United States Patent Application Publication US 2002/0048763 A1 - sequence listing, part 9

SEQ ID NO: 30455 - DNA, 213 bp, Homo sapiens
  MAP TO AC007685.1; EXPRESSED IN PLACENTA, SIGNAL = 0.74; EXPRESSED IN BONE MARROW, SIGNAL = 0.73; EXPRESSED IN ADULT LIVER, SIGNAL = 0.67; EXPRESSED IN BT474, SIGNAL = 0.78; EXPRESSED IN LUNG, SIGNAL = 0.81; NT HIT: Y13932.1, EVALUE 1.00e-102; EST_HUMAN HIT: AA339493.1, EVALUE 3.30e-02; SWISSPROT HIT: P98166, EVALUE 2.20e-01
aaggataagaaatttgaaactacagtaatgctaactgatagacgcgttaaattcagatgtactggcttctgtttcatggaacctacgtttatttcttctgctgtcccacatttaattgataacgacatcactacaagtataagaaaaggaagcagagtgaggtttacggatgagcacttgggagggatttcagaggtcgtgatggccacagtg

SEQ ID NO: 30456 - DNA, 203 bp, Homo sapiens; identical to SEQ ID NO: 17145
  MAP TO AP000113.1; EXPRESSED IN LUNG, SIGNAL = 0.75; EXPRESSED IN HELA, SIGNAL = 0.76; EXPRESSED IN FETAL LIVER, SIGNAL = 0.73; EXPRESSED IN ADULT LIVER, SIGNAL = 0.85; NT HIT: AF055066.1, EVALUE 4.00e-04; SWISSPROT HIT: Q10977, EVALUE 5.50e-01; EST_HUMAN HIT: R17879.1, EVALUE 3.00e-58

SEQ ID NO: 30457 - DNA, 119 bp, Homo sapiens
  MAP TO AP000037.1; EXPRESSED IN PLACENTA, SIGNAL = 0.67; EXPRESSED IN FETAL LIVER, SIGNAL = 0.77; EXPRESSED IN ADULT LIVER, SIGNAL = 1.2; EXPRESSED IN LUNG, SIGNAL = 0.64; EST_HUMAN HIT: T18865.1, EVALUE 3.00e-59; NT HIT: gi11418514, EVALUE 2.00e-32
ccgtgagaacctcggctgccacagctgtcttctccatgacagccccagctcctgggcacgggtcctctgggtgggtgccctctttggggtccctggcctcgagttgacctgccagcatc

SEQ ID NO: 30458 - DNA, 254 bp, Homo sapiens
  MAP TO AL022150.1; EXPRESSED IN FETAL LIVER, SIGNAL =   1; EXPRESSED IN ADULT LIVER, SIGNAL = 1.3; EXPRESSED IN BONE MARROW, SIGNAL = 0.95; EXPRESSED IN PLACENTA, SIGNAL =   1; SWISSPROT HIT: P70213, EVALUE 1.30e-02; NT HIT: AL163246.2, EVALUE 9.50e+00; EST_HUMAN HIT: AI034079.1, EVALUE 6.00e-08
taggtaagtactgctcagccacataggaagggtcagaagacacctctgtcaccatgactgtgagaaataaattcatgagagaagccacagaatccttgaagggctctgtggtcactctttgtaggtcaggaattacagtgggaactgctgccactgaactgagatccttagatacaatcaggtactggagcctgaggtggcaagggccaaatggtggcacttcattatcaaagacaaggtggccatggttacca

SEQ ID NO: 30459 - DNA, 348 bp, Homo sapiens
  MAP TO AC007952.1; EXPRESSED IN BONE MARROW, SIGNAL =   1; EXPRESSED IN ADULT LIVER, SIGNAL = 0.73; EXPRESSED IN LUNG, SIGNAL = 0.76; NT HIT: U08813.1, EVALUE 6.00e-17; EST_HUMAN HIT: BF510408.1, EVALUE 1.00e-126; SWISSPROT HIT: P26430, EVALUE 6.10e-01
  unsure 27
  unsure 43
  unsure 52
  unsure 132
  unsure 244
  unsure 319
ggctcccgctttgctggcttggccagnttcttgggcaccgagnctgctgtgncagctgtgaggggaatctgcccctcttggggcttcgggatccccatgagggaaatgggtggacctgaggactcagagctncctgcctttctgtccaggatggcagtgtcaggcgaagtaggcataaaagaatatgttgacacacatgaggaggatggcattgaagccacagacacgggcccagaaggcgtgntttctggggtgtttggccatcacctggagggggttgcagaaggagagggacagatgaaggacacaaggttacacnctggtgcccttgcctccaggccagggtca

SEQ ID NO: 30460 - DNA, 232 bp, Homo sapiens
  MAP TO AC007253.2; EXPRESSED IN PLACENTA, SIGNAL = 0.59; EXPRESSED IN HELA, SIGNAL = 0.79; EXPRESSED IN ADULT LIVER, SIGNAL = 0.74; EST_HUMAN HIT: BE671454.1, EVALUE 8.20e-01; NT HIT: AF192387.1, EVALUE 4.70e-01; SWISSPROT HIT: O79407, EVALUE 2.30e+00
tcccctggctgtgatatttgccagcgtgcagcagcatcaaccacagcaaaagtgccttggcctggcttttcctgggtcacttgaacttaaggcctctgaagccttagtactgaacatccacatgctcttcattctcacgaagcagcatgctctatttttgctgtatctaggtaccactgttatctacaactccatggtggtgctatgggaagctttctcacaactcccaggt

SEQ ID NO: 30461 - DNA, 311 bp, Homo sapiens
  MAP TO AL034345.3; EXPRESSED IN FETAL LIVER, SIGNAL = 1.2; EXPRESSED IN PLACENTA, SIGNAL = 0.94; EXPRESSED IN BT474, SIGNAL =   1; EXPRESSED IN ADULT LIVER, SIGNAL = 1.4; EXPRESSED IN LUNG, SIGNAL = 1.1; EXPRESSED IN BONE MARROW, SIGNAL = 1.3; EXPRESSED IN HELA, SIGNAL = 0.97; EXPRESSED IN HBL100, SIGNAL = 0.93; NT HIT: AB046823.1, EVALUE 1.20e-02; EST_HUMAN HIT: AI745265.1, EVALUE 7.70e-01; SWISSPROT HIT: Q39575, EVALUE 2.00e-18
gctcattggtagatgacgaatctctcattggtgtacttcgaactaccaagcagacagcagctgaggtaagtgaaaagttgcatgtggctgcagaaactgagatcaagatcaacgcggctcaggaggagttccggcccgcagccacccgcggaagcatcctctacttcctcatcacagagatgagcatggtcaacatcatgtatcagacgtcattggcccagttcttgaagttatttgaccagtccatggccaggtgagtcctcactaccttcatccaaaagtggtgacttaaaagtttgcttgtatttcta

SEQ ID NO: 30462 - DNA, 180 bp, Homo sapiens
  MAP TO AL132708.1; EXPRESSED IN FETAL LIVER, SIGNAL =  38; EXPRESSED IN BONE MARROW, SIGNAL = 2.2; EXPRESSED IN LUNG, SIGNAL = 6.7; EXPRESSED IN ADULT LIVER, SIGNAL =  15; SWISSPROT HIT: P01009, EVALUE 3.00e-30; EST_HUMAN HIT: AV653096.1, EVALUE 5.00e-97; NT HIT: K02212.1, EVALUE 3.00e-97
gcaaatgggagagaccctttgaagtcaaggacaccgaggaagaggacttccacgtggaccaggtgaccaccgtgaaggtgcctatgatgaagcgtttaggcatgtttaacatccagcactgtaagaagctgtccagctgggtgctgctgatgaaatacctgggcaatgccaccgccatct

SEQ ID NO: 30463 - DNA, 123 bp, Homo sapiens
  MAP TO AL109805.3; EXPRESSED IN HELA, SIGNAL = 1.1; EXPRESSED IN PLACENTA, SIGNAL = 0.9; EXPRESSED IN HBL100, SIGNAL = 1.4; EXPRESSED IN ADULT LIVER, SIGNAL = 0.99; EXPRESSED IN BT474, SIGNAL =   1; NT HIT: X81789.1, EVALUE 4.00e-34; EST_HUMAN HIT: BE560024.1, EVALUE 6.00e-34; SWISSPROT HIT: Q55673, EVALUE 2.30e+00
cgtcatggccaaagagatgctcactaagaagtccacgctcaattctgatcaccgcactcaggccatgcaagataggtatatggaggtcagtgggaacctgagggatctgtatgatgataaaga

SEQ ID NO: 30464 - DNA, 193 bp, Homo sapiens
  MAP TO AC004961.2; EXPRESSED IN HBL100, SIGNAL = 0.8; EXPRESSED IN FETAL LIVER, SIGNAL = 0.68; EXPRESSED IN ADULT LIVER, SIGNAL = 0.65; EXPRESSED IN BONE MARROW, SIGNAL =   1; EXPRESSED IN PLACENTA, SIGNAL = 0.64; EXPRESSED IN LUNG, SIGNAL = 0.71; EXPRESSED IN HELA, SIGNAL = 0.7; NT HIT: AJ243817.1, EVALUE 3.80e-01; EST_HUMAN HIT: BE814096.1, EVALUE 4.00e-76; SWISSPROT HIT: P24135, EVALUE 2.20e+00
cctgtgctctgagtcagccagtacctttcactctcattgtctgaactttaacgccatgacttacggtgctacccaggctcgccgcctctccacggcctcctctgtcaccaaacctccacacttcatcctcaccactgactggatttggtactggagtgatgagtttggttcttggcaggaatatggaagacag

SEQ ID NO: 30465 - DNA, 288 bp, Homo sapiens
  MAP TO AC010680.3; EXPRESSED IN FETAL LIVER, SIGNAL =   1; EXPRESSED IN ADULT LIVER, SIGNAL = 1.2; NT HIT: AJ277892.1, EVALUE 0.00e+00; SWISSPROT HIT: P11799, EVALUE 1.00e-10; EST_HUMAN HIT: AV758053.1, EVALUE 1.00e+00
cttgtacacccagctgagcagaacaagagtcttttccagcgatgttgcttgcatagcaggtgtactgcccggcatcgcctttgcctactttgagaactgtcagagtggcagtattttctaccaaagtcatcttgtagttgcctccagggcgaatctctcggttatctttggcccaagtgattttgattggtgcagtcccagttacatgacatttaaaagtaccactttctccaagagcaagatctactgatacaggctttagatcaaagaaaggaggcacttcatgct

SEQ ID NO: 30466 - DNA, 106 bp, Homo sapiens
  MAP TO AC006160.9; EXPRESSED IN BONE MARROW, SIGNAL = 1.5; EXPRESSED IN PLACENTA, SIGNAL = 0.79; EXPRESSED IN HBL100, SIGNAL = 0.92; EXPRESSED IN FETAL LIVER, SIGNAL = 0.65; EXPRESSED IN LUNG, SIGNAL = 0.85; EXPRESSED IN ADULT LIVER, SIGNAL = 0.79; SWISSPROT HIT: P00727, EVALUE 1.00e-13; EST_HUMAN HIT: BE552007.1, EVALUE 4.00e-53; NT HIT: gi7705687, EVALUE 2.00e-53
ctgcaacagcagctctgatgttttctttgccttcatgccagttttcctgttcgtcgattccagctgcctttttgccgaggccaactagcaccacgctggggaagtc

SEQ ID NO: 30467 - DNA, 299 bp, Homo sapiens
  MAP TO AC011895.2; EXPRESSED IN BT474, SIGNAL =   1; EXPRESSED IN LUNG, SIGNAL = 1.1; EXPRESSED IN BONE MARROW, SIGNAL = 0.94; EXPRESSED IN PLACENTA, SIGNAL = 0.99; EXPRESSED IN HBL100, SIGNAL = 0.95; EXPRESSED IN HELA, SIGNAL =   1; EXPRESSED IN ADULT LIVER, SIGNAL = 1.3; NT HIT: AJ271736.1, EVALUE 1.00e-102; EST_HUMAN HIT: AU133926.1, EVALUE 1.00e-104; SWISSPROT HIT: P24784, EVALUE 1.20e-01
aaaaaagaggagcgtgtgaccttaggaatcaacggggctggactggatcctcgagtaaatatcttagttcgaggagaagtttataaacgctctcctgagccagtatttcaaaacttctatgataaactaaaagtgccagtaccagaaattccaggaaaaacaagaaatttgtttttgcaattagccgagcgtgcagcccagtctctcaatgtcacttcctgttatatatgtggaggagctgtaataggagatcaatggccatgggaagcccgagaattggtacctacatacccagttcc

SEQ ID NO: 30468 - DNA, 139 bp, Homo sapiens
  MAP TO AL049835.3; EXPRESSED IN FETAL LIVER, SIGNAL = 0.61; EXPRESSED IN LUNG, SIGNAL = 0.59; EXPRESSED IN HELA, SIGNAL = 0.62; EXPRESSED IN ADULT LIVER, SIGNAL = 0.74; EST_HUMAN HIT: AW961014.1, EVALUE 3.00e-72; SWISSPROT HIT: Q03555, EVALUE 6.00e-20; NT HIT: gi11435180, EVALUE 8.00e-73
ctcggtaattgatgatttctgtcccaagcaccggagtcatctccaggactgtgataaaggctttgtccatagatgtcagaggaaaaggagacatgcgatgtcttctagccaccttggtgatatcgacagcactgtgacc

SEQ ID NO: 30469 - DNA, 568 bp, Homo sapiens
  MAP TO AF095725.1; EXPRESSED IN ADULT LIVER, SIGNAL = 1.4; EST_HUMAN HIT: BF003023.1, EVALUE 4.00e-51; SWISSPROT HIT: P47887, EVALUE 1.00e-108; NT HIT: gi11386152, EVALUE 0.00e+00
ggacccaaggatgagtaggaatgggatgacaagaatgagccctcccatgataaatatcacccattcattaactcgagtgtcagagcaggccagcttcagcagagcagacatatcacagaaaaagtgggggatcacattgtctgcacaaaaacacaacctggccatgagtaaagtgtgtaacatggcatggaaggtggtcagcacccaggacagcgccaccacggagagacagagcatggggctcatgatggcggtgtagtgcaggaggaagcagatggcggtgtagtgcatggggaagcagatggccacatagcggtcataggccatggccacaaggaggaagctctctagatccgaaaaatacaagaagaagtacatttgggtcaggcagtctgcataggggatggatgggtcttggttctgcatgttctgcagcaatttgggcattgtgactgaggaaaagcagaggtcagagaaggacaagttgctgagaaacaaatacacaggcgtgtggagatgggagtccagtcgaatgaggacaatgatgaggaggttccccaggagggtg

SEQ ID NO: 30470 - DNA, 226 bp, Homo sapiens
  MAP TO AP000496.1; EXPRESSED IN ADULT LIVER, SIGNAL =   1; NT HIT: AJ012116.1, EVALUE 1.40e-01; EST_HUMAN HIT: R56395.1, EVALUE 1.40e-01; SWISSPROT HIT: Q03490, EVALUE 3.90e+00
tgtcaactcctgtgatctgctctgcaccatggcaactttcctcaaagttttccttggtcctccaggagtactagtaggaatagcgtttctccatgtggttgaatcttatgttgaggttgcagcccttggagatgctgctttatgggtccctgaacccttcgaggccatgaaaaccaaacttcacttttgtaaggcttgccacatgctcaggactaaaatgattgaa

SEQ ID NO: 30471 - DNA, 247 bp, Homo sapiens
  MAP TO AC009239.2; EXPRESSED IN ADULT LIVER, SIGNAL = 1.1; EXPRESSED IN HELA, SIGNAL = 0.92; EXPRESSED IN PLACENTA, SIGNAL = 0.84; EXPRESSED IN BONE MARROW, SIGNAL = 1.7; EXPRESSED IN HBL100, SIGNAL = 1.9; EXPRESSED IN FETAL LIVER, SIGNAL = 1.2; EXPRESSED IN LUNG, SIGNAL = 0.97; EXPRESSED IN BT474, SIGNAL = 1.9; EST_HUMAN HIT: AA668227.1, EVALUE 8.00e-56; SWISSPROT HIT: P14077, EVALUE 2.00e-04; NT HIT: AB008681.1, EVALUE 2.00e-56
ggaaaagcaagtttacagaaagtccgcagccttagtcatggccctcagacaaactttggtggttcagagaggacagaaaatggagcaggccaatcacctggtagtgcttgttaccagtgtggtttgcaaggacaccttaaaaaaggtttccaacaagaaacaagcagccccctcagccatgtccactatgccaaggcaatcactggaaggtgcactgccctagaggacaaaggttctctgggccagg

SEQ ID NO: 30472 - DNA, 309 bp, Homo sapiens
  MAP TO AC012668.1; EXPRESSED IN ADULT LIVER, SIGNAL =   2; EXPRESSED IN FETAL LIVER, SIGNAL = 1.4; EXPRESSED IN LUNG, SIGNAL = 2.7; EXPRESSED IN PLACENTA, SIGNAL = 9.9; EST_HUMAN HIT: AW953646.1, EVALUE 0.00e+00; SWISSPROT HIT: P02751, EVALUE 2.00e-28; NT HIT: U42404.1, EVALUE 5.00e-85
actgcaaattatcctcaaatggcatgtcaaaggaaagatggatttgcggaaatatttcttgacctgcttccccatttcccgcccctgctcgtcctgtgcctcaccgctcgatgtggtctgcacagaggtgtgcctctcacacttccactctcctcggccgttgcctgtgcagatgcactggagcaggtttcctcgattatccttcttgctccaggtgtctccaattctataggatgtccttgtgtcctgatcgttgcatctatctgtgtcacaaaggaagcacatacatacatcaggtcgagagtcgca

SEQ ID NO: 30473 - DNA, 202 bp, Homo sapiens
  MAP TO AL049868.10; EXPRESSED IN ADULT LIVER, SIGNAL = 1.1; EXPRESSED IN HELA, SIGNAL = 1.7; EXPRESSED IN HBL100, SIGNAL = 1.3; EST_HUMAN HIT: BF347753.1, EVALUE 1.00e-105; SWISSPROT HIT: Q00189, EVALUE 6.40e-02; NT HIT: AF038865.2, EVALUE 8.00e-03
ccattacaacacaagctagcatggagtttcgacggaaagggtcacaaatgtccacagacaccatggtttccaatcctatgtttgatgcaagtgaatttcctgataactatgaagcaggaagagctgaggcttgtgggacactgtgtaggattttttgtagcaagaagactggagaagagattctgccagcttatttatccag

SEQ ID NO: 30474 - DNA, 192 bp, Homo sapiens
  MAP TO AL031667.17; EXPRESSED IN LUNG, SIGNAL = 2.3; EXPRESSED IN ADULT LIVER, SIGNAL =   1; EXPRESSED IN HELA, SIGNAL =   1; NT HIT: AJ006974.1, EVALUE 3.80e-01; EST_HUMAN HIT: BE811280.1, EVALUE 1.70e-01; SWISSPROT HIT: P53800, EVALUE 9.60e-01
aacatgctgagaaaagagaacacatctgaagtcccagaagtatggcaggtagaatttacatgctgctacttcttcctcccccaccccaacacacccaccatagacatacagaaaaccaaggtggatcaggacttggaagaaataagggaagtccccaaatgcagaagtcatttaaagccagaactgaaagct

SEQ ID NO: 30475 - DNA, 92 bp, Homo sapiens
  MAP TO AL078590.5; EXPRESSED IN ADULT LIVER, SIGNAL = 0.98; NT HIT: AF062643.1, EVALUE 1.60e-01
aatcagaaccattgtttcgtaaactggactccgaagacaacacttaaagtcactcaagttcgctacaaaattcttgttttgtgttttcattt

SEQ ID NO: 30476 - DNA, 79 bp, Homo sapiens
  MAP TO AC006559.6; EXPRESSED IN BT474, SIGNAL = 1.1; EXPRESSED IN HBL100, SIGNAL = 0.98; EXPRESSED IN HELA, SIGNAL = 0.63; EXPRESSED IN ADULT LIVER, SIGNAL = 0.66; EXPRESSED IN FETAL LIVER, SIGNAL = 0.61; EXPRESSED IN LUNG, SIGNAL = 0.85; EXPRESSED IN PLACENTA, SIGNAL = 1.2; EST_HUMAN HIT: R31486.1, EVALUE 2.40e-01; SWISSPROT HIT: P25625, EVALUE 5.40e+00; NT HIT: M10976.1, EVALUE 1.60e-01
ctcccgctggactgtactggataaagtagtggaatattttggttcccatgttgtagttgtaggaccattgtctgtggag

SEQ ID NO: 30477 - DNA, 212 bp, Homo sapiens
  MAP TO AC007750.2; EXPRESSED IN ADULT LIVER, SIGNAL = 0.89; EXPRESSED IN BONE MARROW, SIGNAL = 8.8; EXPRESSED IN FETAL LIVER, SIGNAL = 0.85; EXPRESSED IN LUNG, SIGNAL = 0.91; EXPRESSED IN HELA, SIGNAL = 0.61; EXPRESSED IN PLACENTA, SIGNAL = 0.86; EXPRESSED IN BT474, SIGNAL = 1.2; EST_HUMAN HIT: H02389.1, EVALUE 3.30e-02; SWISSPROT HIT: O26929, EVALUE 3.30e+00; NT HIT: AL445067.1, EVALUE 1.30e-01
aggtgaagagtccatgtatggatttccaaccagttctcttttttcagccccatctccctttcttaccctcagtggtaaatgccatctcaaatatggaactgtttcatgcttctgccaggcaaaatgattcctttctaggtatggtccaggcggctgctatttctattctgctttatccattgatgatacttcttcagtctcttcattgtcat

SEQ ID NO: 30478 - DNA, 85 bp, Homo sapiens
  MAP TO AJ006997.1; EXPRESSED IN HBL100, SIGNAL = 0.68; EXPRESSED IN ADULT LIVER, SIGNAL = 0.71; EXPRESSED IN BT474, SIGNAL = 0.62; EXPRESSED IN BONE MARROW, SIGNAL = 0.76; EXPRESSED IN FETAL LIVER, SIGNAL = 0.64; EXPRESSED IN LUNG, SIGNAL = 1.1; EXPRESSED IN PLACENTA, SIGNAL = 0.81; NT HIT: AL163209.2, EVALUE 2.00e-28; EST_HUMAN HIT: BE773716.1, EVALUE 1.00e+00; SWISSPROT HIT: P57028, EVALUE 9.60e+00
ctacaaccaccctacagttagagcaataatttttttcttgtcacacttcagggggtctccagttatgttaacaactgtcatgaaa

SEQ ID NO: 30479 - DNA, 268 bp, Homo sapiens
  MAP TO AC009306.1; EXPRESSED IN PLACENTA, SIGNAL = 0.81; EXPRESSED IN BT474, SIGNAL = 0.61; EXPRESSED IN BONE MARROW, SIGNAL = 0.82; EXPRESSED IN FETAL LIVER, SIGNAL = 1.1; EXPRESSED IN LUNG, SIGNAL = 0.9; EXPRESSED IN HELA, SIGNAL = 0.67; EXPRESSED IN ADULT LIVER, SIGNAL = 0.78; SWISSPROT HIT: Q10059, EVALUE 3.30e+00; NT HIT: AF079137.1, EVALUE 2.60e+00
gcttgtgcacatgcctaacatccagaggcctgaggtccagcctgctgctgctattgcaacttgcagtgctatgcataccatccagcagcctaagaactgtctcaccagttcactgctgccactgccatgcaacctggaggcccaaacgacacattctggtttcccacagtcacagccagtgcaactgtatgacaccctgagtcctgagaatcagcacacagcactcattgtagacatcactgttgtccaaagactggtctggctgcca

SEQ ID NO: 30480 - DNA, 199 bp, Homo sapiens
  MAP TO AC007716.1; EXPRESSED IN HBL100, SIGNAL = 0.68; EXPRESSED IN ADULT LIVER, SIGNAL = 0.99; EXPRESSED IN BONE MARROW, SIGNAL = 0.82; EXPRESSED IN LUNG, SIGNAL =   1; EXPRESSED IN HELA, SIGNAL = 0.8; EXPRESSED IN PLACENTA, SIGNAL = 0.77; EXPRESSED IN BT474, SIGNAL = 0.63; EXPRESSED IN FETAL LIVER, SIGNAL = 0.71; SWISSPROT HIT: O15027, EVALUE 5.60e-01; NT HIT: M24378.1, EVALUE 4.70e-01; EST_HUMAN HIT: BF183582.1, EVALUE 1.80e-01
  unsure 134
  unsure 178
atttttttcattcagcataatctttcttgcttctttttcgtgccagattatgttgaaagaagctacagttggaatgtatgcatctgttattattgaaccagcgatgttatttgcatgccacttagtttgtacanagtgtgttctgatgacattttcaggatttccagccacgagactntcttcttctggactattcctg

SEQ ID NO: 30481 - DNA, 81 bp, Homo sapiens
  MAP TO AC007132.2; EXPRESSED IN ADULT LIVER, SIGNAL = 0.73; NT HIT: Y10196.1, EVALUE 7.00e-16; EST_HUMAN HIT: AI242139.1, EVALUE 5.00e-11
gttggtgcaaaagtccttgcagtctttgccattaaaagtaatggcaaaaaccacaatgacttttgcagcagtcttacctgt

SEQ ID NO: 30482 - DNA, 102 bp, Homo sapiens
  MAP TO AC007681.2; EXPRESSED IN ADULT LIVER, SIGNAL = 0.82; NT HIT: gi11425611, EVALUE 2.20e-01; SWISSPROT HIT: P40179, EVALUE 3.10e+00
tcactggagatgaggagtctcagcactgagatgccagagtgctgggtggtcctcctcaaggaggatgaagtcactggggtgagacagaggctgggatagtga

SEQ ID NO: 30483 - DNA, 243 bp, Homo sapiens
  MAP TO AC007041.3; EXPRESSED IN ADULT LIVER, SIGNAL = 0.8; EXPRESSED IN HELA, SIGNAL = 0.62; EXPRESSED IN PLACENTA, SIGNAL = 2.3; EXPRESSED IN LUNG, SIGNAL = 0.69; SWISSPROT HIT: P23825, EVALUE 3.00e-01
atgacttcccttccatacccagctctgaagttttctgtgggcagatctcagccctggcagaaagatctgaacattgctttttatatcatgctgaagaggggaaggcatgctaatcagaagcagatgcttaaatgtggggagggccttatctggtgggtgagaggaggcctgtttgggaccttggtgcagcccccatgggggttgctctgtgccaagctctgcaagatatctacctgcatcttg

SEQ ID NO: 30484 - DNA, 226 bp, Homo sapiens
  MAP TO AL035669.28; EXPRESSED IN BONE MARROW, SIGNAL = 0.93; EXPRESSED IN LUNG, SIGNAL = 0.95; EXPRESSED IN HELA, SIGNAL =   1; EXPRESSED IN PLACENTA, SIGNAL = 0.93; EXPRESSED IN FETAL LIVER, SIGNAL = 0.98; EXPRESSED IN ADULT LIVER, SIGNAL =   1; EST_HUMAN HIT: AU121661.1, EVALUE 6.00e-48; NT HIT: gi11421470, EVALUE 4.00e-48
ctggaacgagctgggccgcgccgcccgcggctcctccgactcctcgtcctcgtcccctgcgtccgcgtccctcgcgccggcggcctcgccgtcctcgcagtcctcgtcctccgcgtcctccgcatcctcctcgtcctcctcccaggtggagtcgcagtcggggtcgtccatgctcggcggcggcggggctcgcgctggaggcggaagcgaaaccgaaagcagagga

SEQ ID NO: 30485 - DNA, 578 bp, Homo sapiens
  MAP TO AC002080.1; EXPRESSED IN FETAL LIVER, SIGNAL =   1; EXPRESSED IN ADULT LIVER, SIGNAL = 1.2; EXPRESSED IN LUNG, SIGNAL = 1.6; EXPRESSED IN PLACENTA, SIGNAL = 1.8; EXPRESSED IN HBL100, SIGNAL = 1.1; EXPRESSED IN HELA, SIGNAL = 2.1; EST_HUMAN HIT: AA693776.1, EVALUE 0.00e+00; SWISSPROT HIT: P08581, EVALUE 1.00e-104; NT HIT: gi11422024, EVALUE 0.00e+00
atcatccattgcattcgatatcagtgagaaggctaaaggaaacgaaagatggttttatgtttttgacggaccagtcctacattgatgttttacctgagttcagagattcttaccccattaagtatgtccatgcctttgaaagcaacaattttatttacttcttgacggtccaaagggaaactctagatgctcagacttttcacacaagaataatcaggttctgttccataaactctggattgcattcctacatggaaatgcctctggagtgtattctcacagaaaagagaaaaaagagatccacaaagaaggaagtgtttaatatacttcaggctgcgtatgtcagcaagcctggggcccagcttgctagacaaataggagccagcctgaatgatgacattcttttcggggtgttcgcacaaagcaagccagattctgccgaaccaatggatcgatctgccatgtgtgcattccctatcaaatatgtcaacgacttcttcaacaagatcgtcaacaaaaacaatgtgagatgtctccagcatttttacggacccaatcatgagcactgctttaatagg

SEQ ID NO: 30486 - DNA, 551 bp, Homo sapiens
  MAP TO AC003079.1; EXPRESSED IN FETAL LIVER, SIGNAL = 1.1; EXPRESSED IN ADULT LIVER, SIGNAL = 0.97; EST_HUMAN HIT: AI791680.1, EVALUE 0.00e+00; SWISSPROT HIT: P16157, EVALUE 1.00e-09; NT HIT: gi11421851, EVALUE 0.00e+00
agacaaggctgccatttgaatcttcctcaacctgctgaccactgggcagagcctcaccttatggaactgtggagggtatattcgggcagccccatggttcaacaggagctggtagcagatctcaggctgggcagcagggcgcacggaggtgaccttcagcacgtactggatggcagcacagccgttgatatccatgagattggcttcggcgccagcttccagcatcatgtgcatgagcacgtggtcacagttccaggctgccttgtggaggggagatttaaagtcgtcatctcgggcattgacttcggctttgtagtcaagcagcatgcggcagaccaggtggtgctccgtgctgtactcctgctccttaaagcggagggcccagtaggcggcgatggccaggggggtctccatgtgggcattcacgctgtccactatggccccgtgttccacgtagaaggccaccagctccgaaaggccgaagtgggcagccgtgtgcaagggcgtctcctcatcttggttgttggtcttcatgttcacattcgccccta

SEQ ID NO: 30487 - DNA, 182 bp, Homo sapiens
  MAP TO AL049775.2; EXPRESSED IN FETAL LIVER, SIGNAL = 0.59; EXPRESSED IN HBL100, SIGNAL = 1.3; EXPRESSED IN ADULT LIVER, SIGNAL = 0.82; EXPRESSED IN LUNG, SIGNAL = 0.7; EXPRESSED IN HELA, SIGNAL = 0.7; EXPRESSED IN PLACENTA, SIGNAL = 0.71; EXPRESSED IN BT474, SIGNAL = 0.63; NT HIT: gi5453891, EVALUE 3.60e-01; EST_HUMAN HIT: R96946.1, EVALUE 1.10e-01
ttatgcacagcatttttttaaaagtgcagaagatcataggacaatatatggtgctaaacttgtttgattacacttcccaggtgttgctgggtccaattaccctggtgctaaaatatcctctaattgggtgtgaaacacacatcagagttaattacactgtacaccactatataggcttgaaa

SEQ ID NO: 30488 - DNA, 545 bp, Homo sapiens
  MAP TO AL033403.1; EXPRESSED IN ADULT LIVER, SIGNAL = 3.5; EXPRESSED IN FETAL LIVER, SIGNAL = 2.5; EST_HUMAN HIT: T28608.1, EVALUE 1.00e-114; SWISSPROT HIT: P00740, EVALUE 1.00e-107; NT HIT: J00137.1, EVALUE 0.00e+00
gtgaacataatattgaggagacagaacatacagagcaaaagcgaaatgtgattcgaattattcctcaccacaactacaatgcagctattaataagtacaaccatgacattgcccttctggaactggacgaacccttagtgctaaacagctacgttacacctatttgcattgctgacaaggaatacacgaacatcttcctcaaatttggatctggctatgtaagtggctggggaagagtcttccacaaagggagatcagctttagttcttcagtaccttagagttccacttgttgaccgagccacatgtcttcgatctacaaagttcaccatctataacaacatgttctgtgctggcttccatgaaggaggtagagattcatgtcaaggagatagtgggggaccccatgttactgaagtggaagggaccagtttcttaactggaattattagctggggtgaagagtgtgcaatgaaaggcaaatatggaatatataccaaggtatcccggtatgtcaactggattaaggaaaaaacaaagctcact

SEQ ID NO: 30489 - DNA, 1335 bp, Homo sapiens
  MAP TO AP000201.1; EXPRESSED IN ADULT LIVER, SIGNAL = 0.7; EXPRESSED IN BONE MARROW, SIGNAL = 1.2; EXPRESSED IN HBL100, SIGNAL = 1.1; EXPRESSED IN FETAL LIVER, SIGNAL = 1.6; EXPRESSED IN LUNG, SIGNAL = 1.1; EXPRESSED IN HELA, SIGNAL =   2; EXPRESSED IN PLACENTA, SIGNAL = 0.8; EXPRESSED IN BT474, SIGNAL = 1.5; NT HIT: gi6680763, EVALUE 9.00e-93; SWISSPROT HIT: O14867, EVALUE 0.00e+00; EST_HUMAN HIT: AU135531.1, EVALUE 0.00e+00
ctcacattcttgttctctggctgaacaggattcactgtctccttcggtgtccgtctcagagtcgtctcccaagctaatgacacaagcatatgggcaaggttcttgctggggttctgaaacataatcatcgtttccaatttccaaattgcttgaacagccttcagtactcagagtacttataaaagggcagttgacagaacttaatgttgtgaaagtcctttgacctggttctgggctctcactaatcctgatacctaaccacggacactcagaccgtttctgtgagatctgttctgagccatctttggccacagcaggtgataactgcatttggcaaggagtgtccgtgctgcaaatgtcactccagaagccttttgctaggtgttctgccacttctcgctccacactactcctatcactagatgcaacactactatcttccctggtgcccaagtcggatttcaaaggtaaatcctgactttcaccaaatgttttttcttggacgtctgtacctgacaaaggcttttctgttaacactgttgtgttttgcataccagcaaaattcaagtcaccatattggtcatatgtgtgtaaaagagacaaagaataaagtccatgagggtctatggaagaattgtgggggaaaggagtcacttctgatttttcagttgggcactgagaagcaggatctttcttcgtttcttcaggttccattgctaatttactttcgtcacattttaacatcacctgcaaatctctacactccgggactcctcccaggcattcattttcagacctttcatttggctgaacagaagcatgaatgtctttgacactagattccccagtacggactctgtcagttccaaatgctttttggaattttctgtatttggggcataaagaaggcaaggccagagcagcatccttctctaagcacatggactcatatgtctgactggcactgtcttgtagaggaggtgaggcttttgcatttccttgatacctgcggagtttacactgaggagtctgaacatttttattttccagaaattcctccacttcatcagtttctagatccctctggtccaaaagtgaaagtttaaggtctgttttctgacagtgtgatgaaaagcatttttttcttgggcattcttgctggtctgcagtggagtccaaaaacttaaatttcagaaactgaaagcaggattcctcaatattatgtacacttaaaaactccacacatttgcacacttcatccacattctctttacttaaaatcagtttagcagtgtaggcaaactgaattaaaggttcaaatcctttaactgtcac

SEQ ID NO: 30490 - DNA, 359 bp, Homo sapiens
  MAP TO AL035461.11; EXPRESSED IN ADULT LIVER, SIGNAL = 0.96; EXPRESSED IN BT474, SIGNAL = 0.77; EXPRESSED IN BONE MARROW, SIGNAL = 0.92; EXPRESSED IN HELA, SIGNAL = 0.61; EXPRESSED IN PLACENTA, SIGNAL = 0.6; EXPRESSED IN HBL100, SIGNAL = 1.5; NT HIT: gi11421630, EVALUE 0.00e+00; SWISSPROT HIT: P46060, EVALUE 3.20e-02; EST_HUMAN HIT: AW674581.1, EVALUE 0.00e+00
ataatcttttttgcttcctctctctttaggccccttatgttctggatcttgagaaattgtttccattgtttcctggtcttctgggtggttgctctctggggcctctgccatgctgtcttcattctcttgttcagaagcctgtttttcctccagtgtgccattactttcttcaaccaaagcactgtcttttggctctgaagataacatcttggcagaaaatgttccatgtagaagactgtccactttgttgagagggaattcataaagaccactgagaaaagatttgggaaatccaaaacatgctgttgctgcccgaacaggtcctcctccagggtatagctgaataatggagccaaaac

SEQ ID NO: 30491 - DNA, 107 bp, Homo sapiens
  MAP TO AF131217.2; EXPRESSED IN BONE MARROW, SIGNAL = 0.96; EXPRESSED IN ADULT LIVER, SIGNAL = 0.94; NT HIT: AL163247.2, EVALUE 6.00e-54; EST_HUMAN HIT: AW953253.1, EVALUE 6.00e-02; SWISSPROT HIT: P09732, EVALUE 1.20e-01
ctgttcaagtgcatccgctgtgaaaatcctcctacccacacctccttcacaggacagagccagcaatcatcttcttctggcccaatgccagcctgaagttcatacct

SEQ ID NO: 30492 - DNA, 96 bp, Homo sapiens
  MAP TO AB020868.1; EXPRESSED IN ADULT LIVER, SIGNAL = 0.98; EXPRESSED IN FETAL LIVER, SIGNAL = 0.91; EXPRESSED IN HBL100, SIGNAL = 1.3; EXPRESSED IN BONE MARROW, SIGNAL = 0.9; NT HIT: AF029308.1, EVALUE 6.00e-17; EST_HUMAN HIT: BE254708.1, EVALUE 7.00e-29; SWISSPROT HIT: P95337, EVALUE 9.20e+00
caagaatgaagctgcggacctttgcggtgagtgttacagctattaaagatggtgtgtctggagtttgttcctccagatgttcagatgtggcctctg

SEQ ID NO: 30493 - DNA, 371 bp, Homo sapiens
  MAP TO AC008074.1; EXPRESSED IN HELA, SIGNAL = 0.9; EXPRESSED IN ADULT LIVER, SIGNAL = 0.88; EXPRESSED IN BT474, SIGNAL = 2.1; EXPRESSED IN BONE MARROW, SIGNAL = 1.3; EXPRESSED IN HBL100, SIGNAL = 1.5; EXPRESSED IN FETAL LIVER, SIGNAL = 1.1; EXPRESSED IN LUNG, SIGNAL = 0.91; NT HIT: gi11430509, EVALUE 0.00e+00; EST_HUMAN HIT: BE544754.1, EVALUE 0.00e+00; SWISSPROT HIT: P12954, EVALUE 3.50e-01
gactcagctgataattcagaagccattaggagagaacaatgtaaaactgaagaaaaacttgacttacttacttctaaatgtgctcacctatgcatggattctgttaaaacttctgatgatgaagttggttctcccaaagaagaaagtagaaagtttactaatttccaaagcccaaacattgaccccacagaagaaaatgatttggatgattctttaagtgtaaaaaatggtgatagtagtaatgactttgtgacttgcaatgatatcaatgaagatgattttggtgattttggtgactttggctctgccagtggctcaactccaccttttgttactggtactcaagattcaatgagtgatgccacttttga

SEQ ID NO: 30494 - DNA, 110 bp, Homo sapiens
  MAP TO AC007738.2; EXPRESSED IN ADULT LIVER, SIGNAL =   1; NT HIT: gi7706239, EVALUE 3.00e-53; EST_HUMAN HIT: BE788085.1, EVALUE 2.00e-33
gcaaaggcaggatctttaccccaaattcttcaagacatccaacggcttggataagatctagctcctcttgaatggcagggggtctgtctgttatcagttgtaagcagcac

SEQ ID NO: 30495 - DNA, 181 bp, Homo sapiens
  MAP TO AJ229041.1; EXPRESSED IN ADULT LIVER, SIGNAL = 1.3; EXPRESSED IN BONE MARROW, SIGNAL = 0.97; EXPRESSED IN LUNG, SIGNAL = 0.94; NT HIT: AJ229041.1, EVALUE 8.00e-98
gcactcatgttgcaggttaacatgctcctcggttttctgacctcctagaagttggcagctggatccagaagcttcaacagcctcaggttcagcctcctgggctggcggattgtaggtgagtctgtgttctttcacatgcctgttggctccttgtttttgatgttggcagatgtgatgcaca

SEQ ID NO: 30496 - DNA, 101 bp, Homo sapiens
  MAP TO AC007773.1; EXPRESSED IN BT474, SIGNAL = 0.93; EXPRESSED IN BONE MARROW, SIGNAL = 1.2; EXPRESSED IN HELA, SIGNAL = 0.7; EXPRESSED IN ADULT LIVER, SIGNAL = 0.69; EXPRESSED IN PLACENTA, SIGNAL = 0.88; EXPRESSED IN FETAL LIVER, SIGNAL = 1.2; EXPRESSED IN LUNG, SIGNAL = 0.71; EXPRESSED IN HBL100, SIGNAL =   8; EST_HUMAN HIT: BE669818.1, EVALUE 9.00e-48; NT HIT: AF061275.1, EVALUE 7.20e-01; SWISSPROT HIT: P26954, EVALUE 9.10e+00
cactggaagttcagaaaatgcagtgtcatcttcagaactgatgtcccagactcccagtgaagttctgggtaccaacgagaatgagaaactgagccctacaa

SEQ ID NO: 30497 - DNA, 154 bp, Homo sapiens
  MAP TO AP000407.1; EXPRESSED IN ADULT LIVER, SIGNAL =   1; EST_HUMAN HIT: AA349168.1, EVALUE 6.00e-80; NT HIT: Z18891.1, EVALUE 3.00e-01
aactcagtggagcttggcttaagctctcatgagttgcatgtaaaggaatatgtatgtataagaggcggatttgaagtggcagagggtccacaaaaggcacaagtactaaccactgaatgggaggagatagaaaaatgtgtaagtcacaattaag

SEQ ID NO: 30498 - DNA, 184 bp, Homo sapiens
  MAP TO AL080239.11; EXPRESSED IN PLACENTA, SIGNAL = 0.63; EXPRESSED IN ADULT LIVER, SIGNAL = 0.66; EXPRESSED IN BONE MARROW, SIGNAL = 0.86; EXPRESSED IN FETAL LIVER, SIGNAL = 0.65; EXPRESSED IN LUNG, SIGNAL = 0.65; EXPRESSED IN HELA, SIGNAL = 0.6; EST_HUMAN HIT: BF131397.1, EVALUE 2.00e-07; SWISSPROT HIT: P54259, EVALUE 1.30e-02; NT HIT: AF213884.1, EVALUE 4.00e-04
acccccgaagaactgcatcctgccctggggctgatgctgtggctgccaccaccaggccaaggatggtagagagaggagggtgggcattttcatgcacccttacctcttctggaaagaggctgctgtgggactgatgctggagaagatatggagaaaagggaccacttatatactgctggtggga

SEQ ID NO: 30499 - DNA, 86 bp, Homo sapiens
  MAP TO AL078598.4; EXPRESSED IN FETAL LIVER, SIGNAL = 0.63; EXPRESSED IN HELA, SIGNAL = 0.66; EXPRESSED IN ADULT LIVER, SIGNAL = 0.8; EXPRESSED IN LUNG, SIGNAL = 0.66; EST_HUMAN HIT: AV646253.1, EVALUE 4.00e-03; NT HIT: L34318.1, EVALUE 3.80e-02; SWISSPROT HIT: Q9Y3Y2, EVALUE 9.30e+00
ttccaaaatctgaccatctttgatatctttgatgtagtcaaaagttgtgacattaatttttgttattgtttcttcataaaatctgt

SEQ ID NO: 30500 - DNA, 529 bp, Homo sapiens
  MAP TO AL035669.28; EXPRESSED IN HBL100, SIGNAL = 0.93; EXPRESSED IN HELA, SIGNAL =   1; EXPRESSED IN PLACENTA, SIGNAL = 0.99; EXPRESSED IN ADULT LIVER, SIGNAL = 1.2; EST_HUMAN HIT: BF343245.1, EVALUE 1.30e-01; NT HIT: AB002331.1, EVALUE 0.00e+00; SWISSPROT HIT: P13983, EVALUE 9.70e+00
gccaggttccctccgcagaagatgagccagctccgaaaaaacaaaaattgtcagcttctgttaagaaagaagacttaaaatcaaagcatgacagctctgcacctgacccagctccggattcagctgatgaggtgatgccggaggctgtgcctgaagttgcctctgagccaggcctagaaagtgcttctcatccaaatgtggacagaacgtatttccctgggcctccaggagatggccatcccgagccctccccgctggaagacctgtccccctgcccagcctcctgtgggagcggggtggtcaccaccgtcacagtgtccggccgggaccccaggaccgctccaagcagttcatgcacagccgtggcctccgcagcatcccgcccagacagcacccacatggtggaagccagacaggatgtgccgaagcctgtcttgacttctgtgatggtgcccaagtccatactagctaagccatcctcatctcctgacccaagatacctgtcagttcctccgtcaccaaatatcag

SEQ ID NO: 30501 - DNA, 247 bp, Homo sapiens
  MAP TO AP000311.1; EXPRESSED IN ADULT LIVER, SIGNAL = 0.84; EXPRESSED IN PLACENTA, SIGNAL = 0.61; EXPRESSED IN BONE MARROW, SIGNAL = 0.98; EXPRESSED IN FETAL LIVER, SIGNAL =   1; EXPRESSED IN HELA, SIGNAL = 0.63; EXPRESSED IN HBL100, SIGNAL = 0.82; SWISSPROT HIT: Q15811, EVALUE 1.00e-24; NT HIT: AF114487.1, EVALUE 1.00e-127; EST_HUMAN HIT: AA313515.1, EVALUE 1.00e-126
acgagctcaggaaagggacaagcagtggctggagcatgtgcagcaggaggacgagcatcagagaccaagaaaactccacgaagaggaaaaactgaaaagggaggagagtgtcaaaaagaaggatggcgaggaaaaaggcaaacaggaagcacaagacaagctgggtcggcttttccatcaacaccaagaaccagctaagccagctgtccaggcaccctggtccactgcaggtattagaagccaaaaa

SEQ ID NO: 30502 - DNA, 117 bp, Homo sapiens
  MAP TO AC007876.1; EXPRESSED IN ADULT LIVER, SIGNAL = 0.66; EXPRESSED IN HBL100, SIGNAL = 1.5; EXPRESSED IN HELA, SIGNAL = 0.61; EXPRESSED IN PLACENTA, SIGNAL = 0.62; SWISSPROT HIT: Q04526, EVALUE 2.30e+00; NT HIT: AL445066.1, EVALUE 2.60e-01
tgctggattaagaacctgagtgatgtggctcttctttatttcatggttcacacccacaacagggattgtaatatattgataggtccagctcataggtaaacttactctcccctcctg

SEQ ID NO: 30503 - DNA, 201 bp, Homo sapiens
  MAP TO AC007428.1; EXPRESSED IN ADULT LIVER, SIGNAL = 1.1; EXPRESSED IN PLACENTA, SIGNAL = 1.1; EST_HUMAN HIT: BE565182.1, EVALUE 2.80e+00; SWISSPROT HIT: P04295, EVALUE 2.80e+00
attgacagtgaaagagggaaggatcaataataagaaactggcattgacagtgaaagataacaacaaagataaaggcattgcttcaaaagaccagtcagtggctatacacacagacgtacacacgttcctgcacagagaaaggagttacaacactatcaccagaaagattatgacatgtaagggatttggaggtctaacatc

SEQ ID NO: 30504 - DNA, 317 bp, Homo sapiens
  MAP TO AC009802.8; EXPRESSED IN BONE MARROW, SIGNAL = 0.92; EXPRESSED IN PLACENTA, SIGNAL = 8.9; EXPRESSED IN ADULT LIVER, SIGNAL = 1.7; NT HIT: J02685.1, EVALUE 0.00e+00; SWISSPROT HIT: P05120, EVALUE 2.00e-42; EST_HUMAN HIT: BF666685.1, EVALUE 0.00e+00
tgtgggcctccatgtccagttctccctgtcataacacctcctgtgccagcggctgcttcagtgccctcctcattcacatccaccatggcttggtggaacacttcagaaagaaacaggtcattcctctccgacatccctgagaaattggcccgtcccttgttgaaggcgtcctccatgcccatgcttctcagaatggatctgagttcataatgctcttctaatttgaactggggtatgtatacctcaacttcatcttcagccattttgtctttgctggtccacttgttgagtttgtcataggttatttcactttccag

SEQ ID NO: 30505 - DNA, 168 bp, Homo sapiens
  MAP TO AL109933.8; EXPRESSED IN FETAL LIVER, SIGNAL = 1.5; EXPRESSED IN ADULT LIVER, SIGNAL = 1.7; NT HIT: M86879.1, EVALUE 2.00e-82; EST_HUMAN HIT: R07514.1, EVALUE 2.00e-30; SWISSPROT HIT: P08519, EVALUE 8.00e-22
taccatggtgatggacagagttatcgaggcacgtactccaccactgtcacaggaaggacctgccaagcttggtcatctatgacaccacatcaacataataggaccacagaaaactacccaaatgcgtatgtcattaatcttacagtaagcaaaacaaggtccaagtaa

SEQ ID NO: 30506 - DNA, 90 bp, Homo sapiens
  MAP TO AC009307.1; EXPRESSED IN HBL100, SIGNAL = 0.73; EXPRESSED IN ADULT LIVER, SIGNAL = 1.5; EXPRESSED IN BONE MARROW, SIGNAL = 0.78; EXPRESSED IN FETAL LIVER, SIGNAL = 0.71; EXPRESSED IN LUNG, SIGNAL = 0.75; EXPRESSED IN HELA, SIGNAL = 0.73; EXPRESSED IN PLACENTA, SIGNAL = 0.82; NT HIT: AE000962.1, EVALUE 1.60e-01; EST_HUMAN HIT: BF525799.1, EVALUE 1.10e+00
gtgtgccctttactctcccaactttgtcctgtaagtaccgatgccacagcagccccagctggaggccagttaccaagacagcacgagagc

SEQ ID NO: 30507 - DNA, 159 bp, Homo sapiens
  MAP TO X97051.1; EXPRESSED IN ADULT LIVER, SIGNAL = 1.2; NT HIT: gi7661923, EVALUE 9.00e-85; SWISSPROT HIT: P09293, EVALUE 1.00e+00; EST_HUMAN HIT: AA808344.1, EVALUE 2.00e-84
aacagatcaaaagaactgactcctcccatcagcagaaacttcatgccctttgaccagcatctctcctttccccgtccacgactaacccccagcccaagagaacagccaacacccacctcgctgctgccacacgacatgtcgggctttgatgggatggag

SEQ ID NO: 30508 - DNA, 88 bp, Homo sapiens
  MAP TO AC006378.2; EXPRESSED IN FETAL LIVER, SIGNAL = 0.83; EXPRESSED IN LUNG, SIGNAL = 0.82; EXPRESSED IN ADULT LIVER, SIGNAL = 0.99; EXPRESSED IN PLACENTA, SIGNAL = 1.1; EXPRESSED IN HBL100, SIGNAL = 0.92; EXPRESSED IN HELA, SIGNAL =   1; EXPRESSED IN BT474, SIGNAL = 0.93; NT HIT: gi11419397, EVALUE 1.00e-42; EST_HUMAN HIT: AW952391.1, EVALUE 1.00e-42
gtgagcctctcattttcttcttcacaggcactatacccactattagcatagccatagttcccatagttgccaggaggtactccttcac

SEQ ID NO: 30509 - DNA, 159 bp, Homo sapiens
  MAP TO AL034379.8; EXPRESSED IN HBL100, SIGNAL = 0.91; EXPRESSED IN HELA, SIGNAL = 1.1; EXPRESSED IN ADULT LIVER, SIGNAL = 0.92; EST_HUMAN HIT: BF526879.1, EVALUE 2.00e-84; NT HIT: gi7019418, EVALUE 9.00e-85; SWISSPROT HIT: Q13823, EVALUE 1.00e-26
tgttgcccaggttggaacaaggtcacatttgttaagtacaaaaatgaggtgtttccaaggtttttccttcttcaggtaagtttcaatgtgaggggaacgagtacccattggatctctagcatcaagaacttgaactacaacatctgatgaatctatcac

SEQ ID NO: 30510 - DNA, 243 bp, Homo sapiens
  MAP TO AC009961.3; EXPRESSED IN ADULT LIVER, SIGNAL = 3.7; EXPRESSED IN FETAL LIVER, SIGNAL = 0.92; EST_HUMAN HIT: AA782013.1, EVALUE 0.00e+00; SWISSPROT HIT: P43121, EVALUE 6.90e-01; NT HIT: gi11430992, EVALUE 0.00e+00
ataaccacattttaatatcagcattggtgattgctagcacggtaattttgacagttttgggagcaatcatttggttcctgtacaaaaaacattctgattctcgtttcaccacagttttttcaaccgcaccccaatcaccttataatgaagactgtgttttggtagttggagaagaaaatgaatatcctgttcaatttgactaagtttttggtaatcttgcactaagacatcaacaaaatgccc

SEQ ID NO: 30511 - DNA, 159 bp, Homo sapiens
  MAP TO AC007681.2; EXPRESSED IN ADULT LIVER, SIGNAL = 0.92; NT HIT: AL163303.2, EVALUE 3.00e-26; EST_HUMAN HIT: BE165980.1, EVALUE 4.00e-44; SWISSPROT HIT: P12830, EVALUE 2.20e+00
acaggagtttggaagaaattgattccaattctcacggatgacgatggggggttcaagacttcagtggaagaagtaactgcagatgtgatggaaatagcaaaagaactagaattagaaggggaacctgaagatgtgactgaattgctgcaatcttatgga

SEQ ID NO: 30512 - DNA, 239 bp, Homo sapiens
  MAP TO AC007028.2; EXPRESSED IN ADULT LIVER, SIGNAL = 1.5; SWISSPROT HIT: P11128, EVALUE 2.00e+00; EST_HUMAN HIT: BE968659.1, EVALUE 5.50e-02
tcactgtttcaagagacaatttcaaaagcatgagatgctgctgaaagaggattgtgaaccaggggacagctctttcattctgggagagcaacattgggagaatatgctctgtgagcccaaacagcatcctccccagcagggtgagggcagagctgcagggcaggcccagaacccactcaacacagacgtcagccctggagctggtgcaaaggagtctgaggagaaaatttaccagcatc

SEQ ID NO: 30513 - DNA, 135 bp, Homo sapiens
  MAP TO AL049733.3; EXPRESSED IN HELA, SIGNAL = 1.1; EXPRESSED IN PLACENTA, SIGNAL = 0.71; EXPRESSED IN BT474, SIGNAL =   2; EXPRESSED IN BONE MARROW, SIGNAL = 0.86; EXPRESSED IN HBL100, SIGNAL = 1.3; EXPRESSED IN FETAL LIVER, SIGNAL = 0.8; EXPRESSED IN LUNG, SIGNAL = 0.61; EXPRESSED IN ADULT LIVER, SIGNAL = 0.9; NT HIT: AF207881.1, EVALUE 2.00e-70; EST_HUMAN HIT: AW961297.1, EVALUE 2.00e-70; SWISSPROT HIT: P29701, EVALUE 5.20e+00
caggtaaaattggttgtccggcaattcccagcggtgccattccaagattattcattgctgtggcccatgcagttggatcagacataggtagtgtcattgcagtggaatccacgttcagagttctactgttatcgg

SEQ ID NO: 30514 - DNA, 204 bp, Homo sapiens
  MAP TO AC008177.1; EXPRESSED IN FETAL LIVER, SIGNAL =   1; EXPRESSED IN ADULT LIVER, SIGNAL = 0.82; NT HIT: AF136523.1, EVALUE 3.00e-97; SWISSPROT HIT: P21447, EVALUE 3.00e-19; EST_HUMAN HIT: AA091906.1, EVALUE 3.10e-02
cgctctcttaacattcagtggcttagagatcagattgggatagtggagcaagagccagttctgttctctaccaccattgcagaaaatattcgctatggcagagaagatgcaacaatggaagacatagtccaagctgccaaggaggccaatgcctacaacttcatcatggacctgccacaggtacccctagccatacattcctgg

SEQ ID NO: 30515 - DNA, 142 bp, Homo sapiens
  MAP TO AC007966.2; EXPRESSED IN ADULT LIVER, SIGNAL = 0.86; NT HIT: AJ290443.1, EVALUE 2.70e-01; EST_HUMAN HIT: BE963217.2, EVALUE 1.90e+00
ctcttctatttttctacgaagagtaagttttcttcttgtgtgttcccgctgtcgtctttcttctctatccattaggaataggcgttgttcttctgctgtgcgttcaagttgttctagttttctacttatcatatccaaatat

SEQ ID NO: 30516 - DNA, 976 bp, Homo sapiens
  MAP TO AC005255.1; EXPRESSED IN LUNG, SIGNAL = 1.1; EXPRESSED IN BONE MARROW, SIGNAL = 0.91; EXPRESSED IN HBL100, SIGNAL = 1.2; EXPRESSED IN HELA, SIGNAL = 1.2; EXPRESSED IN PLACENTA, SIGNAL =   1; EXPRESSED IN ADULT LIVER, SIGNAL = 1.5; EST_HUMAN HIT: BE718835.1, EVALUE 2.00e-39; SWISSPROT HIT: O76099, EVALUE 0.00e+00; NT HIT: AF127851.1, EVALUE 0.00e+00
ttatgaaagtcctgcagtgatgtcaccattaaaaaatgttgccctactgaggagtctccccagggccctcttcatgtccgtgttcctcaggctgtagatgaaggggttcagcatgggggtgaccatggtgtacatcactgaggccaccagacttgtcctagaagatggtgtggctgcagaactgagatagaccccaaagcccgtgccatagaacaaggtgaccactgagaggtgggaaccacaggtggaaaacgctttgtgctttctcccagctgaggaaatcctcagtatagagaaaacaattttatagtaagagaaaaatattccagtgaaggaaatcacacccaggacgccagttgcaaagtatatcaccacgttattaatgaaggtgtcagaacaggcgagcttcaggacttcaagtagatcacaaaaaaagtgtggaatttccatttcggtgcagaaggacagcctcaaaacagtcaaggtctcgagcagggaacccatgacactgatgcaccaggaccccagaaccagcagtccacagagctgggggttcatgatgaccgtatagtgcagggggtgacagacggccacgaagcggtcataggccatcacggtcaagagtaaattgtccaggcatccaaatgaagtgaaaaaaaaaatctgactgagacagcctgcatatgttatgaatttgttctgtgtcagtatattcagtaacatctttgggacagtcgtggaggtaaaacagaggtcagcaaaagacaggttggagaggaagaagtacatgggggtgtggaggtgggagtctgagcatatggccaggatgatgagcaggttcccggtgaaagtgactaggtacatggagaggaacagcccaaagagaatgaactgaatctctgacgttgctgaaaatcccaggaggagaaattcttgggcatgtgtttgatttcctgtttccatggggataaaataa

SEQ ID NO: 30517 - DNA, 75 bp, Homo sapiens
  MAP TO AL109941.9; EXPRESSED IN ADULT LIVER, SIGNAL =   1; EST_HUMAN HIT: H49630.1, EVALUE 3.00e-13; NT HIT: AF224669.1, EVALUE 6.00e-16
taaaaaccccctggtcttctttgtttggtgtgctcttgcaatcttgattgacacaggtagcacccttctgcagaa

SEQ ID NO: 30518 - DNA, 214 bp, Homo sapiens
  MAP TO AC007558.3; EXPRESSED IN LUNG, SIGNAL = 0.99; EXPRESSED IN BONE MARROW, SIGNAL =   1; EXPRESSED IN HBL100, SIGNAL = 1.1; EXPRESSED IN ADULT LIVER, SIGNAL = 1.1; EXPRESSED IN FETAL LIVER, SIGNAL = 0.94; SWISSPROT HIT: P30589, EVALUE 2.90e-01; NT HIT: AJ229042.1, EVALUE 5.00e-04; EST_HUMAN HIT: AL039124.1, EVALUE 7.50e-01
atgcctgaccaaatacctgggcaccatggcccaactaggtagacacataaagttaaccatcacagcagtcatttttgttctggggagaagaatagagagtgggatggggctgtcaggcggtgggatgattggaggaaatgacagttccagggcaaggaggagaccacaggcaatgtgggaaaggacactctgtccaaaggcaaccattacatca

SEQ ID NO: 30519 - DNA, 159 bp, Homo sapiens
  MAP TO AC007219.1; EXPRESSED IN BT474, SIGNAL = 0.7; EXPRESSED IN FETAL LIVER, SIGNAL = 0.68; EXPRESSED IN LUNG, SIGNAL = 0.66; EXPRESSED IN ADULT LIVER, SIGNAL = 0.64; EXPRESSED IN PLACENTA, SIGNAL = 1.1; EXPRESSED IN BONE MARROW, SIGNAL = 0.7; EXPRESSED IN HBL100, SIGNAL = 1.1; EXPRESSED IN HELA, SIGNAL =   1; SWISSPROT HIT: P19965, EVALUE 8.90e+00; NT HIT: AF193768.1, EVALUE 1.20e+00
tgtacaatgatttgcagtaaagattcgaaatttaagcagagacactctagctcccaacatctccctctagctgtgggcctcagaacccataagctggtcattagtctggccctctcagcctccacgcaaattaattctgactctacctctaacccctag

SEQ ID NO: 30520 - DNA, 391 bp, Homo sapiens
  MAP TO AF130350.1; EXPRESSED IN HELA, SIGNAL = 1.1; EXPRESSED IN PLACENTA, SIGNAL =   1; EXPRESSED IN ADULT LIVER, SIGNAL = 1.3; NT HIT: AL163248.2, EVALUE 0.00e+00; EST_HUMAN HIT: AA001786.1, EVALUE 3.00e-84; SWISSPROT HIT: P70213, EVALUE 6.00e-21
tgttaaggactctacttctaatagtgtggagaacacttataatccttggcatgaactgtatagaaagttatgcaaaataaatgcatttgacattcctgatgcattggtgattagaggcaaggaacttagcaactgtatacttaatacctttgatcatatgtggggaaccaaggaaaataatgaagcttgttggttgctcctaagtttggtggacaaaatgatgaaaatatataatgaactcagggattctgtctcctggcttcagaagcagatactgagcctcaaatctgctaagatagccctgagtgagagtcttatctcctgtcgagaaagagctgaaattgtggaaaaacagacacaagctcttatcgtgtatatggctgacctgcag

SEQ ID NO: 30521 - DNA, 103 bp, Homo sapiens
  MAP TO AC007880.1; EXPRESSED IN LUNG, SIGNAL = 0.65; EXPRESSED IN ADULT LIVER, SIGNAL = 0.69; EXPRESSED IN PLACENTA, SIGNAL = 0.71; EXPRESSED IN BT474, SIGNAL = 0.63; EXPRESSED IN BONE MARROW, SIGNAL =   2; SWISSPROT HIT: Q62590, EVALUE 1.40e+00; EST_HUMAN HIT: AA450086.1, EVALUE 1.30e+00
agggaaaatggaaatggcgagactgtggccagtgttaggccgacattgcagcagatctacattccgccgtgagaacagacatggggacaaaagcccagacctg

SEQ ID NO: 30522 - DNA, 228 bp, Homo sapiens
  MAP TO AC010872.3; EXPRESSED IN ADULT LIVER, SIGNAL = 2.5; EXPRESSED IN FETAL LIVER, SIGNAL = 1.7; EST_HUMAN HIT: AI174976.1, EVALUE 1.00e-102; SWISSPROT HIT: P04114, EVALUE 4.00e-30; NT HIT: M19816.1, EVALUE 1.00e-107
cagtgctccactcacatcctccagtggctgaaacgtgtgcatgccaacccccttctgatagatgtggtcacctacctggtggccctgatccccgagccctcagcacagcagctgcgagagatcttcaacatggcgagggatcagcgcagccgagccaccttgtatgcgctgagccacgcggtcaacaagtgagtttccacactgtatttctcctcctaggagcagagg

SEQ ID NO: 30523 - DNA, 142 bp, Homo sapiens
  MAP TO AC010127.3; EXPRESSED IN ADULT LIVER, SIGNAL = 1.5; EXPRESSED IN FETAL LIVER, SIGNAL = 1.4; EXPRESSED IN LUNG, SIGNAL = 1.2; EXPRESSED IN BONE MARROW, SIGNAL = 0.93; NT HIT: U79568.1, EVALUE 4.00e-25; EST_HUMAN HIT: BF347024.1, EVALUE 9.00e-15; SWISSPROT HIT: P35499, EVALUE 1.00e-13
atctttactttgttattttcatcatctttgggtccttcttcaccttgaacctgtttattggtgtcatcatagataatttcaaccagcagaaaaagaagataagtatttctaatattttctctcccactgagatagaaaatta

SEQ ID NO: 30524 - DNA, 212 bp, Homo sapiens
  MAP TO AC011739.2; EXPRESSED IN ADULT LIVER, SIGNAL =   1; EST_HUMAN HIT: BE896788.1, EVALUE 9.00e-93; SWISSPROT HIT: O24696, EVALUE 3.90e-01; NT HIT: gi11429300, EVALUE 6.00e-93
aaggactgttttgatggccacagctcagatgaaggagcacgagaaggaccccgagatgctggtggatctccagtacagcctggcaaactcctacgcaagcactcctgaactacgcaggacctggctggaaagtatggccaagattcatgccagaaacggagatttatctgaggtgattagccaaggcttggtcatttaccatcagtattgtc

SEQ ID NO: 30525 - DNA, 111 bp, Homo sapiens
  MAP TO AC004882.2; EXPRESSED IN FETAL LIVER, SIGNAL = 0.9; EXPRESSED IN HELA, SIGNAL = 0.98; EXPRESSED IN ADULT LIVER, SIGNAL = 0.79; EXPRESSED IN BT474, SIGNAL = 0.76; EXPRESSED IN BONE MARROW, SIGNAL = 1.1; EXPRESSED IN HBL100, SIGNAL = 1.3; SWISSPROT HIT: O69548, EVALUE 9.10e+00; NT HIT: AF221715.1, EVALUE 3.80e+00; EST_HUMAN HIT: BE379483.1, EVALUE 4.00e-56
caggagaggcatgtcactgggggtcaatcggcccctctcctcaagcttctggggtgtggtattggccccgtccccttgcaaaccacagtgctggaggatattgctgaagac

SEQ ID NO: 30526 - DNA, 112 bp, Homo sapiens
  MAP TO AC010686.1; EXPRESSED IN HBL100, SIGNAL = 0.93; EXPRESSED IN BONE MARROW, SIGNAL = 0.92; EXPRESSED IN ADULT LIVER, SIGNAL = 0.99; EST_HUMAN HIT: D29212.1, EVALUE 5.60e+00
tctgtggggcattgactctgtattccaggatctcgccagcctcaaaggggagaaggcagacagggagcatggcgacagcaagaacaaggtgacgacaaggacaggagcccca

SEQ ID NO: 30527 - DNA, 933 bp, Homo sapiens
  MAP TO AC004889.1; EXPRESSED IN HELA, SIGNAL =   1; EXPRESSED IN PLACENTA, SIGNAL = 1.1; EXPRESSED IN BT474, SIGNAL = 0.93; EXPRESSED IN FETAL LIVER, SIGNAL = 1.1; EXPRESSED IN ADULT LIVER, SIGNAL =   1; EXPRESSED IN LUNG, SIGNAL = 1.3; SWISSPROT HIT: P34984, EVALUE 1.00e-86; EST_HUMAN HIT: BF116115.1, EVALUE 0.00e+00; NT HIT: U86281.1, EVALUE 0.00e+00
ggaatgactttccttgcccagtgctctcctcagggcacccttgacctctccgttcctcaggctgtaaatcagggggttaagtgttgggttgaaaaaactgtaaaatagaaaaaagaccttttgctgctcctcaggatggcgggacttgggggccatgtacatgatgatggcactgccaaagaagagtcccaccacgcagaggtgggaggagcaggtggagaaggcctttctgcggccctccccagactggatcctcaggatggccgccaggatgtgcgagtaggagacaagcaccaggctgggtggccccaccaggaagaacacgcaggctgcaaagatgaccacctggttgagccaggtgtcagcacaggccagcctgaggacagacaggatttcacagaagaagtggttgatttcatgaggcccagagaagggcagtcttaggatgagaaccacatgggccagagccaggagggagccacacgtccaggaagtgacggccagggtgatgcagactctccaggtcatgatgacggagtatcggagagggtggcagatggccacgtaacgatcgtaggacatcagcaccagcaggagacattcgctgtgtccaaaactcaaacagagaaaggtctgcgtcatgcaaccagcaaaggagatgggcttggctggatgcaggaggttcgccagcatctggggcaccgtgttgcgggtgtaggcgatgtcgacgacagccaggtgtgagaggaagaagtacatgggggtgtggagtctggagtccagtgagatgagccccaggatggccccgttccccagcagggtgaagatatagaacagggagaagagcccaaagaggagcatctgaatccttgggcccaggagaaatcccagtaggaggaactctgtgaccattgtctgattttcccccatttc

SEQ ID NO: 30528 - DNA, 178 bp, Homo sapiens
  MAP TO AC012135.1; EXPRESSED IN ADULT LIVER, SIGNAL = 1.2; NT HIT: gi4758367, EVALUE 5.00e-96; EST_HUMAN HIT: AA401543.1, EVALUE 2.00e-07; SWISSPROT HIT: Q92915, EVALUE 8.00e-30
aagtttaaagaatctgtttttgaaaattattatgtaatctactcatccatgttgtacagacaacaggaatctggtagagcctggtttttgggattaaataaggaagggcaagctatgaaagggaacagagtaaagaaaaccaaaccagcagctcattttctacccaagccattggaag

SEQ ID NO: 30529 - DNA, 170 bp, Homo sapiens
  MAP TO AC012667.1; EXPRESSED IN HELA, SIGNAL =  10; EXPRESSED IN ADULT LIVER, SIGNAL = 1.2; EST_HUMAN HIT: AA071307.1, EVALUE 2.60e-02; NT HIT: U15654.1, EVALUE 3.30e-01
cctcagccacctgctcttggcattcagtacttattgcattttcactgttgcacaggagccacattctcttcaaaggggtgcatttcctgttgcctttcatgatgccaatcttcattatggtccctaaatcacctagagtggacaatttaacgtggcccatctctggaaaa

SEQ ID NO: 30530 - DNA, 149 bp, Homo sapiens
  MAP TO AF152365.1; EXPRESSED IN ADULT LIVER, SIGNAL = 1.1; EST_HUMAN HIT: AA984529.1, EVALUE 5.00e-01; NT HIT: X68366.1, EVALUE 5.00e-03
acgcaaaactcagcagactatggtaaagaggatttacgtcaactcaacttcccaagaagttaaaattaaaaacatatctcccctaagtcaatacatcccgcattatttcactggtgactttagtcccaatttgtttgaggaaactaaag

SEQ ID NO: 30531 - DNA, 275 bp, Homo sapiens
  MAP TO AE000660.1; EXPRESSED IN ADULT LIVER, SIGNAL = 1.4; EXPRESSED IN BT474, SIGNAL = 0.99; EXPRESSED IN BONE MARROW, SIGNAL = 0.98; EXPRESSED IN HELA, SIGNAL = 1.1; EXPRESSED IN PLACENTA, SIGNAL = 2.6; EST_HUMAN HIT: AU134310.1, EVALUE 1.00e-117; NT HIT: AB024469.1, EVALUE 1.00e-118; SWISSPROT HIT: P31792, EVALUE 3.00e-17
acaatgaagaaaagatagaacataactgccaacaagtaattgctcaaacctatgccgctcgaggggactttttagaggttcccttgactgatccccacctcaacttgtatactgatggaagttcctttgtagaaaaaggacttcaaaaagtggggtatgcagtggtcagtgataatggaatacttgaaagtaatcccctcactccaggaactagtgctcagctggcagaactaatagccctcactcgggtactagaatcaggagaaggaaaaagg

SEQ ID NO: 30532 - DNA, 96 bp, Homo sapiens
  MAP TO AC010085.1; EXPRESSED IN ADULT LIVER, SIGNAL = 1.2; NT HIT: AB020684.1, EVALUE 1.00e-39
gtcctctccctctgtaaccgtccaacatatcttggtttgaataccaatcaagtccattattttggtataaatccggtaccaactggccaaaattac

SEQ ID NO: 30533 - DNA, 307 bp, Homo sapiens
  MAP TO AP000191.1; EXPRESSED IN ADULT LIVER, SIGNAL = 0.75; NT HIT: AF114488.1, EVALUE 2.00e-65; EST_HUMAN HIT: AI750406.1, EVALUE 7.00e-32; SWISSPROT HIT: P36956, EVALUE 4.20e-02
agaaggtgcgggccccttcttccaattggctggcggtttccccacccacttatgggcggagatggatggtggatggggggcgggggaggcagcggagggagatgaggagataggcgggagcgagggagcgagggagggagcgaaggaggtagagaagagtggaggcgccaggggagggagcgtagcttggttgctccgtagtacggcggctcgcgaggaagaatcccgagcgggctccgggacggacagagaggcgggcggggatggtgtgcggggctgcggctcctgcgtccctcccagcggcgcg

SEQ ID NO: 30534 - DNA, 494 bp, Homo sapiens
  MAP TO AC008174.1; EXPRESSED IN ADULT LIVER, SIGNAL = 0.8; EXPRESSED IN PLACENTA, SIGNAL = 0.74; EXPRESSED IN LUNG, SIGNAL = 0.72; EST_HUMAN HIT: BE839399.1, EVALUE 4.60e-01; SWISSPROT HIT: P22607, EVALUE 4.50e-01
attgctttcaaagtgataatctacttctatttctttggacagtacatgaatcactcctactaagagatcctgaaagaggtcatcaaagccaccagaaactattcctggacagtaagtgtattttgtaggtatggcaaccattttctgtgcaatgtcagcctgtataattttattattaaaaagaattttaataatgatttcagaaatacataaagcaagttctccaatggaaattgacctgctctcaaacacttgagaatgaattgaaataatcttgctaaatgttgcttcttgaatttcccatgctttctctttttctctaccctttttggtgccatcagaaatgctcgaagttaaatggtaaagtactgactcagtgagatgttcacaacattgataaattgaagaatcatcgtatatgtttcttaggaactgttttgattcatattttttccttgaccatgtagaaacagacatcttttcctcactaaaaa

SEQ ID NO: 30535 - DNA, 237 bp, Homo sapiens
  MAP TO AC007270.2; EXPRESSED IN ADULT LIVER, SIGNAL = 7.6; NT HIT: AF087913.1, EVALUE 1.00e-20; SWISSPROT HIT: Q9Z7Q1, EVALUE 1.40e+00; EST_HUMAN HIT: AI499823.1, EVALUE 1.00e-14
aaactactatagcagccctatgaatcatactcctttcttctcctgaaaagaggatgtccaaaatggacattaactcaacccaagtgtataactgaggtcctaaaaattgatcaatttgatctgccactccgtaagggtcatctagtaatggcttaagctccttttttaaactctggaattctgaactggttaagggagtatccatgaagtcaatggttcctcctccttgtggcacct

SEQ ID NO: 30536 - DNA, 102 bp, Homo sapiens
  MAP TO AC007314.3; EXPRESSED IN HELA, SIGNAL = 0.66; EXPRESSED IN ADULT LIVER, SIGNAL = 0.72; EXPRESSED IN PLACENTA, SIGNAL = 0.73; EXPRESSED IN BONE MARROW, SIGNAL = 0.64; EXPRESSED IN LUNG, SIGNAL = 0.78; EST_HUMAN HIT: BF697040.1, EVALUE 1.30e+00
aacaagatgatttcagaacaaacagtgctggtggaggatgcagggatgcgtctgctgaaacccggcctcgcctgggacattgtcagcttggaaaccgctgag

SEQ ID NO: 30537 - DNA, 340 bp, Homo sapiens
  MAP TO AC007600.2; EXPRESSED IN ADULT LIVER, SIGNAL = 0.66; EXPRESSED IN BT474, SIGNAL = 1.3; EXPRESSED IN HBL100, SIGNAL = 0.73; SWISSPROT HIT: Q9QYM0, EVALUE 3.00e-02
ctggcgtccagcttccaggccactgcccggattggcttggagacagaggcacagttcacggctgtagagaggatactgcagtacatgaaggtggggttcaggtctgggtctggtgtggggagccatgcaagttggggcatgacttctgtgacctctacaagccccactggcctcagagccctgagaccatcccaggaaacaccaggctcctggcctttcctccctgtcttccccagacttttgttgaccatctcgctgaagctcttccatacctgtctgctcactttgaccacatccctcacagcattcctagggggaagaggagatcatcttctcctct

SEQ ID NO: 30538 - DNA, 140 bp, Homo sapiens
  MAP TO AC007106.6; EXPRESSED IN ADULT LIVER, SIGNAL = 0.72; NT HIT: AB040053.1, EVALUE 1.10e+00; EST_HUMAN HIT: AW239000.1, EVALUE 1.30e+00
tcatcaagctgggggttctcacattactgctgtaccatattcattatgttgatttccctttcttagattacttgtcccccgatcaaaggatggctataccagatccaggagtggtcatgagtttcaaaagtaggaggcac

SEQ ID NO: 30539 - DNA, 208 bp, Homo sapiens
  MAP TO AL035091.2; EXPRESSED IN PLACENTA, SIGNAL = 0.98; EXPRESSED IN ADULT LIVER, SIGNAL = 2.8; EXPRESSED IN BT474, SIGNAL = 0.96; EXPRESSED IN FETAL LIVER, SIGNAL =   1; EXPRESSED IN LUNG, SIGNAL = 1.2; EXPRESSED IN BONE MARROW, SIGNAL = 1.2; NT HIT: U72237.1, EVALUE 5.00e-07; EST_HUMAN HIT: AA252901.1, EVALUE 8.00e-04; SWISSPROT HIT: Q24139, EVALUE 5.50e-01
acagatttgttactattaccactgacctcatcaggaaagatcttaagtattgggatgctatcaagttcatggtggtgaacacaaattttccaaaattctaattttcatgtgagagctcaaatgttatcgttggccacaaatctgtcaatcgttttgcttaaagtgacaggctcactttgttcattttcaagacaatttctaccaaaaa

SEQ ID NO: 30540 - DNA, 423 bp, Homo sapiens
  MAP TO AL049739.1; EXPRESSED IN ADULT LIVER, SIGNAL = 1.2; EXPRESSED IN BONE MARROW, SIGNAL = 0.99; SWISSPROT HIT: P35410, EVALUE 2.00e-74; EST_HUMAN HIT: AI868942.1, EVALUE 1.60e+00; NT HIT: S78653.1, EVALUE 0.00e+00
aggttctccacatgctgagtagagtgtggttgctccattgggtcgatgccagctgcctttttgttcctccccacctctggcttatctgctaacgcccgttggagaatcactctgagagattccttcagccttttctttctgaggctccccacaaagaaataaatgatagggttggcgctgctgtttataatgaggaacaaggaaattaaataggaggtggtgacaaacattttgaaatctgttatgaggggtgccacgctcaggggtagggcccagagtaggaacatgggggccgagatctgcaccaccgcatagaccctggtggccttttgctgctgggagcagcacaggaatctaatgagtagagtcagactcgacacacacatcacaagtgaaaggatagcatggaagagcccagaaagc

SEQ ID NO: 30541 - DNA, 155 bp, Homo sapiens
  MAP TO AC007750.2; EXPRESSED IN LUNG, SIGNAL = 0.62; EXPRESSED IN HELA, SIGNAL = 0.67; EXPRESSED IN ADULT LIVER, SIGNAL = 0.65; EXPRESSED IN PLACENTA, SIGNAL = 0.68; EXPRESSED IN FETAL LIVER, SIGNAL = 0.62; EXPRESSED IN BONE MARROW, SIGNAL = 0.65; NT HIT: gi11428474, EVALUE 2.00e-82; EST_HUMAN HIT: AU136648.1, EVALUE 4.00e-82; SWISSPROT HIT: P27487, EVALUE 2.00e-16
aggaaatgcttgctacaaaatatgctctctggtggtctcctaatggaaaatttttggcatatgcggaatttaatgatacggatataccagttattgcctattcctattatggcgatgaacaatatcctagaacaataaatattccatacccaaag

SEQ ID NO: 30542 - DNA, 132 bp, Homo sapiens
  MAP TO AC009307.1; EXPRESSED IN LUNG, SIGNAL = 0.76; EXPRESSED IN ADULT LIVER, SIGNAL = 0.73; EXPRESSED IN PLACENTA, SIGNAL = 0.79; EXPRESSED IN BT474, SIGNAL = 0.7; EXPRESSED IN FETAL LIVER, SIGNAL = 0.78; EXPRESSED IN HELA, SIGNAL = 0.89; EXPRESSED IN BONE MARROW, SIGNAL = 0.75; EXPRESSED IN HBL100, SIGNAL = 0.68; EST_HUMAN HIT: BE675766.1, EVALUE 2.00e-68; NT HIT: X71133.1, EVALUE 1.20e+00; SWISSPROT HIT: P54860, EVALUE 1.00e+00
ctgatgcgatgaccggatctttcataagttctctagttattggacatataaattcatcaggaattcctgaagaaagggatttaaccttggtcctgagctcttcaattttcctcagcactttactacgcagtc

SEQ ID NO: 30543 - DNA, 300 bp, Homo sapiens
  MAP TO AL031280.6; EXPRESSED IN PLACENTA, SIGNAL = 1.2; EXPRESSED IN ADULT LIVER, SIGNAL = 0.98; NT HIT: AF084456.1, EVALUE 1.60e-01; EST_HUMAN HIT: BF242995.1, EVALUE 2.70e-01; SWISSPROT HIT: P25502, EVALUE 6.90e+00
atgatggtaagaagccaaacgggagactcctcaaagaattccaaggactcaaggaacttaggcccctccgtcttcctcctcactcccccttcactctgggggctggtcagtagctcagacagcagggttttggatgtcctaaatgtagagttgatgcaactgagattgctgttaagtcagacctgctttggtgtctccaccctcaaagagaatagaagccacagagaccacagcctcagtgtggggactcagttgcgggtgtttcctcccctagaaggctgttgcctaagatttgattga

SEQ ID NO: 30544 - DNA, 141 bp, Homo sapiens
  MAP TO AP000194.1; EXPRESSED IN ADULT LIVER, SIGNAL = 0.81; EXPRESSED IN PLACENTA, SIGNAL = 0.85; EXPRESSED IN HBL100, SIGNAL = 0.72; SWISSPROT HIT: P17303, EVALUE 3.10e+00; NT HIT: AF111167.2, EVALUE 7.00e-05; EST_HUMAN HIT: AW849836.1, EVALUE 1.00e-03
gcagccccagggcctgggttggaattgcagcccttcccttcaccagctgtgtgacttgggcaagttgcctaacctcctgcctcatttccttacctggagaatggagatagtgatggtatatatcatgtaaattatgtaatg

SEQ ID NO: 30545 - DNA, 637 bp, Homo sapiens
  MAP TO AF001905.1; EXPRESSED IN BT474, SIGNAL = 5.4; EXPRESSED IN LUNG, SIGNAL = 0.97; EXPRESSED IN ADULT LIVER, SIGNAL = 1.4; NT HIT: AJ271735.1, EVALUE 8.00e-33; SWISSPROT HIT: P08547, EVALUE 3.00e-57; EST_HUMAN HIT: BE972275.1, EVALUE 5.00e-26
aaataagatccaaataattacaatcagaaacaacaaatgctatattataactgatcccacagaaatacaaaagattctcagagactacattgaacaaatctatgcacacaaattagaaaagctaaagaaaatggagaaattcctggaggcatacaatctcacaagattgaatttggcagaaattaaaaatctgaataaaccaatatcaacttttgaaattgaatcagtaataaagaacctactagccataaacagccttggaccagttggattcacagctaaattctaccatacatacaaagaaaagcagataccaatagtactgcaactatttttaaaaatcaaagtgaaggaactcctccctaacttattcaatgaatccagcatcaacctgatactaaaatctggcagagacacaaggaaaaataaaaacttcagaccaatgtcactcataaacatagatgaaaaaatcctcaacaaaatattagcaaataaaatccagcagcacatcaaaaatttaatataccaagagcaagtaggctttattcctgggatggaaggatggttgaacatatttaaatcaataaatatcattcactatataaacagaattaaaagaataaccatatgttcatct

SEQ ID NO: 30546 - DNA, 119 bp, Homo sapiens
  MAP TO AC012354.2; EXPRESSED IN ADULT LIVER, SIGNAL = 1.1; EST_HUMAN HIT: AI811618.1, EVALUE 6.00e+00
aactgggcagagaattctatagatgcggtgtgcaagttaattaaccatccacccccaacttctgccactgccaccttggccaccactgtagatgattactctgaactcctgagggcaag

SEQ ID NO: 30547 - DNA, 130 bp, Homo sapiens
  MAP TO AC012367.2; EXPRESSED IN ADULT LIVER, SIGNAL =   1; EST_HUMAN HIT: AI690615.1, EVALUE 1.10e-01; SWISSPROT HIT: O09175, EVALUE 8.90e+00; NT HIT: AJ245944.1, EVALUE 7.30e-02
atggctgtgaacatcccattggccaaagcaactcacagggctgagcccaaaatcaaagacaagacaatatgcttcacctttagcagaagagacaacaaatgcgtgacaaagggcacagacgcagggagag

SEQ ID NO: 30548 - DNA, 564 bp, Homo sapiens
  MAP TO AC006345.2; EXPRESSED IN PLACENTA, SIGNAL = 0.98; EXPRESSED IN HBL100, SIGNAL = 0.98; EXPRESSED IN FETAL LIVER, SIGNAL = 1.1; EXPRESSED IN ADULT LIVER, SIGNAL = 1.1; EXPRESSED IN BONE MARROW, SIGNAL = 1.2; EST_HUMAN HIT: AA018975.1, EVALUE 0.00e+00; NT HIT: AF251025.2, EVALUE 0.00e+00; SWISSPROT HIT: P13550, EVALUE 2.40e-01
agaaaattggactgcaaacctgatcagcatctgaaagtggtttccatttttggaaatactggtgatggaaagtctcatactctcaaccacactttcttttatggtcgtgaagtctttaaaacctccccgacccaggagtcctgcactgtgggagtgtgggcagcctatgacccagttcacaaagtagcagtgatcgatacggaagggctcctgggggccaccgtgaatctaagccagagaacacggctgctgcttaaggtcctggccatctcagacctcgtcatctatcgaactcatgcagaccggctgcataacgacctcttcaaattccttggggatgcctcagaagcttatctgaagcacttcaccaaggagctcaaggccaccactgctcgctgtggcctggatgtccctttatccacactgggccctgcagttatcatcttccatgagaccgtgcacacccagctactgggctctggtgagagatggggtacagtgtcacagctcaacctttatgggtacaaggaggcagctatttggtctgcaatagcaacttgttgg

SEQ ID NO: 30549 - DNA, 553 bp, Homo sapiens
  MAP TO AF117829.1; EXPRESSED IN ADULT LIVER, SIGNAL = 0.98; NT HIT: AL163281.2, EVALUE 6.00e-03; EST_HUMAN HIT: AW880878.1, EVALUE 0.00e+00
tggtagtctagtctgttcaatagcttgcagatagtgttctccctatgtcttcacagtatcttccctctatgcatgcttgtcatgatgtacaaatttcccctcattataaagacactgtcaggattaggtcccatcctaataaccttatcctaatttgatcagctgtaaagattctatttcaaaatatggttggtcacggtcatcggtattgagggttaggacttcaacatctttttgggaaacatggttcaaacaataacactgggtctaaaagaatcaattgtacaagagggaaaacctgttttaaaggcacttcattaagagaaaaggatgaagaaagaagaggaagggggtgagagggagggggaggaggagaagaaggaaaaaaaggaggagaaggaaacggagaaaagaaagaaagaaagaaaaaagaaaagaaagagaaaaagagagagaaagagagagagaaggaaagacaagaaagaaagaaagaaaaaaaaagaaagaaagaaagaaaagaaaagaaaagagaaaagaaaagaaaagaaaagaa

SEQ ID NO: 30550 - DNA, 145 bp, Homo sapiens
  MAP TO AF047825.1; EXPRESSED IN ADULT LIVER, SIGNAL =   1; EST_HUMAN HIT: AU137819.1, EVALUE 8.00e-74; NT HIT: M74099.1, EVALUE 5.00e-74; SWISSPROT HIT: P39880, EVALUE 1.00e-20
cttgatttttcacttcagcaaattccttgttgtattcttccagagtttccctaagtttctggttctctgtttcaatatcgtgcaggcgctgcactttgagctggagttgctgtccgagatccaaagctggtacgggatctgcaca

SEQ ID NO: 30551 - DNA, 100 bp, Homo sapiens
  MAP TO AF121782.1; EXPRESSED IN ADULT LIVER, SIGNAL = 0.98; EXPRESSED IN FETAL LIVER, SIGNAL = 0.99; NT HIT: AL163281.2, EVALUE 8.00e-50; EST_HUMAN HIT: BE150815.1, EVALUE 1.40e-02
cattgttggtgtcagctacattctcacattcaccccattctctggggtggcctcctgggtgaatccccttctcatgggactccggtaactgtttctgttc

SEQ ID NO: 30552 - DNA, 445 bp, Homo sapiens
  MAP TO AL049595.5; EXPRESSED IN BT474, SIGNAL = 0.62; EXPRESSED IN HBL100, SIGNAL = 0.91; EXPRESSED IN FETAL LIVER, SIGNAL = 0.62; EXPRESSED IN HELA, SIGNAL = 0.75; EXPRESSED IN ADULT LIVER, SIGNAL = 0.68; EXPRESSED IN PLACENTA, SIGNAL = 0.6; EXPRESSED IN BONE MARROW, SIGNAL = 0.67; NT HIT: AE004450.1, EVALUE 2.80e-01; SWISSPROT HIT: P18737, EVALUE 3.40e+00; EST_HUMAN HIT: AW793542.1, EVALUE 6.50e+00
gtataagaaacaataatctactctatcttctctgaagtggcactcctggtggtagtttccaatacagtatctgctttctccttctcactgggaaaaccccattttggtgggggaggcaatatgccaagttagaaatactcatgtccctggatttccttgcctttaaagatggccatgaaatcaagctttggcccatgataaaatacccacaatctactgggtaagacatctggaaaaactattattcttctagtaaaaacagaaagatggagggccatgtttcttttctcttcttcacctttccctgcttctttctgtctgaaatgggtaatgatgcttggaggtttaacagccaagagagcaaactgcatgctaagattggtggagcaggaagctaaaaggagactgtgtcctccatcaactccttttacagctgtgttagcgt

SEQ ID NO: 30553 - DNA, 271 bp, Homo sapiens
  MAP TO AC009227.1; EXPRESSED IN FETAL LIVER, SIGNAL = 0.65; EXPRESSED IN LUNG, SIGNAL = 0.64; EXPRESSED IN ADULT LIVER, SIGNAL = 0.66; EXPRESSED IN BONE MARROW, SIGNAL = 0.65; NT HIT: M13825.1, EVALUE 1.70e-01; EST_HUMAN HIT: BF513458.1, EVALUE 2.00e-60
aaattactcctttctagctgtggctacactgaccaaaacaacaacaacaacaacaacaaaacaaaacaaaacaaaaaaagctgaaatacaaaaaaaaaaaaacaaaaaaagacatgtaatcatcaagttcttttttcccccttgtgctatttttagcagaaatttcagcacaactggaaccaagcagcagcttactttcgttttcacaccaatggaatgcatgatgaaaatctcatttttaaaaaacattatagatatagccttaatcatc

SEQ ID NO: 30554 - DNA, 192 bp, Homo sapiens
  MAP TO AL035417.15; EXPRESSED IN PLACENTA, SIGNAL = 0.71; EXPRESSED IN BT474, SIGNAL = 0.77; EXPRESSED IN HBL100, SIGNAL = 1.2; EXPRESSED IN HELA, SIGNAL = 0.85; EXPRESSED IN BONE MARROW, SIGNAL = 0.86; EXPRESSED IN FETAL LIVER, SIGNAL = 0.62; EXPRESSED IN ADULT LIVER, SIGNAL = 0.75; EST_HUMAN HIT: F11745.1, EVALUE 1.00e-104; SWISSPROT HIT: P25123, EVALUE 9.60e-01; NT HIT: AB037846.1, EVALUE 4.00e-81
cttgtccgggttgataatgtccttcttgctgatggtcccagaggctgcatccccttctggacccccgagttctagaatgtcccgtacatccgcgcccgtagccatcgcgcctgagagatgggggagccaccggaggtcaagggtcagtgcctgaagaaggaccaggctcaggtcagggggcggggccaatcc

SEQ ID NO: 30555 - DNA, 258 bp, Homo sapiens
  MAP TO AJ010770.1; EXPRESSED IN HBL100, SIGNAL =   1; EXPRESSED IN ADULT LIVER, SIGNAL = 1.1; EST_HUMAN HIT: BE889365.1, EVALUE 1.00e-129; NT HIT: AJ010770.1, EVALUE 1.00e-129; SWISSPROT HIT: P53165, EVALUE 7.20e+00
cttgcccagtttcgacaaagaaaagctcagtcggatgggcagagtccttccaagaagcagaaaaaaaagagaaaaacgtcaagcagtaaacatgatgtgtcagcacaccatgatttgaatattgatcaatcacagtgtaatgaaatgtacataaatagttctcagagagtagaatcaactgtgattcctgaatctacaataatgagaactctacatagtggagaaataaccagtcatgagcagggcttctctgtggaa

SEQ ID NO: 30556 - DNA, 362 bp, Homo sapiens
  MAP TO AL033397.7; EXPRESSED IN ADULT LIVER, SIGNAL = 0.98; EXPRESSED IN PLACENTA, SIGNAL = 1.3; EST_HUMAN HIT: BE095185.1, EVALUE 1.30e+00; NT HIT: AE001912.1, EVALUE 1.90e-01; SWISSPROT HIT: P23934, EVALUE 1.40e+00
attacaaaactcattcaaagttgaacacagtagaggtatttcaagttgctttagagagagaattacacacacacaaaaaatctttaggagccagacaaccactgtggacaccaataagagagctccaacattggtgaggtatagacccgtcaaagttgttggtaataacagcaaggtccatctggcaagattggtcacctgtggtggaagtggtggtgacagcagggatgcaactgcagcaatcaatgatgatgatctcactagggtggggaggtgttaaaggcatcttcacagcagcacagtgcccagaatgccaaagagcagcaggatggatccagcatcctctcctgataaaagagggc

SEQ ID NO: 30557 - DNA, 114 bp, Homo sapiens
  MAP TO AC007366.2; EXPRESSED IN ADULT LIVER, SIGNAL = 1.3; EST_HUMAN HIT: BE543175.1, EVALUE 9.30e-02; NT HIT: AL163213.2, EVALUE 8.40e-01
aatgctccattcctgtatttgtgcattattcacacagctgagtcgccacccaaacccagagagaaacaggaatacaactcccccaactactgttacagagaacgctgcgggcag

SEQ ID NO: 30558 - DNA, 140 bp, Homo sapiens
  MAP TO AC007656.2; EXPRESSED IN ADULT LIVER, SIGNAL = 0.87; NT HIT: gi6679250, EVALUE 6.80e-02; SWISSPROT HIT: P48634, EVALUE 1.00e+00; EST_HUMAN HIT: BF307026.1, EVALUE 1.20e-01
tggaggaaaaggagcaattcgggtactatcagaaggccagtcccccaccccaatggctaagggttttcagcaagtactgcataaaaaagaacaacgtgtttcttttagaaacttacctctctttcctttatatttgtgtg

SEQ ID NO: 30559 - DNA, 182 bp, Homo sapiens
  MAP TO AC009490.4; EXPRESSED IN BONE MARROW, SIGNAL = 1.3; EXPRESSED IN LUNG, SIGNAL = 0.97; EXPRESSED IN PLACENTA, SIGNAL =   1; EXPRESSED IN ADULT LIVER, SIGNAL =   1; SWISSPROT HIT: P32578, EVALUE 4.90e+00; NT HIT: AF182811.1, EVALUE 9.10e-02; EST_HUMAN HIT: AW845675.1, EVALUE 4.00e-02
gctcacaaggccaagcagccatggaggtgctccatctacccctcccagttgctgctccaccttgctcccactgtgcctgagctgaagcagtgccctgcctcctgggaaaatagtacctttgccactgagagcaatcacagccgtcccccaacccctgacaagctcctaaatataaaaagcaa

SEQ ID NO: 30560 - DNA, 182 bp, Homo sapiens
  MAP TO AC007406.1; EXPRESSED IN HELA, SIGNAL = 0.64; EXPRESSED IN PLACENTA, SIGNAL = 0.64; EXPRESSED IN FETAL LIVER, SIGNAL = 0.63; EXPRESSED IN ADULT LIVER, SIGNAL = 1.4; EXPRESSED IN BT474, SIGNAL = 0.76; EXPRESSED IN BONE MARROW, SIGNAL = 0.8; EXPRESSED IN HBL100, SIGNAL = 0.68; EST_HUMAN HIT: AU143406.1, EVALUE 9.00e-68; NT HIT: gi11436400, EVALUE 6.00e-68; SWISSPROT HIT: P29375, EVALUE 2.00e-20
agaagagaagcacattcccacatagagccacggcactttcataccagagatgtccacattaatatgtgcaagaacagactgttccaggacaggcatgttattcaaattccaaccagaaagtgcatattcctataagagaagaaaaaactgtaaatgaaagatcagaaatgaaaagtgctcaa

SEQ ID NO: 30561 - DNA, 468 bp, Homo sapiens
  MAP TO AC000113.1; EXPRESSED IN LUNG, SIGNAL = 1.1; EXPRESSED IN PLACENTA, SIGNAL = 1.1; EXPRESSED IN HELA, SIGNAL = 1.1; EXPRESSED IN BT474, SIGNAL = 0.99; EXPRESSED IN FETAL LIVER, SIGNAL = 1.1; EXPRESSED IN ADULT LIVER, SIGNAL = 1.3; SWISSPROT HIT: P28968, EVALUE 4.00e-07; NT HIT: AB037739.1, EVALUE 0.00e+00; EST_HUMAN HIT: AL040448.1, EVALUE 0.00e+00
cagatgtcaatcctgaggccatggttctcatttgtggcatggacattgcttcagagacaggggctctcatttgcagcatggacattgatccagaggctgggactgtcaattgtggcatggacattgtttcagaggctgttgccgtaactggttgggtggacattgctccagaagttggagctctcctcagtggcgtggacatctttccagaggctgtggctctcttgtattgttttgccacggctttcatagagcctgtgggcattgctccagaagttttggccattgttaactgtgcggacattactctagaggctgtggctgacatttgctctgtggacatcactccagagcttgggactgtcatcagtgaggtggtcatggctccagaggctggaactgtcttttgcaatgtagacatatttccagaggctggggctcccattagcggtgtggacattgctccag

SEQ ID NO: 30562 - DNA, 113 bp, Homo sapiens
  MAP TO AC006560.8; EXPRESSED IN LUNG, SIGNAL = 0.61; EXPRESSED IN HELA, SIGNAL = 2.4; EXPRESSED IN ADULT LIVER, SIGNAL = 0.73; EXPRESSED IN PLACENTA, SIGNAL = 0.71; EXPRESSED IN HBL100, SIGNAL =   1; EST_HUMAN HIT: AA018299.1, EVALUE 2.00e-57; NT HIT: gi9966844, EVALUE 2.00e-57
tgacaagtcctgtgattactggaacctcagctcagcctgtgggaccgcgcaggccagccacctgtttgacaaccctgccaccgtcttcttctctatcttcatggctctgtggg

SEQ ID NO: 30563 - DNA, 2340 bp, Homo sapiens
  MAP TO AC005365.1; EXPRESSED IN PLACENTA, SIGNAL = 1.2; EXPRESSED IN HBL100, SIGNAL = 1.3; EXPRESSED IN HELA, SIGNAL = 1.4; EXPRESSED IN BT474, SIGNAL = 1.2; EXPRESSED IN FETAL LIVER, SIGNAL =   1; EXPRESSED IN ADULT LIVER, SIGNAL =   1; EXPRESSED IN LUNG, SIGNAL = 2.7; NT HIT: AF179429.1, EVALUE 0.00e+00; SWISSPROT HIT: O60673, EVALUE 0.00e+00; EST_HUMAN HIT: AW771182.1, EVALUE 0.00e+00
ggctgctgcagaaaaagaggcaatgctttttaagggtcctaatgtatataagaagactgttaattctcgtataggaaaaactagtcgcgcaagagcacagattaagaaatcaaaagcaaagcttgctaatccctctatagttactaagaaaaggaacaaacgaaatcagacaaataaactagtagatgatggaaaaaagaaaccaagagcaaaacaaaaaacaaatgagaaaggtacatcgagaaagcatataacacttaaggatgaaaaaataaaatctcagtctggtgctgaggttaagtttgtactgaaacaccagaatgtgtctgaatttgcaagtagttctggaggctctcaactactttttaaacagaaagatatgccactaatgggctctgctgtagatcatcccctttctgcttccctacccactggaattaatgcacaacagaagttatctggctgcttttcttctttcttagaaagcaagaagtctgtagatttgcagacattccccagttcacgagatgatttgcatccatcagttgtttgtaattctataggacctggagtctcaaaaattaatgttcaaaggcctcataatcaaagtgctatgtttactctaaaggaatcaacgttaattcaaaaaaatatatttgacctttccaatcatttatctcaggtagcacagaatacacagatatcttctggtatgtcctcaaagatagaagataatgcaaataatatacaaagaaactatttgtcatcaatcggaaagttaagtgaatatcgcaattccctagaatcaaagctggaccaagcatatacccctaattttttgcattgcaaagacagtcagcagcagattgtatgcatagcggaacagtcaaagcacagtgaaacttgttctccgggaaatacagcttcagaggaaagccaaatgcctaataattgctttgtaacttccttgagaagtccaatcaaacaaatagcatgggagcaaaagcaaaggggctttattttagatatgtcaaattttaaacctgaaagagtaaaaccgaggtcattatcagaagcaatttcacaaaccaaagcactttctcagtgtaaaaatcgaaatgtgtcaacaccttcagcatttggtgaaggacagtctggactggcagttctaaaagaattgttacaaaaaagacagcagaaagcacaaaatgcaaatactacacaagacccattatccaataaacatcaaccaaataaaaatatttctggttcccttgagcataacaaagcaaataaacggacacgatcggtaacgtccccaagaaaacctcgaactcccagaagtacaaaacaaaaagaaaaaatccccaaacttctcaaagtagactctttaaatttacaaaactctagccagttggataactctgtatcagatgatagtcccatctttttttcagatccaggctttgaaagttgttactcacttgaagatagtttatctcctgaacataattataattttgatattaacacaataggtcagactggattttgtagcttttattctggaagtcagtttgtcccagctgatcagaatttgcctcagaagttcctaagtgatgctgttcaggatctttttccaggacaagctatagaaaaaaatgagtttttaagtcatgacaaccagaaatgtgatgaagacaagcatcataccacagactcagcctcatggattagatctggtactttaagtcctgaaatttttgagaagtcaaccatagatagcaatgagaatcgtcgccacaaccagtggaaaaatagctttcatcctctaacaactcggtctaactcaataatggattctttctgtgttcagcaggcagaagactgtctaagtgaaaaatctagattgaataggagttcagtaagcaaagaagtgtttcttagcctcccacagccaaacaattcagactggattcaaggtcacaccagaaaagaaatgggacagtctcttgactcagccaatacctcttttactgcaatactctcctcccctgatggtgaacttgtagacgtggcctgtgaagatttagaactgtatgtttcaagaaacaatgatatgttgacaccaactcctgatagttcaccaagatctactagctctccttcacaatctaaaaatggcagcttcacccctcgaactgctaacattctgaaaccacttatgtcccccccaagtagggaagaaattatggcaactttgttggatcatgacctgtctgagactatttaccaggaaccattttgcagtaatccttctgatgtaccagaaaagcccag

SEQ ID NO: 30564 - DNA, 139 bp, Homo sapiens
  MAP TO AF019413.1; EXPRESSED IN FETAL LIVER, SIGNAL = 2.6; EXPRESSED IN ADULT LIVER, SIGNAL = 2.3; NT HIT: AF019413.1, EVALUE 7.00e-73; EST_HUMAN HIT: BF346843.1, EVALUE 6.00e-22; SWISSPROT HIT: P01028, EVALUE 1.00e-03
ccaaggggttgagttcatagaccagctcctctctatggatggccccttccttctgtctcagggaaaacatggttgtgaggtcacacaggactacagcctgccctgctagcgcagactcccccagaactttgagtttcaa

SEQ ID NO: 30565 - DNA, 106 bp, Homo sapiens
  MAP TO AC007124.1; EXPRESSED IN ADULT LIVER, SIGNAL = 1.1; EST_HUMAN HIT: AI862242.1, EVALUE 3.40e-01; NT HIT: AF196779.1, EVALUE 9.00e-01
cacacaacctgagaaagatctcaaagatgatgagaaaagaggaagaaagagtgggtgaagaaaagctgcagatcagagctcaatatgcagccctcaatggtgcact

SEQ ID NO: 30566 - DNA, 174 bp, Homo sapiens
  MAP TO AC007156.2; EXPRESSED IN ADULT LIVER, SIGNAL = 1.4; NT HIT: AF026272.1, EVALUE 6.00e-03; SWISSPROT HIT: P70402, EVALUE 1.00e+00; EST_HUMAN HIT: BF240915.1, EVALUE 6.00e-01
agcagatgtagtcagagaacgcaagagaataaaggccctgatgtgggaagaggcatcgcggagcaggaacaggtcaaagagcttgaagcaggagggctctgttggtgcagggctaatggtggtgtccaagatgttcttgaaggacccagtaagcatgaaataaaaatcaagaga

SEQ ID NO: 30567 - DNA, 114 bp, Homo sapiens
  MAP TO AC008024.1; EXPRESSED IN ADULT LIVER, SIGNAL = 1.1; EXPRESSED IN FETAL LIVER, SIGNAL = 1.4; EXPRESSED IN HBL100, SIGNAL = 0.9; EXPRESSED IN HELA, SIGNAL = 2.9; EXPRESSED IN LUNG, SIGNAL = 0.88; NT HIT: AF124526.1, EVALUE 2.10e-01; EST_HUMAN HIT: AA917635.1, EVALUE 1.00e+00
aaaaaagtcaacaacaacaaaaatgtcaacaacaacaaagtagcctctgaaataaatgtcttcgttaatccctttccaacaataaatcgcgttctgagtgttcaggctaacact

SEQ ID NO: 30568 - DNA, 143 bp, Homo sapiens
  MAP TO AJ009614.1; EXPRESSED IN BONE MARROW, SIGNAL = 1.1; EXPRESSED IN LUNG, SIGNAL = 1.4; EXPRESSED IN HELA, SIGNAL = 1.2; EXPRESSED IN PLACENTA, SIGNAL = 1.2; EXPRESSED IN HBL100, SIGNAL = 0.95; EXPRESSED IN FETAL LIVER, SIGNAL = 1.2; EXPRESSED IN ADULT LIVER, SIGNAL = 1.2; NT HIT: AF034374.1, EVALUE 3.20e-01; EST_HUMAN HIT: BE840049.1, EVALUE 8.00e-03; SWISSPROT HIT: Q07175, EVALUE 1.30e+00
gctcggtgtctccctcagtttcctgccttgcatccaacttcaaacaggcaggttccctggagaacaagcccatcgccatcaaatccatgtctgggctctgggtgggggtcagcgggaccccacgggcagggtctccgccatgg

SEQ ID NO: 30569 - DNA, 307 bp, Homo sapiens
  MAP TO AL021326.1; EXPRESSED IN ADULT LIVER, SIGNAL = 0.96; EST_HUMAN HIT: AI033796.1, EVALUE 4.40e+00; NT HIT: X81477.1, EVALUE 7.50e-01; SWISSPROT HIT: P75439, EVALUE 3.20e+00
gtgaagtctgtttcattggaaaggctgacttaatggaatttaatcttcaatgtaattgagtttaatctcatgtttacctcgaaataacatggtataaatgtatatcacctcgatcagtgctgtataggctaaagtggacagattccaatctttattgtccttattatttgagatggcacgaagtagagcaggattaaaggtataaacgtagctatacaaacaaatgggcagaaattaggaagtggaggtagtattatgacatccatgcctagtagttagtgccttacaggggaaagcatgaaaagaa

SEQ ID NO: 30570 - DNA, 114 bp, Homo sapiens
  MAP TO AC007981.31; EXPRESSED IN ADULT LIVER, SIGNAL = 2.2; EXPRESSED IN PLACENTA, SIGNAL = 1.2; SWISSPROT HIT: P06322, EVALUE 7.10e+00; NT HIT: gi11421595, EVALUE 7.00e-51; EST_HUMAN HIT: BE717028.1, EVALUE 1.00e-47
tgtttctctccctcgtaggtgtggtgtcagcacagcggcaggtcaccgttcaggaaggacccttgtaccgcacggagggctcccacatcactatctggtgcaatgtgagtggct

SEQ ID NO: 30571 - DNA, 282 bp, Homo sapiens
  MAP TO AC007455.7; EXPRESSED IN LUNG, SIGNAL = 0.59; EXPRESSED IN PLACENTA, SIGNAL = 0.75; EXPRESSED IN BT474, SIGNAL = 0.66; EXPRESSED IN BONE MARROW, SIGNAL = 0.75; EXPRESSED IN HBL100, SIGNAL = 1.1; EXPRESSED IN FETAL LIVER, SIGNAL = 0.6; EXPRESSED IN ADULT LIVER, SIGNAL = 0.71; SWISSPROT HIT: P02447, EVALUE 2.00e-23; EST_HUMAN HIT: BE887504.1, EVALUE 8.00e-20; NT HIT: D86424.1, EVALUE 2.00e-50
tcgagacaccaacagacttctctcaactcaacaaaaacccacctcccattgccatgtattgctgtgctctccgctcctgcagcgtccccaccggccctgccaccaccttctgctcatttgataaaagctgccgctgtggagtctgcctacccagcacctgcccacatgagatcagcctccttcagcccatctgctgtgacacctgccccccaccctgctgcaagcctgatacctatgtgccaacttgctggctgctcaacaactgtcacccgactcccggac

SEQ ID NO: 30572 - DNA, 245 bp, Homo sapiens
  MAP TO AB026898.1; EXPRESSED IN ADULT LIVER, SIGNAL = 1.1; EXPRESSED IN LUNG, SIGNAL =   1; EST_HUMAN HIT: Z45123.1, EVALUE 2.20e-01; NT HIT: AB026898.1, EVALUE 0.00e+00; SWISSPROT HIT: P34804, EVALUE 8.10e-02
atgagccccaccactgtgcagtggcttgggtgaagaaccacactttcaacctgagtgctgctgaacagctggtactgagcgtgcccctggacactgcaggtcacccagagccctgcctcatgttccggccaccccccgccaatgccagcctgcaggacatcctcagccaccgcttcaatgagacgcagccttgtgatatgggctgggaatatcctgagaacaggctcccatccctgaagaatgag

SEQ ID NO: 30573 - DNA, 175 bp, Homo sapiens
  MAP TO AC006559.6; EXPRESSED IN PLACENTA, SIGNAL = 0.94; EXPRESSED IN LUNG, SIGNAL = 0.59; EXPRESSED IN HELA, SIGNAL = 1.1; EXPRESSED IN BT474, SIGNAL = 0.98; EXPRESSED IN FETAL LIVER, SIGNAL = 0.64; EXPRESSED IN ADULT LIVER, SIGNAL = 0.79; EST_HUMAN HIT: BE867703.1, EVALUE 3.00e-86
gtatgaaattgaaggctgtgaagtgatttgggccattaaagataaagctatagggaatactttcttcgatgcaggagcagctgaattcttgacttcaaagctcattgctgaaaaatcagaggctaaaattgcacataaaagaaccagatatacaactgaaggtaagtgtagcacc

SEQ ID NO: 30574 - DNA, 169 bp, Homo sapiens
  MAP TO AC009637.2; EXPRESSED IN ADULT LIVER, SIGNAL = 1.1; EXPRESSED IN HBL100, SIGNAL = 2.4; EST_HUMAN HIT: BF327331.1, EVALUE 5.80e-01; NT HIT: gi4759025, EVALUE 3.30e-01; SWISSPROT HIT: P02717, EVALUE 3.80e+00
ggtctgcactgggcagccaaaggcgattcggccaccaagtgtgattctggcctcattcagaagtggatgctaaacaatacaccctttcaccagcagcccatcacatgggcatcaggagatgggggcgagtgatgtgccagccttctagactggcaggcctggggggcag

SEQ ID NO: 30575 - DNA, 106 bp, Homo sapiens
  MAP TO AC009430.1; EXPRESSED IN ADULT LIVER, SIGNAL =   1; EXPRESSED IN LUNG, SIGNAL = 1.2; SWISSPROT HIT: P38321, EVALUE 9.10e+00; EST_HUMAN HIT: AV657627.1, EVALUE 8.50e-02; NT HIT: AJ403242.1, EVALUE 3.60e+00
  unsure 57
  unsure 63
ttagtgacaccatcatttctacacagaaacacaaactcattcatgctgttgccacantttctngttagcgacaccatcacacttctacacagaaacacattttatt

SEQ ID NO: 30576 - DNA, 205 bp, Homo sapiens
  MAP TO AC007968.2; EXPRESSED IN ADULT LIVER, SIGNAL = 1.1; EXPRESSED IN HELA, SIGNAL = 1.5; NT HIT: Y07848.1, EVALUE 2.60e-02; SWISSPROT HIT: P00686, EVALUE 1.20e+00; EST_HUMAN HIT: AI740471.1, EVALUE 2.80e+00
ttatctcaacagctgcaggtacttgaacctcagcttccacagtgtccacagcctcttgaacaatgaaagtggaaattatcagagaaacaaaccatggctgaatgcagttgagtgctctgtaattacatgccagtgttgccatttggctgctggtgtagtctcctgtgggcacaggtgccataaatgctcacacacacccaatcaa

SEQ ID NO: 30577 - DNA, 311 bp, Homo sapiens
  MAP TO AL021395.14; EXPRESSED IN ADULT LIVER, SIGNAL = 1.1; SWISSPROT HIT: Q03376, EVALUE 2.20e-01; NT HIT: U62771.1, EVALUE 1.60e-01; EST_HUMAN HIT: AA096147.1, EVALUE 2.00e-01
gaaggagggacaccccagtaaacaacatggatttagccacactctaggaaggcttctagatgcacttgggcaaggcgatggttcccagacagcactccacatcagcactggacagcagcttgaggagctggatggggtctgggctccagaatgcagctggaatgagacagctgaggaggattttggagcatggcacccggaagttcataccccagcagagtggccacgtatccactcatgccttcatggggatcatttctgtgaggtgcagggttttgaaggtcattatgtgctggatgcctgagctatgt

SEQ ID NO: 30578 - DNA, 168 bp, Homo sapiens
  MAP TO AC007217.2; EXPRESSED IN PLACENTA, SIGNAL = 0.68; EXPRESSED IN ADULT LIVER, SIGNAL = 0.67; EXPRESSED IN LUNG, SIGNAL = 0.62; NT HIT: M54964.1, EVALUE 8.30e-02; SWISSPROT HIT: P45243, EVALUE 1.70e+00; EST_HUMAN HIT: BE733545.1, EVALUE 1.50e-01
aggcagcagcaggtgctgttgggtgttctggttcttgttgctgtaggcatccatgctgatgggattgataacactagtgggctgcggaccacagtctctgagcccagtagggctccaagccaggacttcagactgtgagatgagggtgatgctacagcccagccccca

SEQ ID NO: 30579 - DNA, 378 bp, Homo sapiens
  MAP TO AC007556.2; EXPRESSED IN PLACENTA, SIGNAL = 0.71; EXPRESSED IN BT474, SIGNAL = 0.64; EXPRESSED IN HELA, SIGNAL = 1.4; EXPRESSED IN ADULT LIVER, SIGNAL = 0.88; EST_HUMAN HIT: BE765273.1, EVALUE 0.00e+00; NT HIT: gi6806918, EVALUE 0.00e+00; SWISSPROT HIT: P98164, EVALUE 7.00e-84
caaccaggcctcctggtatgtgccactcagatgaatttcagtgccaagaagatggtatctgcatcccgaacttctgggaatgtgatgggcatccagactgcctctatggatctgatgagcacaatgcctgtgtccccaagacttgcccttcatcatatttccactgtgacaacggaaactgcatccacagggcatggctctgtgatcgggacaatgactgcggggatatgagtgatgagaaggactgccctactcagccctttcgctgtcctagttggcaatggcagtgtcttggccataacatctgtgtgaatctgagtgtagtgtgtgatggcatctttgactgccccaatgggacagatgagtccccactttgca

SEQ ID NO: 30580 - DNA, 247 bp, Homo sapiens
  MAP TO AB016897.1; EXPRESSED IN PLACENTA, SIGNAL = 0.96; EXPRESSED IN BT474, SIGNAL =   1; EXPRESSED IN FETAL LIVER, SIGNAL = 0.84; EXPRESSED IN HELA, SIGNAL = 0.64; EXPRESSED IN ADULT LIVER, SIGNAL = 0.78; EXPRESSED IN HBL100, SIGNAL = 0.82; EXPRESSED IN LUNG, SIGNAL = 0.95; NT HIT: AB011399.1, EVALUE 0.00e+00; EST_HUMAN HIT: BF701766.1, EVALUE 8.80e-01; SWISSPROT HIT: P55196, EVALUE 3.00e-43
ttcagccccatcactgtgaccttaccaacatggatggagtggtcactgtgacgcccagaagtatggacgcagaaacctacgtggaaggccagcgcatctcagaaaccaccatgctgcagagtggcatgaaagtgcagtttggggcgtcccatgtatttaagtttgtggaccccagtcaggatcatgctcttgcaaaaagatctgtggatggaggcctgatggttaagggcccaagacataaacctgg

SEQ ID NO: 30581 - DNA, 238 bp, Homo sapiens
  MAP TO AC007344.2; EXPRESSED IN ADULT LIVER, SIGNAL = 0.74; EXPRESSED IN PLACENTA, SIGNAL = 0.59; EXPRESSED IN LUNG, SIGNAL = 0.64; EXPRESSED IN HELA, SIGNAL = 0.81; EXPRESSED IN FETAL LIVER, SIGNAL = 0.6; NT HIT: M15861.1, EVALUE 1.20e-01; NT HIT: M15861.1, EVALUE 1.20e-01; SWISSPROT HIT: P35568, EVALUE 4.40e+00; NT HIT: M15861.1, EVALUE 1.20e-01
ctttttccccatgtgcatagaaagacttgtagctgtttatctctaagcatgccttctcctgtatctctcgcatcctcagcaacttctccccgtgattcaagatctatttgttgctttgctctcattctcatggcttcaaaaaaaaaaaaagcaccttcctgggcttcattgcctgctagtccccagaacctcagatggaacagtaagtcagggggaagacatagatgcttgtcaaaac

SEQ ID NO: 30582 - DNA, 175 bp, Homo sapiens
  MAP TO AC000029.14; EXPRESSED IN PLACENTA, SIGNAL = 0.72; EXPRESSED IN HELA, SIGNAL = 1.2; EXPRESSED IN ADULT LIVER, SIGNAL = 0.78; EST_HUMAN HIT: AA781836.1, EVALUE 3.00e-94; SWISSPROT HIT: O62732, EVALUE 2.20e+00
tcatgctcaaggtccttggcgtcatctactttgcctgaagcagctgggctggggccgtccaggaggaggcagagctgctgcttctccaggatcatcatgaacagggacaaagcgtttcctactgggagacccatgggcctgggaccaaggattacattaataaaaatgttccctt

SEQ ID NO: 30583 - DNA, 136 bp, Homo sapiens
  MAP TO AC005076.2; EXPRESSED IN ADULT LIVER, SIGNAL = 0.65; EST_HUMAN HIT: AW205043.1, EVALUE 1.00e-59; SWISSPROT HIT: P10541, EVALUE 1.30e+00; NT HIT: AF202144.1, EVALUE 1.00e-59
atttgagtatgagcacagtggaagaggattctgacacagtaacagtagaaactgtgaactctgtgactttgactcaggacacagaagggaatctcattcttcactgccctcagaatggtaggagaacttgctgaca

SEQ ID NO: 30584 - DNA, 207 bp, Homo sapiens
  MAP TO AC005520.2; EXPRESSED IN FETAL LIVER, SIGNAL = 0.63; EXPRESSED IN ADULT LIVER, SIGNAL =   1; NT HIT: AL163218.2, EVALUE 3.00e-11; SWISSPROT HIT: P76113, EVALUE 1.90e-01; EST_HUMAN HIT: BF669487.1, EVALUE 9.00e-16
aaacatgctcagaacacttatggctgggcaaaatcatctggcaacacagtacaccgtagagtaccagttgtttacccttatggtcattgtcaaaataaacatccactccagctgggcatgattcacggagttgttcagccacatacggtggctgaccaggagctacagcttgttgccgctgcccagcatctcgagagagtgtcatac

SEQ ID NO: 30585 - DNA, 205 bp, Homo sapiens
  MAP TO AC005060.2; EXPRESSED IN ADULT LIVER, SIGNAL = 0.73; SWISSPROT HIT: P21440, EVALUE 6.00e-24; EST_HUMAN HIT: BF313560.1, EVALUE 3.00e-12; NT HIT: M60041.1, EVALUE 5.00e-13
cagggagaccttcaataaaagaatggatatttgctgcatttgcggcttctttgatctcatctaatggcaccacacggctgttgtcaccataggcgatgttctcagcaatgctgcagttgaagagcacaggctcttgaggaacgattgctatttgggaacggagccactgtacattcaattcttttgcatccacaccatcaaacag

SEQ ID NO: 30586 - DNA, 199 bp, Homo sapiens
  MAP TO AC007955.3; EXPRESSED IN PLACENTA, SIGNAL =   2; EXPRESSED IN ADULT LIVER, SIGNAL = 1.9; EXPRESSED IN FETAL LIVER, SIGNAL = 1.1; EXPRESSED IN LUNG, SIGNAL = 1.2; EXPRESSED IN HELA, SIGNAL = 0.94; NT HIT: L35079.1, EVALUE 2.00e-03; SWISSPROT HIT: P34584, EVALUE 6.30e+00
actaacccttcttgcatttatgggtaggccattattgcatttatggatattactttatattatttgtatatttctttatctctctctgtcactagactgtaaatatcacatctgccttgttcatccactgcttccccagcgctttgggagaggcaatgtgcttctcagtcattctttgctgaatgaaaaaatggatgaa

SEQ ID NO: 30587 - DNA, 110 bp, Homo sapiens
  MAP TO AC008278.1; EXPRESSED IN FETAL LIVER, SIGNAL = 0.76; EXPRESSED IN BT474, SIGNAL = 0.74; EXPRESSED IN HELA, SIGNAL = 0.6; EXPRESSED IN ADULT LIVER, SIGNAL = 0.66; NT HIT: AF242433.1, EVALUE 2.40e-01; EST_HUMAN HIT: BE151247.1, EVALUE 9.60e-01; SWISSPROT HIT: P25382, EVALUE 4.00e+00
tcccatgagatcaaacaccctcacagttcctgtgctttcggcataggccagtagggtacaatcgtaactccatgctacccgtctccactggggtttcgggtctttcggaa

SEQ ID NO: 30588 - DNA, 268 bp, Homo sapiens
  MAP TO AC009491.2; EXPRESSED IN ADULT LIVER, SIGNAL = 0.94; SWISSPROT HIT: P03330, EVALUE 7.00e-13; NT HIT: M10976.1, EVALUE 3.00e-92; EST_HUMAN HIT: AI521435.1, EVALUE 5.00e-60
cttggggattttggtaattcgccgatgcatgttcctctagccacttaattgctgcttggggcactctctgcctttcatctgtgttaaagaggaacatgagctactggtggcaatcagcccaagtggggttatgggtctagataatagtttggagcaaataaattagagcttgtagcttttcagtataggatggggtattgtctttccagttgagaaggttggcagaggtgaagggctggtacacaaaaacatacctctccaccatgtg

SEQ ID NO: 30589 - DNA, 122 bp, Homo sapiens
  MAP TO AC008124.8; EXPRESSED IN ADULT LIVER, SIGNAL = 1.7; EXPRESSED IN LUNG, SIGNAL = 1.1; NT HIT: D17428.1, EVALUE 9.10e-01; SWISSPROT HIT: P45932, EVALUE 5.20e+00
tgaagggtaagactgaaccaggaggagtggtgaatgtttacctaagaagtaatgagacccctgttcctgttttctacctgggtcagctggtcagctacctgttccctaccctggtgggtgac

SEQ ID NO: 30590 - DNA, 152 bp, Homo sapiens
  MAP TO AL022067.1; EXPRESSED IN BT474, SIGNAL = 0.95; EXPRESSED IN FETAL LIVER, SIGNAL = 1.1; EXPRESSED IN LUNG, SIGNAL = 1.3; EXPRESSED IN BONE MARROW, SIGNAL = 1.2; EXPRESSED IN PLACENTA, SIGNAL = 7.1; EXPRESSED IN ADULT LIVER, SIGNAL = 1.6; EXPRESSED IN HELA, SIGNAL = 1.2; EXPRESSED IN HBL100, SIGNAL = 1.1; NT HIT: gi4759007, EVALUE 3.00e-54; EST_HUMAN HIT: AU138097.1, EVALUE 4.00e-54; SWISSPROT HIT: P10269, EVALUE 5.00e-10
tggtcaccttgcaagatcaacttaacttcctagcatcagtagtccttcaaaattgaagagctttagacttgctaacctctgaaagagggggaagctgtttatttttaggggaagaatgttgttattatgttattttagcggaagaatgttgt

SEQ ID NO: 30591 - DNA, 220 bp, Homo sapiens
  MAP TO AL009175.1; EXPRESSED IN PLACENTA, SIGNAL = 0.89; EXPRESSED IN BT474, SIGNAL = 0.9; EXPRESSED IN ADULT LIVER, SIGNAL = 1.5; EXPRESSED IN FETAL LIVER, SIGNAL = 0.93; EXPRESSED IN LUNG, SIGNAL = 0.94; NT HIT: X89969.1, EVALUE 1.10e-01; EST_HUMAN HIT: BE173435.1, EVALUE 6.00e-04; SWISSPROT HIT: P31316, EVALUE 4.70e+00
attgcttgcagaagtgtgctggctgtgggtacgttcttctgtgttcacattttgcaaggagcggaggatggtgatgatgctgttgataacttactatgtgctaggcattgcttcaaatactttcatttctatgttacaggtaaagaaaatgagttttagagtaacttctgtaaaattactgactgaggtcatgctgctagtaaaaggcacaactacaatt

SEQ ID NO: 30592 - DNA, 1767 bp, Homo sapiens
  MAP TO AC007245.3; EXPRESSED IN HELA, SIGNAL = 0.67; EXPRESSED IN PLACENTA, SIGNAL = 0.69; EXPRESSED IN BT474, SIGNAL = 0.75; EXPRESSED IN HBL100, SIGNAL = 0.81; EXPRESSED IN FETAL LIVER, SIGNAL = 0.58; EXPRESSED IN LUNG, SIGNAL = 0.73; EXPRESSED IN BONE MARROW, SIGNAL = 0.88; EXPRESSED IN ADULT LIVER, SIGNAL = 0.68; SWISSPROT HIT: Q9ZM58, EVALUE 9.60e-01; EST_HUMAN HIT: W26109.1, EVALUE 1.00e-102; NT HIT: gi8923174, EVALUE 6.20e-02
gtctatgctacagaccagggtaagtacctcgtctttgtcagcctctatttcttggtacaacaatccatatctctggttagcaatttcatcttcagataaatctgagttgttgatgtcctggtctcgggaactagcagaactctcagtgctagcattccaggaggtccccaaaatcaatggtcttgctatctcctggctttgttcccagcagctagcaatggcttgttccctacaatcacctgctagtaagtccaccttcagttcttccttgtgctcaactacatctgaatgtgtccagctattatctaagccttctgtatctctgataggccagtggttaatagaatccagacaactggcaaatccacttgcttggccatctggtataccagagaatcctgttatatccaaattattcattgctgaatccaagcttggctgccagatttgacctggatctgttccccaagagtctatctctgcaattcttggcaagttaacagtatgactacagttctcagttactgttctttcagacccttctattagtgaactttctgccttacatgaacataaatctcttctgtttgcatctcttcccagagaataattaaggtcagtcctagactgagcttctacttcaagttttattgataaaacagcctgatttttatccctgtcacctacaagagcatttaacacagtctcacactgaatttcttcagcatctgtactgtcttgtgctgggtaaaatatcatatcatggttgggagtgtctattgcatttttctttatgtcttttctagtcaaatcccatccctcagggctgccatcttcaatattagatacagagtaggtctggagagatggattcaagatatctgggtgattggcaggtttggctccaaagccttctatcattccacaattattgattaccttttgaattccatcatgtagaccttggtctctgtcactaagttcttttgccatatctcctccttccatgtccttttctaataggtcagttttctcaaaataattttcattggcgtttgtactttccttataccctgctcttagatcttttctagtttccacttcattaatttttaaggtcttatggtcttcctttcctatggtattaagaagttctaccactctgtttcctgtcctttcacatgctttctcttcaaattcctctgtaccttctagtgtcttgatatcaatagctccagtgtctaccttttgacacgcctccacacctgcccacagagaatcttccatcttctgtttctcttcctcttcatctgacttcttcatatcttcatgactttctttgaacaggccagctgtgtccatggctggcatgtctgagtcaagtgggtcatacagctgctccatctccacacaagcagcaatggcaactccagcctccggcgcaggctttgggggcagttgttcatttccacctggaaaggctggccccggggcatgctcactctcttcagctacagtgggccagtcagcagacgaaagcaggctggtggataatcttatgtcttgctctgtttcggagggacatgcagagtcttctccaaacccacctgaggtaacttcttggctgaccctgtctgtactagcgtcagggccccaagtaaatgcacctatatcattttgagatctttgaatttcttcggccaacccactgtctggagtttcctccatgatcaggttacacaaggaaagactttctgaagagtcagt

SEQ ID NO: 30593 - DNA, 174 bp, Homo sapiens
  MAP TO AC010087.2; EXPRESSED IN ADULT LIVER, SIGNAL =   1; EST_HUMAN HIT: AI290232.1, EVALUE 4.10e-01; SWISSPROT HIT: Q04833, EVALUE 1.70e+00
gataaaggtctcatcactgggcctttggctgctcctacattgggcatatgggtcatctttgcagttgtcacattcctgctgccctctggggaaagcctggtggctcttgctgaggtgctggaagcacctccaggtacaagctgcaacaccctcctccaccctgccaacagcccc

SEQ ID NO: 30594 - DNA, 82 bp, Homo sapiens
  MAP TO AJ006997.1; EXPRESSED IN LUNG, SIGNAL = 0.64; EXPRESSED IN ADULT LIVER, SIGNAL = 0.88; EST_HUMAN HIT: BF212687.1, EVALUE 2.50e-01; NT HIT: AL163209.2, EVALUE 4.00e-39
agttgtcacaaagaatgatagaattgaagtaagtcaagttctgtttcttcgtgtttacaatgtgctgccattatttattttg

SEQ ID NO: 30595 - DNA, 124 bp, Homo sapiens
  MAP TO AP000175.1; EXPRESSED IN ADULT LIVER, SIGNAL = 6.1; SWISSPROT HIT: Q58133, EVALUE 5.20e+00; NT HIT: gi11419745, EVALUE 5.00e-12; EST_HUMAN HIT: AA430310.1, EVALUE 3.00e-13
tcttgacttaataagaaaaagatcattgactgaggttgctaagacctatggtaaagatgaatcttctatccatgaaattgtgaagaaagaaaaagaagtgtgtgctagttttgctgtttcagct

SEQ ID NO: 30596 - DNA, 952 bp, Homo sapiens
  MAP TO AL096755.1; EXPRESSED IN PLACENTA, SIGNAL = 1.9; EXPRESSED IN ADULT LIVER, SIGNAL = 0.66; SWISSPROT HIT: Q02817, EVALUE 6.00e-10; EST_HUMAN HIT: AA385088.1, EVALUE 4.00e-02; NT HIT: AF005355.1, EVALUE 2.40e+00
tcatgtctccacccggcacacactgagctgggcaggaatgacaaggatataggcacaggagacccagtcccagcccagggagcgctcagacagacggggcgtcttggaggtgcatagacatttctgcctggatgccactccagggtggatgtgctcgtcccctactgccactctgccccgtgttccagcagccgagtaacttcgggaaatcccagtcagtgctgtcagaaacgcaacatgcatgccctttactgtcctgtttagaaaatgagcacctgtgtcccctccaggtggatgctgggcctgcagaagctctcctgggggtgtccggtggtgggtcctggtagccacagcctctgcttcctcagcgtccccttcgtttgcttgctccaggtctgggtcggttgcagttgacagtagcggggagggggtggctgcgtgttgatagagacaggcactagaagtcatctttgggggagtggcctcgcagagggggtggctgcttgttgatagagacgggcacgagaaatcgtctttggtggggagtggcctcgcggagggggtggctgcttgttgatagagacgggcacgagaagtcgtctttggggggagtggcctcgcagaggggttgttgatagagacaggcaggagaagtcgtctttgggggggtgtggcctcacggagggggtggctgcgtgttgatagagacaggcacgagaagttgtctttggtggggagtggcctcgcagagggggtggctgcttgttgatagagacaggcatgagaagtcgtctttggggggagtggcctcgcagagggggtggctgcttgttgatagagacaggcacgagaagtcatctttggtggggagtggcctcggggagggggtgactgcttgttgatagagacgggcacgagaagttggtggggagtggcctcgcggagggggtgg

SEQ ID NO: 30597 - DNA, 139 bp, Homo sapiens
  MAP TO AP000159.1; EXPRESSED IN ADULT LIVER, SIGNAL = 0.67; NT HIT: AF213884.1, EVALUE 4.90e+00; SWISSPROT HIT: Q61982, EVALUE 1.00e-02
accgcagaatggctcgtacgaggccgtggggaaccaggatggcaacaacaaaaaatgggttctccgcctccaggagaggcaaggcaagacctggtgacagcagccttgtctgcattctgtaattggcagcctcagacat

SEQ ID NO: 30598 - DNA, 145 bp, Homo sapiens
  MAP TO AC010876.1; EXPRESSED IN LUNG, SIGNAL = 0.95; EXPRESSED IN ADULT LIVER, SIGNAL = 0.9; EXPRESSED IN HELA, SIGNAL = 1.1; NT HIT: gi11545921, EVALUE 2.00e-76; SWISSPROT HIT: P28188, EVALUE 1.70e+00; EST_HUMAN HIT: BF686405.1, EVALUE 3.00e-76
agcctgttaactcttggacaagttcattgtttcctgtttgacgaagaacattcagaaatgcagagaaccagttttctttctgcacaatcctttttagtagctctcttacacctgattcatttccattgttttctgcagcagcaat

SEQ ID NO: 30599 - DNA, 107 bp, Homo sapiens
  MAP TO AF130342.1; EXPRESSED IN ADULT LIVER, SIGNAL = 0.87; NT HIT: AE000869.1, EVALUE 7.80e-01
acagaaagaatggcaaatacacaggtcctgaagaggcggacaacagaagaagtaacaaggaggtcagtatacctgtaactgggtacaagtgggagagggaaatagga

SEQ ID NO: 30600 - DNA, 160 bp, Homo sapiens
  MAP TO AC010879.1; EXPRESSED IN ADULT LIVER, SIGNAL = 0.9; NT HIT: gi11418236, EVALUE 2.00e-80; EST_HUMAN HIT: BE465446.1, EVALUE 2.00e-80; SWISSPROT HIT: Q63880, EVALUE 7.00e-10
gtattcccagacggtagttaatggtgataacgatgacgttcccatagctggccaaaatgctgccatcaatcatgttaccggttccctccatgtaagatcccccatggatatagaccataacaggcttcttactgttctgttcatgaatatctggaaaaaa

SEQ ID NO: 30601 - DNA, 156 bp, Homo sapiens
  MAP TO AC009298.1; EXPRESSED IN HBL100, SIGNAL = 0.68; EXPRESSED IN BONE MARROW, SIGNAL = 0.73; EXPRESSED IN ADULT LIVER, SIGNAL = 0.7; EXPRESSED IN BT474, SIGNAL = 0.87; EXPRESSED IN FETAL LIVER, SIGNAL = 0.59; EST_HUMAN HIT: BE780987.1, EVALUE 2.00e-77; NT HIT: S72459.1, EVALUE 1.00e-77; SWISSPROT HIT: Q01147, EVALUE 2.00e-21
gtatctatgccagcagctcatgcaacatcatctgctcccaccgtaactctagtacagctgcccaatgggcagacagttcaagtccatggagtcattcaggcggcccagccatcagttattcagtctccacaagtccaaacagttcaggtatgtgta

SEQ ID NO: 30602 - DNA, 92 bp, Homo sapiens
  MAP TO AC009299.1; EXPRESSED IN BONE MARROW, SIGNAL = 0.72; EXPRESSED IN FETAL LIVER, SIGNAL = 0.68; EXPRESSED IN ADULT LIVER, SIGNAL = 0.68; NT HIT: gi4759249, EVALUE 4.00e-45; EST_HUMAN HIT: AU135426.1, EVALUE 8.00e-45
gtttgcttaagtggtctttctgtgcttttgctagcatgcatattttatgaaattcttctttcagatcccagaaagtcttctctatattaccc

SEQ ID NO: 30603 - DNA, 134 bp, Homo sapiens
  MAP TO AL034424.9; EXPRESSED IN PLACENTA, SIGNAL = 0.7; EXPRESSED IN ADULT LIVER, SIGNAL = 0.87; SWISSPROT HIT: Q14541, EVALUE 1.00e-19; EST_HUMAN HIT: AL449786.1, EVALUE 3.00e-67; NT HIT: AF154121.1, EVALUE 6.00e-70
atgatggtcgccgtgttgctggcaaactcagtgaagaaggcgatgaccacagtgatgagcagcacagccagggcggggggcacattctccagggggtgcagctgcccaccaatccatacagacagccccgattc

SEQ ID NO: 30604 - DNA, 145 bp, Homo sapiens
  MAP TO AF064863.1; EXPRESSED IN LUNG, SIGNAL =   1; EXPRESSED IN BONE MARROW, SIGNAL =   1; EXPRESSED IN HBL100, SIGNAL =   1; EXPRESSED IN PLACENTA, SIGNAL = 0.91; EXPRESSED IN ADULT LIVER, SIGNAL =   1; EST_HUMAN HIT: BF206282.1, EVALUE 8.00e-03; NT HIT: AL163283.2, EVALUE 2.00e-76; SWISSPROT HIT: Q10343, EVALUE 6.70e+00
ctcctccttcccctcccttgtgctccatgttccccagtctcatcaagcaattctacctgagaggccttaagatctgatttgaacaccacggccttgatgactttattagcaggcggttcaaggaccacactgggaggaaagaaaa

SEQ ID NO: 30605 - DNA, 88 bp, Homo sapiens
  MAP TO AC009492.2; EXPRESSED IN ADULT LIVER, SIGNAL =  13; EXPRESSED IN FETAL LIVER, SIGNAL =   1; EXPRESSED IN HBL100, SIGNAL = 0.98; EST_HUMAN HIT: AI174287.1, EVALUE 1.10e+00
aaaagaccatttgaaaccattcctgttctacatctacatcttgggctggatgaaccttgaacatgcatctctcaattccaacttgagc

SEQ ID NO: 30606 - DNA, 523 bp, Homo sapiens
  MAP TO AL030996.1; EXPRESSED IN BT474, SIGNAL = 0.96; EXPRESSED IN FETAL LIVER, SIGNAL = 0.95; EXPRESSED IN ADULT LIVER, SIGNAL = 1.2; EXPRESSED IN LUNG, SIGNAL =   1; EXPRESSED IN BONE MARROW, SIGNAL = 1.1; EXPRESSED IN HELA, SIGNAL = 1.3; EXPRESSED IN HBL100, SIGNAL = 1.1; SWISSPROT HIT: Q9ZJP4, EVALUE 8.70e-01; EST_HUMAN HIT: AW905887.1, EVALUE 5.00e-62
tttgatttcatttcctttgctatatctctttctctggatggctccttctctctttccctttcttgagttgattttgattctgcgttggggacagtggtcttaaatttctcatctttagctttttcttccttcttgaatttttctttctctttgtcagacttcggcgttctttccttggtctctcttgctttttcatctttatttggccgctcttcctttggtttttctttaccatctttaccaagtaccctggcctctggagtagtagctggagtcttttcttttttctctttttctttctctttccctttttctttgtcattttctttaacagctttgttgcttaagaataaaaacatgggattttaacacaaataatcataaaatatatcctttgatatatgataaaatatatcataaagggtttcttactaacttcaaaaatactagaactaagggggagtcctttgaaaactaaaggacaactttaagacaaggaaaaaggaagaagtaatggtcgggt

SEQ ID NO: 30607 - DNA, 89 bp, Homo sapiens
  MAP TO AL031585.1; EXPRESSED IN PLACENTA, SIGNAL =  19; EXPRESSED IN ADULT LIVER, SIGNAL = 2.7; EXPRESSED IN BT474, SIGNAL =  15; EXPRESSED IN FETAL LIVER, SIGNAL =   3; EXPRESSED IN LUNG, SIGNAL = 4.2; EXPRESSED IN HBL100, SIGNAL =   5; EXPRESSED IN HELA, SIGNAL =  10; SWISSPROT HIT: P05783, EVALUE 1.00e-08; NT HIT: gi11434787, EVALUE 2.00e-38; EST_HUMAN HIT: BE908641.1, EVALUE 3.00e-38
agatttgggggcatctacctccacggtcaacccagagctggcaatctgggcttgtaggccttttgcttcctcttcgttgttcttcttca

SEQ ID NO: 30608 - DNA, 241 bp, Homo sapiens
  MAP TO AL035106.25; EXPRESSED IN BONE MARROW, SIGNAL = 1.2; EXPRESSED IN ADULT LIVER, SIGNAL = 0.97; EST_HUMAN HIT: BE155575.1, EVALUE 9.00e-34; NT HIT: AF241270.1, EVALUE 2.00e-04
tggtgtagacgtcttgggcacctctggctgtgggatctgaaatactgataatcccgataatgatgctgctgctgctgatgatgatgatagcaaccccacttccagtcagagctgtgtttttggcattgttcttagttcttgatccacagcctctccgcaggtctttgtcactacagagtactgctgtcgttatgcccattttacagatgtggatgcagagtctcagagaggtacagctgcc

SEQ ID NO: 30609 - DNA, 83 bp, Homo sapiens
  MAP TO AL035689.17; EXPRESSED IN FETAL LIVER, SIGNAL = 0.87; EXPRESSED IN ADULT LIVER, SIGNAL = 0.99; NT HIT: AF144623.1, EVALUE 5.70e-01; EST_HUMAN HIT: AW296073.1, EVALUE 1.00e-39
gaccctctaactgctccaaaccctccccgggagaccagttggaaagtagccatatcttaactcttctatgtgactcttcaaaa

SEQ ID NO: 30610 - DNA, 199 bp, Homo sapiens
  MAP TO AL035662.21; EXPRESSED IN BT474, SIGNAL = 1.4; EXPRESSED IN ADULT LIVER, SIGNAL = 0.9; NT HIT: AJ277783.1, EVALUE 1.80e+00; EST_HUMAN HIT: R85100.1, EVALUE 2.80e+00; SWISSPROT HIT: P16759, EVALUE 2.20e-02
gctctatgataagaatgaaatgagatatggcgggctgaacagtgtccagcaccacagccatgaaactggccgaggtcagggagtcataatgggccttgaatgccatctggagaagcgggaccttcatgtcgagggaggagtaaacagtaactactatctgatcatgtttatttctgctcaacacttattaagcacctcc

SEQ ID NO: 30611 - DNA, 594 bp, Homo sapiens
  MAP TO AC007055.3; EXPRESSED IN PLACENTA, SIGNAL = 0.69; EXPRESSED IN BT474, SIGNAL = 0.74; EXPRESSED IN BONE MARROW, SIGNAL = 0.66; EXPRESSED IN HBL100, SIGNAL = 0.9; EXPRESSED IN FETAL LIVER, SIGNAL = 0.62; EXPRESSED IN ADULT LIVER, SIGNAL = 1.1; NT HIT: AF195658.1, EVALUE 0.00e+00; SWISSPROT HIT: P15312, EVALUE 5.80e-01; EST_HUMAN HIT: AU121422.1, EVALUE 0.00e+00
gaatactacgtacttaccattctcaagtacaacatccacagccacagttgtcaggtctttagtacaagcagcctgaatgtcctcagttggggcaatgaatgtgctgagtccagtcattttgttgacataaaccattcttcccagggctacatcgaaatgccgctgccaatctgaacaacacgtgtttgactcttcagtttcagaacaagctcttgctttagattcctcactctgaaaacaaattccattttggtcacctgtggcatcttctaccggattcattaacattccactgggagagtcaagacttcctatctgttgttctgaggctctgataagaacatctgaatctttaccggtaactttagaattattatagggcaataccaaaggagtttctgatatcacacagttctctgttgtattgctgttagaatgtgttttactatttttattaaaggaattatcctgtgtggcagaatctgatgttgggatgacaccattctctgttttttcatgcttgttgttaaataacatacaaaaatcttgtgttaacacactgcacaacttgctgtctttcctactggaatctga

SEQ ID NO: 30612 - DNA, 112 bp, Homo sapiens
  MAP TO AC006979.2; EXPRESSED IN PLACENTA, SIGNAL = 0.93; EXPRESSED IN LUNG, SIGNAL = 0.65; EXPRESSED IN ADULT LIVER, SIGNAL = 0.66; EST_HUMAN HIT: AI198728.1, EVALUE 1.40e+00
tggtatgcccttggaagtggtggtgacagagccagagatgttctcttctgcaactttttttgtgacattatttttaacattagtctgggacaacctagggggaaaaaagtct

SEQ ID NO: 30613 - DNA, 1082 bp, Homo sapiens
  MAP TO AL031276.1; EXPRESSED IN BT474, SIGNAL = 1.1; EXPRESSED IN ADULT LIVER, SIGNAL = 1.1; EXPRESSED IN LUNG, SIGNAL =   2; EXPRESSED IN BONE MARROW, SIGNAL =   1; EXPRESSED IN PLACENTA, SIGNAL = 1.1; SWISSPROT HIT: Q07878, EVALUE 1.80e-01; EST_HUMAN HIT: BF362311.1, EVALUE 0.00e+00; NT HIT: AL162331.1, EVALUE 0.00e+00
ctgtagggaaatcacctgaagagtactgtctaaattcatcgatgggcactctgaactcacaaactgatattccaacttaataagggactcttgctctttggtaagaattttgtcaagtgaaacactagtagctgatcggtcgttcagtgtagctccatcagttaagtgggccacattcggtccagagacaggagactgggccctgctatcccgaaggcttcccgttggaatatcaaagctcaagttcttatgtgaagccatcaaaaggtcaaaatcagcaccatatgtctgcatggtatccaccaggagcaaaccatgaacagttagggagacttcagcatcataaggcctcttcacaaagtgagcattggtaccaaacaccttgagcacagaaatgtaccggccattgctctcaacaccaagctgcatacagttcactttaaattccgccaggaggagctgcgactccaccagaacctcgcgggtatgctgctccaacaacacaatgctctgggttaaattcattacggagtcttgcaaacttccccgctgctcctcctggggaaaaatcttttctttaatctgagtgtcagaagttttcatttctggggtggtgaggagagcaaagcaattctttagtgcagatattttatcttcattaatgtggatttttaagtctggtaagttgcctgagagcacggctcctggatatttgggatctgaagtataaatcaatcgacgctctaactgtaggtgaacgttgaacttctctaccacatgtgttggtcccacgtcaatatcctggacatgcttccaattgtctttcactcgtccaaccatgatctggaggtccataaatgacagcgagtacctctcatacatctttgtgctcattaaatgtgcttgaagctgttcttcactgaactcaactccagaaaagggaggtgttttctctccgttgctgctgcttgactcgggaggtggggtgttaggaggtgtggccaggggggtcttatattcatcatcactaaactgggtctcttcagatgctgacccatccctacttttcctcctggagttat

SEQ ID NO: 30614 - DNA, 127 bp, Homo sapiens
  MAP TO AC012113.1; EXPRESSED IN HELA, SIGNAL = 0.95; EXPRESSED IN ADULT LIVER, SIGNAL = 1.1; EXPRESSED IN BT474, SIGNAL = 0.98; EXPRESSED IN FETAL LIVER, SIGNAL = 1.1; EXPRESSED IN LUNG, SIGNAL =   1; NT HIT: AF119413.1, EVALUE 6.10e-02
tctgctgaatgatgggcaaagggggtgggcgggaagccaaatcaacaagagtttcttttactacatcctcatgcttaagaggaaacaaggtgactttctttactagcatgacatactgaccatactc

SEQ ID NO: 30615 - DNA, 107 bp, Homo sapiens
  MAP TO AL049756.16; EXPRESSED IN FETAL LIVER, SIGNAL =   1; EXPRESSED IN ADULT LIVER, SIGNAL = 1.4; SWISSPROT HIT: P08768, EVALUE 5.50e+00; EST_HUMAN HIT: BF314689.1, EVALUE 3.40e-01; NT HIT: AB033035.1, EVALUE 7.80e-01
atggttatgatgaaaaccctgaccagctactcagagaagaacctactgatgtctcagctgaagtgccaggttggccacgtttttacagctggggagatcctttccta

SEQ ID NO: 30616 - DNA, 115 bp, Homo sapiens
  MAP TO AC012072.1; EXPRESSED IN ADULT LIVER, SIGNAL = 0.97; EXPRESSED IN FETAL LIVER, SIGNAL = 1.2; EXPRESSED IN HELA, SIGNAL = 0.96; EST_HUMAN HIT: AU124317.1, EVALUE 2.40e-02; SWISSPROT HIT: Q62919, EVALUE 6.90e+00; NT HIT: gi11430241, EVALUE 1.60e-02
atagcagactgagctcccctggtttctcaagcagtgccctggctgctccttctaagcccaactgtcttgctctctgggctttagtccctttgcttccagttttatatggagcaga

SEQ ID NO: 30617 - DNA, 204 bp, Homo sapiens
  MAP TO AC009497.2; EXPRESSED IN LUNG, SIGNAL =  15; EXPRESSED IN ADULT LIVER, SIGNAL = 0.92; EXPRESSED IN BT474, SIGNAL = 1.3; NT HIT: X83957.1, EVALUE 1.00e-97; EST_HUMAN HIT: AW383901.1, EVALUE 1.00e-97; SWISSPROT HIT: gi127998, EVALUE 3.00e-04
ggcgtttcggacgcgtataacattgggttcttccagaagagacgtccactggtggaaatagtgtcgatactccaggtcactgaggatgtactggcaccttttagccagcacgtgattcatcatgtcattggggatatgaacatttgctttggtatcctcataatgttttctgtagttcaactaatatgttttaaagacaaaaat

SEQ ID NO: 30618 - DNA, 104 bp, Homo sapiens
  MAP TO AL096708.11; EXPRESSED IN ADULT LIVER, SIGNAL = 1.7; EXPRESSED IN LUNG, SIGNAL = 1.1; NT HIT: U48498.1, EVALUE 7.50e-01; EST_HUMAN HIT: BE155700.1, EVALUE 9.00e-01
aggagatgagaggagcagccgtctggaacctgtggtcacggctgttgctgctgcacagggcacacgtgaggaaatcgcgtggaatcagactatagcagaagaga

SEQ ID NO: 30619 - DNA, 205 bp, Homo sapiens
  MAP TO AC006348.2; EXPRESSED IN LUNG, SIGNAL = 2.7; EXPRESSED IN ADULT LIVER, SIGNAL = 0.99; NT HIT: AE001660.1, EVALUE 1.90e+00; SWISSPROT HIT: P36316, EVALUE 8.30e+00
ttccagtcacaaaatttggggtagggatttgtttgtatgtgtgaagtagtttgtctttagtcaaaatagtaatagtcagtatcatactccacgtaatcactggattttggagaaaattcatgtttatataggaaatcagattctccattggatgatggagttgacaccacagaggatattcaaaggctctaagaggaaaaatatc

SEQ ID NO: 30620 - DNA, 173 bp, Homo sapiens
  MAP TO AL022100.13; EXPRESSED IN BT474, SIGNAL = 1.2; EXPRESSED IN ADULT LIVER, SIGNAL = 0.97; EST_HUMAN HIT: AA460067.1, EVALUE 4.10e-01; NT HIT: AJ001685.1, EVALUE 1.60e+00; SWISSPROT HIT: P03949, EVALUE 1.30e+00
tttttcttccttcttgttattattatattttaaggttggcttgttgtgagctggcactggataaggtgtgaccttgttacaggtggtgtagaacttaggagaatttgatgccggctccgaaagcccctgctcaaagctggctccttgggactgttttctccattggggtgcag

SEQ ID NO: 30621 - DNA, 97 bp, Homo sapiens
  MAP TO AF179296.1; EXPRESSED IN ADULT LIVER, SIGNAL = 0.91; NT HIT: AF055316.1, EVALUE 3.20e+00; EST_HUMAN HIT: AA746867.1, EVALUE 6.00e-48
atcctcagtgcattgcacatggactctcgatcctaaagggtccttggtggcttcaagttggttctgcccactctctacctcttctgcaaaggagtaa

SEQ ID NO: 30622 - DNA, 172 bp, Homo sapiens
  MAP TO AP000427.1; EXPRESSED IN ADULT LIVER, SIGNAL = 0.91; EST_HUMAN HIT: AV696614.1, EVALUE 1.00e-02; NT HIT: AB016530.1, EVALUE 4.00e-01; SWISSPROT HIT: P36615, EVALUE 5.70e-01
caacagcactattaccagtttggccatgccgacacctctgatgtggacacaaactggagcccaccctgatagagtatgggcatctgtcatgcagatgatgtgtgtcttgttggaatactcaacatcacatttggcttcagctatggtgatatgaacatcctccatattttca

SEQ ID NO: 30623 - DNA, 89 bp, Homo sapiens
  MAP TO AC007603.1; EXPRESSED IN ADULT LIVER, SIGNAL = 0.74; NT HIT: AF100154.1, EVALUE 1.60e-01; EST_HUMAN HIT: AA488291.1, EVALUE 7.40e-01
agggagaggcaggaaactcaccagcagaaaagggcttccacacaatgcatctgatttgcccaactgaacgaaactcaacccgaaagtaa

SEQ ID NO: 30624 - DNA, 127 bp, Homo sapiens
  MAP TO AC004624.6; EXPRESSED IN LUNG, SIGNAL = 0.77; EXPRESSED IN HELA, SIGNAL = 0.65; EXPRESSED IN ADULT LIVER, SIGNAL = 0.71; EXPRESSED IN PLACENTA, SIGNAL = 0.63; EXPRESSED IN BONE MARROW, SIGNAL = 0.65; NT HIT: X80905.1, EVALUE 2.40e-01; SWISSPROT HIT: P03181, EVALUE 8.00e-03
atggaatatgtcctctttgtgctgtacttctctttcttcctgtgtctctgtgccctggtgtgcctgtacttctctggctgccaggagatgacctataagcatgaaggtaggcagctggttcggggtt

SEQ ID NO: 30625 - DNA, 256 bp, Homo sapiens
  MAP TO AF064861.1; EXPRESSED IN BT474, SIGNAL = 0.92; EXPRESSED IN ADULT LIVER, SIGNAL = 1.1; EXPRESSED IN FETAL LIVER, SIGNAL = 0.93; EXPRESSED IN BONE MARROW, SIGNAL = 1.1; EXPRESSED IN LUNG, SIGNAL = 1.5; EXPRESSED IN HELA, SIGNAL =   1; EXPRESSED IN PLACENTA, SIGNAL = 1.4; NT HIT: AL163279.2, EVALUE 3.00e-67; EST_HUMAN HIT: AW303568.1, EVALUE 8.00e-62; SWISSPROT HIT: O95447, EVALUE 3.00e-33
tttgccaagtgtgtcatccacaccatttctctgcatgcttcttttaaacttttctcttactagaacatcttcttgattgctttctctttcaggatgaataacttcaattatttttggtggtagttcttgctcttctttcacaaaaatgtttttcttttcttggtcttcttttttgtctttttgtcttccagtattctccagcagtatttggacttccaaatgtttctcttcccctgataaatctatattagaaaaa

SEQ ID NO: 30626 - DNA, 154 bp, Homo sapiens
  MAP TO AC007347.2; EXPRESSED IN LUNG, SIGNAL = 1.1; EXPRESSED IN HBL100, SIGNAL = 0.99; EXPRESSED IN ADULT LIVER, SIGNAL =   1; NT HIT: gi9633550, EVALUE 3.50e-01; SWISSPROT HIT: O35343, EVALUE 8.70e+00
ccccctggtcccccaccatgacactacctctgtgaacattttggtagatattctttgggctctgacacgtacacacatgttgacttttatcatcatcatcatcatcatcattattctagtactctctttttcactttgctaaagtttgaatcat

SEQ ID NO: 30627 - DNA, 512 bp, Homo sapiens
  MAP TO AL021579.1; EXPRESSED IN HBL100, SIGNAL = 1.2; EXPRESSED IN HELA, SIGNAL = 0.99; EXPRESSED IN PLACENTA, SIGNAL = 1.3; EXPRESSED IN ADULT LIVER, SIGNAL = 1.1; EXPRESSED IN BT474, SIGNAL = 1.2; EXPRESSED IN LUNG, SIGNAL = 1.1; EXPRESSED IN BONE MARROW, SIGNAL = 0.96; NT HIT: AL096857.1, EVALUE 0.00e+00; SWISSPROT HIT: P48634, EVALUE 1.00e-06; EST_HUMAN HIT: BE502381.1, EVALUE 0.00e+00
catccacctccagatcgacaggcagtacctggaagaccaggcccctttccctccaagcagcaagtagctgatgaagatgaaatatggaagcaaagacgaagacaacaatcagaaatttctgcagcagtagaacgtgctcgtaaacggcgtgaagaggaagagcgaagaatggaagaacaaaggaaggcagcttgtgcggagaaactgaaacgattggatgagaagcttggcatcctggaaaaacaaccatctccagaggaaattagggaaagggagcgagaaaaagaacgggagcgtgagaaagaacttgaaaaagaacaagaacaggagcgagagaaggagagggaaaaagacagagagagacagcaggaaaaggagaaagagctggagaaggagcaggaaaaacaaagagaaatggagaaagaaagaaagcaagaaaaagaaaaagaactagaacggcagaaagaaaaggaaaaagaactacaaaagatgaaagaacaagaaaaggaatg

SEQ ID NO: 30628 - DNA, 151 bp, Homo sapiens
  MAP TO AC010000.1; EXPRESSED IN LUNG, SIGNAL = 3.4; EXPRESSED IN ADULT LIVER, SIGNAL = 0.9; NT HIT: AF178754.3, EVALUE 1.90e-02; SWISSPROT HIT: Q12206, EVALUE 4.50e-01; EST_HUMAN HIT: AI820688.1, EVALUE 8.00e+00
aaattggggagactcagtaacagattggctatggagtatgagggagaggaagagttcaaggatgaccagattttccagtctggcaaccgaatccataacggtcacatctactgaatggggagtaacaaaaaaaagagtcaagtttgggatg

SEQ ID NO: 30629 - DNA, 104 bp, Homo sapiens
  MAP TO AP000162.1; EXPRESSED IN BONE MARROW, SIGNAL =   1; EXPRESSED IN FETAL LIVER, SIGNAL = 0.77; EXPRESSED IN ADULT LIVER, SIGNAL = 0.86; EXPRESSED IN PLACENTA, SIGNAL = 0.81; EXPRESSED IN LUNG, SIGNAL = 1.3; NT HIT: AE001198.1, EVALUE 1.20e-02; EST_HUMAN HIT: AI766814.1, EVALUE 4.00e-52; SWISSPROT HIT: P48972, EVALUE 1.80e+00
ttagcacaaaagaaaaattcagctgcctgacaatacaggaaatgttctcagatgctgatgtttgtaaggtccggtggggccatgaggaagaagaggagctgaag

SEQ ID NO: 30630 - DNA, 226 bp, Homo sapiens
  MAP TO AC005484.2; EXPRESSED IN BONE MARROW, SIGNAL = 0.81; EXPRESSED IN LUNG, SIGNAL = 0.71; EXPRESSED IN ADULT LIVER, SIGNAL = 1.1; SWISSPROT HIT: O33780, EVALUE 1.50e-01; NT HIT: AF037338.1, EVALUE 2.90e-02; EST_HUMAN HIT: BE220437.1, EVALUE 1.00e-124
attatctttctcctgatcctgcttcttcaggtaacttaatactgacattatgtctttctccattttacattgctttttctttaagtcctcattactttttgccagtatccgtgaagtatcacgatacttaatcctagagagttctgtgacttccaacctggcctcccaaagggaggcattggccttggctctgtccaccacagattcatctgtttttattaacttc

SEQ ID NO: 30631 - DNA, 135 bp, Homo sapiens
  MAP TO AL034412.1; EXPRESSED IN LUNG, SIGNAL = 1.2; EXPRESSED IN BONE MARROW, SIGNAL = 0.99; EXPRESSED IN PLACENTA, SIGNAL = 1.1; EXPRESSED IN HBL100, SIGNAL =   1; EXPRESSED IN FETAL LIVER, SIGNAL =   1; EXPRESSED IN ADULT LIVER, SIGNAL = 1.2; NT HIT: gi11416767, EVALUE 2.00e-08; EST_HUMAN HIT: BE266255.1, EVALUE 1.00e-10
ttttctgggaccctcatttgctgactaatatctttattgtattccatttcatactgaaattgactaatttcttccatctagagaaggaagtgcttccctactcaccaaatatgtaccagctactacttgctattt

SEQ ID NO: 30632 - DNA, 295 bp, Homo sapiens
  MAP TO AL035696.14; EXPRESSED IN BT474, SIGNAL = 0.63; EXPRESSED IN BONE MARROW, SIGNAL = 0.71; EXPRESSED IN ADULT LIVER, SIGNAL = 0.92; EXPRESSED IN PLACENTA, SIGNAL = 0.69; EXPRESSED IN FETAL LIVER, SIGNAL = 0.57; NT HIT: AL163204.2, EVALUE 4.00e-36; SWISSPROT HIT: P40957, EVALUE 8.00e-03; EST_HUMAN HIT: AF109301.1, EVALUE 1.00e-27
attaaaaaaactaacctgtaaattgatttcttctaatttttctatttcctgtcctgctctttcttccaactgcaatttacattcttctacgtcaccaaattctaccatatttttttcatgtgtcttaagattcactacttcttgttccaaaattttgttaacctcctcaagttttttacatttctgttgtacttctttcatagataataactcctgttgaataacttgattctttttagccaaatatagacatttttgaagatatagtttccagctctgctgtaagttcatcaaa

SEQ ID NO: 30633 - DNA, 198 bp, Homo sapiens
  MAP TO AC004832.2; EXPRESSED IN BONE MARROW, SIGNAL = 1.7; EXPRESSED IN FETAL LIVER, SIGNAL = 1.1; EXPRESSED IN ADULT LIVER, SIGNAL = 0.66; EST_HUMAN HIT: AA699335.1, EVALUE 1.00e-105; SWISSPROT HIT: Q60432, EVALUE 2.20e+00; NT HIT: AJ132352.1, EVALUE 5.00e-25
ctttcacgatgagcatgaacttcagggtctctgggtaattctcttcaaggaggccaaagaactgtggaaccaagagagatcccttcagagagcacatcacatcttctcctacctccatctcctgtgcaatctcctgttgggaggtttcagatggctctggagggtttcccttcatgccatcacctcccctggcctctg

SEQ ID NO: 30634 - DNA, 381 bp, Homo sapiens
  MAP TO AL033531.7; EXPRESSED IN HBL100, SIGNAL = 1.7; EXPRESSED IN HELA, SIGNAL = 1.2; EXPRESSED IN BONE MARROW, SIGNAL = 1.1; EXPRESSED IN FETAL LIVER, SIGNAL = 0.91; EXPRESSED IN ADULT LIVER, SIGNAL = 0.97; EXPRESSED IN BT474, SIGNAL =   1; NT HIT: gi11425524, EVALUE 0.00e+00; EST_HUMAN HIT: AI929343.1, EVALUE 0.00e+00; SWISSPROT HIT: P20659, EVALUE 9.10e-01
gcatgctggcagagctgatcagcaggtagaggagggcagagaagttgcaccacactacaccaaagatccattccctgcggatggagctcgtcaccacaaaaggcagcaccaacacggacagcaggaagttggacagagtcaggctgaagacgaacttgttgctgagggtgaggaggtaggacttcttgtacaaggtgaccacgatgaccaggtttcccaggcagacaaaaatggtgatgacaatgatggcgatgaactgggtgatgatgacgcccccttcgccaccctcctcctcagtgagattactcagctccttcctgcagctgagggaggagttgaggctcatggtcagtgcacctcggcgtggggtgggcagagcat

SEQ ID NO: 30635 - DNA, 238 bp, Homo sapiens
  MAP TO AC007861.1; EXPRESSED IN BT474, SIGNAL = 2.5; EXPRESSED IN ADULT LIVER, SIGNAL = 0.73; EST_HUMAN HIT: AI769980.1, EVALUE 8.50e-01; SWISSPROT HIT: Q29077, EVALUE 2.60e+00
aggcctccacctccagcatctggccttgtggacctgggatcctgacaccttctccttcttccagctgacagcctcctttctgcagtccctgagccctgacatacaggatctggctcatttgaacaactgcaaggaggggctgagtgttacaggcacctacaagaggcagaaaaacaagatagaattgggccaggcctggacactgtctgaagctccctggagacttctgaatgaggca

SEQ ID NO: 30636 - DNA, 216 bp, Homo sapiens
  MAP TO AC011592.2; EXPRESSED IN BONE MARROW, SIGNAL = 0.94; EXPRESSED IN ADULT LIVER, SIGNAL = 0.97; NT HIT: AL163206.2, EVALUE 8.00e-49; EST_HUMAN HIT: AV724885.1, EVALUE 6.00e-54; SWISSPROT HIT: Q61768, EVALUE 1.80e-01
atggagaattcaaaatagctgtgttgaggaagctcaaagaaattcaagataacaaagagaaggatttcagaattctatcagataaatttaatgaagagattgaaataattaaaaagaatcaatcagaaattcaggggctgaaaaatgcaattcacatactgacgaatgcatcagagtcttttaacagcagaattgatcaagcagaagaaataattg

SEQ ID NO: 30637 - DNA, 91 bp, Homo sapiens
  MAP TO AL035670.16; EXPRESSED IN HBL100, SIGNAL =   1; EXPRESSED IN ADULT LIVER, SIGNAL = 1.1; SWISSPROT HIT: P30437, EVALUE 6.20e-01; EST_HUMAN HIT: BF092337.1, EVALUE 3.00e-44; NT HIT: gi7706128, EVALUE 2.00e-44
ctgctttgccaaacacagaagatatgccttccataatggccttgtggatatcaggatgagaaaggacgtatgcaagtgtccaaaatgcaac

SEQ ID NO: 30638 - DNA, 110 bp, Homo sapiens
  MAP TO AC008248.1; EXPRESSED IN FETAL LIVER, SIGNAL =   8; EXPRESSED IN ADULT LIVER, SIGNAL = 0.96; SWISSPROT HIT: P16144, EVALUE 9.10e+00; NT HIT: AF085167.1, EVALUE 5.10e-02
cgtggcacagcagacacaggctgagaagcagtttgaataacaagcacaacttctaatgcagagaagatgtacttgtcttgtataacagtttctgccagtttaatgtggac

SEQ ID NO: 30639 - DNA, 76 bp, Homo sapiens
  MAP TO AC007397.21; EXPRESSED IN HELA, SIGNAL = 4.9; EXPRESSED IN ADULT LIVER, SIGNAL = 0.69; EXPRESSED IN HBL100, SIGNAL = 2.6; EST_HUMAN HIT: AI401460.1, EVALUE 6.10e-01; NT HIT: AF067083.1, EVALUE 3.20e-02
ggaaagggtttgtaggtggatgtgtaatgtgtggcatttttgtggttctgaccgagcccaatcttggcaatgtcta

SEQ ID NO: 30640 - DNA, 275 bp, Homo sapiens
  MAP TO AL031073.1; EXPRESSED IN ADULT LIVER, SIGNAL = 0.98; EXPRESSED IN BT474, SIGNAL = 1.1; EXPRESSED IN FETAL LIVER, SIGNAL = 0.98; SWISSPROT HIT: P43363, EVALUE 7.00e-28; EST_HUMAN HIT: BF026372.1, EVALUE 0.00e+00; NT HIT: gi11422626, EVALUE 0.00e+00
aatgggctctcggaccccacaggaattcataatatggaggagaactgtggggcacctcccgatactccaggtaatgtccctgcacccaaactttagtgaggagctccctaggctccccatagacgaagtgctccctcccagcatatacccctactgcattcagcacttcccagatgacctcctcagaggcacagttgccctttatgaagatcacactcagaataataatcaggaggctgttctcgggcatgccctcatcatcactaccctcatcg

SEQ ID NO: 30641 - DNA, 163 bp, Homo sapiens
  MAP TO AC010974.3; EXPRESSED IN HELA, SIGNAL = 0.95; EXPRESSED IN ADULT LIVER, SIGNAL = 1.1; NT HIT: AL163285.2, EVALUE 2.00e-09; SWISSPROT HIT: Q9Y6R4, EVALUE 2.60e-01; EST_HUMAN HIT: AV720204.1, EVALUE 4.00e-14
actggttcatggttctgcaggctgtataggaagcatggtgctggcattagctgctggtgagggcctcaggaagcttccaatcatgatggaaggtgaaggaggagcaggtgtctcaaatgcaagagcaggagcaagagagaaggtgggaggtgccacacacttt

SEQ ID NO: 30642 - DNA, 164 bp, Homo sapiens
  MAP TO AC010809.2; EXPRESSED IN ADULT LIVER, SIGNAL = 0.98; EXPRESSED IN LUNG, SIGNAL = 1.1; EXPRESSED IN BONE MARROW, SIGNAL = 0.92; SWISSPROT HIT: P08973, EVALUE 2.60e-01; EST_HUMAN HIT: AV689659.1, EVALUE 1.40e-01
cagaaaacaatgaggactgtgttaacttgtttaaggcagatgagtatatgaatgaagccaaaaacctacatatgttcatatccaaccccttctgtgacttactcttcttgagatattatcataaaagtagcatcacatttactcatgtttgtatgtggagaact

SEQ ID NO: 30643 - DNA, 125 bp, Homo sapiens
  MAP TO D83253.1; EXPRESSED IN ADULT LIVER, SIGNAL = 0.95; EST_HUMAN HIT: BE621909.1, EVALUE 4.10e-01
acatttctgtgaattcttgatccttcatggagatcactgcactgagtgcccatttgcccagccacatcttcctcttgttctttatctccttattcttctgtttgccacagaccacgtaaaatatg

SEQ ID NO: 30644 - DNA, 147 bp, Homo sapiens
  MAP TO AL096771.11; EXPRESSED IN HBL100, SIGNAL = 1.2; EXPRESSED IN HELA, SIGNAL = 1.3; EXPRESSED IN ADULT LIVER, SIGNAL = 1.1; EXPRESSED IN BT474, SIGNAL = 1.1; SWISSPROT HIT: Q99715, EVALUE 3.00e-23; NT HIT: gi11418424, EVALUE 1.00e-77; EST_HUMAN HIT: AU120639.1, EVALUE 5.00e-75
gaacaaggggacaagaaattacagtgcgtggatcagaaaccagtcactgcttcactggcctttcaccagacactgattatggtgtcactgtttttgtgcagacaccaaatctcgagggaccaggagtctctgttaaagaacatacca

SEQ ID NO: 30645 - DNA, 137 bp, Homo sapiens
  MAP TO AL109614.15; EXPRESSED IN ADULT LIVER, SIGNAL =   1; SWISSPROT HIT: Q9XBM7, EVALUE 3.10e+00; EST_HUMAN HIT: BF311914.1, EVALUE 1.20e-01; NT HIT: AF133217.1, EVALUE 2.60e-01
gagaaccccagaatcttgtccagcccagtactgtcctccatgttgactctcatcagcaaagaggaaatccagatatcacctaggtctcccggaactatactcctagtaatgctgccaaagatggcacttatgtccag

SEQ ID NO: 30646 - DNA, 101 bp, Homo sapiens
  MAP TO AJ239320.2; EXPRESSED IN LUNG, SIGNAL = 2.8; EXPRESSED IN BONE MARROW, SIGNAL = 8.4; EXPRESSED IN ADULT LIVER, SIGNAL =   1; EXPRESSED IN BT474, SIGNAL = 0.99; EXPRESSED IN HBL100, SIGNAL = 0.95; NT HIT: gi6754367, EVALUE 1.20e-02; EST_HUMAN HIT: AI829970.1, EVALUE 2.20e-01; SWISSPROT HIT: O73810, EVALUE 9.40e+00
ggctgtggctggagagcaggtggccgtgggacttgtgaaagggaagaccttttagatgaacaaggcaccagtagctggtgtgaattgggccaagagggtaa

SEQ ID NO: 30647 - DNA, 446 bp, Homo sapiens; identical to SEQ ID NO: 24799
  MAP TO AL049829.2; EXPRESSED IN FETAL LIVER, SIGNAL = 0.64; EXPRESSED IN ADULT LIVER, SIGNAL = 0.66; EXPRESSED IN BT474, SIGNAL = 1.3; EXPRESSED IN BONE MARROW, SIGNAL = 0.69; EXPRESSED IN HBL100, SIGNAL = 1.1; EXPRESSED IN HELA, SIGNAL = 0.64; NT HIT: AB037864.1, EVALUE 0.00e+00; EST_HUMAN HIT: AW057621.1, EVALUE 0.00e+00; SWISSPROT HIT: P48002, EVALUE 1.50e-02

SEQ ID NO: 30648 - DNA, 2334 bp, Homo sapiens
  MAP TO AC004889.1; EXPRESSED IN LUNG, SIGNAL = 1.5; EXPRESSED IN PLACENTA, SIGNAL = 1.8; EXPRESSED IN HELA, SIGNAL = 1.3; EXPRESSED IN BT474, SIGNAL = 1.6; EXPRESSED IN FETAL LIVER, SIGNAL = 1.3; EXPRESSED IN ADULT LIVER, SIGNAL = 1.6; EST_HUMAN HIT: BE272325.1, EVALUE 0.00e+00; SWISSPROT HIT: Q99323, EVALUE 5.00e-10; NT HIT: gi11433426, EVALUE 0.00e+00
gaatgtggggttggggtaaaatccaggtctcggatgaaggtaaggaggtaaacccctcggtggatagatgtttctcattgcaaatggagcatgtggtggacctgggaaatcccttggtggaaaataacctcgagaagctccaaacatggttcctggaggaggtggggggaaaggaggtcctcttctcatgaacgggccccttgtatccactggaaacaatggtcctctgactggagcaagaggtggaggaataaagccagggccagttgcttcattttcagcagggagagatgaatcaggcacatttaaattaccaagatcatctttggcatcatttctactggattccatttctgaaggcattgacctatccattttatccaaagaagtcattttaaaacttctgggttctgctggtccagacagtctttcagaattagaataaaatctgtcttccctttgtggaggaagagttgaatcaggatatgattgccctggtggaggaaacatcatcctacggtcctgttccaccggagatgacagggacccagtgtcagaaggagccctgtgaggatcgattaacctgtcatagcttggttctcctctttcattggtaatctgatggtccaggggattccctgggctgcttgggcctcttcctcctccccctggaagcacaggtgagagtctgagtggatcctccaacaaagtttgaggagagggaaaagctctcgtttcagatgaaggccgacccaatggtgagggactacatggggaatgctctctgccaaatgctgtatttgaaacatcgagtgcattaggatctttttctaaaagttcaaatttcaactctgtttcagttaatttttgtttgttgtgagcattttctttccttaaatcactgaggtttctttcagcagtccgagctgccaaccaattatcatgtcctcttttctcgtaggaaataacctgcttttgataaaaatgaacagttctctccaattcttcttcaagatctttggctagctttctataggtctccagcccttcagtggcacggctgatcttttcttccactctagaaagcttctcttcttcctctattcggtaattttcctccactgttaatttcctgtagagtttcatttcattttcttgatagaattcagtcattattttaagtttctgttgaagcttctgattctcactttcaaaatatatgttttctgattgcaaagatgcttgttgagtctgaagatttttaatatgctctgtaagctcttcctttgttttgtccacttcagataactgaataataatgtggtttctttctccttctaagctttttaaagaaacatttaacttagcagcatgaatcagtttcttcaaagctcctttcagaggatcatctaagttagcaccattttcccattgactgttcacttctaattccaggttatcatcatccgttgtgtcttcttcaagcacagcagcctgatctttcatcattggcaagtgtccagtcagggtcttgatgtgattttctttatcattcagaacttgttctgcgtgcactttggagtcttcaaatgttattttctgtttattaagttcactcacttgtcctttccatacttcagcttcttgctgaaaaagctgtttatggcttgtctgaagttgagaattttcattcaaagcatcttttattgctatagcccgtcgttcttcactcattttaaatgtcttgcagatgattttggcttcagctatttgtgatttgagggattttgactcatcttctagagactgtatactttttgaaatatccgccatcaattcatcttgttgagaatgtttagatttctcttcttttaagtctttttctagacagaggatttcatcctcaagttcagaattggacctgttcagcttttcacaggttgcctccaaacttcgtgcttcttctgctgccgccttctcaaagctggcatcctctaaagatgactctacttcatagccttcatactctttttgaataaggctaaacttttcaagtagtttacatttttcttcaattagtccagaaagcgttgcaccaagtttttgctctcttcccacgtaaagccgactcctaaccgatctaaaacttctccacaaaaaaaggagaacaacaaaaaatccaataacagctgcacataccaccagttccgatggaaaaccataaggattctcatctggtctcatactctcaggtagtgctgccacaactctgcgtagctcctccaggaccagccccaggtagggctgaggggtagcaccaggctcctccatagc

SEQ ID NO: 30649 - DNA, 137 bp, Homo sapiens
  MAP TO AC011193.1; EXPRESSED IN LUNG, SIGNAL =  17; EXPRESSED IN BT474, SIGNAL = 4.9; EXPRESSED IN ADULT LIVER, SIGNAL = 0.99; SWISSPROT HIT: P31020, EVALUE 2.60e-01
gtaagtccccagtcctagtcttatccccaaccctggagaacacaccaaccaagtacccaactgagttcctggccctgactctagtgagcttgccttttgagatccaggtattgaccaaagagaagggaaagaaatat

SEQ ID NO: 30650 - DNA, 198 bp, Homo sapiens
  MAP TO AC004895.2; EXPRESSED IN FETAL LIVER, SIGNAL = 0.93; EXPRESSED IN LUNG, SIGNAL = 0.9; EXPRESSED IN ADULT LIVER, SIGNAL = 0.74; EXPRESSED IN PLACENTA, SIGNAL = 0.63; EXPRESSED IN BONE MARROW, SIGNAL = 0.98; EXPRESSED IN HBL100, SIGNAL = 0.88; EXPRESSED IN BT474, SIGNAL = 1.1; EXPRESSED IN HELA, SIGNAL = 0.77; NT HIT: AB040886.1, EVALUE 2.50e-02; EST_HUMAN HIT: AW504799.1, EVALUE 1.00e-108; SWISSPROT HIT: Q61068, EVALUE 2.00e-13
ttttggagtgttcatgtgatagcatgtaattggcaagaggtggtgtgtaggttaaacactgcagtgctgcattggcaaaacaggtattgcccaaattctggagcccagctccaactctatgagtttgttgccacttaagacaaatcttctcagatgggaaaagaactttctgtggaggagcgatgccatcacctaggg

SEQ ID NO: 30651 - DNA, 278 bp, Homo sapiens
  MAP TO AJ011929.1; EXPRESSED IN PLACENTA, SIGNAL = 1.2; EXPRESSED IN ADULT LIVER, SIGNAL =   1; NT HIT: AL163285.2, EVALUE 0.00e+00; EST_HUMAN HIT: BE149334.1, EVALUE 2.00e-81; SWISSPROT HIT: P23074, EVALUE 3.00e-09
acaggaatggggaaaaagtcatttgccaagtcaatggctgcataccaggtaccaggaggtgtgttaatttgctcaagcaatgaaaccacatctggtacagcagctgcaattggagtcaccacttggttaagcttacagtaacccactgtcattctccaagatccgtctgtcttctgcacaggccagatgggagagttgaatggggatgtggtgggaatcaccacccctgcatccttcaagtccttgatggtggcactaatctccacaatcccttcagg

SEQ ID NO: 30652 - DNA, 233 bp, Homo sapiens
  MAP TO AP000039.1; EXPRESSED IN HELA, SIGNAL =  16; EXPRESSED IN ADULT LIVER, SIGNAL =   1; SWISSPROT HIT: P56926, EVALUE 3.20e+00; NT HIT: AF134904.1, EVALUE 1.20e-01; EST_HUMAN HIT: AW833962.1, EVALUE 5.70e-01
gtagtggaaaatatgttactgaagtactgaacaatatttctgtgctggaccaacactatgataattatttcaatattattgatttctattgtgaactccacctactctatagagaatatttaatcaggcaaactagtacttatgccaaaaatgcttcttattctccctcttccgctagaaaatttcgcaggattagagctattatattatctagtagttacatctttggtgcc

SEQ ID NO: 30653 - DNA, 158 bp, Homo sapiens
  MAP TO AC007036.3; EXPRESSED IN ADULT LIVER, SIGNAL = 0.99; EXPRESSED IN FETAL LIVER, SIGNAL = 0.79; EXPRESSED IN LUNG, SIGNAL = 0.74; SWISSPROT HIT: Q10470, EVALUE 4.00e+00; NT HIT: gi9506448, EVALUE 3.60e-01
ttaccatactgactaatacagaactgaagctgaaaagccatgatgtagagagaggggccaagattatctatttccttcttgaaagtttttccctgaactttccagaagtacaaataagagtaaaaacatatccctggacacaggagctggcgacctaa

SEQ ID NO: 30654 - DNA, 231 bp, Homo sapiens
  MAP TO AC012140.1; EXPRESSED IN BONE MARROW, SIGNAL = 1.1; EXPRESSED IN HELA, SIGNAL = 0.97; EXPRESSED IN ADULT LIVER, SIGNAL = 1.1; EXPRESSED IN FETAL LIVER, SIGNAL =   1; EXPRESSED IN LUNG, SIGNAL = 0.99; NT HIT: L44140.1, EVALUE 8.60e+00; SWISSPROT HIT: P15265, EVALUE 5.00e-03
tcacgccacagcacagacaagcctcaggacatgctgctcagtgagaggccacatcctgtgactctgctgctgggaaatattcagagcaggcgcatccacagggacaggagctatgccagggctgccagggcctgggacaggaacgggatgagccgtgaaggggcacacagggtctatctggaaggatgcaatgttccgacggtggatcgtgctggtggctgcatgatgcag

SEQ ID NO: 30655 - DNA, 413 bp, Homo sapiens
  MAP TO AL034400.2; EXPRESSED IN ADULT LIVER, SIGNAL =   1; EXPRESSED IN LUNG, SIGNAL = 0.93; EXPRESSED IN BONE MARROW, SIGNAL = 0.93; EXPRESSED IN PLACENTA, SIGNAL = 1.4; NT HIT: gi11421167, EVALUE 0.00e+00; SWISSPROT HIT: O75487, EVALUE 9.00e-59; EST_HUMAN HIT: BE171158.1, EVALUE 2.00e-23
agcgaaagtacgggctgctacaaaagcacgagtaacctggagcttcaatttgcgagggacatctccgaagggcttcagctgctccgtatacttgctcacacattccagatactcatctgtaaagtggtactgggagttcaccaggcggaacatccgctccaggaggcgagcccagaagtcatttagcatttcttccaggttcacatttcccaccacgtagtaacgtttcaactctacgaagagatctttaaatagctcagaattttgcatgtataaatggccatatgtcttcacaaacatatcattcagggatttctctgcattttcaagtagttctttgaagaattctgaaaccaacaccaaaaaaaaaaaaaaaaaaaggaaaaacgagagttttcagtgtttaaataact

SEQ ID NO: 30656 - DNA, 91 bp, Homo sapiens
  MAP TO AL008631.1; EXPRESSED IN ADULT LIVER, SIGNAL =   1; SWISSPROT HIT: P04505, EVALUE 9.20e+00; NT HIT: AF233854.1, EVALUE 7.50e-01
ttaaaatttagtaatagagaagagagtacataagtagaagaccaaaactgtattgttaccagagttccaaccgctgctgacttttctggct

SEQ ID NO: 30657 - DNA, 107 bp, Homo sapiens
  MAP TO AL049796.17; EXPRESSED IN LUNG, SIGNAL = 4.8; EXPRESSED IN BT474, SIGNAL =   1; EXPRESSED IN ADULT LIVER, SIGNAL =   1; EST_HUMAN HIT: AV730833.1, EVALUE 4.00e-16; NT HIT: AF260225.1, EVALUE 2.00e-14
atgcagcacaaaagcccttgcgggaagcagggccatgcccttgaacttctcagcctgcagaactgtgagctaagcaaacctcttttctttatgaattacccagtctc

SEQ ID NO: 30658 - DNA, 191 bp, Homo sapiens
  MAP TO AC000353.21; EXPRESSED IN HBL100, SIGNAL = 1.9; EXPRESSED IN FETAL LIVER, SIGNAL = 0.79; EXPRESSED IN LUNG, SIGNAL = 0.65; EXPRESSED IN HELA, SIGNAL = 1.1; EXPRESSED IN ADULT LIVER, SIGNAL = 0.68; EXPRESSED IN PLACENTA, SIGNAL = 0.66; EXPRESSED IN BT474, SIGNAL = 0.96; EXPRESSED IN BONE MARROW, SIGNAL = 0.99; EST_HUMAN HIT: BE546699.1, EVALUE 8.00e-84; NT HIT: gi4505928, EVALUE 4.00e-84; SWISSPROT HIT: Q14181, EVALUE 2.00e-25
gagcctgtcactctgctgggccagattggctgtgatagcaacgggaagctgaacaacaagtcagtgattctcgagggagaccgggaacattcctcgggtgctcaaattccagtggatttatctgagcttaaggaatattctctgtttcctggacaggtgagattggaggagttccaccagaatgcaggcgc

SEQ ID NO: 30659 - DNA, 88 bp, Homo sapiens
  MAP TO AC005037.2; EXPRESSED IN LUNG, SIGNAL = 0.63; EXPRESSED IN ADULT LIVER, SIGNAL = 0.67; EXPRESSED IN BONE MARROW, SIGNAL = 0.79; EST_HUMAN HIT: Z46120.1, EVALUE 1.00e-42; NT HIT: Z74230.1, EVALUE 2.80e+00
gtataatggacagtgggaccttggccaggaagttcttgatgatatcatttatagagcccagctagagcttttttctcaaccactattg

SEQ ID NO: 30660 - DNA, 129 bp, Homo sapiens
  MAP TO AC007279.3; EXPRESSED IN BT474, SIGNAL = 1.3; EXPRESSED IN ADULT LIVER, SIGNAL = 0.98; NT HIT: AB030501.1, EVALUE 6.00e-36; SWISSPROT HIT: Q13368, EVALUE 3.00e-10
ttgctcagtgcccatgacacgatagctcagaaagattttgaaccccttctccctccactgccagacaatatccctgagagtgaggaagcaatgaggattgtttgtttagtgaaaaaccaacagcccctg

SEQ ID NO: 30661 - DNA, 166 bp, Homo sapiens
  MAP TO AC007389.2; EXPRESSED IN PLACENTA, SIGNAL = 1.1; EXPRESSED IN BONE MARROW, SIGNAL = 1.3; EXPRESSED IN FETAL LIVER, SIGNAL = 1.1; EXPRESSED IN BT474, SIGNAL = 1.1; EXPRESSED IN HBL100, SIGNAL = 1.5; EXPRESSED IN LUNG, SIGNAL = 0.84; EXPRESSED IN HELA, SIGNAL =   1; EXPRESSED IN ADULT LIVER, SIGNAL = 1.2; NT HIT: gi8923029, EVALUE 2.00e-51; SWISSPROT HIT: Q13214, EVALUE 2.20e+00; EST_HUMAN HIT: BE271567.1, EVALUE 2.00e-53
atggagtctctcaactaggaaccacaaactgctggtgaccaaccccaacccacagacacaacccatgccacccacaggaaagcaggtgggaccgatgctccctaggccaacggtgaagctggaggaggagagagcaccaaaggctacactgcagaaggagttgcag

SEQ ID NO: 30662 - DNA, 527 bp, Homo sapiens
  MAP TO AL049834.2; EXPRESSED IN HBL100, SIGNAL = 0.86; EXPRESSED IN ADULT LIVER, SIGNAL = 0.77; EXPRESSED IN BT474, SIGNAL = 0.7; SWISSPROT HIT: P32325, EVALUE 4.50e-01; NT HIT: AF094609.1, EVALUE 3.00e-13; EST_HUMAN HIT: BF674218.1, EVALUE 0.00e+00
gaaaaaatgcgccacctgctgcatgtcctgaaagtagacttaggctgcacatcggaggaaaactcggtaaagcaaaatgatgttgatatgttgaatgtatttgattttgaaaaggctgggaattcagaaccaaatgaattaaaaaatgaaagtgaagtaacaattcagcaggaacgtcaacaataccaaaaggctttggatatgttattgtcggcaccaaaggatgagaacgagatattcccttcaccaactgaatttttcatgcctatttataaatcaaagcattcagaaggggttataattcaacaggtgaatgatgaaacaaatcttgaaacttcaactttggatgaaaatcatccaagtatttcagacagtttaacagatcgggaaacttctgtgaatgtcattgaaggtgatagtgaccctgaaaaggttgagatttcaaatggattatgtggtcttaacacatcaccctcccaatctgttcagttctccagtgtcaaaggcgacaataatcatgacatgga

SEQ ID NO: 30663 - DNA, 121 bp, Homo sapiens
  MAP TO AC006020.2; EXPRESSED IN ADULT LIVER, SIGNAL = 1.2; EXPRESSED IN BT474, SIGNAL = 2.3e+02; NT HIT: AF229180.1, EVALUE 3.00e-62; SWISSPROT HIT: P39997, EVALUE 2.30e+00; EST_HUMAN HIT: BE937783.1, EVALUE 2.00e-27
agtattaaaacgacttatgtagcgctccggatgtttgtcatactctgcaggatcatacacagcatctgttttcctgacaagatgatgatgacgacttaacaccgtcccatacacttttctg

SEQ ID NO: 30664 - DNA, 112 bp, Homo sapiens
  MAP TO AC009230.2; EXPRESSED IN ADULT LIVER, SIGNAL = 1.1; EST_HUMAN HIT: AI963769.1, EVALUE 6.30e-02; SWISSPROT HIT: P14654, EVALUE 4.00e+00; NT HIT: AF044083.1, EVALUE 3.80e+00
tgaagttaactacataccttccaagaccaattcttactattccttctgcatggaatgtttttccctttacccaagaaagttccaagactatgagagagcctggaagttacgg

SEQ ID NO: 30665 - DNA, 114 bp, Homo sapiens
  MAP TO AP000425.1; EXPRESSED IN FETAL LIVER, SIGNAL = 1.1; EXPRESSED IN ADULT LIVER, SIGNAL = 0.96; NT HIT: Z48497.1, EVALUE 1.40e-02; EST_HUMAN HIT: AW848834.1, EVALUE 5.00e-58; SWISSPROT HIT: Q09217, EVALUE 1.80e+00
tctcttttctgaattttccttctccatttccaatttcctgttgcatatcttctcttggatcatccacagtcatttcaagcttaatgtatttatcatggaatttattaggcttgt

SEQ ID NO: 30666 - DNA, 110 bp, Homo sapiens
  MAP TO AL031132.1; EXPRESSED IN BT474, SIGNAL = 1.1; EXPRESSED IN ADULT LIVER, SIGNAL = 1.2; EXPRESSED IN LUNG, SIGNAL =   1; EXPRESSED IN HELA, SIGNAL = 1.3; EXPRESSED IN PLACENTA, SIGNAL =   1; EXPRESSED IN HBL100, SIGNAL = 1.1; EXPRESSED IN FETAL LIVER, SIGNAL = 1.1; NT HIT: gi7657352, EVALUE 8.00e-01
tcataaattctggtgctgtgagatttcctccatcttcatagtgagtttaatgatgcagtagatttccatgttaccacttttaatttccagttctggcgacccaagccttt

SEQ ID NO: 30667 - DNA, 329 bp, Homo sapiens
  MAP TO AL023280.1; EXPRESSED IN BT474, SIGNAL = 1.9; EXPRESSED IN HELA, SIGNAL = 1.1; EXPRESSED IN HBL100, SIGNAL = 1.6; EXPRESSED IN ADULT LIVER, SIGNAL = 1.1; EXPRESSED IN FETAL LIVER, SIGNAL = 1.2; EXPRESSED IN LUNG, SIGNAL = 1.1; EXPRESSED IN BONE MARROW, SIGNAL = 1.1; EXPRESSED IN PLACENTA, SIGNAL = 1.2; NT HIT: M10976.1, EVALUE 0.00e+00; EST_HUMAN HIT: AA324003.1, EVALUE 8.00e-75; SWISSPROT HIT: P03360, EVALUE 4.00e-08
ctccacactttggcatctctgtgaagtccacctggatccagatcttcaaagggggcttctccataagcttgtatgccaggtggaacagctagaccttgcctcgcattatgctgtcggcaggtaacacaccgctgggtcaccgttttggcaagggctgacaaatgcgagatgtagaaataccagcctaacaacttttcaagtgattcctgacctagatgggtggtttcatggacagccagtacaactgcagctcctagcagctgtggcacagctactctcccatctggtaaccgaatcaatccttcctccatcacttgtcctccctctgc

SEQ ID NO: 30668 - DNA, 114 bp, Homo sapiens
  MAP TO AL049692.13; EXPRESSED IN ADULT LIVER, SIGNAL = 1.1; EST_HUMAN HIT: AA172249.1, EVALUE 2.00e-54; NT HIT: M80229.1, EVALUE 5.00e-58; SWISSPROT HIT: P49952, EVALUE 3.00e-17
tacggtcggcatctgagaccagtgagaaacgccccttcatgtgtgcttacccaggctgcaataagagatattttaagctgtcccacttacagatgcacagcaggaagcacactg

SEQ ID NO: 30669 - DNA, 165 bp, Homo sapiens
  MAP TO AC010099.3; EXPRESSED IN ADULT LIVER, SIGNAL =   1; EXPRESSED IN BT474, SIGNAL = 0.91; EXPRESSED IN HELA, SIGNAL = 3.6; SWISSPROT HIT: P03193, EVALUE 5.20e+00; EST_HUMAN HIT: AI865479.1, EVALUE 3.00e-11; NT HIT: AL163208.2, EVALUE 3.00e-08
tacccctctgaagctgacaatgagccctcagcagacagcaaatctgctggcacattgatcttggacttcccagcctcctcaattgttatgaactcattttctggtacagctaagttaagagacatctgggctggtgcaaatacacacgaggatgccactgcccta

SEQ ID NO: 30670 - DNA, 382 bp, Homo sapiens; identical to SEQ ID NO: 14112
  MAP TO AL021937.1; EXPRESSED IN BONE MARROW, SIGNAL = 0.94; EXPRESSED IN HBL100, SIGNAL = 0.91; EXPRESSED IN ADULT LIVER, SIGNAL = 0.99; EST_HUMAN HIT: AA309371.1, EVALUE 2.40e-01; NT HIT: AB031740.1, EVALUE 5.10e-02

SEQ ID NO: 30671 - DNA, 218 bp, Homo sapiens
  MAP TO AD000685.1; EXPRESSED IN ADULT LIVER, SIGNAL = 0.98; EXPRESSED IN FETAL LIVER, SIGNAL = 1.1; EST_HUMAN HIT: BF512006.1, EVALUE 1.00e-61; NT HIT: AF054821.1, EVALUE 1.00e-120; SWISSPROT HIT: Q08477, EVALUE 1.00e-35
aaagacaccagcagatcctcctgtacatagacttcctgtattatctcacccctgatgggcagcgtttccgcagggcctgccgcctggtgcacgacttcacagatgccgtcatccaggagcggcgccgcaccctccctagccagggtgttgatgacttcctccaagccaaggccaaatccaagactttggacttcattgatgtactcctgctgagcaag

SEQ ID NO: 30672 - DNA, 152 bp, Homo sapiens
  MAP TO AL117258.1; EXPRESSED IN FETAL LIVER, SIGNAL = 1.4; EXPRESSED IN ADULT LIVER, SIGNAL = 1.1; SWISSPROT HIT: P75569, EVALUE 7.70e-01; EST_HUMAN HIT: BF364978.1, EVALUE 8.00e+00
tcaactgctggcccagatcacctcctctttcctgattcccatagtgtctcttctgctcttcagcttctactctcagacagaagttctgctgttcagagagtgtgtgtgcccacaccctggaaatggaggaatgaggggcttgttctgggaat

SEQ ID NO: 30673 - DNA, 115 bp, Homo sapiens
  MAP TO AC011413.1; EXPRESSED IN ADULT LIVER, SIGNAL = 0.94; EST_HUMAN HIT: AA467937.1, EVALUE 2.40e-02; NT HIT: AE002306.2, EVALUE 8.50e-01
aagcagcaattacacttacaggtcctgctggaacaagcactacagctacaaatactactcactcaccctgagaagaaggaagataaagcctttcctttggaaatctacaaaaggg

SEQ ID NO: 30674 - DNA, 185 bp, Homo sapiens
  MAP TO AC011423.1; EXPRESSED IN HELA, SIGNAL =   1; EXPRESSED IN ADULT LIVER, SIGNAL =   1; NT HIT: AF115443.1, EVALUE 9.30e-02; EST_HUMAN HIT: AL121474.1, EVALUE 1.70e+00; SWISSPROT HIT: P28191, EVALUE 1.30e+00
gtagttgtgatgagcattcttggtatacttgcaattcaaggcagagcagatggtgaaggctgcatgcccatactgcatcctctgatcctgtctgcagatgctcaaggccatgaggtaaacagcccctttgggcttccaatcctaactgctgaaggagtcctctctcttgtactaaatgacacttt

SEQ ID NO: 30675 - DNA, 176 bp, Homo sapiens
  MAP TO AL078590.12; EXPRESSED IN ADULT LIVER, SIGNAL = 1.9; EXPRESSED IN BT474, SIGNAL = 1.1; EXPRESSED IN LUNG, SIGNAL =   1; EXPRESSED IN BONE MARROW, SIGNAL =   1; EXPRESSED IN PLACENTA, SIGNAL = 0.89; EXPRESSED IN HELA, SIGNAL = 1.7; EXPRESSED IN HBL100, SIGNAL = 1.2; EXPRESSED IN FETAL LIVER, SIGNAL = 1.2; NT HIT: AL163278.2, EVALUE 3.00e-35; EST_HUMAN HIT: AI435225.1, EVALUE 4.00e-44; SWISSPROT HIT: O33280, EVALUE 2.90e+00
aattatctatttcggaaaaatcagtttcatcaaatgaatctacggccaacaactgcttgagaatgatgttaacatcacgcgtaggaatgctacgttttctaggatttgacattttcagcaatcgagaattactatattttgtaaatagaagtaccactactacaaacagaatacta

SEQ ID NO: 30676 - DNA, 92 bp, Homo sapiens
  MAP TO AL034351.1; EXPRESSED IN HBL100, SIGNAL = 1.7; EXPRESSED IN ADULT LIVER, SIGNAL = 0.69; EST_HUMAN HIT: BF363958.1, EVALUE 1.10e+00; NT HIT: L05632.1, EVALUE 1.00e-02
taggagcgtccaggggccgcatgtgattctgatggatctggctaggtcaagtaggaagtttctgagctttacaaaagtgaaaactgtcctaa

SEQ ID NO: 30677 - DNA, 181 bp, Homo sapiens
  MAP TO AL096792.5; EXPRESSED IN HBL100, SIGNAL = 0.86; EXPRESSED IN ADULT LIVER, SIGNAL = 0.69; NT HIT: gi11496534, EVALUE 1.70e+00; SWISSPROT HIT: Q12627, EVALUE 3.90e+00; EST_HUMAN HIT: BF574065.1, EVALUE 1.60e-01
aaccgggaatatttacttacactcaagaaatatggtggtgaaccccttgatcaaaagagatgaccttgaacactgttccctaaagaaaaaaaaatttattataaattatacttacttaatatttattatcactagtaatgtcatcagagccagacttaattccagcaaaaaggtccggagt

SEQ ID NO: 30678 - DNA, 669 bp, Homo sapiens; identical to SEQ ID NO: 17589
  MAP TO AP000099.1; EXPRESSED IN BONE MARROW, SIGNAL = 2.4; EXPRESSED IN ADULT LIVER, SIGNAL = 1.3; SWISSPROT HIT: P04930, EVALUE 1.20e+00; NT HIT: AE000843.1, EVALUE 6.70e+00; EST_HUMAN HIT: AA983508.1, EVALUE 1.70e+00

SEQ ID NO: 30679 - DNA, 93 bp, Homo sapiens
  MAP TO AC004885.2; EXPRESSED IN ADULT LIVER, SIGNAL = 0.81; NT HIT: AL161585.2, EVALUE 3.00e+00; EST_HUMAN HIT: AA861824.1, EVALUE 2.00e-01; SWISSPROT HIT: Q91437, EVALUE 1.40e+00
acggcaggcatggacatgcatattcgtacaacaaccatgtcttcatttctcagcatttcaaaagcatcaaacgttttctcaaccccaagctcc

SEQ ID NO: 30680 - DNA, 149 bp, Homo sapiens
  MAP TO AC006448.4; EXPRESSED IN ADULT LIVER, SIGNAL = 0.66; EST_HUMAN HIT: AI818839.1, EVALUE 8.70e-02; SWISSPROT HIT: P27989, EVALUE 6.70e+00; NT HIT: AF003528.1, EVALUE 1.30e+00
atgctgttattacacatacagcaaatgttgctatgttactgaaaaccgtaaactgcacaaatgatatcagtcttaacaaaaatgaaactgtctgtagactagggtttaagggtaagggtgtgtgtgtttatgtttcaatctacccacca

SEQ ID NO: 30681 - DNA, 112 bp, Homo sapiens
  MAP TO AC006499.11; EXPRESSED IN PLACENTA, SIGNAL = 0.7; EXPRESSED IN ADULT LIVER, SIGNAL = 1.7; EXPRESSED IN BONE MARROW, SIGNAL = 5.1; NT HIT: D13567.1, EVALUE 2.10e-01; EST_HUMAN HIT: AU134076.1, EVALUE 1.40e+00; SWISSPROT HIT: P37084, EVALUE 9.10e+00
ttctacctagatcttccagctcaagccatccccaaatacatggcaatcttgactcagatgatctccaggtacagcgaggtgagtgtttcatatgcaggccatgttttcacag

SEQ ID NO: 30682 - DNA, 89 bp, Homo sapiens
  MAP TO AC007364.2; EXPRESSED IN ADULT LIVER, SIGNAL = 0.74; EXPRESSED IN FETAL LIVER, SIGNAL = 0.71; NT HIT: AF157898.1, EVALUE 6.20e-01; EST_HUMAN HIT: BF306992.1, EVALUE 1.10e+00
tcagtagtggttcaccttctgtgggggcctaccctccaggttgtcaggggcaggctcaatctcgatgaggagcaggtcttctttgtttc

SEQ ID NO: 30683 - DNA, 157 bp, Homo sapiens
  MAP TO AF121898.1; EXPRESSED IN PLACENTA, SIGNAL = 0.9; EXPRESSED IN ADULT LIVER, SIGNAL =   1; EXPRESSED IN FETAL LIVER, SIGNAL = 0.93; NT HIT: AL163208.2, EVALUE 1.40e+00; EST_HUMAN HIT: AW844307.1, EVALUE 2.30e-02; SWISSPROT HIT: O14975, EVALUE 2.90e+00
cttcaagcttgaagagctggagacagcagagagagtggaagagtgggaggaacaggagatcagtaaagtagataaacaggaaagaaagaaaccctacttctttctccagtgcagacttctgagactgatcagcctctatgtggggctacaaaaattg

SEQ ID NO: 30684 - DNA, 94 bp, Homo sapiens
  MAP TO AC007935.1; EXPRESSED IN ADULT LIVER, SIGNAL = 0.83; NT HIT: Z28337.1, EVALUE 6.60e-01
atttttcgtaatctttcttctccttcaatagcaacaatggaggccatgtattgaaatcgtatgacacgaagagcctgagttttataggtatcac

SEQ ID NO: 30685 - DNA, 211 bp, Homo sapiens
  MAP TO AC007455.7; EXPRESSED IN ADULT LIVER, SIGNAL = 0.67; SWISSPROT HIT: O76013, EVALUE 1.00e-21; NT HIT: gi11425631, EVALUE 5.00e-04; EST_HUMAN HIT: BF569905.1, EVALUE 8.00e-04
ctggtatggtgaaggcatcaacagtaatgagaaggagaccatgcaaatcttgaacgagcgccttgctaactacctgcaaaaggtgcgaatgctagaacgagagaatgctgaactggaatctaaaatccaggaagaaagtaacaaagagctccctgttctatgtcctgattacctgtcttactacactaccattgaggagctccagcagaag

SEQ ID NO: 30686 - DNA, 243 bp, Homo sapiens
  MAP TO AC007939.1; EXPRESSED IN HELA, SIGNAL = 0.71; EXPRESSED IN ADULT LIVER, SIGNAL = 0.71; SWISSPROT HIT: P45969, EVALUE 2.00e-03
gtatttccaagatgactaaattaactcgcctcagcataaataataatcttctcactggttgggaagagcatacctttgataacatgcttcatcttcactcgctttctcttgagaacaacagaatcacttcattgagtggtttacaaaaatcttttactcttgttgagttatacataagcaataactatattgctgtcaatcaggagatgcacaatttaaaggtaatcatctgggtagtaattt

SEQ ID NO: 30687 - DNA, 520 bp, Homo sapiens
  MAP TO AB023056.1; EXPRESSED IN HELA, SIGNAL = 0.85; EXPRESSED IN ADULT LIVER, SIGNAL = 0.71; EXPRESSED IN BONE MARROW, SIGNAL = 0.8; EXPRESSED IN HBL100, SIGNAL = 1.3; EXPRESSED IN PLACENTA, SIGNAL = 0.64; EXPRESSED IN FETAL LIVER, SIGNAL = 0.67; EXPRESSED IN LUNG, SIGNAL = 1.2; SWISSPROT HIT: P00164, EVALUE 4.00e-03; NT HIT: U53588.1, EVALUE 0.00e+00
gtactgtttggtacctgagagagagatgaaacacatagaaaggcacatacatcaaacaggaaaggctggagaatttaagaacaaaccatttagacaagtactacaaccccccaatgaaacaaaattaccaaaaattatgccagaagggcatggcatccagaacgcacagagaagaaagcaggtaaatgagagggaacagatgcagactaaggatcaccaggaacgcatgattcgagggagagaacttgcagaacaaagactcaaggagagaatcttgagaagaagccagagccagctacttacatatgagaagcatgagagagtaaaagagataaaggagtttgaaagagttattgcgtatcttcttttccaaccatgcagtagaagtcggattaaagtgagtattcttatggataagtctcagaatggagagaaggtgaatacaattgtgaaaccatatcaaagaaaattcttggcaatgccaccctttttaagaagtcaaataggaaaaataagagat

SEQ ID NO: 30688 - DNA, 161 bp, Homo sapiens
  MAP TO AC012444.1; EXPRESSED IN FETAL LIVER, SIGNAL = 0.98; EXPRESSED IN ADULT LIVER, SIGNAL = 0.95; EXPRESSED IN LUNG, SIGNAL =   1; EST_HUMAN HIT: BF215466.1, EVALUE 5.50e-01; NT HIT: U63157.1, EVALUE 1.50e+00; SWISSPROT HIT: O66437, EVALUE 6.60e+00
caagacttctacacaaaaagtactttaaaatactgagagaaattttaagagatcttagatatattaaggaatatacaaaaatggccagtaatgataagactgttttaaagaaaaggaacagagttgcagaattgatagtgccagatatcaagattgattag

SEQ ID NO: 30689 - DNA, 379 bp, Homo sapiens
  MAP TO AC006548.19; EXPRESSED IN ADULT LIVER, SIGNAL = 0.79; EST_HUMAN HIT: BE535440.1, EVALUE 6.00e-46; NT HIT: gi11437238, EVALUE 3.00e-22; SWISSPROT HIT: P14373, EVALUE 1.00e-11
aaaaatggacttagacttcccacaagccttccagaaagaactcgcctgcctcatctgcctgaattacctcatagaccccatcactataggctgcgggcacagtttctgtaggccctgcctctgcctttgctgggaagaagcacatattcctgccctgcatgcagggaactgtcacagcaggaagatttcaaccaatattcctctgaagaatctagtgtccattgccagaaaagccagtctctggcaattcctgagctctaatgaacaaatgtgtgggatccacagggagacaaagatgttctgtgatgtggacaagagcttgctctgttttctgtgttctaactctcaggaacactggggcacagaaacactggcccac

SEQ ID NO: 30690 - DNA, 119 bp, Homo sapiens
  MAP TO AC005399.14; EXPRESSED IN ADULT LIVER, SIGNAL = 0.92; SWISSPROT HIT: P36917, EVALUE 5.20e+00; EST_HUMAN HIT: AI827753.1, EVALUE 2.70e-01
gaaaggaatgccttccaggtgatccaggctctgatacggtggaatataaacaggttaatcaataatagcccagaaatggacaaactctctgagctgcagcggacctccagtcagtccct

SEQ ID NO: 30691 - DNA, 77 bp, Homo sapiens
  MAP TO AC006499.11; EXPRESSED IN ADULT LIVER, SIGNAL =   1; EST_HUMAN HIT: AI017141.1, EVALUE 1.60e-01
gcagcccttgattcttggcttttggctccatttttggcttcagaagctgggacatcccgtcagcttcagagatgctc

SEQ ID NO: 30692 - DNA, 166 bp, Homo sapiens
  MAP TO AC006390.8; EXPRESSED IN BONE MARROW, SIGNAL = 1.3; EXPRESSED IN BT474, SIGNAL = 0.67; EXPRESSED IN ADULT LIVER, SIGNAL = 0.65; SWISSPROT HIT: Q09384, EVALUE 5.80e-01; EST_HUMAN HIT: AV645367.1, EVALUE 1.40e-01; NT HIT: gi10946835, EVALUE 9.70e-02
gcctttcatcagtggcatgcctgatcatgcccatctgaccctgaaacaggccattggcctgagcctggaacttgggagcagccttcttccagcggccaaaggtgtaggggctccatcccagctgcagttggcagtcacgcttccgcttctgaggaggaagcaggcg

SEQ ID NO: 30693 - DNA, 110 bp, Homo sapiens
  MAP TO AC007200.1; EXPRESSED IN ADULT LIVER, SIGNAL = 1.1; NT HIT: X99711.1, EVALUE 5.10e-02; EST_HUMAN HIT: AI769132.1, EVALUE 1.60e-02; SWISSPROT HIT: P34356, EVALUE 3.10e+00
attcctccctcccccaatgttcactctattgttttattatgtgttgacatcagcctgcggacgatggtgttctggcagagtccccttccgtggctttctgaataccactg

SEQ ID NO: 30694 - DNA, 110 bp, Homo sapiens
  MAP TO AL096794.3; EXPRESSED IN PLACENTA, SIGNAL = 0.65; EXPRESSED IN ADULT LIVER, SIGNAL = 0.67; EXPRESSED IN LUNG, SIGNAL = 0.63; NT HIT: X96581.1, EVALUE 9.40e-01; EST_HUMAN HIT: AA063015.1, EVALUE 3.50e-01; SWISSPROT HIT: P05152, EVALUE 9.10e+00
taaacaccatgttttatccacagggagaaccatattctgccctgtcccttatacacagtaaaatgctttgaacttttctggacatcattagggatgtgtaaagccaacat

SEQ ID NO: 30695 - DNA, 203 bp, Homo sapiens
  MAP TO AL049874.2; EXPRESSED IN PLACENTA, SIGNAL = 0.59; EXPRESSED IN ADULT LIVER, SIGNAL =  11; SWISSPROT HIT: Q10259, EVALUE 2.80e+00
cgtggtttctctgcccacacctgacattcaagggcattttgcaaaggaaatcagtgaggatgaaaatccaagtcacttgatggctgcgtgattcaaaaggcaaaactagtctcgtcttcctcttatacccaaattggagaaaagttataactgtgagtttacagaagacaagatgaatggtactgtcacaatcatagtcccca

SEQ ID NO: 30696 - DNA, 258 bp, Homo sapiens; identical to SEQ ID NO: 19351
  MAP TO AC000052.8; EXPRESSED IN ADULT LIVER, SIGNAL = 0.65; SWISSPROT HIT: P22105, EVALUE 2.70e-01; EST_HUMAN HIT: BF372962.1, EVALUE 3.00e-13

SEQ ID NO: 30697 - DNA, 85 bp, Homo sapiens
  MAP TO AC007158.5; EXPRESSED IN ADULT LIVER, SIGNAL = 2.1; NT HIT: L27316.1, EVALUE 5.90e-01
cccaggtaagttttgggtacttggagacattgatcttttgcaaatctgagaagccagcacagcccgtgtctcctttaagtgaatc

SEQ ID NO: 30698 - DNA, 132 bp, Homo sapiens
  MAP TO AB020875.1; EXPRESSED IN ADULT LIVER, SIGNAL = 1.6; EXPRESSED IN HBL100, SIGNAL = 1.2; NT HIT: AL163249.2, EVALUE 4.60e+00
ttgggagatctctaaacactttctatcccatccagtagctgtaagactgctggttttcacaattaccatgctcgtgaggctgttggttttcactgctactgtgcaggaaaacagaaatagaaatagtgtgtg

SEQ ID NO: 30699 - DNA, 208 bp, Homo sapiens
  MAP TO AC007115.1; EXPRESSED IN ADULT LIVER, SIGNAL = 4.1; NT HIT: gi11435940, EVALUE 1.00e-114; EST_HUMAN HIT: BE011744.1, EVALUE 5.00e-01; SWISSPROT HIT: P51888, EVALUE 7.00e-14
ttcataacagacactgtgtggtctagaagtgtgaggcaggtctatgaagtacatgattcagatgattggactattcatgacttcgagtgtcccatggaatgtttctgcccacccagttttcctactgctttatattgtgaaaatagaggtctcaaagaaattcctgctattccttcaagaatttggtatctttatcttcaaaacaacc

SEQ ID NO: 30700 - DNA, 155 bp, Homo sapiens
  MAP TO AC007739.1; EXPRESSED IN HELA, SIGNAL = 0.76; EXPRESSED IN ADULT LIVER, SIGNAL = 0.68; EXPRESSED IN PLACENTA, SIGNAL = 0.92; EXPRESSED IN BONE MARROW, SIGNAL = 0.65; EXPRESSED IN LUNG, SIGNAL = 0.73; EXPRESSED IN FETAL LIVER, SIGNAL = 0.58; EST_HUMAN HIT: BF693708.1, EVALUE 5.30e-01; SWISSPROT HIT: P56727, EVALUE 6.60e+00
acaaagagatcaatggaacaggagggtccagaaaccagttctcaaaatggtcatttttccttatgttagggatgctggaagaaacttcagtaataatacctcccaagttacctgtggatttgagagggagaatggtatctactgtctactcttga

SEQ ID NO: 30701 - DNA, 176 bp, Homo sapiens; identical to SEQ ID NO: 20779
  MAP TO AP000177.1; EXPRESSED IN ADULT LIVER, SIGNAL = 0.76; NT HIT: gi7549762, EVALUE 1.40e+00; EST_HUMAN HIT: AW819412.1, EVALUE 1.10e-01; SWISSPROT HIT: P13729, EVALUE 2.90e+00

SEQ ID NO: 30702 - DNA, 182 bp, Homo sapiens
  MAP TO AP000236.1; EXPRESSED IN ADULT LIVER, SIGNAL = 0.94; EXPRESSED IN PLACENTA, SIGNAL = 0.62; SWISSPROT HIT: P27023, EVALUE 2.50e-01; EST_HUMAN HIT: AW957076.1, EVALUE 1.70e+00
tctgtcagcctttcctggtgtatttcctcacccacaatgttaggaggggacttgttcccagactgtgtcgagggcatcgtagcacttaggaatgttggctgagtgaattgcaccacaatatcagcttcatggggcagggacttttgttctgctgtttgcagctggtagaataaaggtatctg

SEQ ID NO: 30703 - DNA, 100 bp, Homo sapiens
  MAP TO AL031586.2; EXPRESSED IN PLACENTA, SIGNAL = 0.92; EXPRESSED IN ADULT LIVER, SIGNAL =   1; EXPRESSED IN LUNG, SIGNAL =   1; NT HIT: AF057019.1, EVALUE 2.00e-04
attttagtgaggaataaatgttaattatcagcattattattgttgccatcattgttatcaccatcatcatgaatattatcaatgaatgtccaaaaactct

SEQ ID NO: 30704 - DNA, 229 bp, Homo sapiens
  MAP TO AF155238.1; EXPRESSED IN HBL100, SIGNAL =   4; EXPRESSED IN BONE MARROW, SIGNAL = 0.91; EXPRESSED IN ADULT LIVER, SIGNAL =   1; EXPRESSED IN FETAL LIVER, SIGNAL =  10; NT HIT: AL163227.2, EVALUE 1.20e-01; SWISSPROT HIT: P10404, EVALUE 3.00e+00
ctgtcagctcaggtttccaaaagcagcgtccagtggaggaggtggaagctgctttgcagggaacataattactctctccatgccctgctggggtggagccgtcgcaggctgagtagtccaggggcgaggcagaaactgccactctggttgggagcatggcagagttacatggtagaagagcatgtgagatgggatatatggttgcaacttttgttgagtcaaaaagcat

SEQ ID NO: 30705 - DNA, 108 bp, Homo sapiens
  MAP TO AL049610.9; EXPRESSED IN BONE MARROW, SIGNAL = 0.79; EXPRESSED IN ADULT LIVER, SIGNAL = 0.94; EXPRESSED IN FETAL LIVER, SIGNAL = 0.63; EXPRESSED IN PLACENTA, SIGNAL = 0.68; EXPRESSED IN HELA, SIGNAL = 0.75; EST_HUMAN HIT: AA401574.1, EVALUE 3.00e-38; NT HIT: U50471.1, EVALUE 5.00e-02
gagggagaacaacaactcaagcccaacaactctaatgcacccaatgaagatcaagaagaagaaatccaacagtcagaacaggcaagtggtggtttctcaattccaact

SEQ ID NO: 30706 - DNA, 121 bp, Homo sapiens
  MAP TO AF152365.1; EXPRESSED IN ADULT LIVER, SIGNAL = 0.93; EXPRESSED IN BONE MARROW, SIGNAL = 0.97; NT HIT: AF061308.1, EVALUE 2.30e-01; EST_HUMAN HIT: AI445880.1, EVALUE 6.20e+00
tgttatgatggacagattccattttatccaactacccagctccgagaatataaaaatgagcaaaaggaggagaagtgtgatagtttcaccagctacacaaatactagttcaagtaatggct

SEQ ID NO: 30707 - DNA, 215 bp, Homo sapiens
  MAP TO AL031121.5; EXPRESSED IN FETAL LIVER, SIGNAL = 4.1; EXPRESSED IN ADULT LIVER, SIGNAL = 1.2; EXPRESSED IN HBL100, SIGNAL = 1.8; EXPRESSED IN HELA, SIGNAL =   1; NT HIT: AB029900.1, EVALUE 4.30e-01; SWISSPROT HIT: P51843, EVALUE 3.50e+00
caagaaggggacattgacaaagacccccagggatgatggatccgtgaggaaaacgttccagcccacagaaagcacatgcaaaggccccaagaagggacacgtcggtgccttgaaggaggccagtgcccgagtgaaggcaagagtggtaggaggtgacagggaaggtggccggcagttcatgtagagacttcactgtgaggacactgacggtgacc

SEQ ID NO: 30708 - DNA, 147 bp, Homo sapiens
  MAP TO AC009236.1; EXPRESSED IN ADULT LIVER, SIGNAL = 0.66; EST_HUMAN HIT: AA587031.1, EVALUE 3.40e-01; SWISSPROT HIT: P24821, EVALUE 2.30e+00
acttgaccctgctccacgtctctgacaggaaggcctgtcttccttcccgtctgcccccaggcatgcaaggaccaagccagggtcaaggagtggaagagcagcttatcctccagaagcctagaggtgaggctctaagtgggaactttc

SEQ ID NO: 30709 - DNA, 111 bp, Homo sapiens
  MAP TO AL031591.18; EXPRESSED IN HBL100, SIGNAL = 0.72; EXPRESSED IN FETAL LIVER, SIGNAL = 0.6; EXPRESSED IN HELA, SIGNAL = 0.76; EXPRESSED IN ADULT LIVER, SIGNAL = 0.67; EST_HUMAN HIT: H55124.1, EVALUE 3.00e-56; SWISSPROT HIT: P48739, EVALUE 2.00e-17; NT HIT: gi11417905, EVALUE 3.00e-56
cttttgaatgaagttttctactttgctttgcagtccccaccacttgaatttgatggtcaccagcttataggcacacatctggggacagtcagggctgtttgccagctcctt

SEQ ID NO: 30710 - DNA, 212 bp, Homo sapiens; identical to SEQ ID NO: 30387
  MAP TO AL121756.6; EXPRESSED IN ADULT LIVER, SIGNAL = 1.1; SWISSPROT HIT: Q61768, EVALUE 5.80e-02; NT HIT: X90980.1, EVALUE 1.30e-01; EST_HUMAN HIT: AI911291.1, EVALUE 1.30e-01

SEQ ID NO: 30711 - DNA, 680 bp, Homo sapiens
  MAP TO AL021327.1; EXPRESSED IN LUNG, SIGNAL =   1; EXPRESSED IN HBL100, SIGNAL = 0.98; EXPRESSED IN FETAL LIVER, SIGNAL = 0.92; EXPRESSED IN ADULT LIVER, SIGNAL = 1.1; NT HIT: AL163202.2, EVALUE 1.70e+00; EST_HUMAN HIT: AW817107.1, EVALUE 7.00e-03; SWISSPROT HIT: O65333, EVALUE 3.50e+00
taaaaggcaggtgtggtcaatagtagccactgtaagcaaattacgctgtatggggcagggaaatacataattggttataaaaattaagaagccctgagtgattttttcaagggtggtttcagaaacaccctgagaagtccatgcagctacagcttttgctgaaccagacctgaacactgcttctgctgctctgggacttacactagtggccatggtattcccaaggccataaaatacatgaccacaattagtgggcagaagcaaatctccctggaaaaatctttgtacgcacaatgccttcccaaaggctttgaccagagtgtgttatctgtcatcatctactctattgcataaaccacctaggcccctctgtggaagccattcaatcaagataaagtccctttactttgataaagagaaatagcaaagtacaaagctgatatttcctacctaatgccccttccaagccctgtcttaattgacttctaagctctcgtgtctgactttttatggtgattttcttctgtctctctcttcttcaacacttctttctgccaaaaaaaaaaaaaaacaaaaattacataggacatgaaaaccttctaaatcaacaacaacaacaaaaaagactaatctttttttgttcttctcattttccatttatatttttcattccaaaaaat

SEQ ID NO: 30712 - DNA, 313 bp, Homo sapiens
  MAP TO AL021393.1; EXPRESSED IN LUNG, SIGNAL = 0.98; EXPRESSED IN ADULT LIVER, SIGNAL = 0.97; EST_HUMAN HIT: AA845499.1, EVALUE 0.00e+00; SWISSPROT HIT: P03204, EVALUE 8.60e-01; NT HIT: gi11417917, EVALUE 0.00e+00
cccagagcttttgtttaatggccttgcccagctccaggctgtacctcttgggggtccctgaaggattccacagcattggctccaccacagcgtggtacagagcctggtaaccctctgtggggagaccatggatggttagcgtgtcctccgacaactgctgtctcttttgggtttcaggaagcaacactcggcccttccaggctgctgtcccactgtcctggggtagcgcttgggtggcagccacatgttcagcatatctgtcctcaagatcttggcggactgttagttttttctcctttgaactttctttact

SEQ ID NO: 30713 - DNA, 257 bp, Homo sapiens
  MAP TO AP000136.1; EXPRESSED IN ADULT LIVER, SIGNAL = 0.66; SWISSPROT HIT: P18583, EVALUE 3.00e+00; EST_HUMAN HIT: BE736102.1, EVALUE 9.20e-01
atgtctggagctcagtaggaaagccagcactacaaagacaaattgtgaattctatgatgtctttgtattaactcaggctgtacatgaaagtgtaaagagatttcctagcagggagagcatagagtgtgaagaggagagacaaagattgagctcgacccaggaaaggacggaatgtgcaaaggagtcagagacagagcatctcaggcagtaagagcaaaccaaaaaacaatcatgataaaaattcattattttaaaaa

SEQ ID NO: 30714 - DNA, 198 bp, Homo sapiens; identical to SEQ ID NO: 17126
  MAP TO AP000117.1; EXPRESSED IN FETAL LIVER, SIGNAL = 0.94; EXPRESSED IN HELA, SIGNAL = 0.78; EXPRESSED IN ADULT LIVER, SIGNAL = 0.7; NT HIT: gi4504796, EVALUE 3.00e-79; EST_HUMAN HIT: AA985166.1, EVALUE 2.00e-74; SWISSPROT HIT: Q01722, EVALUE 4.30e-01

SEQ ID NO: 30715 - DNA, 81 bp, Homo sapiens
  MAP TO AC009309.1; EXPRESSED IN HELA, SIGNAL = 0.67; EXPRESSED IN ADULT LIVER, SIGNAL = 0.76; EXPRESSED IN HBL100, SIGNAL = 0.75; EXPRESSED IN FETAL LIVER, SIGNAL = 0.63; EST_HUMAN HIT: BF371875.1, EVALUE 2.00e-38; NT HIT: AL163249.2, EVALUE 3.50e-02; SWISSPROT HIT: P09866, EVALUE 1.20e-01
cttctgaaaatatttggggtatgaattaataataaacttggccacattctccccggatttctttgccagtaaaaatgaacg

SEQ ID NO: 30716 - DNA, 283 bp, Homo sapiens
  MAP TO AL034431.13; EXPRESSED IN BONE MARROW, SIGNAL =   1; EXPRESSED IN ADULT LIVER, SIGNAL = 0.94; NT HIT: AF187974.1, EVALUE 2.00e-03; SWISSPROT HIT: P10388, EVALUE 1.80e-01
ccagactgagggcatctgtggcgacttcctggaaaaggtgatgtctcaactgagtcccgaagacaagtgagagaggtggcagccagggaaggaagggcagtccatgcagaagaggcagcaggatggggtaagagctggtctcccttccaggatcagttttctccagggtagacgaggaagccgaggtttgcctggcagctgctcccagcgtcccattcatttgcagctccctgctcagggctcctcctggctgctcccggctgtgccatggacccctgctcat

SEQ ID NO: 30717 - DNA, 106 bp, Homo sapiens
  MAP TO AP000167.1; EXPRESSED IN FETAL LIVER, SIGNAL = 0.57; EXPRESSED IN HELA, SIGNAL = 0.6; EXPRESSED IN ADULT LIVER, SIGNAL = 0.67; EST_HUMAN HIT: BF032407.1, EVALUE 3.40e-01; SWISSPROT HIT: Q13796, EVALUE 2.40e+00; NT HIT: AF275366.1, EVALUE 5.80e-02
ccaggaagcgctggctgtcctgaaggtgctcagtctgaaggtgtcgggcccaggtgtaggaagcagagccagaggaccaggatgggaaggcactgggcccgcggtg

SEQ ID NO: 30718 - DNA, 89 bp, Homo sapiens
  MAP TO AC008166.1; EXPRESSED IN FETAL LIVER, SIGNAL = 0.58; EXPRESSED IN LUNG, SIGNAL = 0.71; EXPRESSED IN HELA, SIGNAL = 0.9; EXPRESSED IN ADULT LIVER, SIGNAL = 0.7; NT HIT: AB042297.1, EVALUE 4.00e-02; EST_HUMAN HIT: AW855116.1, EVALUE 4.80e-02
aattcaagcatgaactcttctgtttctctcttgaaatataatttgaactctttatgttgtatgtagccaaaaatcacagatgatgcagc

SEQ ID NO: 30719 - DNA, 153 bp, Homo sapiens
  MAP TO AL021307.1; EXPRESSED IN ADULT LIVER, SIGNAL = 1.1; NT HIT: AF200261.1, EVALUE 5.40e+00; EST_HUMAN HIT: AI652527.1, EVALUE 6.00e-03; SWISSPROT HIT: P14344, EVALUE 1.30e+00
atcatgcgatacgtaaacaaaatggtcaatgtgtacgtaattttgctagataatgccgtatttttatttacagaaaatatacatattatgtttccaacagcagtttgtgagaatgtatttgcctccacaatctcagccatgtatgtagcaaaa

SEQ ID NO: 30720 - DNA, 153 bp, Homo sapiens
  MAP TO AC006346.1; EXPRESSED IN FETAL LIVER, SIGNAL = 2.5; EXPRESSED IN ADULT LIVER, SIGNAL = 4.4; EXPRESSED IN HBL100, SIGNAL = 1.6; NT HIT: AF005392.1, EVALUE 7.50e-02; EST_HUMAN HIT: R10039.1, EVALUE 6.00e-37; SWISSPROT HIT: P42306, EVALUE 6.60e+00
aagaagaaatatcctgacctctttctcttcctgccctccaatatcctgctagagccttccataggccccacccaagataaacacagagagcagagagtcccagtcatgcaaatgacaagggtcagcttcgcagagcacagggaagacatggaa

SEQ ID NO: 30721 - DNA, 128 bp, Homo sapiens
  MAP TO AC004852.2; EXPRESSED IN ADULT LIVER, SIGNAL = 0.91; SWISSPROT HIT: O13332, EVALUE 4.00e+00; NT HIT: AF224669.1, EVALUE 1.00e-21; EST_HUMAN HIT: H87208.1, EVALUE 1.00e-21
gtcaggattatcaatatcactgtctgccaccctcacaccttgtcccatcgaaaggttttcatgggcaataacatacatggagctgttatctcctgtgataacaatgccttctcctggaatgcctccta

SEQ ID NO: 30722 - DNA, 351 bp, Homo sapiens
  MAP TO AC007103.4; EXPRESSED IN ADULT LIVER, SIGNAL = 0.78; EXPRESSED IN PLACENTA, SIGNAL = 0.6; NT HIT: AL163209.2, EVALUE 8.60e-01; EST_HUMAN HIT: AW902219.1, EVALUE 2.00e-07; SWISSPROT HIT: P08547, EVALUE 4.00e-05
ccatttgaggactgccagaatgtcttccaacatggcagtcccaactgggatgaggtatgcaggttccaatttctccacatacttgccaacaaatgtaattatcagttttttattattaaagccatccttgtgggcgtaaagaacctcattggggtttccaataaggtttccctgactgctaatgatatcgagcaccttttcatgtgtctttttagacacttgtgtgtcttctttaggaaaatatctattctgatttttgctgatttttatagagttatttatgttttgattattgagttttaatatgtctttacatattctagatatagacatacagagcttaatgctaat

SEQ ID NO: 30723 - DNA, 77 bp, Homo sapiens
  MAP TO AC007130.2; EXPRESSED IN BT474, SIGNAL = 0.74; EXPRESSED IN LUNG, SIGNAL = 0.8; EXPRESSED IN FETAL LIVER, SIGNAL = 0.58; EXPRESSED IN HELA, SIGNAL = 0.59; EXPRESSED IN ADULT LIVER, SIGNAL = 0.84; NT HIT: J04628.1, EVALUE 2.00e-22; SWISSPROT HIT: P29266, EVALUE 5.00e-07; EST_HUMAN HIT: BF340337.1, EVALUE 6.00e-36
ctgattccaagattcatagcttcagcagttccaatcatactaatagctaacagcatgttgttgcagatctttgccgc

SEQ ID NO: 30724 - DNA, 160 bp, Homo sapiens
  MAP TO AL121575.6; EXPRESSED IN FETAL LIVER, SIGNAL = 1.7; EXPRESSED IN ADULT LIVER, SIGNAL = 1.3; EXPRESSED IN BONE MARROW, SIGNAL = 1.4; NT HIT: gi10947138, EVALUE 3.00e-85; EST_HUMAN HIT: AV652048.1, EVALUE 4.00e-85; SWISSPROT HIT: P05089, EVALUE 6.00e-26
tttggcaattggaagcatctctggccatgccagggtccaccctgatcttggagtcatctgggtggatgctcacactgatatcaacactccactgacaaccacaagtggaaacttgcatggacaacctgtatctttcctcctgaaggaactaaaaggaaag

SEQ ID NO: 30725 - DNA, 102 bp, Homo sapiens
  MAP TO AP000076.1; EXPRESSED IN HBL100, SIGNAL = 0.91; EXPRESSED IN ADULT LIVER, SIGNAL = 1.2; EXPRESSED IN LUNG, SIGNAL = 0.93; EXPRESSED IN BONE MARROW, SIGNAL = 1.5; NT HIT: AB026833.1, EVALUE 8.60e-01; EST_HUMAN HIT: H60548.1, EVALUE 2.20e-01
ctctgaagggcatattactccatctgtcaggatatgccttctcttggtagcattacaactcaaaggcaagtcgatgggaaatttaatcctttccccaggcat

SEQ ID NO: 30726 - DNA, 167 bp, Homo sapiens
  MAP TO AC007539.8; EXPRESSED IN HELA, SIGNAL = 3.9; EXPRESSED IN ADULT LIVER, SIGNAL =   1; EXPRESSED IN PLACENTA, SIGNAL = 0.6; EST_HUMAN HIT: AU142869.1, EVALUE 4.00e-79; NT HIT: gi9966844, EVALUE 1.00e-81; SWISSPROT HIT: P38250, EVALUE 3.90e-02
tcatccagtttggttttgtcaccctcttcgtggcctcctttcccctggcacctgtgtttgccctcctcaacaacgtcattgaagtgcggctcgatgcaaagaagtttgttacagagctgagacggccggatgctgtaagaaccaaagatatcggtacgtgccccact

SEQ ID NO: 30727 - DNA, 155 bp, Homo sapiens
  MAP TO AC006430.15; EXPRESSED IN FETAL LIVER, SIGNAL = 1.3; EXPRESSED IN ADULT LIVER, SIGNAL = 1.6; EST_HUMAN HIT: AV660086.1, EVALUE 4.00e-82; SWISSPROT HIT: P01031, EVALUE 8.00e-24; NT HIT: gi11427631, EVALUE 2.00e-82
ataaatgaacatggcctgaggagtaactaaattttttatcaggataacttttaatagagattgttgcatcaaatgcttcagtgtatccataaacttgaatcacaatattttcagatgctccaacacggaatatttttggtgctgaaatgacatat

SEQ ID NO: 30728 - DNA, 160 bp, Homo sapiens
  MAP TO AC010766.2; EXPRESSED IN PLACENTA, SIGNAL = 1.6; EXPRESSED IN ADULT LIVER, SIGNAL = 0.97; NT HIT: AL163246.2, EVALUE 5.00e-19; SWISSPROT HIT: P03356, EVALUE 1.00e-02; EST_HUMAN HIT: AW998611.1, EVALUE 6.00e-34
agtccagtgcatttgctacttcttgctcactggatccaatcagcataatgtcatcaacataatggaccagcagtgtgatattttgcagaagcaaaaagccatcaaggtctcttcgaataagattatgacacaaagccagagagctgatatacccctgagg

SEQ ID NO: 30729 - DNA, 1101 bp, Homo sapiens
  MAP TO AP000118.1; EXPRESSED IN PLACENTA, SIGNAL = 0.65; EXPRESSED IN HELA, SIGNAL = 0.85; EXPRESSED IN BT474, SIGNAL = 0.62; EXPRESSED IN FETAL LIVER, SIGNAL = 0.67; EXPRESSED IN LUNG, SIGNAL = 0.73; EXPRESSED IN ADULT LIVER, SIGNAL = 0.87; NT HIT: gi11526218, EVALUE 0.00e+00; EST_HUMAN HIT: BE089541.1, EVALUE 0.00e+00; SWISSPROT HIT: P53794, EVALUE 0.00e+00
aaagaagccctgaaaatgctgcggaatccaacagatgaagatgttccttggcctggattcattcttgggcagaccccagcttcagtatggtactggtgtgctgaccaagtcatcgtgcagagggtccttgcagccaaaaacattgctcatgccaaaggctctactcttatggctggcttcttaaagctcctgccaatgtttatcatagttgtcccaggaatgatttccaggatactgtttactgatgatatagcttgcatcaacccagagcactgcatgctggtgtgtggaagcagagctggttgctccaatattgcttacccacgcctggtgatgaagctggttcctgtgggccttcggggtttaatgatggcagtgatgattgcagctctgatgagtgacttagactctatctttaacagtgccagtaccatattcaccctcgatgtgtacaaacttatccgcaagagcgcaagctcccgggagttaatgattgtggggaggatatttgtggcatttatggtggtgatcagcatagcatgggtgccaatcatcgtggagatgcaaggaggccagatgtacctttacattcaggaggtagcagattacctgacacccccagtggcagccttgttcctgctggcaattttctggaagcgctgcaatgaacaaggggctttctatggtggaatggctggctttgttcttggagcagtccgtttgatactggcctttgcctaccgtgccccagaatgtgaccaacctgataataggccgggcttcatcaaagacatccattatatgtatgtggccacaggattgttttgggtcacgggactcattactgtaattgtgagccttctcacaccacctcccacaaaggaacagattcgaaccaccaccttttggtctaagaagaacctggtggtgaaggagaactgctccccaaaagaggaaccataccaaatgcaagaaaagagcattctgagatgcagtgagaataatgagaccatcaaccacatcattcccaacgggaaatctgaagacagcattaagggccttcagcctgaagatgttaatctgttggtaacctgcagagag

SEQ ID NO: 30730 - DNA, 94 bp, Homo sapiens
  MAP TO AC008039.1; EXPRESSED IN BONE MARROW, SIGNAL = 0.78; EXPRESSED IN ADULT LIVER, SIGNAL = 0.66; EXPRESSED IN BT474, SIGNAL = 0.65; EST_HUMAN HIT: BE044260.1, EVALUE 4.00e-46; SWISSPROT HIT: P38241, EVALUE 9.20e+00
gctagccagcacatactcactgaccagttgctgcctgcacagcagtgttttcactgctgtgttggagaaacccgaagtcttaaagggccataag

SEQ ID NO: 30731 - DNA, 192 bp, Homo sapiens
  MAP TO AC010872.3; EXPRESSED IN FETAL LIVER, SIGNAL = 1.8; EXPRESSED IN ADULT LIVER, SIGNAL = 1.3; EST_HUMAN HIT: AV750284.1, EVALUE 3.00e-03; SWISSPROT HIT: P04114, EVALUE 1.00e-17; NT HIT: J02610.1, EVALUE 1.00e-104
catctgggggatcccctgcagagtgcgggcacccatcagaagcagctttcccaggagctggaggtcatggagactggcaaaaccaagctcctctcccaagatgcggaggtaggctctggcttccgggacttctttggatttcaaatctttaatcagcttctcaacactgagcattattccatttaccatatc

SEQ ID NO: 30732 - DNA, 94 bp, Homo sapiens
  MAP TO AC012666.1; EXPRESSED IN ADULT LIVER, SIGNAL = 1.6; EST_HUMAN HIT: H97809.1, EVALUE 1.10e+00; NT HIT: X17012.1, EVALUE 1.70e-01
tctttgggaacattgcagcttagctgataggtctgatttttctcctcatgctttgggcaacctctggaaggggtaaaggtgatgtttcggcttg

SEQ ID NO: 30733 - DNA, 76 bp, Homo sapiens
  MAP TO AL035409.15; EXPRESSED IN LUNG, SIGNAL = 0.61; EXPRESSED IN ADULT LIVER, SIGNAL = 0.69; EXPRESSED IN PLACENTA, SIGNAL = 0.63; EST_HUMAN HIT: BF574804.1, EVALUE 2.30e-01
cactccccaccctactctctattctccggcctggctgatttccctctcctttctgttcctgggaaacagtaagcat

SEQ ID NO: 30734 - DNA, 171 bp, Homo sapiens
  MAP TO AC007739.1; EXPRESSED IN LUNG, SIGNAL = 0.62; EXPRESSED IN HELA, SIGNAL = 0.66; EXPRESSED IN ADULT LIVER, SIGNAL = 0.68; EXPRESSED IN PLACENTA, SIGNAL = 0.61; EST_HUMAN HIT: W25935.1, EVALUE 1.50e-01; NT HIT: AB035321.1, EVALUE 3.40e-01
gttgctagcgtcttggcttttggtgttctctatagcatgttcaaaagttctgacatcaagcccagaatcaacattttccagaatgattatgtaactgtagtaggtctgttgcctgatgaattggggcaggtcaatacgccaagacaccaggttgcagaaaagaaagcagtt

SEQ ID NO: 30735 - DNA, 117 bp, Homo sapiens
  MAP TO AE000658.1; EXPRESSED IN ADULT LIVER, SIGNAL =   1; SWISSPROT HIT: P29809, EVALUE 2.30e+00; EST_HUMAN HIT: Z78330.1, EVALUE 4.00e-04; NT HIT: gi11428810, EVALUE 3.00e-04
ggtcatctttcctccttttatcctgctgctgctgctgcagcggctgccacttgctccatgctggtaggggccagaaattggcagtgggagatggggcatctgaccatccacagctga

SEQ ID NO: 30736 - DNA, 117 bp, Homo sapiens
  MAP TO AF127577.1; EXPRESSED IN ADULT LIVER, SIGNAL = 0.99; NT HIT: AL163208.2, EVALUE 7.00e-60; EST_HUMAN HIT: BE158362.1, EVALUE 4.00e-40
ctagttttcttgcaatttccaccacatctgcagttacttcctccactgatgtcttcaacccgccaaagttatccataaggggtggaagcagcttctttcaaactcctattaatgtta

SEQ ID NO: 30737 - DNA, 172 bp, Homo sapiens
  MAP TO AC006325.3; EXPRESSED IN ADULT LIVER, SIGNAL = 1.8; EXPRESSED IN BT474, SIGNAL = 2.2; NT HIT: AF060174.1, EVALUE 8.60e-02; SWISSPROT HIT: Q31125, EVALUE 2.60e-01
aatatagttaggagaacacagtgggaatttaacggaaggtagctgggtcagagtaactgtggccctttggatcagaatggtgctcaaagtcagtgtgactatggcccctttggtcacagtgacacttagggacctcatggtctgagtctccattcgacaagacaaaccagta

SEQ ID NO: 30738 - DNA, 836 bp, Homo sapiens
  MAP TO AC008269.1; EXPRESSED IN HELA, SIGNAL = 1.1; EXPRESSED IN ADULT LIVER, SIGNAL =   1; EXPRESSED IN BT474, SIGNAL = 1.3; EXPRESSED IN HBL100, SIGNAL = 0.92; EXPRESSED IN FETAL LIVER, SIGNAL = 0.6; EST_HUMAN HIT: AU117680.1, EVALUE 0.00e+00; SWISSPROT HIT: P12365, EVALUE 6.80e-01; NT HIT: gi11428892, EVALUE 0.00e+00
tcactagtagaagtgacgttggtttcatgttgacaactttgaagccatttggaagtgtttcagtggagagcaaaatgaataacaaagcgggctcctttttctggaaccttagacaattcagtacattagtttcaacaagcagaactatgaggctatgttgtttgggactttgcaaaccaaaaatagttcattcaaactggaacattttaaataactttcataacagaatgcaatcaactgatatcattagatatctctttcaggatgcattcatttttaaatcagatgttggctttcaaacaaagggcataagcactctaacagcccttagaattgaaagactactttatgctaaaagactgttttttgactcaaagcagtctcttgtccctgttgataaatctgatgatgaattgaagaaagtaaaccttaatcatgaagtctccaatgaagatgttcttaccaaggaaacaaaaccaaaccgtatcagcagtagaaaactgtctgaggaatgtaattccctgagtgatgtgttagatgcattttcaaaagcgcccacatttcctagtagcaactatttcacagcaatgtggacaattgccaaaagactgtctgatgaccagaagcgctttgaaaaacgactgatgtttagccaccctgcatttaatcagctctgtgaacatatgatgagagaagccaagatcatgcagtataagtacctactgttcagtcttcacgccatagtgaagcttggaatccctcagaacactattttggtgcagactttgctgagggtgacccaggtaaaataaaaaggagatttaaacatgcattta

SEQ ID NO: 30739 - DNA, 154 bp, Homo sapiens
  MAP TO AP000239.1; EXPRESSED IN LUNG, SIGNAL = 0.61; EXPRESSED IN ADULT LIVER, SIGNAL = 0.66; EXPRESSED IN HELA, SIGNAL = 0.86; EST_HUMAN HIT: AA248800.1, EVALUE 5.00e-04; SWISSPROT HIT: O51868, EVALUE 1.70e+00; NT HIT: U76377.1, EVALUE 7.50e-02
atccttggcttatggaccctttcctccatcctcaaagccagcaatctttcaattgaaagtagcatctttcaatttttcagtctctttctctctgtcttctatttctgtcatcacatcatcttctgtctctctgacccttcctgggtccctttta

SEQ ID NO: 30740 - DNA, 75 bp, Homo sapiens
  MAP TO AC007655.1; EXPRESSED IN ADULT LIVER, SIGNAL = 0.78; EST_HUMAN HIT: N73147.1, EVALUE 8.00e-35; NT HIT: Z74152.1, EVALUE 5.00e-01
atactctggggaggccttgttcattatcaggaggagatgaatctgaattacgctgttgaataacccaatcacagt

SEQ ID NO: 30741 - DNA, 122 bp, Homo sapiens
  MAP TO AP000221.1; EXPRESSED IN ADULT LIVER, SIGNAL = 5.1; NT HIT: AL163208.2, EVALUE 7.00e-08; SWISSPROT HIT: P52571, EVALUE 9.00e+00; EST_HUMAN HIT: AI791808.1, EVALUE 7.00e-06
gcgatgtgagcacacaaagagaaggcagccatctgcaagtgaggaagcaggctttcaccaggaacccaactggctggcatcttgatcttggacttctcagcctccaaactgtgagaaagtaa

SEQ ID NO: 30742 - DNA, 247 bp, Homo sapiens
  MAP TO AL031073.1; EXPRESSED IN BT474, SIGNAL = 0.94; EXPRESSED IN PLACENTA, SIGNAL = 1.1; EXPRESSED IN ADULT LIVER, SIGNAL = 1.3; EST_HUMAN HIT: AI961530.1, EVALUE 3.00e-43; SWISSPROT HIT: P31792, EVALUE 5.00e-21; NT HIT: AJ271736.1, EVALUE 3.00e-70
agttaaaggagaaacttatgtcagccccagccttaggactatcagacttgacaaagccctttacactctatgcgtcagaaagagaaaaaattgcagtcggagttttaacccaaactgtggggccctggccaagaccagtggcctatctctcaaaacagctagacggagtttcaaaaggctggcctccatgtctgagagccctggcagctacagccctgttagcacaagatgcagacatgctaatcct

SEQ ID NO: 30743 - DNA, 195 bp, Homo sapiens
  MAP TO AC007686.3; EXPRESSED IN LUNG, SIGNAL = 0.64; EXPRESSED IN BT474, SIGNAL = 0.62; EXPRESSED IN FETAL LIVER, SIGNAL = 0.6; EXPRESSED IN PLACENTA, SIGNAL = 0.72; EXPRESSED IN BONE MARROW, SIGNAL = 0.74; EXPRESSED IN ADULT LIVER, SIGNAL = 0.7; EST_HUMAN HIT: BF030010.1, EVALUE 1.70e-01; SWISSPROT HIT: P17437, EVALUE 1.90e-01
ttttcctcaggggtcaagctctcaatctgtaattgtctcagaaagacccggagagctttaaaatatccagagtccacgtcccgcccctgcacctccagagggagaccatcctggggcagggccttgctcagtgaaagctccaacagggacgctgatgggcttgatgggccaagactgagaaccaccagccagggc

SEQ ID NO: 30744 - DNA, 108 bp, Homo sapiens
  MAP TO AL049837.3; EXPRESSED IN PLACENTA, SIGNAL =   3; EXPRESSED IN ADULT LIVER, SIGNAL = 0.71; NT HIT: D26547.1, EVALUE 1.30e-02; EST_HUMAN HIT: AW847154.1, EVALUE 6.00e-02; SWISSPROT HIT: Q01222, EVALUE 8.00e-01
tttaagtagtcatctgaatcttcatcaggctgatagttgtcttctcaccttacttccacagattattatatttgaactgtattatttgcttagacctccccacacacg

SEQ ID NO: 30745 - DNA, 816 bp, Homo sapiens
  MAP TO AC010872.3; EXPRESSED IN ADULT LIVER, SIGNAL = 5.7; EXPRESSED IN FETAL LIVER, SIGNAL =  26; NT HIT: gi11428887, EVALUE 0.00e+00; EST_HUMAN HIT: T95195.1, EVALUE 0.00e+00; SWISSPROT HIT: P04114, EVALUE 0.00e+00
agaggtgaggctttccaagctaagcttgtggtcaactgctcctttagcggtagagtacagcattgaagaattgaaatcatacttaaattccatggaggaagagacagtaggttttgacttggtatttccattaagttcttgcttgaaattcattctcaaaattggaatttgggcttttgtggttgttgccactgacacttccatatttttcgtggttaagctcacagtactgttatgactaccctccacaaatttgttgctcagagacagagctgtggctaacttcaatcccctttttcttgtcaatcttgtggtgccctctaatttgtactgcagtgcatcaatgacagatgaagatgaagaaaggagatgagcaacaatatctgactggttaaaaagttcagcattggtattcagtgtgatgacacttgatttaaaggagaaatcataggtaatattgcccatggcaggaataaaaatatggcttatggtacacaattccttgaaatctggaagagaaagcttgagatttctagggacatgaaggactggcagctctaatgatggcaggattaatgtgtatgaaggcacacggacgtcagaacctaggatggagaaactaggcatgctgactgcttttgggaacacatagccgaatgccgacatctctatggtgaatggagacacttcaacattgacaactggaacagtgtatccaggaatttgaaaggtcctggggagctcgtcgtgagatttttcagctttgtacttatcaaacttaatttttgtttcattataggatttggtgacaaaatc

SEQ ID NO: 30746 - DNA, 204 bp, Homo sapiens
  MAP TO AP000039.1; EXPRESSED IN LUNG, SIGNAL = 0.65; EXPRESSED IN ADULT LIVER, SIGNAL = 0.65; SWISSPROT HIT: Q04503, EVALUE 5.50e-01; NT HIT: gi9629732, EVALUE 1.90e+00
tatgggaggagtgtggggtggagacccacgctgggctccagaaacaagtggtcacctgttctcaggtccagtgcccacttgtccagggctgtgcaacccctcttcccgttgaggtcaaggaggggtgttggctattctgttatgtggatgagatgcccacacaggcagtgtgagggctttagctgtaggaccttgaaatgctct

SEQ ID NO: 30747 - DNA, 108 bp, Homo sapiens
  MAP TO AC005076.2; EXPRESSED IN BT474, SIGNAL = 0.65; EXPRESSED IN LUNG, SIGNAL = 0.61; EXPRESSED IN PLACENTA, SIGNAL = 0.66; EXPRESSED IN ADULT LIVER, SIGNAL = 0.68; NT HIT: D85389.1, EVALUE 9.20e-01
tgattcagaaactcactaagaaccaggacatttatcagaatgtggcagaaatgtttattaagtccactagaactgaactgaacacataattggcagacaatctgttct

SEQ ID NO: 30748 - DNA, 111 bp, Homo sapiens
  MAP TO AL078477.5; EXPRESSED IN ADULT LIVER, SIGNAL = 0.72; EXPRESSED IN HELA, SIGNAL = 0.72; EXPRESSED IN PLACENTA, SIGNAL = 0.66; EST_HUMAN HIT: AA463369.1, EVALUE 1.40e+00; NT HIT: AB038481.1, EVALUE 2.40e-01; SWISSPROT HIT: P13496, EVALUE 1.80e+00
acccttgaaagagataatgagctgcaaagggagaaggtaaaagaaaatgaagaaaagtttcttaatcttcaaaatgagcatgaaaaagcactaggaacttggaaaagacat

SEQ ID NO: 30749 - DNA, 537 bp, Homo sapiens
  MAP TO AC007981.24; EXPRESSED IN ADULT LIVER, SIGNAL = 1.1; EXPRESSED IN HELA, SIGNAL = 1.4; NT HIT: AF225925.1, EVALUE 1.10e+00; EST_HUMAN HIT: AI904151.1, EVALUE 1.00e-120; SWISSPROT HIT: Q04503, EVALUE 2.00e-03
gaaaagtgtcttacattggcagcatcttcttttttacagatgtcttgtacagtgtcctcattagcaatgtcatatacagcgtgcttattagcgaattcgtatacagcatcctcattagcgatgccatatacagcgtcctcattagcgatgttgtatacagcgtcctcattagtgatgtcgtatagagcgtcctcattagcgatgtcatatacaatgtcctcattagcgatgtcatatacagcaacctcattcgctatgtcttgtaaagcatcctcattagcgatgtcatatacaacgtcctcattagcgatgtcgtatacagcgtcctcgctagtgatgtcttgtacggtgtccttataagcaatgtcgtctacagcgtcctcgttagcatgccttgtgggtgtcattagcgatgtcatatacagcatcctcattggtgatgtcttatatggtgtcctcattagcgatgttgtgtacagcgtcctcgttagcaatgccttgtacagtgtcctcgttagcaatgtcatatacagtgtc

SEQ ID NO: 30750 - DNA, 100 bp, Homo sapiens
  MAP TO Z83845.14; EXPRESSED IN ADULT LIVER, SIGNAL = 0.71; EST_HUMAN HIT: AA813119.1, EVALUE 1.20e+00; SWISSPROT HIT: P50317, EVALUE 3.10e+00
tgataactggccgaaaagcagttggggcgcccaatggcgcagccttcagaagcaccttctgtgtttttggaactgttggcagcatcccaaggtgaaatgg

SEQ ID NO: 30751 - DNA, 117 bp, Homo sapiens
  MAP TO AC005060.2; EXPRESSED IN FETAL LIVER, SIGNAL = 1.2; EXPRESSED IN BONE MARROW, SIGNAL = 0.63; EXPRESSED IN LUNG, SIGNAL = 0.59; EXPRESSED IN ADULT LIVER, SIGNAL = 1.6; SWISSPROT HIT: Q05471, EVALUE 1.00e+00; NT HIT: AF183429.1, EVALUE 1.00e+00; EST_HUMAN HIT: AA699995.1, EVALUE 4.00e-03
ctttagattgggtggattcctcagccttgtcaatgaagtctgacttgatgctcttcacagagtgcagaggaagtgagttggtctttctttcagtagaatatgtcattgactccatct

SEQ ID NO: 30752 - DNA, 287 bp, Homo sapiens
  MAP TO AC004964.2; EXPRESSED IN PLACENTA, SIGNAL = 0.66; EXPRESSED IN ADULT LIVER, SIGNAL = 2.5; NT HIT: AF026566.1, EVALUE 5.90e-01; SWISSPROT HIT: P19336, EVALUE 1.90e+00; EST_HUMAN HIT: BE780062.1, EVALUE 1.00e+00
ctgaggcagggtgatggtgtgtcagaagcagcaggccagcagagcaccaagaagggggtgccctctccccacgccctcacgcagccctcaacactgtgtgggcaagtgggaattcagccagacatcagtgtcaatctcagagatacaaggaaagaggatgaagaaaatctgaactgtaactcagttctaaaaccagatgcccgggaagttgctggatctgactcggtctacctgaaaatagcgaatttgagctttccgcaatggtctgagaaagctcaagatgaaaa

SEQ ID NO: 30753 - DNA, 94 bp, Homo sapiens
  MAP TO AC010896.1; EXPRESSED IN ADULT LIVER, SIGNAL = 0.9; EXPRESSED IN BONE MARROW, SIGNAL = 0.99; EST_HUMAN HIT: BF229505.1, EVALUE 7.30e-02; SWISSPROT HIT: Q07687, EVALUE 4.10e+00; NT HIT: D86842.1, EVALUE 3.00e-09
actgaccaacgaggtttatggaacctccatgactccagcaggttcaaatcccagaaaacagcctcccattaacatcctcaagcctaatcctaaa

SEQ ID NO: 30754 - DNA, 153 bp, Homo sapiens
  MAP TO AL079305.2; EXPRESSED IN ADULT LIVER, SIGNAL = 1.5; SWISSPROT HIT: P39969, EVALUE 5.20e+00; NT HIT: L12122.1, EVALUE 1.20e+00; EST_HUMAN HIT: H12094.1, EVALUE 3.50e-01
acatcctctggaaagtgctgcctgatggttttgcctgcttccccatctgctgctgagagtaaatgttataccaggtctagagatcacttcaggacagaggtagttgatgcagggaaaattaagattcaagacaacgttgagactgtatatcag

SEQ ID NO: 30755 - DNA, 1577 bp, Homo sapiens
  MAP TO AC010872.3; EXPRESSED IN FETAL LIVER, SIGNAL = 9.4; EXPRESSED IN ADULT LIVER, SIGNAL = 6.2; NT HIT: M19828.1, EVALUE 0.00e+00; EST_HUMAN HIT: R06764.1, EVALUE 0.00e+00; SWISSPROT HIT: P04114, EVALUE 0.00e+00
aatagtctccttcaacttgtattggtgggccaactctactaatttatccattaaaacctggatttgttggtctacttcatacctctcgattaactcatggactttggctctgaaggcattgattttctcagctacttcaaaatccccaataagatttataacaaagtgtttgacatgctcaagaatgtcatttattctttcaaatgaaattgtagttcccaattgatctaaaagcactctaacatcaatagcctcaatgtgttgttttaactttccagctaggtgctggatgtctatattctgtatgtgtctcttaagctgctgcagtttttcttgtatctggattctgatttggtacttagtatccacattttgaatccaggatgcagtactacttccacttttgttaaaatcaatattttcaataaacaaatgtagatcatggattgtttttactaaatttacacggatatgatagtgctcatcaagactttttaatttttcaatgatttcatcaataatattagcaatagctattttcaaatcatgtaaatcataactatctttaatatactgatcaaattgtatcatatatgtctgcagttgagatagtttttcattaaagttgattttggcatcatctaatgcaatttgtatatcattttctgtaattctatacttttttgtgagagcagtcagtttctccttggcatgtgaaacttgtctctcccaattgaatgaattcagataatcattagcttgctgtgggagttttcccagggctgctctgtattttcttacaaattgatcaatattgatgtgcttcaggtttctctgtacgttttccagtacaactataatggtttgtcgattcctctcaaaatattcttgcaaggtctcaaaaaatgggaggttaatggagtgaacatcttggtttttatcatactttacaaaagcaacaattgtaaattcttggggcttctcaacggcatctctcatctctaaagcatcaatgatattgatgggctcactgagtaaaagtggcactttaattggggagtctagtagagttaggtcagccagagttcgtccagtaagctccacgccaattttatctttagtgttgtaagcatccaagtcctggctgtattcattgttgttaaattgggtcttgagtttccaggtgcctgtctgctcagctggagtaagcagggcactgactttgtgttcaagagctgcactgatgcttttcctagacacgagatgatgacttgtggagcctttgtaatcatgagagaaagtaaatgccagaggttctgctttcaacaggaatttgctatacagctgcccagtatgttctccccagagagcgagtttcccattgccatttgtatgtgcatcgatggtcatggtaaacggggccattacagaacggaagacattgctgaaatgcagtgagtctgaattatagtttgtgctcatgtcaatggctgaagccagcccagcgatgtctgtgttgagccgatggctaaactccacaccctgaaccttagcaacagtgtctgctttatagcttg

SEQ ID NO: 30756 - DNA, 198 bp, Homo sapiens
  MAP TO AC009497.2; EXPRESSED IN BT474, SIGNAL = 1.5; EXPRESSED IN ADULT LIVER, SIGNAL = 1.2; EST_HUMAN HIT: BF673026.1, EVALUE 1.00e-107; SWISSPROT HIT: gi127998, EVALUE 9.00e-04; NT HIT: X83957.1, EVALUE 1.00e-108
atcgctgatctgatctgtgactttcctgacgtgatcattgacttgcaagtcggggtggcaaatccattcgtggaggcgcaggcggtaatcaatctcactgactttcttctgggaatccttggcagtaaccatctctaccatgtcgggcacgatgtggattttcatcttgttcttttcataaactgatctgtacaggcg

SEQ ID NO: 30757 - DNA, 256 bp, Homo sapiens
  MAP TO AL031117.1; EXPRESSED IN ADULT LIVER, SIGNAL = 1.3; SWISSPROT HIT: Q92178, EVALUE 1.00e-04; EST_HUMAN HIT: BE929868.1, EVALUE 1.00e-102; NT HIT: gi11422531, EVALUE 1.00e-105
caaactttgtagtctcttctgccaggaatgagtatacagtggttgtttttcatgagtacaaacctcaatggaacagcagatcagaccacctttggtaaatgttttgtacagttctccgaatagcttgtacttctcctcaacaagctcagtgtatcttcctttctgcatgtcaacagtttcagccaatgtgcccgtgaagtccacaataatatcagtgatggtcaaaccatccagggcctcataacagcctagcagc

SEQ ID NO: 30758 - DNA, 202 bp, Homo sapiens
  MAP TO AL031282.1; EXPRESSED IN ADULT LIVER, SIGNAL = 3.5; NT HIT: M36430.1, EVALUE 1.00e-110; SWISSPROT HIT: P54311, EVALUE 3.00e-26; EST_HUMAN HIT: BF307569.1, EVALUE 1.00e-110
gcaaatggcattgatgtcagactcgtggccagtgaaggtctgccggcacatgccttctcgcacatcccagagtttggctgaagcatcacaagcaccagagacgaacagtctggtgtcaggagcaagagaaaggctcatgacatctccagtgtgtccggtaaacgtggtcgtctgctggccggtctcgatgtcccacagggca

SEQ ID NO: 30759 - DNA, 179 bp, Homo sapiens
  MAP TO AC007037.2; EXPRESSED IN ADULT LIVER, SIGNAL = 0.96; NT HIT: AB042046.1, EVALUE 2.30e-02; EST_HUMAN HIT: AI970415.1, EVALUE 7.00e-03; SWISSPROT HIT: P12114, EVALUE 6.60e-02
aggggaaacagctgatgagaattccccacgagatagttctttcctcttgcacaaaggggctggctggtgtctggaaagcttgggagatgtcctttgtagacctggtccttgagggatgcctcatgctgggaggacaggtccccggggcctggcaggtgatcgtgcatgggtctggagga

SEQ ID NO: 30760 - DNA, 106 bp, Homo sapiens
  MAP TO AC007364.2; EXPRESSED IN FETAL LIVER, SIGNAL = 0.61; EXPRESSED IN ADULT LIVER, SIGNAL = 2.6; NT HIT: AF081457.1, EVALUE 5.80e-02
atctgtgattagagatatcatttccatatgtgttatatttagcttttgtttctacttttcctccaatgggttttgttacttgcctttttttttccattttcattag

SEQ ID NO: 30761 - DNA, 165 bp, Homo sapiens
  MAP TO AL049812.4; EXPRESSED IN ADULT LIVER, SIGNAL = 1.4; NT HIT: AF080222.1, EVALUE 1.30e+00; EST_HUMAN HIT: H99965.1, EVALUE 8.80e+00; SWISSPROT HIT: P31792, EVALUE 1.30e+00
acttttgaagttggctgatccaagaatagattcaaattcttcagccaagagtctagaccaactgactttttccacttcattgcctagtaagtactctctcctaccctttcttttccagtggtctgagggtgaaaggtgatactgcctgaagggagggctttgcca

SEQ ID NO: 30762 - DNA, 82 bp, Homo sapiens
  MAP TO AL049833.3; EXPRESSED IN ADULT LIVER, SIGNAL = 1.2; SWISSPROT HIT: P49327, EVALUE 4.10e+00; NT HIT: D64001.1, EVALUE 6.60e-01; EST_HUMAN HIT: AI075275.1, EVALUE 4.30e-02
gcagtggtgtggtcatggccatcgtcatcatcgtactggcttgccagggctgctatcaccaagtcctgctcattgggtggcc

SEQ ID NO: 30763 - DNA, 78 bp, Homo sapiens
  MAP TO AL031542.1; EXPRESSED IN FETAL LIVER, SIGNAL =   1; EXPRESSED IN ADULT LIVER, SIGNAL = 1.1; EXPRESSED IN BT474, SIGNAL = 0.94; NT HIT: gi11497452, EVALUE 1.00e-02
gaaaagaaagtagaagaaaaattcacagaactagagatgtcaggtggtaaattctgttttgaagaggaaaacaggaag

SEQ ID NO: 30764 - DNA, 84 bp, Homo sapiens
  MAP TO AL109933.8; EXPRESSED IN FETAL LIVER, SIGNAL = 3.3; EXPRESSED IN BONE MARROW, SIGNAL = 1.1; EXPRESSED IN HBL100, SIGNAL =   1; EXPRESSED IN ADULT LIVER, SIGNAL = 1.9; NT HIT: gi11418729, EVALUE 3.00e-40; EST_HUMAN HIT: T60602.1, EVALUE 3.00e-40; SWISSPROT HIT: P12545, EVALUE 3.00e-12
agagtcccaggcctggcattccagtccagacatggtcttggaaattttgccgtcatagttttctccactgcaatgcatacattc

SEQ ID NO: 30765 - DNA, 94 bp, Homo sapiens
  MAP TO AL050335.17; EXPRESSED IN ADULT LIVER, SIGNAL = 0.91; EST_HUMAN HIT: BF130439.1, EVALUE 1.10e+00; SWISSPROT HIT: P00508, EVALUE 5.40e+00
taaaagtagggtgaatggatctgggtgtcccaaaacagtaaatgaccaccacattgtctttctctcccaagcctccactctgctccatcttgat

SEQ ID NO: 30766 - DNA, 125 bp, Homo sapiens
  MAP TO AF188024.1; EXPRESSED IN HBL100, SIGNAL = 0.97; EXPRESSED IN ADULT LIVER, SIGNAL = 1.1; EST_HUMAN HIT: BF529626.1, EVALUE 1.00e-01; NT HIT: gi4503534, EVALUE 1.50e-02; SWISSPROT HIT: P49144, EVALUE 6.80e+00
agacacggagaataaagcaggtgtctacttcttcctcttttgtggtgtcttcccatttaaatggcttattgatgcaagtactgcagcacaaatgaatgctgatgccagctctgcccatgtacatg

SEQ ID NO: 30767 - DNA, 119 bp, Homo sapiens
  MAP TO AL049708.6; EXPRESSED IN BONE MARROW, SIGNAL = 0.9; EXPRESSED IN ADULT LIVER, SIGNAL = 0.96; SWISSPROT HIT: P77969, EVALUE 4.10e+00; NT HIT: L41654.1, EVALUE 8.80e-01
taaaaggaaacgctgtcgacatcaggaggataatagtcggaaagatgagttcgattgtagctcaaaacgggcaagcactgtacttcatgagttttcaggatcacggctttcttggggac

SEQ ID NO: 30768 - DNA, 92 bp, Homo sapiens
  MAP TO AP000228.1; EXPRESSED IN HELA, SIGNAL = 1.3; EXPRESSED IN ADULT LIVER, SIGNAL = 0.72; NT HIT: AF132449.2, EVALUE 2.60e+00; EST_HUMAN HIT: Z43785.1, EVALUE 7.80e-01
aactgaactgcagtgtctccagccgcgccctgtgcaatgatttggttctgcattgcgccccctagaggtgagtggaagcaatgtccaagctg

SEQ ID NO: 30769 - DNA, 138 bp, Homo sapiens
  MAP TO AC012528.1; EXPRESSED IN ADULT LIVER, SIGNAL = 0.98; SWISSPROT HIT: Q09990, EVALUE 6.90e+00; NT HIT: AF040964.1, EVALUE 2.70e-01; EST_HUMAN HIT: Z21088.1, EVALUE 2.00e-02
aaagttcttatggtgtaaaagatggtggcacaatgtttctaactcatggaaaagaggcaactccactggtagaagcaaaagtacatgtagcaggggcagtgcaatggctacagatatgaagtgttgctgtgagcattt

SEQ ID NO: 30770 - DNA, 220 bp, Homo sapiens
  MAP TO AC009336.2; EXPRESSED IN HBL100, SIGNAL = 1.3; EXPRESSED IN ADULT LIVER, SIGNAL =   1; EST_HUMAN HIT: AI971733.1, EVALUE 1.00e-110; SWISSPROT HIT: P70217, EVALUE 7.00e-37; NT HIT: AB038155.1, EVALUE 1.00e-121
attttcttgtccttcactcttcggttctgaaaccaaatggtcacttgtctctcagataggttcgtagcagccgagatacgccgccgcttgtccttgttaatgaatttgttaatggcatactcgttctccagttctttaagctgcagtttggtgtaaggcactctcttcttcctccctcttcggtagacgcacatgtccggctgatttagagccacatccc

SEQ ID NO: 30771 - DNA, 1257 bp, Homo sapiens
  MAP TO AC010872.3; EXPRESSED IN ADULT LIVER, SIGNAL = 5.9; EXPRESSED IN FETAL LIVER, SIGNAL = 8.1; NT HIT: gi11428887, EVALUE 0.00e+00; EST_HUMAN HIT: AI056881.1, EVALUE 0.00e+00; SWISSPROT HIT: P04114, EVALUE 0.00e+00
cagccacatgcagcttcaggggttctagccgtagtttcccattgttggtgagatccagagcattgtatttcaggtcactgtttaaagtagttaccagagaatagggctgtagctgtaaattaacagtttgcttataaaacttgtcagagctgtaaatgttgtcaagttttgaagagaagtccagtgataagcctgcaatgttcagactgtttgtgtggtcaaatttcatttcagcatatgagcccatcatgtcatttgagagcttaagtccttcttgactgaccttgaagttgaaaatgtttttgctgtcgacacccagaatcatggcctgataagcacttcccagtgatagctctgtgagggcggctttcccatccagactgaattttgcattgtgttccctgaagcggccatttgttgttaatttcatagatgccccagagaggccaagctctgcattcagctcattctccagcaccaggagactacacttcaagttggtcgttgcactggtagatattccatcttggccaatccttagtgtcgccttgtgagcaccactattaattttgtcagtgcctaagatgtcagcatttaactcaagaccatgggaatttagtgatccagaaagcaggctgaagaacctcaatgactcgtaatcagcctgatattcagaacgcagcagtgcattttgcttagagaaggtcatatccatcttgttagaagtggcaaagttcttatacttcccattggtgtcagattttaaagtcagctcgtagttctcatactttagggaagcagtatttttaatgatgccactttgcagatcagaggtggaggtgagggagagggttccatcttcatatcttcctgttatctggttggtgccttggaggtaggaggagttaaacctcaggttggactctccattgagccggccagtgttaggatccctctgacaagacaggccatatgtgcctttagcatagaacgaagagactctgaactgcccatcaatcttgacttctttgacaaacaaatgctgtttctttttggagtccaaatgaactgaagcagacatctgtggtccccaggaactagatgcatcgaatattagtaaaccttttgagactgggttgtttccaagtttttctacatgactgaatttgatattcgaatctagaaatttgtggcgtagagacccatcatatgatagtgtgaacgtattcttgtggtcatatgttgtttctccagatc

SEQ ID NO: 30772 - DNA, 489 bp, Homo sapiens; identical to SEQ ID NO: 14220
  MAP TO AL008723.8; EXPRESSED IN ADULT LIVER, SIGNAL = 1.1; NT HIT: AF109128.1, EVALUE 4.80e+00; EST_HUMAN HIT: W78748.1, EVALUE 1.00e-100; SWISSPROT HIT: Q62315, EVALUE 2.30e+00

SEQ ID NO: 30773 - DNA, 107 bp, Homo sapiens
  MAP TO AF064863.1; EXPRESSED IN ADULT LIVER, SIGNAL = 1.2; NT HIT: AL163282.2, EVALUE 6.00e-54; EST_HUMAN HIT: AA179964.1, EVALUE 4.00e-03; SWISSPROT HIT: Q02792, EVALUE 9.10e+00
aaggtgccatctcttcccttctggagctttaatatgctgaagaatatgatgtagatctccaaggtcaagagtaccgtctgcatccatgaagctgtgaattagaaaaa

SEQ ID NO: 30774 - DNA, 168 bp, Homo sapiens
  MAP TO AF130417.2; EXPRESSED IN ADULT LIVER, SIGNAL = 0.97; SWISSPROT HIT: P23430, EVALUE 3.40e-01
cattgctattccaaacaatttttctcctctcttttgttctacttgtgatattatcacgcaacagtctagccagaaaggtcatttgtgatggattccccagcttgtatttctccatgcccaaagagttgctgggcagattaaaaaatatatgtgctcatttcagcattt

SEQ ID NO: 30775 - DNA, 239 bp, Homo sapiens
  MAP TO AF070718.1; EXPRESSED IN LUNG, SIGNAL = 1.1; EXPRESSED IN PLACENTA, SIGNAL =   1; EXPRESSED IN ADULT LIVER, SIGNAL =   1; NT HIT: AL163246.2, EVALUE 3.00e-61; EST_HUMAN HIT: AA403053.1, EVALUE 8.00e-68; SWISSPROT HIT: P27401, EVALUE 8.00e-08
caggtaccaggagatgtgttaatttgctcaagcaatgaaaccacatctggtacagcagctgcaattggagtcaccactttgttaagtttacaataatccactgtcattctccaagatccatctgccttctgcacaggctgaataggagagttgatgaaggatgtgatgggaatcaccacccttgcgtctttcaagtccttgatggtggcaataatctctgcaatccctgcagggattcc

SEQ ID NO: 30776 - DNA, 110 bp, Homo sapiens
  MAP TO AL031905.7; EXPRESSED IN LUNG, SIGNAL = 2.1; EXPRESSED IN ADULT LIVER, SIGNAL = 0.91; EXPRESSED IN HBL100, SIGNAL = 2.2; NT HIT: AF163864.1, EVALUE 3.70e+00; EST_HUMAN HIT: BE077198.1, EVALUE 1.00e-55; SWISSPROT HIT: P43772, EVALUE 5.30e+00
ctatcagccccttctcaagagtgaaggttttgtttgtaaacatacattcaaaagccacaatgtgaaaaatcttgttcactgtgttgtgagtcccaacaattcgaatatac

SEQ ID NO: 30777 - DNA, 93 bp, Homo sapiens
  MAP TO AC008854.2; EXPRESSED IN ADULT LIVER, SIGNAL = 1.3; EST_HUMAN HIT: BE150616.1, EVALUE 1.10e+00; SWISSPROT HIT: P33769, EVALUE 7.00e+00
ctgaaaaacaaatttgaacagacatccaggaatgacaagatttttaaggaaaacaaacactataaaaaggagataccaaatataacaaatgat

SEQ ID NO: 30778 - DNA, 75 bp, Homo sapiens
  MAP TO AL023807.6; EXPRESSED IN BONE MARROW, SIGNAL = 0.97; EXPRESSED IN ADULT LIVER, SIGNAL = 0.73; NT HIT: AB015879.1, EVALUE 7.80e+00; EST_HUMAN HIT: BF219306.1, EVALUE 8.70e-01
atttgtgccttcaaagtgatgatggagaaaccatgtgtgtttactccacacaagacagtgaataatctcacacag

SEQ ID NO: 30779 - DNA, 175 bp, Homo sapiens
  MAP TO AC004998.2; EXPRESSED IN ADULT LIVER, SIGNAL = 1.5; NT HIT: gi8659560, EVALUE 3.40e-01; EST_HUMAN HIT: AW997214.1, EVALUE 2.60e-02; SWISSPROT HIT: P03357, EVALUE 2.00e-10
agatgtacagctctagtcaaagcaatgaactcggccttttgggcagatgtccctgggggtatggcacatgccttgattacctgctgggttgtaactacagcatacctgacctttctgactccttgttccatgaaactgcttccatcagtgaagaattctttgtcacattccattc

SEQ ID NO: 30780 - DNA, 163 bp, Homo sapiens
  MAP TO AC009813.2; EXPRESSED IN ADULT LIVER, SIGNAL = 1.1; EXPRESSED IN HELA, SIGNAL = 1.1; NT HIT: X90761.1, EVALUE 5.00e-03; EST_HUMAN HIT: R46689.1, EVALUE 2.00e-03
  unsure 45
  unsure 105
cccaacagaacaggtagctacaaagaaacctactacacacttaanaagccgtcaacccctcctctgactaataagcctgtgaccttcatcaagctccctgggccntcagttttctcatctgtataacaaggataagaatacttatctgagaatgatgtgatta

SEQ ID NO: 30781 - DNA, 216 bp, Homo sapiens
  MAP TO AL121716.2; EXPRESSED IN ADULT LIVER, SIGNAL = 0.96; NT HIT: AJ245479.1, EVALUE 1.10e-01; EST_HUMAN HIT: H17233.1, EVALUE 1.00e-108; SWISSPROT HIT: Q9UIY3, EVALUE 4.00e-21
atgtctgcttcggtgaaagaaagccttcagcttcagctactggagatggaaatgctgttttctatgtttcctaaccaaggagaagtaaaacttgaagatgtaaatgccctgacgaatataaagaggtatttggaaggcacaagggaggcgctgccaccaaaaatcgaatttgtaattacactccagattgaagagcccaaggtaggtaccctgatt

SEQ ID NO: 30782 - DNA, 131 bp, Homo sapiens
  MAP TO AC011632.2; EXPRESSED IN ADULT LIVER, SIGNAL = 0.99; NT HIT: D90912.1, EVALUE 6.30e-02
ttatcatcattaaccttgtcaatatttttactattttcagtgtgaaagaagaatacctggtacctaaaaaactacaaaaacaaaagctctatgcctttcataaagtaatctttttcaggtgtttcaccaaa

SEQ ID NO: 30783 - DNA, 152 bp, Homo sapiens
  MAP TO AL078623.21; EXPRESSED IN ADULT LIVER, SIGNAL =   1; EXPRESSED IN FETAL LIVER, SIGNAL = 0.93; NT HIT: AJ012469.1, EVALUE 7.40e-02; EST_HUMAN HIT: BF433981.1, EVALUE 5.10e-01
tctggattggcaccttttggaaggttaatcagttcttgtgagtcatcaagctgaccccaacatattactgtgtgctcttcaatgacattttcaccccataagacactaagttcctggaagacaaacacaggaactatttactgtgtttttgt

SEQ ID NO: 30784 - DNA, 149 bp, Homo sapiens
  MAP TO AC012528.1; EXPRESSED IN HBL100, SIGNAL =   1; EXPRESSED IN ADULT LIVER, SIGNAL = 1.1; EST_HUMAN HIT: D51209.1, EVALUE 7.90e+00; NT HIT: AL161585.2, EVALUE 2.90e-01; SWISSPROT HIT: P32582, EVALUE 3.90e+00
ccaggaaaaagagggatgaagaaaacatatcatctctacagtgctacagacctgctgcggcatatctccattcacatttccactggccagaaccaaatcacatgactctacgtcaacttcaagaaatgtagggaggtcactaatatttg

SEQ ID NO: 30785 - DNA, 611 bp, Homo sapiens
  MAP TO AC010872.3; EXPRESSED IN ADULT LIVER, SIGNAL = 0.99; NT HIT: AF089417.1, EVALUE 2.10e-02; SWISSPROT HIT: P25823, EVALUE 2.00e-09
tgcagttttgaacatgctttccatttcagtagttcattaatgacacatttttcatcacaaatcatatttacttcccatttctgatcatgctttttcaaaaattcacaataaactgttttgttatgtactttcgaagtaaaataatccacagttttgtcatcccatatttcatcaggctcattccattttactccactaagaaaagcatggattcctagctgaggaacagttaaaaattccctctgaagttcgtaaattttagatgtgtttactattgcagagttaccatagtcaataaattctacttcaaaagaatttcctggcaaaattttcttaataactgccctgtaaatggcattgtcaccagaatattctgcaactacaagatctcccactagaggtttaactgattttctctctctcaatctccttgctgttgcatttagagcatcagcaagtctgataattacactttcattctcagcaagctgaatatggaaattcgctggattactgatattagatacataccctttaactttggcattcaaataaatttgcggttgaggaaggtctttgatctgtggcctaataaggtcatatgggttttg

SEQ ID NO: 30786 - DNA, 630 bp, Homo sapiens
  MAP TO Z99716.4; EXPRESSED IN ADULT LIVER, SIGNAL = 0.97; EXPRESSED IN HELA, SIGNAL = 0.95; NT HIT: gi11418194, EVALUE 2.00e-92; EST_HUMAN HIT: BE388069.1, EVALUE 2.00e-92; SWISSPROT HIT: Q60429, EVALUE 1.00e-03
ttagtattgctttgaatttcaaagaatcttatagttcttcaatggagttcaagaattgggacaggtgggggaatgtaaaggcaaaaagctgagacagtcctcccaaagtgcacttgccgtccagaaaggatggaagaaaatgaagccccagggagttgttgattctcaacatctgttaactcccttgctgggtgcagtcatttgctgattagcttccctttcccccaccctggcacccagagtaataaaacaatttgtactcgttccctcagaaattgatgcagcccttatgggatgttcttgttgtctaagccaccttgtaaatggctgtgcacatcatcttcagcagtaggtggggagttggaatcattatgagatactccatcctcaggtttctgctgcagctgcagtgacagaatgcattcctcatctctgtgccttctttctcctcttctcccaagtccttcagcctcaagtccaaagcctggtgacatcctcccaggtacagccggtcaccattcagcagcaggtgcagacagtacaggcccagcgggtgctgacacaaacggccaatggcacgctgcagacccttgccccggctacggtgcagacagttgctgcgccacaggt

SEQ ID NO: 30787 - DNA, 99 bp, Homo sapiens
  MAP TO AC007690.11; EXPRESSED IN ADULT LIVER, SIGNAL = 0.97; EST_HUMAN HIT: BF085913.1, EVALUE 2.00e-02; SWISSPROT HIT: Q61001, EVALUE 4.10e+00
gcgcgatccccagccctggaattcctggaggacatgatatttaagaagacattagtagacattgtcctcactaaagacagagttaaagtggagtttgaa

SEQ ID NO: 30788 - DNA, 95 bp, Homo sapiens
  MAP TO AC008269.1; EXPRESSED IN BONE MARROW, SIGNAL = 0.65; EXPRESSED IN ADULT LIVER, SIGNAL = 0.92; NT HIT: gi11428892, EVALUE 9.00e-47; EST_HUMAN HIT: BE277969.1, EVALUE 1.00e-46
gtagaggatcctgaatccctaaacatgaaaaacattctatctattcttcatacttactcttctctcaatcatgtctacaaatgccagaacaaaga

SEQ ID NO: 30789 - DNA, 129 bp, Homo sapiens
  MAP TO AC007395.2; EXPRESSED IN ADULT LIVER, SIGNAL = 0.71; NT HIT: gi6753875, EVALUE 1.00e-15; EST_HUMAN HIT: AW880429.1, EVALUE 1.10e+00; SWISSPROT HIT: P41134, EVALUE 2.00e-03
gccagattgaaggcacttgtgccatttcttccccaaagcaggaagcccagcaaagttgatatccttaaaggtgcgactgaatatatacaggttctcagtgatcttttggaaggagccaaagactcaaag

SEQ ID NO: 30790 - DNA, 146 bp, Homo sapiens
  MAP TO AC009786.1; EXPRESSED IN ADULT LIVER, SIGNAL = 1.2; EXPRESSED IN LUNG, SIGNAL =  14; EST_HUMAN HIT: BE744358.1, EVALUE 4.90e-01; NT HIT: AF063937.1, EVALUE 1.10e+00
  unsure 94
ttgccactactattaataacatgatcaaactgaacagaacgacaacatttgtagtacctacgcagcactgctaccacagagcagtagactttangagaatggcctttccagaactgattgactttctgcagagtaaaataaatggt

SEQ ID NO: 30791 - DNA, 88 bp, Homo sapiens
  MAP TO AC010135.1; EXPRESSED IN HELA, SIGNAL = 0.97; EXPRESSED IN ADULT LIVER, SIGNAL =   1; EST_HUMAN HIT: H52187.1, EVALUE 3.00e-25; SWISSPROT HIT: Q16831, EVALUE 9.30e+00; NT HIT: AL163247.2, EVALUE 1.00e-20
cctactcaatgtgaaaacaatgaagatgaagacctttatgatgatccacttccacttaataaatagtaaatatattttctcttcctta

SEQ ID NO: 30792 - DNA, 167 bp, Homo sapiens
  MAP TO AC010937.2; EXPRESSED IN ADULT LIVER, SIGNAL = 1.4; EST_HUMAN HIT: BF331740.1, EVALUE 3.00e-89; SWISSPROT HIT: P09929, EVALUE 9.90e-01
aagcaggcataactgtgctgttgacaatgttggcgactggccccagtgaagggggttatgcagacaatacccctaagtacagtggcagattgggagggtggaggtctctcctcagtcacatcactccagatgagccatcagcggctgcaaggcaagatttctactaa

SEQ ID NO: 30793 - DNA, 295 bp, Homo sapiens
  MAP TO AC010686.2; EXPRESSED IN ADULT LIVER, SIGNAL = 0.96; NT HIT: AF119841.1, EVALUE 9.00e-90; EST_HUMAN HIT: BE205792.1, EVALUE 4.00e-92; SWISSPROT HIT: O34717, EVALUE 2.00e-07
ttaatgacatggggcttctgagtccctaataggaatcctgagatctctaaataaagacatgttgacttgtggatactgatggtacttgcctgctttgcacatgtagaaggtacccgtcaggttggtctcaagcacagcgtgccatcccttagaactgatgtgttcagcaggggaaagaaactggcctcctccattgttcaccaagaaattgatcttaccaaaagtatctaaggtagatttgaccaaattattcacctaaagaagaacagtagaagttactaaaaggaaaagttta

SEQ ID NO: 30794 - DNA, 244 bp, Homo sapiens
  MAP TO AC009893.1; EXPRESSED IN ADULT LIVER, SIGNAL = 0.92; SWISSPROT HIT: P30796, EVALUE 4.50e+00; EST_HUMAN HIT: BE081921.1, EVALUE 2.20e-01
tcacagggaggtatcttgctgaatgcactctgctaggaaataacccaagcccgtgctagaggaagatgctggctgctccttgtgctggctgccctgtgttggagaagctgcctgagctgccagtacctggtgtgggagaggctgcccacagtgcaggaggtgggtgcctgggaagccatgtgcccaggagaagcctggtgctggaaaagctgcacatgctgcagaagcttgctgcaggagcaca

SEQ ID NO: 30795 - DNA, 100 bp, Homo sapiens
  MAP TO AC011504.2; EXPRESSED IN ADULT LIVER, SIGNAL =   1; NT HIT: M58318.1, EVALUE 2.00e-13; SWISSPROT HIT: P08547, EVALUE 1.80e-01; EST_HUMAN HIT: BE064272.1, EVALUE 6.00e-12
ctgttacgagaactagtacaaccactgtggaaaacagaagattccttaaagaactgaaagtggatctaccattcgacctagcagtcccaatactggatat

SEQ ID NO: 30796 - DNA, 181 bp, Homo sapiens
  MAP TO AC012130.1; EXPRESSED IN ADULT LIVER, SIGNAL = 1.1; SWISSPROT HIT: P17147, EVALUE 4.90e+00; NT HIT: Z30333.1, EVALUE 1.70e+00; EST_HUMAN HIT: BF242746.1, EVALUE 4.00e-02
tcctattttgagcctcgttatatcctggtggtgcccatgaacaaggaaaaatatgagggatatttgcggagaaaaggattattcagtcgtgcagaaattgaatttgctgtctccagagtggacctttatattaaaattaatcagaattttccgggatattttgatgaggtaatcaatgcag

SEQ ID NO: 30797 - DNA, 80 bp, Homo sapiens
  MAP TO AL049756.16; EXPRESSED IN ADULT LIVER, SIGNAL = 0.91; NT HIT: Z14974.1, EVALUE 6.40e-01; EST_HUMAN HIT: AA169742.1, EVALUE 1.10e-02
ccactttacacatggcccctgccgaggccccaaccatctctgcagctgctgtggctgctgcgtctgtctgtggagctcat

SEQ ID NO: 30798 - DNA, 164 bp, Homo sapiens
  MAP TO AL031768.9; EXPRESSED IN ADULT LIVER, SIGNAL = 0.96; EST_HUMAN HIT: BE275231.1, EVALUE 3.60e-02; NT HIT: D31662.1, EVALUE 9.50e-02; SWISSPROT HIT: P16071, EVALUE 2.20e+00
ttgcaagtcagttttaaggcagatttgttgacacacttgtggatggccaaagtcaggctgttggtttgcttattcaaaagaatggaaattgtctctatgtacacggtaacagggctgtgattcataatcactgcctctcaatgttatgctttatttctcttcca

SEQ ID NO: 30799 - DNA, 180 bp, Homo sapiens
  MAP TO AP000494.1; EXPRESSED IN LUNG, SIGNAL = 7.1; EXPRESSED IN ADULT LIVER, SIGNAL = 1.2; NT HIT: AF156166.1, EVALUE 9.00e-05; SWISSPROT HIT: P12690, EVALUE 2.20e+00; EST_HUMAN HIT: AA341435.1, EVALUE 4.00e-02
ttattttcttggtctttttgtgttatttggaagtgtaatcatgtcatttatacccttgctactcgaatatggtccatgaaccagcatggtgacgtcacctgggagtgtgttagaaatgcagaatctcaggccgcagccctccggggtcaggatatgcattttaacaagatcgttgggtat

SEQ ID NO: 30800 - DNA, 179 bp, Homo sapiens
  MAP TO AL008638.1; EXPRESSED IN HBL100, SIGNAL =   1; EXPRESSED IN ADULT LIVER, SIGNAL = 1.2; NT HIT: gi7662608, EVALUE 6.50e+00; EST_HUMAN HIT: T95073.1, EVALUE 2.70e-02; SWISSPROT HIT: P22338, EVALUE 1.30e+00
aacaggccaatctgatcacatcagagtcttctgtgttaacctgttctggctcccagtgggccgaagattagagtcttttgattcatttgaaaatgcttccaatttgggtctgggtcaacctaaaataatcaaaagaaggactgtaaccaaagtatgcaaaggaagcaatccatgtaaca

SEQ ID NO: 30801 - DNA, 80 bp, Homo sapiens
  MAP TO AP000465.1; EXPRESSED IN HELA, SIGNAL = 1.9; EXPRESSED IN LUNG, SIGNAL = 1.4; EXPRESSED IN ADULT LIVER, SIGNAL = 0.91; NT HIT: X85973.1, EVALUE 5.40e-01; EST_HUMAN HIT: R01127.1, EVALUE 3.80e+00
atcttcttgatattagtattccgagagagtctgacctggcagtgttcaggtaacatcagagagtgggctataatattgag

SEQ ID NO: 30802 - DNA, 331 bp, Homo sapiens
  MAP TO AL031123.9; EXPRESSED IN ADULT LIVER, SIGNAL = 0.92; EXPRESSED IN LUNG, SIGNAL =  10; EST_HUMAN HIT: AV763053.1, EVALUE 0.00e+00; NT HIT: U79240.1, EVALUE 8.10e-01; SWISSPROT HIT: O35973, EVALUE 1.90e-01
caggtgaggctgtaaacttgggaaagacaaagcgcaggccaccatctgtttcccatctccagcccccgagtctctgcaggctcttgatgcaggctgtgtatggacccagggacctggctgcagccagcaggcagcagttgatagcacgagggctacagaatgacatttggaatctggaatgaggctttggccctattgtcactttcctctcctctggctttggctctgctcttaggtttgggattttagcagtgaattgtccagctgcagaacagaccttgttttgggagctgcagatgtggtctctggagatgaggcagaggcaatagcc

SEQ ID NO: 30803 - DNA, 113 bp, Homo sapiens
  MAP TO AL121574.4; EXPRESSED IN LUNG, SIGNAL = 6.6; EXPRESSED IN ADULT LIVER, SIGNAL =   1; SWISSPROT HIT: P04817, EVALUE 9.00e+00; NT HIT: D85185.1, EVALUE 3.90e+00; EST_HUMAN HIT: AW195700.1, EVALUE 2.30e-02
cttttctctttgagtatgggtcatgttttcctgtttctttaaatgtctagtaattttgaaatgcatcctagacattgtggacaatttattatagaaatactggtttctgttgt

SEQ ID NO: 30804 - DNA, 242 bp, Homo sapiens
  MAP TO AC007098.2; EXPRESSED IN ADULT LIVER, SIGNAL = 1.1; NT HIT: AB020710.1, EVALUE 1.00e-112; EST_HUMAN HIT: Z21249.1, EVALUE 1.00e-108; SWISSPROT HIT: O62771, EVALUE 6.00e-02
aacctatcactgaaacagcttcacctagaaaaacagaagactctttttataataacagctataatccctttaaagaggtgcagactccacagtatttgaacccattcgatgagccagaagcatttgtgaccataaaggattctcctccccagtctacaaaaagaaaaaatataagacctgtggatatgagcaagtacctctatgctgatagttctaaaactgaagaagaagaattggatgag

SEQ ID NO: 30805 - DNA, 103 bp, Homo sapiens
  MAP TO AC008169.1; EXPRESSED IN ADULT LIVER, SIGNAL = 0.68; EXPRESSED IN PLACENTA, SIGNAL = 0.66; NT HIT: gi11421510, EVALUE 8.70e-01; SWISSPROT HIT: Q9Y233, EVALUE 3.60e-01; EST_HUMAN HIT: AI026932.1, EVALUE 2.00e-51
tgccaggacttggacctatatcgatggacacaattggtaacagcttccgaaagtcccacagctttgtaaccccacaggcatcacaggatgctatcatgtgacc

SEQ ID NO: 30806 - DNA, 265 bp, Homo sapiens
  MAP TO AC010906.2; EXPRESSED IN ADULT LIVER, SIGNAL = 1.1; NT HIT: U53366.1, EVALUE 9.00e-03; EST_HUMAN HIT: AA526781.1, EVALUE 0.00e+00; SWISSPROT HIT: P05143, EVALUE 4.30e-02
cacaacacagcacccctccccgcagctgtctgccacttgcttcacttgtggcacctggttccatccaagcaaactcgagtccgcacacctgtgggaaggcaaccggcaggagcaaggcagagccctcgagggaaaggtcctggctgagctgtcttgcaaggccacccacagccgggccagctcccttgtgccaggccacaacagagatcccctgtatgggggagatgggggcctcccctgcctgggggaagctggtggtgtccat

SEQ ID NO: 30807 - DNA, 443 bp, Homo sapiens
  MAP TO AC012130.1; EXPRESSED IN ADULT LIVER, SIGNAL = 1.1; SWISSPROT HIT: P12259, EVALUE 6.00e-04; EST_HUMAN HIT: AA834137.1, EVALUE 2.80e-01
caggagctcccgctagcaagaagactgtctctggggtgccagcacacctggttccatctcccaggtgcttggcgaaactgcaagcagatggccagatgacagagcatctctctggaatgcaaattcatgccaagcacctagaaaatcagagcgtaactcctgcccagaaccaagagctggctcaggatggagaaacccatcaaaaagagctttctcctgacagccatctcaatcctgagctccctcaacacctcagttcatcagcactgggtcttcctcagcaggcccaggacctatccctaaacccaacggaagaggatgtccaacaatcagatcttcccctaaaacaaatagccactgagacagatgtccctgagatggaagccagtgaggttgggcagtctcccatcaccccgaccctggtgcctcctgtgcacccttcc

SEQ ID NO: 30808 - DNA, 151 bp, Homo sapiens; identical to SEQ ID NO: 20703
  MAP TO AL080312.8; EXPRESSED IN ADULT LIVER, SIGNAL = 1.2; EST_HUMAN HIT: AA707095.1, EVALUE 4.00e-08; NT HIT: U43626.1, EVALUE 1.40e+00; SWISSPROT HIT: P08548, EVALUE 8.00e-03

SEQ ID NO: 30809 - DNA, 163 bp, Homo sapiens
  MAP TO AL118499.5; EXPRESSED IN ADULT LIVER, SIGNAL = 0.98; EXPRESSED IN LUNG, SIGNAL = 0.96; EST_HUMAN HIT: BF690770.1, EVALUE 2.00e-74; NT HIT: AF068845.1, EVALUE 3.20e-01; SWISSPROT HIT: Q08129, EVALUE 5.00e+00
gttcatggaatccgagctggacctaaatgacatcattcaggagatgcacgtggtggccaccatgccagacctgtaccaccttctggtggagctgaatgctgtacagtcgcttctcggcttgctcggacacgataatacagatatcctttcagatctgacctca

SEQ ID NO: 30810 - DNA, 117 bp, Homo sapiens
  MAP TO AL118519.5; EXPRESSED IN ADULT LIVER, SIGNAL = 0.98; NT HIT: AF083085.1, EVALUE 4.00e+00; EST_HUMAN HIT: BE142914.1, EVALUE 1.00e+00
tactgtgcttttgggaatctttatgtacatgaatttgattgaaaaccttcataacagataccgatcttactcaatatttaattcagagtctattccatttggctctttatgcctatg

SEQ ID NO: 30811 - DNA, 114 bp, Homo sapiens
  MAP TO AC006296.8; EXPRESSED IN ADULT LIVER, SIGNAL = 1.1; EST_HUMAN HIT: AV654764.1, EVALUE 3.70e-01; NT HIT: gi4557484, EVALUE 2.10e-01
tattggacacttctttaataccaggaatcttctatagccctgatacaggacggtttaatgatctccgtgtcactctggcacattttgactttgtctccaaacacgtctattatg

SEQ ID NO: 30812 - DNA, 101 bp, Homo sapiens
  MAP TO AL109941.9; EXPRESSED IN ADULT LIVER, SIGNAL = 1.9; EST_HUMAN HIT: BE255986.1, EVALUE 3.40e+00; SWISSPROT HIT: P56677, EVALUE 9.10e+00
atggaagacggagaagattggcaagagcctcagagggctgcccttgagtattcagcgagtgctgatcagcaggtgcgtgcaaggaaactgaccaaggccag

SEQ ID NO: 30813 - DNA, 241 bp, Homo sapiens
  MAP TO D84394.1; EXPRESSED IN BT474, SIGNAL = 1.2; EXPRESSED IN ADULT LIVER, SIGNAL = 1.1; EST_HUMAN HIT: AW876742.1, EVALUE 3.00e-13; SWISSPROT HIT: P10266, EVALUE 9.00e-16; NT HIT: L22247.1, EVALUE 9.00e+00
tgtggtaaacaatctgcagcctgctaagcattttcattatttcacagatgggtctagcaatggtaaagcttcttattctggatcaaaaggtaaagctttccaggcaacctatacttcagctcagaaagcagagcttgtagctgtaattgaggtgctgactgcttttgatatgcctgttaatgtgatttctgattctttatacatggttcattccacgcagttaattgaaaatgctcagtta

SEQ ID NO: 30814 - DNA, 652 bp, Homo sapiens
  MAP TO AL008726.1; EXPRESSED IN PLACENTA, SIGNAL = 1.6; EXPRESSED IN ADULT LIVER, SIGNAL =  36; NT HIT: gi11420635, EVALUE 1.00e-96; EST_HUMAN HIT: BE715886.1, EVALUE 2.00e-96; SWISSPROT HIT: P55058, EVALUE 1.00e-36
gcacggggctgggagacacctgctgtcagtccaggtgccaggccagtctgccttgaccctgactgtgaatgccccaccccagggggccttcttccccctgactgagaggaactggagcctccccaaccgggcagtggagccccagctgcaggaggaagagcggatggtgtatgtggccttctctgagttcttcttcgactctgccatggagagctacttccgggcgggggccctgcagctgttgctggtgggggacaaggtatgtcatggcctgtttgtgggatgggcaagagaaggtctgtgacagagctcactccctcactcctgattcccctgttcaggtgccccacgacctggacatgctgctgagggccacctactttgggagcattgtcctgctggtgagtgctggcgggggcagggatagggccacctgcacaccagtgagaccaaggaggggtgcaggtggggcccccagtggcagccacgcagacagggccctggcctcttgtctgtggccaatccccctcgccttgtcatggctgttcctgtctgtgaagcggtctgctccttcctgctccttcctgccccatctccttcgcagagctgctgtgaggattagtgagaacccaagctttgcaagtgtgagggc

SEQ ID NO: 30815 - DNA, 97 bp, Homo sapiens
  MAP TO AL033521.2; EXPRESSED IN ADULT LIVER, SIGNAL =   1; EXPRESSED IN LUNG, SIGNAL = 1.4; NT HIT: L31531.1, EVALUE 8.10e-01; SWISSPROT HIT: Q49424, EVALUE 5.40e+00
tgtaaaaagtaattattttcttcatggcaagagcaaccataaacaacataaaaatatagcaaagggggaaaaatctggaaatcatatcatgaagggt

SEQ ID NO: 30816 - DNA, 202 bp, Homo sapiens
  MAP TO AC007421.11; EXPRESSED IN ADULT LIVER, SIGNAL = 2.5; EST_HUMAN HIT: AW949828.1, EVALUE 6.00e-22; NT HIT: X16349.1, EVALUE 1.00e-110; SWISSPROT HIT: P04278, EVALUE 5.00e-25
cggcaaccgaaggttggaagcggggaagagcagccccccaagcgcaatcctcatgatgggatggcgtttgctggtcaggggcccagagacctgtctcaggcgcagcacctcctccccatccacctccagcagcacagagtccccctccatcttgacttccacctgcaggaaggtgggaagcaaaatcagaggcccctgggat

SEQ ID NO: 30817 - DNA, 117 bp, Homo sapiens
  MAP TO AL035457.13; EXPRESSED IN ADULT LIVER, SIGNAL = 1.3; EXPRESSED IN BT474, SIGNAL = 0.96; EST_HUMAN HIT: BF128251.1, EVALUE 1.50e+00; NT HIT: AL163300.2, EVALUE 2.20e-01
taagatggttgccacagctccaggtgttgtgtctctgatcctcttctgcatcctagggaggaggcagggcataggtgagaggctctctttgtaagccgaagccttttgatctgaaac

SEQ ID NO: 30818 - DNA, 204 bp, Homo sapiens
  MAP TO AC007163.2; EXPRESSED IN ADULT LIVER, SIGNAL = 1.2; EST_HUMAN HIT: AV655595.1, EVALUE 1.00e-111; NT HIT: gi6598319, EVALUE 1.00e-111; SWISSPROT HIT: Q06278, EVALUE 1.00e-35
gccaacaggaaacttcagggggaccatggccagtcctttcttcttccaataattctctgcattgaacttttccacagcaactttcctcaaggagtaggaagacatggccatacattctctccaacactggattaggttcttggcattgatctcttgtttgtagggtgtttgatcaatttccttgtacatgtttatgattcgcac

SEQ ID NO: 30819 - DNA, 304 bp, Homo sapiens
  MAP TO AC007157.6; EXPRESSED IN ADULT LIVER, SIGNAL =   1; NT HIT: AL163209.2, EVALUE 5.00e-91; SWISSPROT HIT: P70213, EVALUE 9.00e-15; EST_HUMAN HIT: AA001786.1, EVALUE 4.00e-98
tgagagacaaggagtttagtgactctatgcttaatacctttgatcatatgtggagagccaaggtacgtaatgaagctggttggttgctcctaagttcagtggacaaagtgataaaagaaaatgatgaactcagggattctgtctcctggcttcagaagcagatactgagcctcaaatctgccaagattgccctgagtgagaatcttatctcctgtagagaaagagctgaaattggaaaaacagacacagctcttatcatgcaagtggctgacctgcaatgaaaggtgcatcccagcctcgccag

SEQ ID NO: 30820 - DNA, 145 bp, Homo sapiens
  MAP TO AL035552.9; EXPRESSED IN ADULT LIVER, SIGNAL = 0.72; NT HIT: X56272.1, EVALUE 5.10e+00; EST_HUMAN HIT: H53417.1, EVALUE 1.30e+00; SWISSPROT HIT: P04066, EVALUE 3.00e+00
aacgtgaatacgattaactttctttattacaaatgtttcataaatgacaactatcctcagggtctgacctacggtcatttttcccaagagattaaagcattttccatatgctcagatctataacacttattctagaccctatggt

SEQ ID NO: 30821 - DNA, 126 bp, Homo sapiens
  MAP TO AC007446.8; EXPRESSED IN ADULT LIVER, SIGNAL = 0.91; SWISSPROT HIT: P10447, EVALUE 4.10e+00; NT HIT: X59959.1, EVALUE 1.10e+00
tttcttggtgtgagcaaggtttgcagttcctgctgcatggcccagggtaccacagccctgaggttgtgaggtccagatgtttatttgactggccctgcccattcttgtattcaaagtcacaaacct

SEQ ID NO: 30822 - DNA, 195 bp, Homo sapiens
  MAP TO L10641.1; EXPRESSED IN FETAL LIVER, SIGNAL = 8.5; EXPRESSED IN ADULT LIVER, SIGNAL = 1.1; EST_HUMAN HIT: AV662254.1, EVALUE 1.00e-106; NT HIT: S67479.1, EVALUE 1.00e-106; SWISSPROT HIT: P02774, EVALUE 9.00e-35
acacacagtaaaactctgtgacaatttatccacaaagaattctaagtttgaagactgttgtcaagaaaaaacagccatggacgtttttgtgtgcacttacttcatgccagctgcccaactccccgagcttccagatgtagagttgcccacaaacaaagatgtgtgtgatccaggaaacaccaaagtcatggataa

SEQ ID NO: 30823 - DNA, 143 bp, Homo sapiens
  MAP TO AC008268.1; EXPRESSED IN ADULT LIVER, SIGNAL = 0.65; NT HIT: AF247734.1, EVALUE 2.80e-01; EST_HUMAN HIT: BE394321.1, EVALUE 2.00e-70; SWISSPROT HIT: P08175, EVALUE 3.00e+00
ttagagaggttaaatagcatcctcaaagtcacccaggtcatgctctgcttctggagaggctgggatgcagcatgggagtgtgacctcctgagcacggactgcacgggccgcctcgcagccggcatggtgaggtgagatgagtt

SEQ ID NO: 30824 - DNA, 429 bp, Homo sapiens
  MAP TO AC009501.2; EXPRESSED IN ADULT LIVER, SIGNAL = 0.98; EST_HUMAN HIT: T89896.1, EVALUE 1.60e+00
gctatggctatcttttgtaggccacagtgacactgctgaccctgtagggcatctgctttgtttttccagctgcagagatgggtttgtactgattcacccacatttttcacctatcctgcatatgactaatggaacactaactatagactttgttatgggagccaagattaaaaatacaatttgtgtccatgaaattgtttacagatttacccttcatctagctatccctggttatgtctgtctccatactagattatgcggcctttgagggcagggaccacatcttggttatcttgtatctccagttcctgcctcagggctatatacaccatcatcacccccttcattattatcatcatagcttgtagtcttgggttctgcactaagtactttatgtggattttctcaattcttacaacaatcgtgaag

SEQ ID NO: 30825 - DNA, 84 bp, Homo sapiens
  MAP TO AC007690.11; EXPRESSED IN ADULT LIVER, SIGNAL = 1.1; NT HIT: AB002455.1, EVALUE 1.50e-01; EST_HUMAN HIT: AW291061.1, EVALUE 2.00e-35
ggagaagacactcctcgcttcataggcttgtgtgaagaataaatgaataacttagtacataaagcacctggcacacagtagttg

SEQ ID NO: 30826 - DNA, 117 bp, Homo sapiens
  MAP TO AC009856.1; EXPRESSED IN ADULT LIVER, SIGNAL = 1.6; NT HIT: X16524.1, EVALUE 1.00e+00; SWISSPROT HIT: P24349, EVALUE 4.00e+00; EST_HUMAN HIT: N78411.1, EVALUE 5.90e+00
  unsure 2
  unsure 25
  unsure 54
angggaagtataaatttaaaccacntgttggatgtcgctatgcatacgccaacnatagctgaagttaaaagtatgaccatacaaagtgttgcagctggaactctcatgaacggctca

SEQ ID NO: 30827 - DNA, 99 bp, Homo sapiens
  MAP TO AC009234.2; EXPRESSED IN ADULT LIVER, SIGNAL = 0.76; EST_HUMAN HIT: BE157936.1, EVALUE 2.10e-01
cttccgtggattatcacatttaacttctaccacaaagccctcaaatactttgataggtttaacataattattgataccatcagtctgattcagttttat

SEQ ID NO: 30828 - DNA, 235 bp, Homo sapiens
  MAP TO AC009224.1; EXPRESSED IN ADULT LIVER, SIGNAL = 0.85; EST_HUMAN HIT: BE792991.1, EVALUE 8.40e-01; NT HIT: L31380.1, EVALUE 1.20e-01; SWISSPROT HIT: Q04719, EVALUE 3.20e+00
caatctcctgagagggctgtcagaaagtcaccagccaagacagagctgacacctggtgtgcagcgtgtgctccacggatgctgcctttacatttgtactgggtacatttcttatattttgaggattgagaggcagcttcaggaccctggaatgtccaaactgtgttatcagaaggcatttctgagtcaccatccagtgggaaaaagatctcaaaaagggaccaagaataacaaag

SEQ ID NO: 30829 - DNA, 128 bp, Homo sapiens
  MAP TO AC006499.11; EXPRESSED IN ADULT LIVER, SIGNAL = 1.1; NT HIT: AF126399.1, EVALUE 6.20e-02; EST_HUMAN HIT: H70167.1, EVALUE 1.10e+00; SWISSPROT HIT: P51559, EVALUE 1.60e-01
ccaactggtacttgggacagagcccaaacaatgtcatagtgacctataaaaacagctatttctataagagacccatgctcccagggggctgttttgacagcagttctgggtcccacagtgttttggtc

SEQ ID NO: 30830 - DNA, 129 bp, Homo sapiens
  MAP TO AL096769.7; EXPRESSED IN ADULT LIVER, SIGNAL = 0.83; EST_HUMAN HIT: N26083.1, EVALUE 1.10e-01; SWISSPROT HIT: P35190, EVALUE 6.80e+00; NT HIT: AL161564.2, EVALUE 4.50e+00
tataattatgtttttgttgtcaataagaactgtagtgttgtccctcttttcagttataatagcaatttctattctgtcagtctctctcataaacagtctgattcagattttttcaacttcattactctt

SEQ ID NO: 30831 - DNA, 192 bp, Homo sapiens
  MAP TO AC007971.2; EXPRESSED IN FETAL LIVER, SIGNAL =  62; EXPRESSED IN ADULT LIVER, SIGNAL = 3.7; SWISSPROT HIT: P96989, EVALUE 3.80e+00; NT HIT: AL163248.2, EVALUE 4.50e-01; EST_HUMAN HIT: R09112.1, EVALUE 2.90e-02
agaactaatgttggcaattaaagtaaacatgaataaaaccttcaagaagccctcaacatcccacttccaagtcaccaaacccactattccattagcaatgtgtgagattgtcagttgctctgcaactgtgttattgtcacctgtggtaacaacatatatggtcttgtcagtctttttcacgttagccattct

SEQ ID NO: 30832 - DNA, 104 bp, Homo sapiens; identical to SEQ ID NO: 30618
  MAP TO AL096708.14; EXPRESSED IN ADULT LIVER, SIGNAL = 1.1; NT HIT: U48498.1, EVALUE 7.50e-01; EST_HUMAN HIT: BE155700.1, EVALUE 9.00e-01

SEQ ID NO: 30833 - DNA, 101 bp, Homo sapiens
  MAP TO AP000053.1; EXPRESSED IN PLACENTA, SIGNAL = 1.5; EXPRESSED IN LUNG, SIGNAL = 0.59; EXPRESSED IN BONE MARROW, SIGNAL = 1.4; EXPRESSED IN FETAL LIVER, SIGNAL = 0.6; EXPRESSED IN ADULT LIVER, SIGNAL = 1.7; SWISSPROT HIT: P57607, EVALUE 9.40e+00; EST_HUMAN HIT: AA703228.1, EVALUE 1.30e+00; NT HIT: M14509.1, EVALUE 8.50e-01
gcggcagccacagcgtcccacatgggatgccacacgtgatgatgttatgttcatggtgatgacctcaggcgtgaagaagaggttcagccgtttcacacagt

SEQ ID NO: 30834 - DNA, 143 bp, Homo sapiens
  MAP TO AC005589.1; EXPRESSED IN ADULT LIVER, SIGNAL = 0.46; EXPRESSED IN LUNG, SIGNAL = 0.45; EXPRESSED IN BONE MARROW, SIGNAL = 0.52; EST_HUMAN HIT: BE064923.1, EVALUE 2.00e-03; SWISSPROT HIT: P08548, EVALUE 1.00e-05; NT HIT: Y18047.1, EVALUE 1.30e+00
tttgacaaaattaaacatctgttcatgatgaaaactttcagcaaactaggaacagaaaggtgcatccttaccctgataaaggcaatcaacaaaaaacctacagctaaaatcatacttaaagagtgaaagacaatgttttccct

SEQ ID NO: 30835 - DNA, 120 bp, Homo sapiens
  MAP TO AC005668.1; EXPRESSED IN LUNG, SIGNAL = 0.6; EXPRESSED IN BONE MARROW, SIGNAL = 0.64; EXPRESSED IN ADULT LIVER, SIGNAL = 0.56; SWISSPROT HIT: O41174, EVALUE 1.10e+00; NT HIT: U63721.1, EVALUE 1.00e+00
atgctcattaatgcccttctgctcacaacttgtctgtggcttcccactgccctccaggtagattccagcttcctgggcatggcattccaggcccttcacgatcgggtctaaagcgtgaat

SEQ ID NO: 30836 - DNA, 200 bp, Homo sapiens
  MAP TO AC004041.1; EXPRESSED IN BONE MARROW, SIGNAL = 0.49; EXPRESSED IN ADULT LIVER, SIGNAL = 0.41; EXPRESSED IN LUNG, SIGNAL = 0.43; SWISSPROT HIT: P29817, EVALUE 1.30e+00; EST_HUMAN HIT: BE074888.1, EVALUE 1.00e-109; NT HIT: gi5032016, EVALUE 1.00e-109
atagacaatataaaaagaaatcataatttggcattagggcgacagaaaggttatgaagaagaaattattcattttaagaaagaacttcgagaaccacaatttcgggatgctgaggaaaagtatagagaaatgatgattgttatgaggacaacagaacttgtgaacaaggatctggatatttattataagactcttgacca

SEQ ID NO: 30837 - DNA, 237 bp, Homo sapiens
  MAP TO AC006412.1; EXPRESSED IN BONE MARROW, SIGNAL = 0.5; EXPRESSED IN ADULT LIVER, SIGNAL = 0.46; EXPRESSED IN LUNG, SIGNAL = 0.59; NT HIT: U67575.1, EVALUE 3.60e-02; SWISSPROT HIT: P97887, EVALUE 3.40e+00
tatcccattgcacattgacaaggagctgcggaatgtgcccaaacataaaggaatgaccaacacaacctcccagattcatctctgtggaaatatctcttggaacaatgccagcattaattctttcagtgagggtccaatcaggaggcagacaaaacacaagaatttgaggagggaatgtttgaagtggacatttatttactataagtggattgcaatccagagcttgttagaggctac

SEQ ID NO: 30838 - DNA, 279 bp, Homo sapiens
  MAP TO AC004049.1; EXPRESSED IN ADULT LIVER, SIGNAL = 0.46; NT HIT: gi7706540, EVALUE 1.00e-76; EST_HUMAN HIT: BE272717.1, EVALUE 2.00e-76; SWISSPROT HIT: P12752, EVALUE 9.00e-03
aatggtgtgaccgtagacttcccttcccagccctacaaatgccaacaggagtacatgaccaaggtcctggaatgtctgcagatgaatggcatcctggagagccccgcgggcacaggcaagacgctgtgcctcctgtgcaccaccctggcctggcgagaacacctccaagacaccatctttgcctgcaattttgccgatagggtgcaaggggagcttctctcagatcaggcctttgtcatcctggggcaatgctgctgctgataatggagaccccttagc

SEQ ID NO: 30839 - DNA, 420 bp, Homo sapiens
  MAP TO AC004080.1; EXPRESSED IN PLACENTA, SIGNAL = 0.62; EXPRESSED IN ADULT LIVER, SIGNAL = 0.42; EXPRESSED IN LUNG, SIGNAL = 0.43; SWISSPROT HIT: Q00056, EVALUE 2.00e-18; EST_HUMAN HIT: AI660911.1, EVALUE 0.00e+00; NT HIT: gi11421568, EVALUE 0.00e+00
atggatcttcttcatccaggggtacaccacgggctccttgcccttcaggcccagcgggctcttgtcggccaagagcagcgggcacgcgggggcgctgccccctgccgggacgcctggggtggcgggggccgcctcgcagcgccgcggggccgctgggggcacggcgcgaggctgcaggggcggcggcagctggggctgcaggacgtggctcgcatgcaggccgtgcgctgggcccttggcttgcgccgggggctgctcgggctggggcggccgcccggggctggcgccgccgcggtagccataggggtaggcggtgtccgcggccccatgcgcggggtacagcgcggcagcagggtaggcgggctcgcgggcggtccgcggcgcgtagtaggaggcagtgggctctcggccgccgcccgc

SEQ ID NO: 30840 - DNA, 175 bp, Homo sapiens
  MAP TO AC006313.1; EXPRESSED IN PLACENTA, SIGNAL = 0.61; EXPRESSED IN BONE MARROW, SIGNAL = 0.58; EXPRESSED IN ADULT LIVER, SIGNAL = 0.56; EXPRESSED IN LUNG, SIGNAL = 0.63; SWISSPROT HIT: O43749, EVALUE 2.00e-16; NT HIT: AF127882.1, EVALUE 7.00e-80; EST_HUMAN HIT: BF003023.1, EVALUE 2.00e-04
agaccttagctgtcattgtgacccccttcctgtgtatcatcttctcctacctgcgaatcatggtcactgtgctcagaatcccctctgcagccgggaagtggaaggccttctctacctgtggctcccacctcactgcagtagcccttttctatgggagtattatttatgtctattt

SEQ ID NO: 30841 - DNA, 91 bp, Homo sapiens
  MAP TO AC005030.1; EXPRESSED IN ADULT LIVER, SIGNAL = 0.57; EXPRESSED IN LUNG, SIGNAL = 0.46; NT HIT: X68216.1, EVALUE 1.90e-01
ctcctcttcctcctcttccttctcctcctctttctttttctccttgccatccatcagttcaaaattcgtcttcatttcttcagtgaggctt

SEQ ID NO: 30842 - DNA, 250 bp, Homo sapiens; identical to SEQ ID NO: 23165
  MAP TO AC006321.1; EXPRESSED IN LUNG, SIGNAL = 0.52; EXPRESSED IN ADULT LIVER, SIGNAL = 0.52; EXPRESSED IN PLACENTA, SIGNAL = 0.58; EXPRESSED IN BONE MARROW, SIGNAL = 0.6; EST_HUMAN HIT: BE909318.1, EVALUE 2.30e-01; SWISSPROT HIT: P35616, EVALUE 5.00e-02

SEQ ID NO: 30843 - DNA, 105 bp, Homo sapiens
  MAP TO AC006461.2; EXPRESSED IN PLACENTA, SIGNAL = 0.67; EXPRESSED IN LUNG, SIGNAL = 0.68; EXPRESSED IN ADULT LIVER, SIGNAL = 0.62; EXPRESSED IN BONE MARROW, SIGNAL = 0.71; NT HIT: AL163249.2, EVALUE 1.40e-02; EST_HUMAN HIT: AW893981.1, EVALUE 3.00e-04
tactccacctcttcattcccttcttgccccaacccctggcagccactgatctttttcttgtccccctcattgtgccttttctggaatgtcatgtagttggaatca

SEQ ID NO: 30844 - DNA, 456 bp, Homo sapiens
  MAP TO AC004099.1; EXPRESSED IN ADULT LIVER, SIGNAL = 0.71; EXPRESSED IN BONE MARROW, SIGNAL = 0.59; EXPRESSED IN LUNG, SIGNAL = 0.55; SWISSPROT HIT: Q64623, EVALUE 3.00e-26; EST_HUMAN HIT: BF130916.1, EVALUE 0.00e+00; NT HIT: gi11428005, EVALUE 0.00e+00
ttccgagggagacataggaggcattgctcaaatcacctcctctctattcctgggcagaggcagtgtggcctccaatcggcacctcctccaggctcgtggcatcacctgcattgttaatgctaccattgagatccctaatttcaactggccccaatttgagtatgttaaagtgcctctggctgacatgccgcatgcccccattggactgtactttgacaccgtggctgacaagatccacagtgtgagcaggaagcacggggccaccttggtgcactgtgctgcaggggtgagccgctcagccacgctgtgtatcgcgtacctgatgaaattccacaacgtgtgcctgctggaggcgtacaactgggtgaaagcccggcgacctgtcatcaggcccaacgtaggcttctggaggcaactgatagactacgagcgccagctctttgggaagtcgacagt

SEQ ID NO: 30845 - DNA, 141 bp, Homo sapiens
  MAP TO AC005495.1; EXPRESSED IN ADULT LIVER, SIGNAL = 0.97; EXPRESSED IN PLACENTA, SIGNAL = 0.74; EXPRESSED IN LUNG, SIGNAL = 0.72; EXPRESSED IN BONE MARROW, SIGNAL = 0.59; EXPRESSED IN FETAL LIVER, SIGNAL = 0.73; SWISSPROT HIT: P46560, EVALUE 1.40e+00; NT HIT: AL445066.1, EVALUE 1.30e+00; EST_HUMAN HIT: AW808665.1, EVALUE 1.00e-35
aaagtggactgttatatccctggaaaaatattaacttataagagaaagtttcattaaagatgattcccatagcatatggtaaattttccagaagtatttcgtccatgtgtgttttatttggtgccccaatgacacttgttc

SEQ ID NO: 30846 - DNA, 126 bp, Homo sapiens
  MAP TO AC006464.3; EXPRESSED IN LUNG, SIGNAL = 0.63; EXPRESSED IN PLACENTA, SIGNAL = 0.6; EXPRESSED IN BONE MARROW, SIGNAL = 0.52; EXPRESSED IN ADULT LIVER, SIGNAL = 0.51; SWISSPROT HIT: Q98631, EVALUE 4.10e+00; NT HIT: L25805.1, EVALUE 1.10e+00; EST_HUMAN HIT: BF245672.1, EVALUE 2.70e-02
atgggcccagcaaaggtgtgtcagctcagtgcctgtttgacttgctgcagtccctagagggagagaccaccgacatattagacatcttagagctggtcaaagctgagaagcctctcaagtcattag

SEQ ID NO: 30847 - DNA, 280 bp, Homo sapiens
  MAP TO AC004949.1; EXPRESSED IN ADULT LIVER, SIGNAL = 0.52; EXPRESSED IN PLACENTA, SIGNAL = 0.59; EXPRESSED IN LUNG, SIGNAL = 0.78; EXPRESSED IN BONE MARROW, SIGNAL = 0.49; NT HIT: AE001166.1, EVALUE 4.30e-02; EST_HUMAN HIT: AI281385.1, EVALUE 1.60e-02
tcttacaacccctgcgtttttattgagttgtgtaatgtattcatacttaatgttgtttattattattgtagttgtatttacatctacccttttacttttcatttctatatgtctcatgccttttttgttgatctgctcttctttttcattaagtaaatgttttttatctggcattttaatttctttaatgatttttttcactatattttttgatatttttattttagcggttattctcgggcttgccatatacatcttaatttatcagaatcatcttttg

SEQ ID NO: 30848 - DNA, 158 bp, Homo sapiens
  MAP TO AC003026.1; EXPRESSED IN PLACENTA, SIGNAL = 1.6; EXPRESSED IN BONE MARROW, SIGNAL = 0.53; EXPRESSED IN ADULT LIVER, SIGNAL = 0.46; EXPRESSED IN LUNG, SIGNAL = 0.61; EST_HUMAN HIT: AL043477.1, EVALUE 2.00e-65; NT HIT: AF022835.1, EVALUE 4.00e-84; SWISSPROT HIT: P33527, EVALUE 4.00e-21
gtggccttgtgcacatttgccgtctacgtgaccattgacgagaacaacatcctggatgcccagacagccttcgtgtctttggccttgttcaacatcctccggtttcccctgaacattctccccatggtcatcagcagcatcgtgcaggtacaggggga

SEQ ID NO: 30849 - DNA, 134 bp, Homo sapiens
  MAP TO AC005019.1; EXPRESSED IN LUNG, SIGNAL = 0.57; EXPRESSED IN ADULT LIVER, SIGNAL = 0.45; EST_HUMAN HIT: BE894706.1, EVALUE 1.80e+00; SWISSPROT HIT: P13181, EVALUE 1.10e+00; NT HIT: AL441603.1, EVALUE 1.20e+00
tgctgggcagtaatctggtctgcagtggcatggctgatttctgcagcaagctgcgtgtcaaggtcaaaatcagagtcacgtataggaaggacaagtccagagttaccattaagagcagcatagcttccaactgg

SEQ ID NO: 30850 - DNA, 127 bp, Homo sapiens
  MAP TO AC003080.1; EXPRESSED IN PLACENTA, SIGNAL = 0.86; EXPRESSED IN ADULT LIVER, SIGNAL = 0.58; EXPRESSED IN LUNG, SIGNAL = 0.48; EXPRESSED IN BONE MARROW, SIGNAL = 0.54; SWISSPROT HIT: Q95327, EVALUE 2.80e-01; EST_HUMAN HIT: BE089509.1, EVALUE 1.00e-65
cctggaactggaaccgcattgctgagctggatggctgaggtcggctggtgatctccaatatggtcctcagcagaatatccagcaagctggccactatcacatctatttcctccagcacagatttttc

SEQ ID NO: 30851 - DNA, 200 bp, Homo sapiens
  MAP TO AC002480.1; EXPRESSED IN LUNG, SIGNAL = 0.67; EXPRESSED IN PLACENTA, SIGNAL = 0.61; EXPRESSED IN BONE MARROW, SIGNAL = 0.64; EXPRESSED IN ADULT LIVER, SIGNAL = 0.56; SWISSPROT HIT: O24746, EVALUE 7.50e-01; NT HIT: D14566.1, EVALUE 4.70e-01; EST_HUMAN HIT: BE082626.1, EVALUE 1.80e-01
tttaaaaagacaagtataatggcagaagatttggcaatgacagtactcaagccacctcctgagtcacgatgttccaatctgtactgactgccctcttcaattaatgtgtaatcgtcatcctgggatctcccttcaccactctccaggagattccctttcccttctccacagcgatggatcttctgctttctgtattccat

SEQ ID NO: 30852 - DNA, 115 bp, Homo sapiens
  MAP TO AC006477.2; EXPRESSED IN FETAL LIVER, SIGNAL = 0.75; EXPRESSED IN ADULT LIVER, SIGNAL = 0.81; EXPRESSED IN PLACENTA, SIGNAL = 0.94; EXPRESSED IN LUNG, SIGNAL =   1; EXPRESSED IN BONE MARROW, SIGNAL = 0.75; NT HIT: U59287.1, EVALUE 6.40e-02; SWISSPROT HIT: P79005, EVALUE 7.10e+00; EST_HUMAN HIT: AW074831.1, EVALUE 2.00e-58
ggaagttctgttactgtatctaccgaagatggtttgctgaaagccaagtatctttatacagaatcatcatttctgtcttctgctgctggggatattacattaggaagtgttcatg

SEQ ID NO: 30853 - DNA, 113 bp, Homo sapiens
  MAP TO AC005022.1; EXPRESSED IN PLACENTA, SIGNAL = 0.73; EXPRESSED IN LUNG, SIGNAL = 0.62; EXPRESSED IN ADULT LIVER, SIGNAL = 0.63; NT HIT: AL163267.2, EVALUE 2.00e-17; SWISSPROT HIT: Q24133, EVALUE 6.30e-01; EST_HUMAN HIT: AI890866.1, EVALUE 1.00e-19
aggaaaaaggtttaatcgactcacagttcagcctggctggggaggccccaggaaacttacaattatggcaaaaggtgaaggaggcccgaggaaacttacagttgtggcaaaag

SEQ ID NO: 30854 - DNA, 280 bp, Homo sapiens
  MAP TO AC004558.1; EXPRESSED IN LUNG, SIGNAL = 0.6; EXPRESSED IN BONE MARROW, SIGNAL = 0.51; EXPRESSED IN ADULT LIVER, SIGNAL = 0.5; SWISSPROT HIT: P06731, EVALUE 1.00e-26; EST_HUMAN HIT: AA152037.1, EVALUE 4.00e-34; NT HIT: M59259.1, EVALUE 3.00e-43
cagtgactgtgatcttcttgatcgtgaaacacctgctgtcagtggctgagttgcgaacgaaacagatgtagattccactattctttttagtgattttggagataaagagctcttgtgctgatttttggaacttcccattaatctgccaagaatactgtgggggtgggttagaggctgtgttgcaggagaggttgaggttttcccctggatggtaataggagtaagagggggaaatgttggggtcgtctgggccatctggagcaaagaaaatagagccaaa

SEQ ID NO: 30855 - DNA, 178 bp, Homo sapiens
  MAP TO AC005273.1; EXPRESSED IN PLACENTA, SIGNAL = 0.67; EXPRESSED IN LUNG, SIGNAL = 0.57; EXPRESSED IN BONE MARROW, SIGNAL = 0.59; EXPRESSED IN ADULT LIVER, SIGNAL = 0.64; NT HIT: X54015.1, EVALUE 1.00e-01; EST_HUMAN HIT: AI767472.1, EVALUE 6.20e-01; SWISSPROT HIT: P02381, EVALUE 3.90e+00
tttccactttgcaactgtaaattgttacctggcaataggattatgtgattaagaaaaaagtagggaacagatagccctggaagagaaccaggatgaaaagcaagacatcgaaagattttcatatgattaagatttcgtaattgaagactggatttctcaactaacagatgtttatcga

SEQ ID NO: 30856 - DNA, 136 bp, Homo sapiens
  MAP TO AC005350.1; EXPRESSED IN PLACENTA, SIGNAL = 0.64; EXPRESSED IN LUNG, SIGNAL = 0.69; EXPRESSED IN BONE MARROW, SIGNAL = 0.56; EXPRESSED IN ADULT LIVER, SIGNAL = 0.48; NT HIT: AF224669.1, EVALUE 3.00e-01; SWISSPROT HIT: Q04726, EVALUE 6.10e-01; EST_HUMAN HIT: AI540371.1, EVALUE 4.50e-01
gatacctatatccataataattccattttgcaaagaaggaaatgttcaaacaacttactaatatctgatttaaatgcaacagatatttatgaggtctttgttaagtgccaaggtgtgtagctaggcattgaggtac

SEQ ID NO: 30857 - DNA, 117 bp, Homo sapiens
  MAP TO AC005906.1; EXPRESSED IN FETAL LIVER, SIGNAL = 0.68; EXPRESSED IN BONE MARROW, SIGNAL = 0.69; EXPRESSED IN PLACENTA, SIGNAL = 0.67; EXPRESSED IN LUNG, SIGNAL = 1.1; EXPRESSED IN ADULT LIVER, SIGNAL = 0.68; EST_HUMAN HIT: BE314327.1, EVALUE 5.90e+00; NT HIT: M96060.1, EVALUE 2.60e-01; SWISSPROT HIT: P40189, EVALUE 9.30e+00
gatgtaccactgggactccagctcccacggagtctccatcctcgtctcccctgaaatctgcatgctgacccccatttctctccaagcagatctgatgcagttgattcgctttgtgaa

SEQ ID NO: 30858 - DNA, 145 bp, Homo sapiens
  MAP TO AC005832.1; EXPRESSED IN LUNG, SIGNAL = 0.5; EXPRESSED IN ADULT LIVER, SIGNAL = 0.49; NT HIT: gi9966846, EVALUE 2.00e-76; SWISSPROT HIT: P14004, EVALUE 9.00e+00; EST_HUMAN HIT: BF326624.1, EVALUE 3.00e-76
gacttctgtaagcataaaagaaatcatcgaagtggtgtgaaacttcatcggctccaaacagctctgtcactttattctacatctctctgtggcctggttttactagtagataatcgaattaattcatatagtggtattaaaagag

SEQ ID NO: 30859 - DNA, 127 bp, Homo sapiens
  MAP TO AC002094.1; EXPRESSED IN PLACENTA, SIGNAL = 0.58; EXPRESSED IN LUNG, SIGNAL = 0.65; EXPRESSED IN FETAL LIVER, SIGNAL = 0.74; EXPRESSED IN ADULT LIVER, SIGNAL = 0.63; EXPRESSED IN BONE MARROW, SIGNAL = 0.61; SWISSPROT HIT: Q10255, EVALUE 3.20e-02; EST_HUMAN HIT: AI243738.1, EVALUE 1.00e-65; NT HIT: L19183.1, EVALUE 1.00e-65
ttgcaatgggaaagaaaggcagctgaaacacaagctcgcaaaacagaaaggacttaaaccaggctgggggctcctgtagcagtgggtctttgaactccttagcataccacttcagcaggtttctaaa

SEQ ID NO: 30860 - DNA, 239 bp, Homo sapiens
  MAP TO AC005553.1; EXPRESSED IN LUNG, SIGNAL = 0.44; EXPRESSED IN ADULT LIVER, SIGNAL = 0.43; NT HIT: X82012.1, EVALUE 5.70e-01; SWISSPROT HIT: Q36860, EVALUE 1.00e-01; EST_HUMAN HIT: AU126078.1, EVALUE 3.40e+00
ccaagtcatctccaccttctggcatacatggaacaagggtctcggagtctgtggctcttgagacaaaactggcttcgaggagtcctcactggctgaacctgctttcttgggcccaaggagcctcctgagaatttctggcaagttaatggcctcagagtgggtacggctatttattttgctgagaagagatgtcttcatcttcactttctctatttcctcttctggcaattctttcactc

SEQ ID NO: 30861 - DNA, 193 bp, Homo sapiens
  MAP TO AC003670.1; EXPRESSED IN LUNG, SIGNAL = 0.59; EXPRESSED IN BONE MARROW, SIGNAL = 0.61; EXPRESSED IN PLACENTA, SIGNAL = 0.6; EXPRESSED IN ADULT LIVER, SIGNAL = 0.55; SWISSPROT HIT: P04374, EVALUE 7.00e-25; EST_HUMAN HIT: AA584575.1, EVALUE 2.00e-41; NT HIT: AF023861.1, EVALUE 1.00e-35
ctccatggtttccacaatattcatgccctcttttatcttcccaaagacaacaggcttgctatgtaaccactcagtcttggccgtgcagatgaaaaactgggaattgtttgtgctgagtcctgcatttaccatgaacatcacgccaggacctgtatgcttcaggatgagattctcatcatcaaatttctctctg

SEQ ID NO: 30862 - DNA, 408 bp, Homo sapiens
  MAP TO AC005815.1; EXPRESSED IN PLACENTA, SIGNAL = 0.59; EXPRESSED IN LUNG, SIGNAL = 4.2; EXPRESSED IN BONE MARROW, SIGNAL = 0.57; EXPRESSED IN ADULT LIVER, SIGNAL = 0.47; EST_HUMAN HIT: AI928181.1, EVALUE 0.00e+00; NT HIT: AB007935.1, EVALUE 0.00e+00; SWISSPROT HIT: Q62786, EVALUE 2.00e-07
ctggtcgcatgactgtcagagctgtctgcccagcggtgtcctctgcccgcttataccacatgccactggggctgggcagccactcctccacatggcagctgtaggtcccgctgtcctgcacagccacgttctggatgaagagacggtacacgccgggggaaggactctccaaatgcagccgccccttcagattgttcttggctgcctgctctccatagtggaaggtggcgtcacggctcaagcgggccacagtctcccgctcagggtggttgggcttccatacaaaccattccaccatgagctgggaggttatgctggtgcggttgagaaccacacactccagctgtacctgccgggtctccagaaccgacaggttcccctgggcttggctgagcctcaggcggctgt

SEQ ID NO: 30863 - DNA, 212 bp, Homo sapiens
  MAP TO AC006398.1; EXPRESSED IN LUNG, SIGNAL = 0.47; EXPRESSED IN ADULT LIVER, SIGNAL = 0.44; EST_HUMAN HIT: H82429.1, EVALUE 3.00e+00; SWISSPROT HIT: Q50673, EVALUE 1.50e+00; NT HIT: U30320.1, EVALUE 5.00e-01
tacatccagagactgcaactcttcagaaaacacctgagcaagacttaggctgtgggctaccagcatagtagtctccataaataaagcactatgggtctgggaggagatagaaatagaagcagtaaaaaccagggctagagttttccatgtagtccatctgttccatgtactagtgagccggcagtggacgtaggagtggatcccatttctgt

SEQ ID NO: 30864 - DNA, 222 bp, Homo sapiens
  MAP TO AC005026.1; EXPRESSED IN BONE MARROW, SIGNAL = 0.55; EXPRESSED IN LUNG, SIGNAL = 0.76; EXPRESSED IN ADULT LIVER, SIGNAL = 0.97; SWISSPROT HIT: P39055, EVALUE 3.30e-01
gaagcgcactgaggatgagcacagggccgtcagagggcaaggcagtggggaggacatgatgcgggtccaagtagaattcctcgggtcgtccctactggttctggccaacctgaattatggagaagggaggaaggagcactcgatcccatggagccccctgggaagcctgatggagggggtggtgtttgtattgagtcttgaagagggggtaagacttgggta

SEQ ID NO: 30865 - DNA, 184 bp, Homo sapiens
  MAP TO AC004662.1; EXPRESSED IN PLACENTA, SIGNAL = 0.72; EXPRESSED IN ADULT LIVER, SIGNAL = 0.58; EXPRESSED IN LUNG, SIGNAL = 0.61; EXPRESSED IN BONE MARROW, SIGNAL = 0.61; SWISSPROT HIT: P29849, EVALUE 5.10e+00; EST_HUMAN HIT: H46111.1, EVALUE 8.00e-90; NT HIT: AF008915.1, EVALUE 5.00e-90
atggtgaaagggctggtgttgatagtgtggtagatgaggatgtggtatgtaatgaagtagatggacttgccacctgactggccatctgactgactgtatgcgatactgtgttcttcacccatgagagagtagagctcagcttttctgcaactttgtctgtcgccacctaaggacaaaaataaaa

SEQ ID NO: 30866 - DNA, 142 bp, Homo sapiens
  MAP TO AC005035.1; EXPRESSED IN BONE MARROW, SIGNAL = 0.54; EXPRESSED IN ADULT LIVER, SIGNAL = 0.51; SWISSPROT HIT: P42655, EVALUE 6.90e+00; NT HIT: U14178.1, EVALUE 3.00e-69; EST_HUMAN HIT: AV700067.1, EVALUE 4.80e-01
ctcccaatgtgttttcctccttgatattctggattcttctgccactacagccccaggaaagggagagagcaaaggcctcctcagaaagaggaaaggaagtgaatatgatgcaggggaagttccttcctggtaggaagtgtca

SEQ ID NO: 30867 - DNA, 217 bp, Homo sapiens
  MAP TO AC006377.3; EXPRESSED IN LUNG, SIGNAL = 0.52; EXPRESSED IN BONE MARROW, SIGNAL = 0.5; EXPRESSED IN ADULT LIVER, SIGNAL = 0.47; EST_HUMAN HIT: AA759018.1, EVALUE 1.20e-02; SWISSPROT HIT: P32333, EVALUE 1.60e+00
gagtaagattccaaattatgctaagaaaatctttcgtgaaggtaaacattctctctccaaagtttgtaggcgagcagaccttattgggaaaggatgttattatgaaaacccacttgttcttctgggtgaagaaataaaaaagaatgaaaaatacaacccagagcatcattcagaatccaccccaggccatgctggggactggggagagggaagcagt

SEQ ID NO: 30868 - DNA, 133 bp, Homo sapiens
  MAP TO AC005348.1; EXPRESSED IN LUNG, SIGNAL = 0.66; EXPRESSED IN ADULT LIVER, SIGNAL = 0.51; EXPRESSED IN PLACENTA, SIGNAL = 0.63; EXPRESSED IN BONE MARROW, SIGNAL = 0.51; SWISSPROT HIT: Q01727, EVALUE 8.10e-01; EST_HUMAN HIT: BF198029.1, EVALUE 1.70e+00
tcattgtgatgacgatgatgacaatgacgacaatgatgatgctgacgatgataaaggtgagatgttgtgggcagctgggcaggtgaatcaccggaaggaagaacttgccctgagtcagaaagaaaatgaaact

SEQ ID NO: 30869 - DNA, 216 bp, Homo sapiens
  MAP TO AC005296.1; EXPRESSED IN PLACENTA, SIGNAL = 0.59; EXPRESSED IN LUNG, SIGNAL = 0.63; EXPRESSED IN FETAL LIVER, SIGNAL = 0.77; EXPRESSED IN BONE MARROW, SIGNAL = 0.58; EXPRESSED IN ADULT LIVER, SIGNAL = 0.63; SWISSPROT HIT: P41247, EVALUE 3.00e-25; NT HIT: U08892.1, EVALUE 1.00e-118; EST_HUMAN HIT: AI078482.1, EVALUE 1.00e-82
gatgtgttgttgacgtgtgctgacgtgagatgtttctttccacagaagtgggtggacggaggcctcaccaacgctcttcccatcctgcccgtcggccggacagtaaccatctcccccttcagtggacgactggacatctccccgcaggacaaagggcagctagatctgtatgttaatatcgccaagcaggatatcatggtgagtaattatgttcag

SEQ ID NO: 30870 - DNA, 78 bp, Homo sapiens
  MAP TO AC000015.2; EXPRESSED IN LUNG, SIGNAL = 0.62; EXPRESSED IN FETAL LIVER, SIGNAL = 0.86; EXPRESSED IN BONE MARROW, SIGNAL = 0.82; EXPRESSED IN PLACENTA, SIGNAL = 0.64; EXPRESSED IN ADULT LIVER, SIGNAL = 0.62; NT HIT: AF030234.1, EVALUE 1.00e-36; EST_HUMAN HIT: AL044446.1, EVALUE 1.00e-36
cttaacataaccttccaatgcactgaatttaaacactgcctgaaaaggtttacggtcaataggacatgaagccagtgt

SEQ ID NO: 30871 - DNA, 101 bp, Homo sapiens
  MAP TO AC004925.1; EXPRESSED IN LUNG, SIGNAL = 0.45; EXPRESSED IN BONE MARROW, SIGNAL = 0.71; EXPRESSED IN ADULT LIVER, SIGNAL = 0.49; EST_HUMAN HIT: AW951139.1, EVALUE 8.00e-02; SWISSPROT HIT: Q9WVA4, EVALUE 7.20e+00; NT HIT: gi7705741, EVALUE 3.40e+00
atttgtccttgaagtggttatttgtaacatggaaactttagtaaagaaatcaactgagaatatgtacaacttttctcaaaattattataaagaagggaaag

SEQ ID NO: 30872 - DNA, 1019 bp, Homo sapiens
  MAP TO AC003682.1; EXPRESSED IN BONE MARROW, SIGNAL = 0.53; EXPRESSED IN ADULT LIVER, SIGNAL = 0.6; EST_HUMAN HIT: AI114826.1, EVALUE 0.00e+00; SWISSPROT HIT: P51523, EVALUE 2.00e-88; NT HIT: gi11426566, EVALUE 4.00e-36
tcatgtatggaccctttggtgctgcagaaggtgtgacctgcgtttgaaggccttcccacactcgatacacttgtagggcatctccccagtgtggatgacagagtgctgaatgaggtacgtgctccggtgaaaggctttcccacactgggtgcattcatagggcttctccccagtgtgaatccgctggtgctgtatgagttctgagctgcatctgaaggcctttccacatgccatgcaatcatagggcttctctccagtgtggatgatgtaatgttgaattaggtgggctctattgctaaaggctttctcacattctttgcactcaaagggcttttctccagtgtgggtcctattatggcgaataaaagtagaccggtgggtgaaggcctttcgacattgactacactcatagggtttctctccagtgtggattggatggtgctgcatgaggtacgacctgcgtttgaaggccttcccacactcaaggcacttgtatggtttctccccggtgtggatgaggtagtgccgaatgagagttgagctctggctaaaggctttcccacatgcattgcattcatagggtttcattccagtgtgaaccctctgatgtcgaacgagataccacttcctgttaaaacctttcccacactgcttgcatttgtaggggtttgtccctgcatgaatcaaggcgtctttccctggttgctgtgagtcacattcatggagaacatctgctgataaccactcttgtaatgccctggagtgcagaccatcatctgtccccaaaccttcaccttcaaggctcactttcccaagatgggtctccttgtggaggtctgtctccggtgtcactttacctttctgcatttccaaaagcccttcctcatccctagctctccccaacctcgaatcacttgaggttgaagattccagagtcaggcttccccggagaaaggcccgctcagataagactggcgggtaagtggttggctctctggtatgaacttgtgctctgtcac

SEQ ID NO: 30873 - DNA, 203 bp, Homo sapiens
  MAP TO AC005877.2; EXPRESSED IN PLACENTA, SIGNAL = 0.66; EXPRESSED IN LUNG, SIGNAL = 0.53; EXPRESSED IN BONE MARROW, SIGNAL = 0.49; EXPRESSED IN ADULT LIVER, SIGNAL = 0.44; NT HIT: U19969.1, EVALUE 1.00e-111; EST_HUMAN HIT: W67356.1, EVALUE 1.00e-110; SWISSPROT HIT: P37275, EVALUE 4.00e-37
ttgatctcttcctgatttatgtgatgtcatgtgacgttcaagttgggttctgtatgcaaaggtgtaactgcacagggagcaactaaagttatcttcattcttttcatgacgatatttaatgtgttctttcagagaggtaaagcgtttatagcctctatcacaatatggacaggtgagtaattgtgaaaatgcatctggtgttc

SEQ ID NO: 30874 - DNA, 163 bp, Homo sapiens
  MAP TO AC004531.1; EXPRESSED IN PLACENTA, SIGNAL = 0.58; EXPRESSED IN LUNG, SIGNAL = 1.3; EXPRESSED IN FETAL LIVER, SIGNAL = 0.72; EXPRESSED IN BONE MARROW, SIGNAL = 0.55; EXPRESSED IN ADULT LIVER, SIGNAL = 0.47; EST_HUMAN HIT: BE257384.1, EVALUE 7.00e-87; NT HIT: U85429.1, EVALUE 4.00e-87; SWISSPROT HIT: Q12968, EVALUE 7.00e-25
aacgggtatagaggctatctgcagagaaaggacttttccactgggctgtgggatgtgtacacgaaacacaagtcgtactctagtattctttctgccaatatcagtttctccttttcgaagttctatatctgaattgcggagtttcaaaatacctgcacaatca

SEQ ID NO: 30875 - DNA, 248 bp, Homo sapiens
  MAP TO AC002115.1; EXPRESSED IN LUNG, SIGNAL = 0.56; EXPRESSED IN FETAL LIVER, SIGNAL = 0.69; EXPRESSED IN ADULT LIVER, SIGNAL = 0.66; EXPRESSED IN PLACENTA, SIGNAL = 0.65; EXPRESSED IN BONE MARROW, SIGNAL = 1.5; NT HIT: AF085807.1, EVALUE 1.00e-105; SWISSPROT HIT: O00322, EVALUE 4.00e-32; EST_HUMAN HIT: BF683645.1, EVALUE 1.00e-125
gcctgtccctgtttgctgagaccatatgggtgacagccgaccagtaccgtgtatacccactgatgggagtctcaggcaaggatgacgtcttcgctggtgcctggattgccatcttctgcggcttctccttcttcatggtagccagttttggtgtgggtgccgcactctgccgccgccggtccatggtcctcacggtgagactccaggggttgggggatggggacactgaaaacggagttcagcatcac

SEQ ID NO: 30876 - DNA, 102 bp, Homo sapiens
  MAP TO AC005690.7; EXPRESSED IN LUNG, SIGNAL = 0.54; EXPRESSED IN BONE MARROW, SIGNAL = 0.58; EXPRESSED IN PLACENTA, SIGNAL = 0.71; EXPRESSED IN ADULT LIVER, SIGNAL = 0.52; SWISSPROT HIT: O27830, EVALUE 4.20e+00
acagaaaaacatccagagcacggcctgggaattctgggcaatgggcttcactctctgcttcatgaggttgttactgaacataggaattaaatgatatatgag

SEQ ID NO: 30877 - DNA, 259 bp, Homo sapiens
  MAP TO AC003043.1; EXPRESSED IN BONE MARROW, SIGNAL = 0.57; EXPRESSED IN PLACENTA, SIGNAL = 0.6; EXPRESSED IN LUNG, SIGNAL = 0.54; EXPRESSED IN FETAL LIVER, SIGNAL = 0.72; EXPRESSED IN ADULT LIVER, SIGNAL = 0.53; EST_HUMAN HIT: BF530718.1, EVALUE 3.00e-90; NT HIT: gi11525901, EVALUE 2.00e-90; SWISSPROT HIT: P87023, EVALUE 7.00e+00
catccccgccccgccccgggatgcccggatcccccgcccggcccgcccgccccccgggcccgccggcgtcgcgcaccttctgcgcgtagacgatgcggaacttctgctccatcttgtgccacttgctgtaccagctgtcctcatcggtgacgagcgggaggtacgggtgctcgggcgagttgtcctcgctcgtgctgctctcggcgctgtgccgctcctcctcgtccgtcaggtagtcgtagcttgggagagggagcag

SEQ ID NO: 30878 - DNA, 396 bp, Homo sapiens
  MAP TO AC003687.1; EXPRESSED IN LUNG, SIGNAL = 0.61; EXPRESSED IN ADULT LIVER, SIGNAL = 0.48; EXPRESSED IN BONE MARROW, SIGNAL = 0.64; NT HIT: U53212.1, EVALUE 3.00e-25; SWISSPROT HIT: Q62962, EVALUE 1.00e-05; EST_HUMAN HIT: AI567447.1, EVALUE 2.00e-03
gggatgcccctttttgtacccctgagcagcacaaggagtgtgcagagcctgccctaggtcagtactcaggggacagatggaatcatgggggccgggggcctgagactgagatcatggaaatcatctgggtttggggaaagatcaagtggaagaaggaatggagagaggatgagaagaaaggggctggtcgggtggagttgctgcagggatgggagagggagatggagaggaggaagaagagaaggttgggaagggaactggtgcaagaggatgagggctggaaatgggactggggagagaaagagatatggaaggtggagatggagaaggagtgggtttcaggggaaacagagggtgctaaggaatgcaggggagaggacagaggtggagagagga

SEQ ID NO: 30879 - DNA, 90 bp, Homo sapiens
  MAP TO AC004942.1; EXPRESSED IN PLACENTA, SIGNAL = 0.66; EXPRESSED IN LUNG, SIGNAL = 0.64; EXPRESSED IN BONE MARROW, SIGNAL = 0.65; EXPRESSED IN ADULT LIVER, SIGNAL = 0.72; NT HIT: AF111167.2, EVALUE 2.00e-07; EST_HUMAN HIT: AW674316.1, EVALUE 8.00e-11
gagtcagcttctgcttttagtgagggcttcgggaagcttacaatcgtgatggaaggtgaagagggagcaggcctgtcacatgacaagaaa

SEQ ID NO: 30880 - DNA, 140 bp, Homo sapiens
  MAP TO AC005857.1; EXPRESSED IN BONE MARROW, SIGNAL = 0.57; EXPRESSED IN ADULT LIVER, SIGNAL = 0.51; EXPRESSED IN PLACENTA, SIGNAL = 0.65; EXPRESSED IN LUNG, SIGNAL = 0.6; NT HIT: X81879.1, EVALUE 1.20e+00; EST_HUMAN HIT: AW876735.1, EVALUE 1.90e+00
tttttcttctcccgtattttcattgatgatgatgatgatgatgatgatgataactgctatagttagcacctatggggcacactgtaaggcaccatgcattttaggggcattagctcatgagatcctcacgtcaactccaa

SEQ ID NO: 30881 - DNA, 129 bp, Homo sapiens
  MAP TO AC005859.1; EXPRESSED IN LUNG, SIGNAL = 0.79; EXPRESSED IN PLACENTA, SIGNAL = 0.96; EXPRESSED IN FETAL LIVER, SIGNAL = 0.84; EXPRESSED IN ADULT LIVER, SIGNAL = 0.76; EXPRESSED IN BONE MARROW, SIGNAL = 0.73; SWISSPROT HIT: P16811, EVALUE 2.40e+00; NT HIT: AL161516.2, EVALUE 2.90e-01; EST_HUMAN HIT: BF339519.1, EVALUE 1.10e-01
catacctaccggtgctgtctcagaaacttgtggaacaaagatgaagcaatgttcatgttattcgcctacatctgtgaattacacaaggaagacgagtttgagaaatccgaagttcagtacaaatttatg

SEQ ID NO: 30882 - DNA, 208 bp, Homo sapiens
  MAP TO AC005342.1; EXPRESSED IN BONE MARROW, SIGNAL = 0.54; EXPRESSED IN LUNG, SIGNAL = 0.49; EXPRESSED IN ADULT LIVER, SIGNAL = 0.47; SWISSPROT HIT: Q39586, EVALUE 1.70e+00; EST_HUMAN HIT: BE789172.1, EVALUE 1.00e-113; NT HIT: AF050491.1, EVALUE 4.90e-01
caagggtttccctgttccagagctctgagcgagcacaggaaacttagcggccaaggctggccggttagaggcatgcagctgctgctcctgctgtacaatctgaagcttcttcagtaactcttgaggggagatcactccagagctgccagtctgactaccagagatggggagtgtttgtcttgggagtgtggactgttctcttccatga

SEQ ID NO: 30883 - DNA, 82 bp, Homo sapiens
  MAP TO AC006529.1; EXPRESSED IN LUNG, SIGNAL = 0.74; EXPRESSED IN FETAL LIVER, SIGNAL = 0.73; EXPRESSED IN PLACENTA, SIGNAL = 0.6; EXPRESSED IN BONE MARROW, SIGNAL = 0.65; EXPRESSED IN ADULT LIVER, SIGNAL = 0.63; NT HIT: gi11422113, EVALUE 4.00e-39; EST_HUMAN HIT: BE384839.1, EVALUE 6.00e-39
caagaaactgcgtcccctgtatgacattccttacatgtttgaggcccgggaatttcttcgaaaaaagcttattgggaagaag

SEQ ID NO: 30884 - DNA, 99 bp, Homo sapiens; identical to SEQ ID NO: 28188
  MAP TO AC005079.1; EXPRESSED IN ADULT LIVER, SIGNAL = 0.49; EXPRESSED IN PLACENTA, SIGNAL = 0.64; EXPRESSED IN LUNG, SIGNAL = 0.53; NT HIT: D64088.1, EVALUE 8.30e-01; EST_HUMAN HIT: AW511225.1, EVALUE 6.00e-49

SEQ ID NO: 30885 - DNA, 129 bp, Homo sapiens
  MAP TO AC005042.1; EXPRESSED IN LUNG, SIGNAL = 0.47; EXPRESSED IN BONE MARROW, SIGNAL = 0.49; EXPRESSED IN ADULT LIVER, SIGNAL = 0.49; EST_HUMAN HIT: R58748.1, EVALUE 1.70e+00; NT HIT: X14778.1, EVALUE 4.50e+00; SWISSPROT HIT: P08843, EVALUE 4.10e+00
ggatctttgaggtgggcacaggttaaggataaagagcaaggggatgtgatttacagacatagagacagtacgaaaccaggcctggtgcattgcagaaatgctgaaatctcaaagttgagagaagaaaag

SEQ ID NO: 30886 - DNA, 105 bp, Homo sapiens
  MAP TO AC005856.1; EXPRESSED IN ADULT LIVER, SIGNAL = 0.75; EXPRESSED IN BONE MARROW, SIGNAL = 0.69; EXPRESSED IN LUNG, SIGNAL = 0.86; EXPRESSED IN PLACENTA, SIGNAL = 0.67; EXPRESSED IN FETAL LIVER, SIGNAL = 0.8; EST_HUMAN HIT: BF376989.1, EVALUE 8.40e-02; NT HIT: AF275948.1, EVALUE 5.70e-02
cagcctcggctggagacgttgctcctccccaaggagggcattatgacatggaatcagtttcagaaagagaagtatatccctgaactggtttacttattatttttg

SEQ ID NO: 30887 - DNA, 192 bp, Homo sapiens
  MAP TO AC005664.1; EXPRESSED IN BONE MARROW, SIGNAL = 0.82; EXPRESSED IN LUNG, SIGNAL = 0.58; EXPRESSED IN FETAL LIVER, SIGNAL = 0.98; EXPRESSED IN ADULT LIVER, SIGNAL = 0.53; EST_HUMAN HIT: BF509383.1, EVALUE 2.00e-59; SWISSPROT HIT: P54797, EVALUE 1.00e-13; NT HIT: X74504.1, EVALUE 4.00e-26
ctcaggtcggctgctatgaggttgaagccattgtacagatggccctccatagagaccttcttcaggtaggacaagctgtccacgtcagtggtcagaaagtgggtgacaagttcacctgtaggcaggggacagatgctgtgtccacagctgcaggcatgtgctcttctcccaggaacactgatatggggcccc

SEQ ID NO: 30888 - DNA, 84 bp, Homo sapiens
  MAP TO AC006478.2; EXPRESSED IN LUNG, SIGNAL = 0.56; EXPRESSED IN BONE MARROW, SIGNAL = 0.56; EXPRESSED IN ADULT LIVER, SIGNAL = 0.51; SWISSPROT HIT: Q15648, EVALUE 7.30e+00; NT HIT: AF099810.1, EVALUE 3.00e-03; EST_HUMAN HIT: AA773352.1, EVALUE 1.00e-03
aaaacgggtcaaggaaagcaagatggaggagtgccacaagattatacttatgggaagagactgggcatgttcagggtggtatgg

SEQ ID NO: 30889 - DNA, 77 bp, Homo sapiens
  MAP TO AC004063.1; EXPRESSED IN PLACENTA, SIGNAL = 0.82; EXPRESSED IN ADULT LIVER, SIGNAL = 0.57; EXPRESSED IN LUNG, SIGNAL = 0.78; EXPRESSED IN BONE MARROW, SIGNAL = 0.79; SWISSPROT HIT: P43927, EVALUE 7.40e+00; NT HIT: gi4506810, EVALUE 1.50e-01; EST_HUMAN HIT: AW367408.1, EVALUE 9.00e-01
tctacctgattctaaagtattctctaatactgaggaagaggactggaatgatatccctctggagtttgacaaaaatc

SEQ ID NO: 30890 - DNA, 251 bp, Homo sapiens
  MAP TO AC006484.2; EXPRESSED IN LUNG, SIGNAL = 0.57; EXPRESSED IN FETAL LIVER, SIGNAL = 1.5; EXPRESSED IN BONE MARROW, SIGNAL = 0.53; EXPRESSED IN ADULT LIVER, SIGNAL = 0.53; EST_HUMAN HIT: AA190994.1, EVALUE 5.80e-02; NT HIT: AJ243213.1, EVALUE 1.50e-01
tggagaaggtacacaggatctttgccacctgccgggcagatgatgctaagaaccacgtggctgccattactgtagggcctgatttgtgttttaaaagaatcagtctggctgttgtatcaagaatagacccaggagacctggtagaagccagttataagctttttgcaatattccagtatgagattatgatagtttgcatcaaagatatctcagtgcagatatttagaattgctcagattctagctgaatct

SEQ ID NO: 30891 - DNA, 279 bp, Homo sapiens
  MAP TO AC005669.1; EXPRESSED IN BONE MARROW, SIGNAL = 0.53; EXPRESSED IN LUNG, SIGNAL = 0.44; EXPRESSED IN ADULT LIVER, SIGNAL = 0.5; SWISSPROT HIT: P23071, EVALUE 2.40e-01; EST_HUMAN HIT: AW510940.1, EVALUE 6.40e-02; NT HIT: AJ289880.1, EVALUE 0.00e+00
aatcttaaagacagttgtggatcccaaagagagggttagaattgcagcatttccagacttacttggtcaaggaatgccttttcaccctcctctcacccgactcccacccttagctactaacattttgaggacactagtgttaaggggaccaactctccctgtttccccaggattgaggggttttctgggacgtggaactttcagtactaaaattgggaaaatccctggtcacctaggaaatgccagtctagagggagaaagagattggtcactgagagg

SEQ ID NO: 30892 - DNA, 110 bp, Homo sapiens
  MAP TO AC003090.1; EXPRESSED IN BONE MARROW, SIGNAL = 0.52; EXPRESSED IN PLACENTA, SIGNAL = 0.59; EXPRESSED IN LUNG, SIGNAL = 0.51; EXPRESSED IN ADULT LIVER, SIGNAL = 0.45; EST_HUMAN HIT: BF541639.1, EVALUE 1.00e-03; SWISSPROT HIT: P54269, EVALUE 1.80e+00; NT HIT: gi11427690, EVALUE 6.10e-02
aggcttcactcctgcgacagctgactttctgttcctttctgctgttgtctctgtgcccagtgctgaagtccctggagatgatcatgaaattcagggtgaccaggttgggc

SEQ ID NO: 30893 - DNA, 436 bp, Homo sapiens
  MAP TO AC005703.1; EXPRESSED IN LUNG, SIGNAL = 0.61; EXPRESSED IN BONE MARROW, SIGNAL = 0.57; EXPRESSED IN ADULT LIVER, SIGNAL = 0.46; EST_HUMAN HIT: AF150372.1, EVALUE 1.00e-01; NT HIT: AF161364.1, EVALUE 6.90e-02; SWISSPROT HIT: P12655, EVALUE 3.40e+00
gcttcaggaagccactgtaaacaccagaaaaggtgggtggcacatgagcactggctctgactccatggccctgtttgcctgtagaaccaatgaatgtcaagttttgatgagttgcacagtcccttctgctgcccgagagaggaccctggaggaggaaagagagggaaaggctgcatatgttctcttcaccattcctctagatgggagagagagcaaaatctactcttctatgggccaaaatatgaaaagacagagaaaagtatttcttctagtagacactagtgttagtgactcagaagacagtggcagcagtgaacagcttggacgtggtgctgggcttacatccaaggggcagcaactccacagtcaacaaaaactggataagttggacgacatggaaattagcaattcttgtgcattaaggggcatgacagac

SEQ ID NO: 30894 - DNA, 89 bp, Homo sapiens
  MAP TO AC004687.1; EXPRESSED IN LUNG, SIGNAL = 0.79; EXPRESSED IN FETAL LIVER, SIGNAL = 0.69; EXPRESSED IN BONE MARROW, SIGNAL = 0.57; EXPRESSED IN PLACENTA, SIGNAL = 0.66; EXPRESSED IN ADULT LIVER, SIGNAL = 0.54; NT HIT: D50914.1, EVALUE 7.30e-01; EST_HUMAN HIT: AA765296.1, EVALUE 2.80e-01
tcacagggatcctttgagcactcttcctctgagccttcttgtggtgtccttgtggtcaggagacacatcatcaatcacaaagacttgcc

SEQ ID NO: 30895 - DNA, 110 bp, Homo sapiens
  MAP TO AC002044.1; EXPRESSED IN LUNG, SIGNAL = 0.51; EXPRESSED IN BONE MARROW, SIGNAL = 0.62; EXPRESSED IN ADULT LIVER, SIGNAL = 0.48; EST_HUMAN HIT: BE888617.1, EVALUE 8.90e-02; NT HIT: gi7662463, EVALUE 6.10e-02
ttcagggaagggagctttaggaggctcttgtgtcccctttagtagaaggagcagcatggaccctgtgaccaaggagcgtttctcattttcctctttttcactctccttac

SEQ ID NO: 30896 - DNA, 313 bp, Homo sapiens
  MAP TO AC004701.1; EXPRESSED IN ADULT LIVER, SIGNAL = 0.54; EXPRESSED IN LUNG, SIGNAL = 0.52; NT HIT: AE001299.1, EVALUE 1.90e-01
atggatgtacattatctttatttggctcatcccagccacttgtgtacagcgcacagagaactttgcattaggcatggagcatgactccaagaccactacactagcaaagtacaacatttactctttggtcaattaccttcttcgcttctgttgctatttcaggggcaggacaaagggtaacacagggctctgtaaatatgaaattagaaagaatagctggaagtccctatactgggagccaagtatacttaccacattcaattccatcatagaatacaggaaaatgaaaaacatatgggttgacttgttgagt

SEQ ID NO: 30897 - DNA, 124 bp, Homo sapiens
  MAP TO AC005884.1; EXPRESSED IN PLACENTA, SIGNAL = 0.61; EXPRESSED IN LUNG, SIGNAL = 0.56; EXPRESSED IN ADULT LIVER, SIGNAL = 0.52; EXPRESSED IN FETAL LIVER, SIGNAL = 1.1; EXPRESSED IN BONE MARROW, SIGNAL = 0.56; NT HIT: gi8923130, EVALUE 2.00e-23; EST_HUMAN HIT: AW401433.1, EVALUE 9.00e-64
catgcaagggtgacccagaagggctgcttgatagacctggaacagggctacagcgacctccttgcttagacgtcagttcttgttcaatctcttccagtccagcacttttctggaaacggctcat

SEQ ID NO: 30898 - DNA, 123 bp, Homo sapiens
  MAP TO AC000121.1; EXPRESSED IN LUNG, SIGNAL = 0.42; EXPRESSED IN ADULT LIVER, SIGNAL = 0.48; NT HIT: U52111.2, EVALUE 4.30e+00; EST_HUMAN HIT: BE971873.1, EVALUE 1.60e+00
atcctgtcccagtgggatcacgaaggggcaaggagccctcagcacaaaaatgttgtattcattagccagagatgcaatgctaagagaggaagcatgcatgatctgcctgagagatgctttggg

SEQ ID NO: 30899 - DNA, 333 bp, Homo sapiens
  MAP TO AC002115.1; EXPRESSED IN PLACENTA, SIGNAL = 0.58; EXPRESSED IN LUNG, SIGNAL = 0.61; EXPRESSED IN BONE MARROW, SIGNAL = 0.53; EXPRESSED IN ADULT LIVER, SIGNAL = 0.54; NT HIT: X71428.1, EVALUE 5.20e-02; EST_HUMAN HIT: BE388673.1, EVALUE 0.00e+00; SWISSPROT HIT: P10388, EVALUE 1.70e-01
gaagagccagcagcaccccgagagctgggcctaggcctggggttgggcctgaaagagaaggaagaggcagtggtggcggcggcggctgggctggaggaggctagcgcggctgtggccgtgggggcaggaggtgccccagctggccctgcagtcattgggcccagcctgccgctggccctggccatgccattgcccgagcctgagcccctgcccctcccgttggaggtcgtccgcggcctcctgcccccgctgcgcattcctgaactcctgtccctgcgtcctcggccccggccccctcggccagagccacccccaggcctcatggctcttgag

SEQ ID NO: 30900 - DNA, 201 bp, Homo sapiens
  MAP TO AC000380.1; EXPRESSED IN ADULT LIVER, SIGNAL = 0.44; EXPRESSED IN BONE MARROW, SIGNAL = 0.59; EST_HUMAN HIT: BE744218.1, EVALUE 9.00e-93; NT HIT: gi11450204, EVALUE 6.00e-93; SWISSPROT HIT: P96463, EVALUE 5.70e-01
gttgatcgacatcgcccgcaaactggacaaggctgagcgcgagcccctgctgctgtgcgctacctacctcaagaagctggacagccctggctatgctgctgagacctacctgaagatgggtgacctcaagtccctggtgcagctgcacgtggagacccagcgctgggatgaggtgaggggaaagcaggcctcatgggctgg

SEQ ID NO: 30901 - DNA, 145 bp, Homo sapiens
  MAP TO AC004676.1; EXPRESSED IN PLACENTA, SIGNAL = 0.61; EXPRESSED IN LUNG, SIGNAL = 0.65; EXPRESSED IN BONE MARROW, SIGNAL = 0.71; EXPRESSED IN ADULT LIVER, SIGNAL = 0.6; EST_HUMAN HIT: AW027705.1, EVALUE 3.00e-76; NT HIT: U22818.1, EVALUE 1.30e+00
tcacttgggtgagagatcatccatcaagatgaacgaagagcatgaattggagcatgctactggagactctgcggtagcgctgcctttagccagcgggtctgaggataagccactgctgctactactgccatccaaaatatctgaa

SEQ ID NO: 30902 - DNA, 142 bp, Homo sapiens
  MAP TO AC005281.2; EXPRESSED IN PLACENTA, SIGNAL = 0.67; EXPRESSED IN LUNG, SIGNAL = 0.64; EXPRESSED IN BONE MARROW, SIGNAL = 0.75; EXPRESSED IN ADULT LIVER, SIGNAL = 0.67; NT HIT: X78479.1, EVALUE 8.00e-36; EST_HUMAN HIT: BF689800.1, EVALUE 9.00e-12; SWISSPROT HIT: Q60604, EVALUE 1.00e-21
attaaatcatgttcttacgaacgacctgacagccaagaggctcctacatgtgaagggtcgtagagtggtgagagccacagaagttccccttagctgggacagtttcaacaagggtgactgcttcatcattgaccttggcacc

SEQ ID NO: 30903 - DNA, 121 bp, Homo sapiens
  MAP TO AC005670.1; EXPRESSED IN PLACENTA, SIGNAL = 0.74; EXPRESSED IN LUNG, SIGNAL = 0.51; EXPRESSED IN BONE MARROW, SIGNAL = 0.61; EXPRESSED IN ADULT LIVER, SIGNAL = 0.59; SWISSPROT HIT: O14653, EVALUE 3.00e-03; EST_HUMAN HIT: W44493.1, EVALUE 2.00e-21; NT HIT: gi11426036, EVALUE 2.00e-20
attgtctttcctgactgaagcgctgttgattactcctgtctcactcatttcctccctcttcctttgataggcaggtccacgagatccagtcttgcatgggacgcctggagacggcagacaa

SEQ ID NO: 30904 - DNA, 154 bp, Homo sapiens
  MAP TO AC003098.1; EXPRESSED IN LUNG, SIGNAL = 0.91; EXPRESSED IN FETAL LIVER, SIGNAL = 0.98; EXPRESSED IN PLACENTA, SIGNAL = 0.92; EXPRESSED IN BONE MARROW, SIGNAL = 0.94; EXPRESSED IN ADULT LIVER, SIGNAL = 0.89; NT HIT: gi11525883, EVALUE 9.00e-73; SWISSPROT HIT: Q13368, EVALUE 4.00e-21; EST_HUMAN HIT: T27219.1, EVALUE 5.00e-69
caggggttccttgttcttcaccaagcggacgatcttcaccgattcctcatcaaaatcctcatcgatattgtcaggcagaggcgggagaacggggtcaaaattcttctgggcaaccgtgtcatgtaccatgagcacagcctgccgggaaagccag

SEQ ID NO: 30905 - DNA, 287 bp, Homo sapiens
  MAP TO AC005600.1; EXPRESSED IN BONE MARROW, SIGNAL = 0.54; EXPRESSED IN LUNG, SIGNAL = 0.45; EXPRESSED IN ADULT LIVER, SIGNAL = 0.41; NT HIT: AB014460.1, EVALUE 0.00e+00; SWISSPROT HIT: Q00587, EVALUE 1.50e-01; EST_HUMAN HIT: AW853983.1, EVALUE 0.00e+00
ctttgggggggcactggagtcatagcagtgctcagtccccagatggtccacaggtgcatcctttttgttcctcatggcacggatgttgaccagctgttgctgccagtcctggggctcccagactggcaccttgaggggctcagccccctcacctttctcactgtccgagccctcataggccacacgcagtctctgtgctttccgcggacgcttcacggggctgtggcttttcctcgcttctgcaaaaagcaccacgcagtccctctggtggggccacaggtgaaggt

SEQ ID NO: 30906 - DNA, 89 bp, Homo sapiens
  MAP TO AC004862.1; EXPRESSED IN ADULT LIVER, SIGNAL = 0.56; EXPRESSED IN LUNG, SIGNAL = 0.65; EXPRESSED IN FETAL LIVER, SIGNAL = 0.68; EXPRESSED IN BONE MARROW, SIGNAL = 0.6; NT HIT: AB026033.1, EVALUE 2.90e+00
gagtttcagaagtctttgtgggctttctagtgagcctgtgaactcacggaagccatctaaaaacttgacctgtgtaaatgttgtaaaat

SEQ ID NO: 30907 - DNA, 134 bp, Homo sapiens
  MAP TO AC004862.1; EXPRESSED IN LUNG, SIGNAL = 0.61; EXPRESSED IN ADULT LIVER, SIGNAL = 0.58; NT HIT: X65747.1, EVALUE 7.00e-27; SWISSPROT HIT: P29348, EVALUE 1.00e-19
atactaagatgcaccttggttaccttttcttgaaagatatcttttttgttgaggaacaggacaatggaggttgttgaaaaatacttgtgattacagatactgttgaacaggtgaaggctttcatgcattctatt

SEQ ID NO: 30908 - DNA, 98 bp, Homo sapiens
  MAP TO AC006337.2; EXPRESSED IN PLACENTA, SIGNAL = 1.1; EXPRESSED IN FETAL LIVER, SIGNAL = 0.71; EXPRESSED IN BONE MARROW, SIGNAL =   3; EXPRESSED IN ADULT LIVER, SIGNAL = 1.1; EXPRESSED IN LUNG, SIGNAL = 0.73; SWISSPROT HIT: P92812, EVALUE 5.50e+00; EST_HUMAN HIT: H82119.1, EVALUE 1.20e+00; NT HIT: M85289.1, EVALUE 5.30e-02
cagaccattccttgcccaattcttgatgagtcccaatggtctcctaatacctgtgctgactctctcatcccagggtgacagactgggccttctgcctg

SEQ ID NO: 30909 - DNA, 92 bp, Homo sapiens
  MAP TO AC006204.1; EXPRESSED IN FETAL LIVER, SIGNAL = 0.83; EXPRESSED IN BONE MARROW, SIGNAL = 0.73; EXPRESSED IN ADULT LIVER, SIGNAL = 0.55; EXPRESSED IN PLACENTA, SIGNAL = 1.1; EXPRESSED IN LUNG, SIGNAL = 0.65; SWISSPROT HIT: P08541, EVALUE 4.20e+00; NT HIT: M15274.1, EVALUE 7.60e-01; EST_HUMAN HIT: BF217596.1, EVALUE 7.20e-02
agagaaaaagaatgaatacaagaataccatgacaaagcagaaagaaaagaaagtcagaactgggaaagagtgataatttacccatctttgtt

SEQ ID NO: 30910 - DNA, 193 bp, Homo sapiens
  MAP TO AC005913.1; EXPRESSED IN LUNG, SIGNAL = 0.71; EXPRESSED IN HELA, SIGNAL = 2.7; EXPRESSED IN FETAL LIVER, SIGNAL = 1.7; EXPRESSED IN BONE MARROW, SIGNAL = 1.3; EXPRESSED IN ADULT LIVER, SIGNAL = 0.82; EXPRESSED IN PLACENTA, SIGNAL = 0.62; SWISSPROT HIT: P33551, EVALUE 8.00e-26; EST_HUMAN HIT: BE569085.1, EVALUE 1.00e-85; NT HIT: gi11424140, EVALUE 8.00e-86
ggagtttgagtatcgacatgtcatgctgcccaaggacatagccaagctggtccctgaaacccatttgatgtctgaatctgaatggaggaatcttggcattcagcagagtcagggatgggtccattatatgatccatgaaccagaaccgcacgtcttgctcttccggcgcccgctacccaagaagccaaagaaa

SEQ ID NO: 30911 - DNA, 257 bp, Homo sapiens
  MAP TO AC004031.1; EXPRESSED IN PLACENTA, SIGNAL = 0.66; EXPRESSED IN BONE MARROW, SIGNAL = 0.89; EXPRESSED IN ADULT LIVER, SIGNAL = 0.76; EXPRESSED IN LUNG, SIGNAL = 0.73; EXPRESSED IN FETAL LIVER, SIGNAL = 0.85; EST_HUMAN HIT: AW502437.1, EVALUE 1.00e-112; NT HIT: AB014514.1, EVALUE 1.00e-112; SWISSPROT HIT: Q92259, EVALUE 6.20e-01
acggcaccatcagctccagctcgatcctcctggcgcagtctttacagcattgcatccattcccagaactgctccgccacggacctcttttaccagggcaactcccagacagtgagagagtggctcaacgtggccatcacccggaccctgcaccagggcgaggagagccttttagagctgacgaaacagatctgctctttcctgcaggtagaagtctaaagctcatgttcctgcagtgtggttaccatttttaactgg

SEQ ID NO: 30912 - DNA, 98 bp, Homo sapiens
  MAP TO AC002486.1; EXPRESSED IN BONE MARROW, SIGNAL = 0.57; EXPRESSED IN ADULT LIVER, SIGNAL = 0.52; EXPRESSED IN PLACENTA, SIGNAL = 0.59; EXPRESSED IN LUNG, SIGNAL = 0.52; EST_HUMAN HIT: BF642800.1, EVALUE 1.00e-12
gaatcatcgtcctcctccagccgcccaagctcctccgccactcgtcagagtcctccttcagccgttcccagcccggggcctcccaggtgatgagggcc

SEQ ID NO: 30913 - DNA, 148 bp, Homo sapiens
  MAP TO AC005678.1; EXPRESSED IN LUNG, SIGNAL = 0.62; EXPRESSED IN ADULT LIVER, SIGNAL = 0.57; EXPRESSED IN PLACENTA, SIGNAL = 0.71; EXPRESSED IN BONE MARROW, SIGNAL = 0.61; SWISSPROT HIT: O43309, EVALUE 6.00e-22; NT HIT: gi7662109, EVALUE 4.00e-78; EST_HUMAN HIT: BE929604.1, EVALUE 1.00e-50
cttgctcctgttgggattcaagttctggagattcatactttggctgggctttcatggactggagggacatactgggttctccttcttttcgtagacgtaccgtctcctgcaagaacatttcctgttccccagtgtggactgagacctg

SEQ ID NO: 30914 - DNA, 157 bp, Homo sapiens
  MAP TO AC005249.1; EXPRESSED IN FETAL LIVER, SIGNAL = 0.68; EXPRESSED IN LUNG, SIGNAL = 0.67; EXPRESSED IN BONE MARROW, SIGNAL = 0.63; EXPRESSED IN ADULT LIVER, SIGNAL = 0.62; EST_HUMAN HIT: BF131628.1, EVALUE 3.40e-02
atgatccagaaactgctagcacagtgactgagatgatggctggagaggagatggaaagagaaaaggcagagagtgaggctaaggaagagatggaaagaagaaacttatcagggcagatcacgaaaaggagagcagagaggctttcagaggcttaaac

SEQ ID NO: 30915 - DNA, 136 bp, Homo sapiens
  MAP TO AC005906.1; EXPRESSED IN LUNG, SIGNAL = 0.45; EXPRESSED IN ADULT LIVER, SIGNAL = 0.44; NT HIT: AF003529.1, EVALUE 1.00e-06; EST_HUMAN HIT: AA278183.1, EVALUE 5.00e-07
ggctctccagcaggtccagattaccatggaaatatccctgctatttgggccatatgatccagcagatcccatggtgtttgcagtggcagtggtagagagagagatctctttggagtctttaaaaagcttctgtagg

SEQ ID NO: 30916 - DNA, 115 bp, Homo sapiens
  MAP TO AC004452.1; EXPRESSED IN PLACENTA, SIGNAL = 0.59; EXPRESSED IN LUNG, SIGNAL = 0.59; EXPRESSED IN ADULT LIVER, SIGNAL = 1.5; EXPRESSED IN FETAL LIVER, SIGNAL = 0.79; EXPRESSED IN BONE MARROW, SIGNAL = 0.69; NT HIT: gi11545722, EVALUE 2.50e-01; EST_HUMAN HIT: AW663302.1, EVALUE 5.00e-19
gaacaccagctgagattgacgttaaagcatcatccaggcgacctggtggctttcctttgagaatccagctgacaacaagttcaagcagcatcaaagaaatgaaaaatggagttgc

SEQ ID NO: 30917 - DNA, 180 bp, Homo sapiens
  MAP TO AC002042.1; EXPRESSED IN BONE MARROW, SIGNAL = 0.49; EXPRESSED IN ADULT LIVER, SIGNAL = 0.52; EXPRESSED IN LUNG, SIGNAL = 0.49; SWISSPROT HIT: P35085, EVALUE 2.00e-05; EST_HUMAN HIT: BE908508.1, EVALUE 2.50e+00; NT HIT: AE004925.1, EVALUE 1.70e+00
actgggtggcttggctggcttgcctggctgggttggttggctggcttggatggcttggccggctgggtggcttggctggcttggctggctgggccggcctagctggcttggctggctggctggcttgtttggcttggcttggcttggcgtgtgcggcagccgaggctggggctgtgactt

SEQ ID NO: 30918 - DNA, 102 bp, Homo sapiens
  MAP TO AC005969.4; EXPRESSED IN LUNG, SIGNAL = 0.59; EXPRESSED IN ADULT LIVER, SIGNAL = 0.52; NT HIT: X06285.1, EVALUE 8.60e-01; EST_HUMAN HIT: BE383518.1, EVALUE 3.20e-01
tttggaacagaagtacacaatttggatgcaaaagttgattcaggaaagactgtaaaactcaactctccactggaaaagataaactccttttcgccacagaaa

SEQ ID NO: 30919 - DNA, 111 bp, Homo sapiens
  MAP TO AC005939.1; EXPRESSED IN LUNG, SIGNAL = 0.63; EXPRESSED IN BONE MARROW, SIGNAL = 0.55; EXPRESSED IN PLACENTA, SIGNAL = 0.62; EXPRESSED IN ADULT LIVER, SIGNAL = 0.5; SWISSPROT HIT: P33108, EVALUE 9.30e+00; EST_HUMAN HIT: BF106464.1, EVALUE 2.30e-02
gatggtatcacagagaatggaatcaccatgggaattgagaaaaacatatttaccaaattggaagctggataccaagtgtttattgtgctaaaagaaaaactgttgataaat

SEQ ID NO: 30920 - DNA, 153 bp, Homo sapiens
  MAP TO AC004962.1; EXPRESSED IN BONE MARROW, SIGNAL = 0.69; EXPRESSED IN ADULT LIVER, SIGNAL = 0.7; EXPRESSED IN LUNG, SIGNAL = 0.67; EXPRESSED IN FETAL LIVER, SIGNAL = 0.71; SWISSPROT HIT: P39963, EVALUE 5.20e+00; NT HIT: AF038548.1, EVALUE 2.20e-02; EST_HUMAN HIT: AI923972.1, EVALUE 2.00e-80
cacatcagagcctacctgcatgacctcaagcgggccaagatgggtctcgggggcatgcctgacaggaaccacctggcctgtgccaaggctgaccttgaggaagtggtcagggtgtgcccaggcttcaaggcgtacctggacatcggccaggta

SEQ ID NO: 30921 - DNA, 108 bp, Homo sapiens
  MAP TO AC001231.1; EXPRESSED IN ADULT LIVER, SIGNAL = 0.51; EST_HUMAN HIT: BF109222.1, EVALUE 2.20e-02; NT HIT: M38684.1, EVALUE 2.30e-01
agcatggaatccattgataagcgtagaccagtcatgggcccccatcatagctggcagagcagtcaacttcccctgaaccacatggacccccaaacagaaattcagctt

SEQ ID NO: 30922 - DNA, 127 bp, Homo sapiens
  MAP TO AC005166.1; EXPRESSED IN LUNG, SIGNAL = 0.59; EXPRESSED IN BONE MARROW, SIGNAL = 0.59; EXPRESSED IN ADULT LIVER, SIGNAL = 0.61; SWISSPROT HIT: P34855, EVALUE 7.00e+00; NT HIT: AF156696.1, EVALUE 4.40e+00
tccaggagcaaaaactccctcgtgtaagcatctaccaagcctctgtttgcgtatttgctgatattccaccagccaaaatgagtcataaggccaagtcaagaatcagcataggtgaggatgacataga

SEQ ID NO: 30923 - DNA, 168 bp, Homo sapiens
  MAP TO AC003071.1; EXPRESSED IN LUNG, SIGNAL = 0.67; EXPRESSED IN PLACENTA, SIGNAL = 0.64; EXPRESSED IN BONE MARROW, SIGNAL = 0.66; EXPRESSED IN ADULT LIVER, SIGNAL = 0.56; EXPRESSED IN FETAL LIVER, SIGNAL = 0.68; NT HIT: U82695.2, EVALUE 3.90e-01; EST_HUMAN HIT: BE298018.1, EVALUE 5.80e-01; SWISSPROT HIT: Q61765, EVALUE 1.30e+00
gccttgggccttttccccatgtagatgaccctgcttaccctgctcaggctccaactctggcattcccactgtgggtcacccacacttgtgatgccctcgttactccatttggcactgactccccaagccatgctcgccctccacatggttgccctcctcacactgcac

SEQ ID NO: 30924 - DNA, 198 bp, Homo sapiens
  MAP TO AC004465.1; EXPRESSED IN LUNG, SIGNAL = 0.42; EXPRESSED IN ADULT LIVER, SIGNAL = 0.47; EST_HUMAN HIT: AI333675.1, EVALUE 7.00e-04; SWISSPROT HIT: Q00158, EVALUE 5.00e+00; NT HIT: AJ400877.1, EVALUE 2.00e-03
taagagtgactaatgtttactgagcacctacaaagtgccaagctttggtccaagcaaacataatatattgacttggtaaattcccaaaacaacccaataaggtagttgttattgttatcttcatttcccacatgaagaaactgagatgcagagagatttggtaactcgttcaagaccacagagcagcagagctggaac

SEQ ID NO: 30925 - DNA, 166 bp, Homo sapiens
  MAP TO AC006329.2; EXPRESSED IN ADULT LIVER, SIGNAL = 0.99; EXPRESSED IN LUNG, SIGNAL = 0.65; SWISSPROT HIT: P77744, EVALUE 2.30e+00; EST_HUMAN HIT: AI798726.1, EVALUE 2.20e+00; NT HIT: AL163202.2, EVALUE 1.50e+00
atccctactcctgtttgaaaccagtgagatgagagttgagtgtggttcagaccccagccaagcgcatggagtggtttctcttcccctcctcattctgctacctaagcaaggtgtcctgatcatcttcacccaaatctgggtggtaagtactgttattattctactt

SEQ ID NO: 30926 - DNA, 107 bp, Homo sapiens
  MAP TO AC006143.1; EXPRESSED IN LUNG, SIGNAL = 0.55; EXPRESSED IN BONE MARROW, SIGNAL = 0.54; EXPRESSED IN ADULT LIVER, SIGNAL = 0.51; SWISSPROT HIT: P75130, EVALUE 9.40e+00
cttcattgatgaagtgttttggattgtcttgtatttttgcaaagtgttgctgatcgatactggctaagagcacagatccatagcaatcagtctgctgtgaggcaatt

SEQ ID NO: 30927 - DNA, 163 bp, Homo sapiens
  MAP TO AC005317.1; EXPRESSED IN LUNG, SIGNAL = 0.77; EXPRESSED IN BONE MARROW, SIGNAL = 0.64; EXPRESSED IN ADULT LIVER, SIGNAL = 0.59; EXPRESSED IN PLACENTA, SIGNAL = 0.68; SWISSPROT HIT: O84767, EVALUE 1.30e+00; NT HIT: AL161573.2, EVALUE 1.50e+00; EST_HUMAN HIT: AW500861.1, EVALUE 3.00e-64
ggatgtccctctgactgcagaagaggtggaatttgtggtggaaaaagcattgagcatgttctccaagatgaatcttcaagaaataccacctttggtctatcagcttctggttctctcctccaaggtacaaatggaaaattgtttctccttagttctggtggta

SEQ ID NO: 30928 - DNA, 201 bp, Homo sapiens
  MAP TO AC004039.1; EXPRESSED IN BONE MARROW, SIGNAL = 0.57; EXPRESSED IN LUNG, SIGNAL = 0.59; EXPRESSED IN FETAL LIVER, SIGNAL = 0.8; EXPRESSED IN ADULT LIVER, SIGNAL = 0.73; EST_HUMAN HIT: AW953230.1, EVALUE 2.00e-96; SWISSPROT HIT: P79339, EVALUE 1.00e-30; NT HIT: M23442.1, EVALUE 1.00e-109
caagcccgccaggccccagaggttcctgtcgagccgtttcaggaatcggatcagctgcttgtgcctgtggaactgctgtgcagtcgcacccaggcagcgagtgtccttctcatggtggctgtagaactgccggagcacagtcgcagccctgcagaaggtttccttctcagttgtgttctggaaagacaaatgccacagata

SEQ ID NO: 30929 - DNA, 277 bp, Homo sapiens
  MAP TO AC004860.1; EXPRESSED IN ADULT LIVER, SIGNAL = 0.49; EXPRESSED IN LUNG, SIGNAL = 0.51; EST_HUMAN HIT: AW846897.1, EVALUE 3.90e+00; SWISSPROT HIT: P08748, EVALUE 9.10e-01; NT HIT: AJ235270.1, EVALUE 1.70e-01
atatatgactataaatattgtctttatttccacaattttaagtctatatcattatacttacagcattagactcaaaaattactatttagctttttattatgttccctgtaatcatcctcaaactcttatttatatgcatatgtacatctcatttagagttataaacttttcacatgtcaggcacttttggaatcattctatcaaatctattctttttagtgatgataaaacagacactgaaaaacaggatgacctactgaaagtcaaacagttctat

SEQ ID NO: 30930 - DNA, 290 bp, Homo sapiens
  MAP TO AC004147.1; EXPRESSED IN PLACENTA, SIGNAL = 0.71; EXPRESSED IN LUNG, SIGNAL = 0.52; EXPRESSED IN ADULT LIVER, SIGNAL = 0.58; EXPRESSED IN BONE MARROW, SIGNAL = 1.2; SWISSPROT HIT: Q16515, EVALUE 2.00e-51; NT HIT: gi11426293, EVALUE 0.00e+00; EST_HUMAN HIT: AW134599.1, EVALUE 1.00e-09
aatggcttccggttctccaggctcaccaccaatgacctgtaccatgctggggagctgctggccctgctggatgtcaacctgcagatcccggacccccatctggctgacccctccgtgctggaggccctgcggcagaaggccaacttcaagcactacaaacccaagcagttcagcatgctggagttcctgcaccgtgtgggccatgacctgaaggatatgatgctctactgcaagttcaaagggcaggagtgcggccaccaagacttcaccacagtgagtacttggttttc

SEQ ID NO: 30931 - DNA, 259 bp, Homo sapiens
  MAP TO AC004692.1; EXPRESSED IN PLACENTA, SIGNAL = 0.87; EXPRESSED IN LUNG, SIGNAL = 0.67; EXPRESSED IN BONE MARROW, SIGNAL = 0.69; EXPRESSED IN ADULT LIVER, SIGNAL = 0.56; SWISSPROT HIT: Q24814, EVALUE 6.20e-01; NT HIT: U41302.1, EVALUE 9.70e+00; EST_HUMAN HIT: AA398672.1, EVALUE 2.40e-01
cttcctggacaccaacaggcagtgggggtgggggcaggcagtgacctactccgcttgccactggctggtcactgtcttcgccggtggagagacagccgccatggcctggacagcagcctcctgccctccagattgcagtgactgtactgagttttcatattcagcaggtcccagggcagcccttgcgagtgaggcaaaggcatcagcctcgttggagagccagttaggcagttatcctgattccagaggccctgcctag

SEQ ID NO: 30932 - DNA, 125 bp, Homo sapiens
  MAP TO AC005868.1; EXPRESSED IN LUNG, SIGNAL = 0.53; EXPRESSED IN BONE MARROW, SIGNAL = 0.59; EXPRESSED IN ADULT LIVER, SIGNAL = 0.63; SWISSPROT HIT: Q23469, EVALUE 9.20e+00; NT HIT: AE002518.1, EVALUE 1.80e-02; EST_HUMAN HIT: D57939.1, EVALUE 2.60e-02
tctgggacctcaacacagacatctgggtgaaggccttgacagcagcgctggtgcaaaatgaattgtcacatcacacccaacgttctcaacctttagaatctgaaagtaagaaaaacacctcaaac

SEQ ID NO: 30933 - DNA, 246 bp, Homo sapiens
  MAP TO AC004051.1; EXPRESSED IN LUNG, SIGNAL = 0.47; EXPRESSED IN ADULT LIVER, SIGNAL = 0.68; EXPRESSED IN BONE MARROW, SIGNAL = 0.49; SWISSPROT HIT: P22219, EVALUE 2.50e-01; NT HIT: AF069772.1, EVALUE 9.20e+00
gtaccaaaatgtccactatgtggtgctgctgtacctgaattacacaaggagggtaaaacagtacactgtaccctgaattacacaaaagaaggtaaagaagtacactgtacccttaattacacaaaagagggtaaagaagcacaaagtaataataatttcacccacaaattcattatcatcattgttcaagcaattgttattgggaagacaaagaagaaaatatgtgatactgaaattattactata

SEQ ID NO: 30934 - DNA, 346 bp, Homo sapiens
  MAP TO AC005919.1; EXPRESSED IN LUNG, SIGNAL = 1.8; EXPRESSED IN PLACENTA, SIGNAL = 1.1; EXPRESSED IN BONE MARROW, SIGNAL = 0.68; EXPRESSED IN ADULT LIVER, SIGNAL =   1; SWISSPROT HIT: P19012, EVALUE 4.00e-12; NT HIT: gi7106336, EVALUE 1.00e-24; EST_HUMAN HIT: BE720120.1, EVALUE 7.00e-24
tgatcttctgctccaggtctgcgttggcctcctctagagcatgcacatggtccaggtaggatgccaggcggtcgttgagattctgcatggtcaccttttcattcccagagaggaggctgtgctcattgccaagaaaaccagcacaggcaccacttcccaaccctccaccgctattgcagaagcttcctccagaagagatgccctcaagagtacaagaaaagctgcttcttgctcccgatccaacacacacattcccagccacgaagcctgttcctccaccggacagcctaccagacccagttcgcgagcagatcctcctggatccaccagaaagtcgaaaagacat

SEQ ID NO: 30935 - DNA, 180 bp, Homo sapiens
  MAP TO AC004601.1; EXPRESSED IN LUNG, SIGNAL = 0.44; EXPRESSED IN ADULT LIVER, SIGNAL = 0.5; EST_HUMAN HIT: BF373321.1, EVALUE 8.00e-22; NT HIT: U10089.1, EVALUE 6.50e+00; SWISSPROT HIT: Q12053, EVALUE 4.50e-01
ctctctgctgatgtccaagtcatagtcttgaggctccaggtccaactcagtgacaggcatggcctgcactttcaaccagccattctcctccttgtcctttttttccccttgcacgacccgttccagcaactgcaggtcaaagtcctgctcacgcttccactggcaacagaacaagaggtt

SEQ ID NO: 30936 - DNA, 150 bp, Homo sapiens
  MAP TO AC002093.1; EXPRESSED IN ADULT LIVER, SIGNAL = 0.43; NT HIT: gi11426724, EVALUE 1.00e-59; EST_HUMAN HIT: AW239095.1, EVALUE 2.00e-40
  unsure 68
  unsure 87
  unsure 102
  unsure 108
tcaccgtccttctcgtagggctcattcaccaggacctccacgccttcgccaccacccgtttcattttntactggcctcagccacagnaatacagctgccccnacttgnatactaaaggacagagacagatgttattctcaacacggaccc

SEQ ID NO: 30937 - DNA, 226 bp, Homo sapiens
  MAP TO AC004613.1; EXPRESSED IN ADULT LIVER, SIGNAL = 0.41; NT HIT: gi11559924, EVALUE 5.40e-01; EST_HUMAN HIT: BE877442.1, EVALUE 8.00e-01; SWISSPROT HIT: Q64455, EVALUE 1.30e+00
ttacattcttgtggatcatttcctcaagctgcatgtcatgaaagtgctcatgatgttagaatgcaatccactctttcctaagtgcaggtgcgtggtggtctctgagattcagatgcccctatgtgcattggttgagttgtcccttgacacccatgtcagggatgcttgtaaaagcaacatgactgtctttagggaaaatgaatttttgaagtctcaacagaaagta

SEQ ID NO: 30938 - DNA, 525 bp, Homo sapiens
  MAP TO AC005562.1; EXPRESSED IN LUNG, SIGNAL = 0.42; EXPRESSED IN PLACENTA, SIGNAL = 1.1; EXPRESSED IN BONE MARROW, SIGNAL = 0.71; EXPRESSED IN ADULT LIVER, SIGNAL = 0.53; EST_HUMAN HIT: BE867657.1, EVALUE 0.00e+00; NT HIT: AF224669.1, EVALUE 0.00e+00; SWISSPROT HIT: P95816, EVALUE 2.30e-01
ggtaacaaatttaaaaacaaaatatttgaaaaaaaaattagaaactgcgcaaccacaggaaaaccgcctggcaaagattcaaagtgtaggcaaaaacctgcagagagtgaacagagtcctcatgggcccaaggagcatccaggaaaggcacttcaaaaaggtgggaaagcacagcactaggaaagaacaggatgcccaggcatttgtggacaatgctgccaaaggaaaaaggcttgagggtccagccccaagggagctggaacagcctcacatagtgcaggggcctgagaaggtagtgggaaacaccatctacaccaagccttcattcacccaagagcataaggcagcagtctcctctgtgctgaaacccttctccatgggcgtgccttctgcctctagccctgcaaaagccctacctcaggtcagagacagatcgaaagacttagcctacaccattttaattttagaaatggcaatggctagagtgaaaaacatgaaggctgctaaaccaatcacacattccag

SEQ ID NO: 30939 - DNA, 145 bp, Homo sapiens
  MAP TO AC004027.1; EXPRESSED IN LUNG, SIGNAL = 0.52; EXPRESSED IN BONE MARROW, SIGNAL = 0.61; EXPRESSED IN ADULT LIVER, SIGNAL = 0.47; NT HIT: gi9626133, EVALUE 3.30e-01; SWISSPROT HIT: P55558, EVALUE 5.30e+00; EST_HUMAN HIT: AA090732.1, EVALUE 1.00e-13
agtcctggcccacgaggaaaagtctacaggtacaggcaacagtcaggcagccctggtgctcatgaaggatcttggagaaggggacttcttttccttctcatccaccactgaaaacagctggagcttttcccatgagatctcggca

SEQ ID NO: 30940 - DNA, 157 bp, Homo sapiens
  MAP TO AC006478.2; EXPRESSED IN LUNG, SIGNAL = 0.61; EXPRESSED IN FETAL LIVER, SIGNAL = 0.67; EXPRESSED IN ADULT LIVER, SIGNAL = 0.51; NT HIT: gi11096333, EVALUE 1.40e+00; SWISSPROT HIT: P51170, EVALUE 2.30e+00
gttatcgagtgctcgctgtgttccgagtgctgcttcctcccaattagctgcgctgaagacgaggattgtaggaaatgagggagcatctggcaccggagatgctgactcccaggcccacctccaggccatgctggcaggtgagcagctccatttgaga

SEQ ID NO: 30941 - DNA, 84 bp, Homo sapiens
  MAP TO AC004686.1; EXPRESSED IN LUNG, SIGNAL = 0.5; EXPRESSED IN BONE MARROW, SIGNAL = 0.66; EXPRESSED IN ADULT LIVER, SIGNAL = 0.61; EXPRESSED IN PLACENTA, SIGNAL = 0.66; EST_HUMAN HIT: W78905.1, EVALUE 4.00e-40; NT HIT: gi4506736, EVALUE 3.00e-40; SWISSPROT HIT: P21425, EVALUE 2.00e-09
ctttcactgagagttgagtcatctgggctgtcgacaggtgtctgacgtgtaaacttggaatcaaactgacttacatcctcttca

SEQ ID NO: 30942 - DNA, 120 bp, Homo sapiens
  MAP TO AC006500.4; EXPRESSED IN LUNG, SIGNAL = 0.45; EXPRESSED IN BONE MARROW, SIGNAL = 0.64; EXPRESSED IN ADULT LIVER, SIGNAL = 0.49; SWISSPROT HIT: Q02435, EVALUE 9.30e+00; NT HIT: Z28383.1, EVALUE 1.70e-02; EST_HUMAN HIT: AV728420.1, EVALUE 6.10e+00
ctggatccctctggaccaaatttcctaactggacttggttgatgacctcctcctccctgctgttcagaatgagccctgaggcttctatggcctgtcctgctccgccatagcttcctgtca

SEQ ID NO: 30943 - DNA, 134 bp, Homo sapiens
  MAP TO AC004457.1; EXPRESSED IN ADULT LIVER, SIGNAL = 0.55; EXPRESSED IN PLACENTA, SIGNAL = 0.7; EXPRESSED IN LUNG, SIGNAL = 0.77; EXPRESSED IN FETAL LIVER, SIGNAL = 0.67; EXPRESSED IN BONE MARROW, SIGNAL = 0.6; EST_HUMAN HIT: AA146878.1, EVALUE 7.00e+00; SWISSPROT HIT: P41779, EVALUE 5.30e+00
catcacgttgacataatactatgataatagatgccatcagagggtgacattctagttctgggtcctgtgcttcattaagagacttcacctggaaagtttttcctactaagacatgttctaagatataataatta

SEQ ID NO: 30944 - DNA, 147 bp, Homo sapiens
  MAP TO AC004960.1; EXPRESSED IN LUNG, SIGNAL = 0.53; EXPRESSED IN BONE MARROW, SIGNAL = 0.73; EXPRESSED IN ADULT LIVER, SIGNAL = 0.56; EST_HUMAN HIT: AA037738.1, EVALUE 3.00e-42; NT HIT: M29145.1, EVALUE 2.00e-42; SWISSPROT HIT: P14210, EVALUE 2.00e-22
ctttattcctagtacatctattagcacattggtctgcagtattcacttttttggtttttatcttcagtgctggatctattttgattagggtagtctttgctgattttttgaattcatgaattgtatttcttcttttcctttgtccct

SEQ ID NO: 30945 - DNA, 190 bp, Homo sapiens
  MAP TO AC004057.1; EXPRESSED IN BONE MARROW, SIGNAL = 0.53; EXPRESSED IN LUNG, SIGNAL = 0.8; EXPRESSED IN ADULT LIVER, SIGNAL = 0.41; EST_HUMAN HIT: T06245.1, EVALUE 2.00e-90; NT HIT: gi10947051, EVALUE 1.00e-103; SWISSPROT HIT: Q01484, EVALUE 3.00e-31
acatgtggatattggctcccttatccagaagcaaggtaaccatatctgtgtgcccctcctgcgaggccagatggagtggagttactccttgctttgtcacaatgtttgtctctgctccatagttcaggagtgtggaagctatctgcatttgattcttcttggcagcaatatgtaacggagtatagccatt

SEQ ID NO: 30946 - DNA, 220 bp, Homo sapiens
  MAP TO AC004583.1; EXPRESSED IN ADULT LIVER, SIGNAL = 0.67; EXPRESSED IN PLACENTA, SIGNAL = 0.8; EXPRESSED IN LUNG, SIGNAL = 0.76; EXPRESSED IN BONE MARROW, SIGNAL = 0.73; SWISSPROT HIT: Q00121, EVALUE 3.10e-01; NT HIT: gi5729867, EVALUE 1.00e-116; EST_HUMAN HIT: BE074020.1, EVALUE 9.00e-47
atgtgaatgaactgaaggagtgtctttctgtgctggttaaagagcagcaggccctggccgtccagtcagccaccaccaccctctcagccctgcgactcaagcagaggctggtgatcttggagcgctatttcattgccttgaatagaaccgtttttcaggagaatgtcaaagttaagtggaaaagcagcggtatttctctgcctcctgtggacaaaaaaag

SEQ ID NO: 30947 - DNA, 144 bp, Homo sapiens
  MAP TO AC002452.1; EXPRESSED IN BONE MARROW, SIGNAL = 0.51; EXPRESSED IN PLACENTA, SIGNAL = 0.59; EXPRESSED IN LUNG, SIGNAL = 0.68; EXPRESSED IN ADULT LIVER, SIGNAL = 0.71; SWISSPROT HIT: O14576, EVALUE 6.00e-25; NT HIT: AF123074.1, EVALUE 3.00e-75; EST_HUMAN HIT: H05552.1, EVALUE 5.00e-75
ctcggtgtcattgttgaggttccagaggtccaagcgccccatcccgtccacgcaggcaaaaagcgcaggatgcacgggggaccacatgacatcgtacacatagtctgcattgtcttcaaaggagtagagcggcttgttgtgctg

SEQ ID NO: 30948 - DNA, 253 bp, Homo sapiens
  MAP TO AC004893.1; EXPRESSED IN PLACENTA, SIGNAL = 0.61; EXPRESSED IN LUNG, SIGNAL = 0.75; EXPRESSED IN BONE MARROW, SIGNAL = 0.54; EXPRESSED IN ADULT LIVER, SIGNAL = 0.44; NT HIT: gi11420658, EVALUE 1.00e-129; SWISSPROT HIT: P08798, EVALUE 5.90e-01; EST_HUMAN HIT: BE888934.1, EVALUE 1.00e-129
gggactgccagcccagcgcgctgaactgctttgtggaagccatgtcccagtgcgtgccgccaatccccatccgaccctgcgtcctgaagtacctggggaagacacacaacctctggttccggtccacgctgatgttggagcaccaggcttttgaaaagggtctgagtcttcagattaagccgaagcaaacaacggagttttatgagcaggagagcatcaccccgccgcagcaggtgagggtgcgcctcagttt

SEQ ID NO: 30949 - DNA, 588 bp, Homo sapiens
  MAP TO AC005600.1; EXPRESSED IN PLACENTA, SIGNAL = 0.64; EXPRESSED IN BONE MARROW, SIGNAL = 0.64; EXPRESSED IN ADULT LIVER, SIGNAL = 0.47; EXPRESSED IN LUNG, SIGNAL = 0.47; NT HIT: L48546.1, EVALUE 0.00e+00; SWISSPROT HIT: P49815, EVALUE 3.00e-43; EST_HUMAN HIT: BE892745.1, EVALUE 4.00e-88
tggcgtgaccaccaagtctccccagacatggagggccttgtggacaccagcgtggccaagatcgtgtctgaccgcaacctgcccttcgtggcccgccagatggccctgcacgcaaatgtgagtgggggtgggtccaggcgtgagctggtgggacaggcccaggtgccacctgatagtgagctcaccccctgcctacgtccccagatggcctcacaggtgcatcatagccgctccaaccccaccgatatctacccctccaagtggattgcccggctccgccacatcaagcggctccgccagcgggtagggaatatggggctccctcagcggggtgtgctggctgcccaagctgtggggcgggtgtgtgggcagagcggttgccacgcctcccagacttactgcccaagccgcctctgccttcagatctgcgaggaagccgcctactccaaccccagcctacctctggtgcaccctccgtcccatagcaaagcccctgcacagactccagccgagcccacacctggctatgaggtgggccagcggaagcgcctcatctcctcggtggaggacttcaccgagtttgtgtga

SEQ ID NO: 30950 - DNA, 280 bp, Homo sapiens
  MAP TO AC005510.3; EXPRESSED IN LUNG, SIGNAL = 0.78; EXPRESSED IN ADULT LIVER, SIGNAL = 0.89; EXPRESSED IN PLACENTA, SIGNAL = 0.73; EXPRESSED IN FETAL LIVER, SIGNAL = 0.89; EXPRESSED IN BONE MARROW, SIGNAL = 0.83; EST_HUMAN HIT: BF665340.1, EVALUE 6.50e-02; NT HIT: L14283.1, EVALUE 1.70e-01
atccaaggagactggtatggttgaagaagaatgaccaatcagtgggaaaaatgctaggaaatgaagtcaggatagagccttgagccagatcatggggggcttcataggctactgcacagaatgctgtgagaattacttgaattgattcacataaactgtttaggaatgtgcctgcgatatagttctccatgaaattgctatcatcatcatcatcatcatcatcatcatcatcatcatcatctctctttgtatgagggtggctctgtgtatatctcaccac

SEQ ID NO: 30951 - DNA, 79 bp, Homo sapiens
  MAP TO AC004864.1; EXPRESSED IN ADULT LIVER, SIGNAL = 0.64; EXPRESSED IN PLACENTA, SIGNAL = 0.6; EXPRESSED IN LUNG, SIGNAL = 0.68; EXPRESSED IN BONE MARROW, SIGNAL = 0.55; EST_HUMAN HIT: AW270107.1, EVALUE 4.00e-37; NT HIT: gi11990617, EVALUE 2.00e-37
ctatcttcttttggagcattttaaggcacttagtaaagtcagtgtggtcttgatcaggagttgaaatgagctcacatcc

SEQ ID NO: 30952 - DNA, 204 bp, Homo sapiens
  MAP TO AC004870.2; EXPRESSED IN ADULT LIVER, SIGNAL = 0.53; EXPRESSED IN LUNG, SIGNAL = 0.64; EXPRESSED IN PLACENTA, SIGNAL = 0.67; EXPRESSED IN BONE MARROW, SIGNAL = 0.59; SWISSPROT HIT: P35816, EVALUE 1.70e+00
ctggaacagcacaacaaacaaaacaccccaacaacagcaaaaccttggaacctgctcgaggcagggacagcaggtgcccttgttaagagcctggctctggagcagaagctgcagcttttgctccactccaccgtaacctgttttgtgaccttgctcacaccattggacctctctgcacctgttttcacaggcatgaaacagcgg

SEQ ID NO: 30953 - DNA, 148 bp, Homo sapiens; identical to SEQ ID NO: 28225
  MAP TO AC005702.1; EXPRESSED IN LUNG, SIGNAL = 0.64; EXPRESSED IN PLACENTA, SIGNAL = 0.74; EXPRESSED IN BONE MARROW, SIGNAL = 0.59; EXPRESSED IN ADULT LIVER, SIGNAL = 0.74; EST_HUMAN HIT: BE514195.1, EVALUE 5.00e-78; NT HIT: gi4506736, EVALUE 4.00e-78; SWISSPROT HIT: P21425, EVALUE 4.00e-22

SEQ ID NO: 30954 - DNA, 132 bp, Homo sapiens
  MAP TO AC006145.2; EXPRESSED IN PLACENTA, SIGNAL = 0.66; EXPRESSED IN ADULT LIVER, SIGNAL = 0.41; SWISSPROT HIT: P28660, EVALUE 1.10e+00; EST_HUMAN HIT: AW247706.1, EVALUE 1.10e-01; NT HIT: AF030422.1, EVALUE 7.40e-02
gggaagtcttgctgtctgacttgaaggcaggctcctgggtgggcaaattatgattagcatagccacagagctgctcagagaaagacacagacaaatggccagtcaggcgcattctgcatgaggttacggaat

SEQ ID NO: 30955 - DNA, 311 bp, Homo sapiens
  MAP TO AC005959.1; EXPRESSED IN PLACENTA, SIGNAL = 0.85; EXPRESSED IN LUNG, SIGNAL = 0.71; EXPRESSED IN ADULT LIVER, SIGNAL = 0.61; EXPRESSED IN BONE MARROW, SIGNAL = 8.7; EST_HUMAN HIT: AI221385.1, EVALUE 1.00e-109; SWISSPROT HIT: P23648, EVALUE 2.30e-01; NT HIT: X05630.1, EVALUE 7.60e-01
agcatttggacatgagctgggtcctctaacactgagagaaggtcatatctggtaagtttattcgtcagctcaaactctggaaggagggccaccaaattattcccttttattttgacttctggtatagcatagttcctgagaaacttctcgacgtgttccaagagagaaaaaatacctccccaagctaagctaaaatgttccttgaatgctaagaagtctggggctgtattgtctatgacaccatcataaattaaaaagtcataatcccacagtgatttcagggctctcaaaggtgttttgactttcatggc

SEQ ID NO: 30956 - DNA, 75 bp, Homo sapiens
  MAP TO AC003081.1; EXPRESSED IN LUNG, SIGNAL = 0.42; EXPRESSED IN ADULT LIVER, SIGNAL = 0.47; EST_HUMAN HIT: AI057456.1, EVALUE 2.20e-01; NT HIT: AJ132405.1, EVALUE 3.70e-02
cagtatgaatctaataagacaaatctcaacatggtggatgaagaaactgaggatcagaatgaatgcaagaaataa

SEQ ID NO: 30957 - DNA, 196 bp, Homo sapiens
  MAP TO AC005589.1; EXPRESSED IN PLACENTA, SIGNAL = 0.68; EXPRESSED IN LUNG, SIGNAL = 0.8; EXPRESSED IN FETAL LIVER, SIGNAL = 0.83; EXPRESSED IN BONE MARROW, SIGNAL = 0.78; EXPRESSED IN ADULT LIVER, SIGNAL = 0.79; EST_HUMAN HIT: AA077156.1, EVALUE 3.00e-55; SWISSPROT HIT: Q9Y6C7, EVALUE 1.70e+00; NT HIT: AF044736.1, EVALUE 1.20e-01
atttctccacctggtgcatagtgggtttggggagcgtctccactccaccctcatccgtctctagtattttccccccccttctttggaatccaggttttcgttccaggaagtgcattaacttgcgggataatttgctgatcacactggtacagaaaccattgagaggctttagactcctactcatagggatcaagac

SEQ ID NO: 30958 - DNA, 95 bp, Homo sapiens
  MAP TO AC003959.1; EXPRESSED IN PLACENTA, SIGNAL = 0.64; EXPRESSED IN LUNG, SIGNAL = 0.77; EXPRESSED IN FETAL LIVER, SIGNAL = 0.72; EXPRESSED IN ADULT LIVER, SIGNAL = 0.55; EXPRESSED IN BONE MARROW, SIGNAL = 0.65; EST_HUMAN HIT: BF196247.1, EVALUE 1.00e-46; NT HIT: AB002328.1, EVALUE 7.90e-01; SWISSPROT HIT: Q24278, EVALUE 1.40e+00
cactccccgccgcaagtcctgaggatggccagcagagaaacaagaaaatggactccctggctgctggagagttgaatgccagccaccagccatgg

SEQ ID NO: 30959 - DNA, 149 bp, Homo sapiens
  MAP TO AC006011.2; EXPRESSED IN LUNG, SIGNAL = 0.96; EXPRESSED IN FETAL LIVER, SIGNAL = 1.4; EXPRESSED IN BONE MARROW, SIGNAL = 0.87; EXPRESSED IN PLACENTA, SIGNAL = 0.98; EXPRESSED IN ADULT LIVER, SIGNAL = 1.1; NT HIT: gi11430822, EVALUE 9.00e-79; SWISSPROT HIT: P42841, EVALUE 6.00e-07; EST_HUMAN HIT: BF593180.1, EVALUE 1.00e-78
gcctctctaatcgcctccttatgtgcctggaacatcttgacgttgttcatgttcgactgccaatatttcacatatcctccgtggtctgctgtcaacatccacatgtcattatgtgaccacgtcatggccctcactgggctgtcgtgagc

SEQ ID NO: 30960 - DNA, 191 bp, Homo sapiens
  MAP TO AC003046.1; EXPRESSED IN PLACENTA, SIGNAL = 0.59; EXPRESSED IN LUNG, SIGNAL = 0.48; EXPRESSED IN ADULT LIVER, SIGNAL = 0.48; EST_HUMAN HIT: BE966241.2, EVALUE 6.70e-01; SWISSPROT HIT: O14174, EVALUE 3.80e+00; NT HIT: AB003573.1, EVALUE 1.80e+00
aaaatgttgtttcacaattccctggccgaccttccaggcaaatttgctgcaaaaacagtttttgtggggtttgtagcaaaattatatgataagaaggacacgaaccgaattccttttttaaaggactatgctggtttttgtagcccctggctgtgtagtgacaacaaatgcatgctaaggggcagtccctg

SEQ ID NO: 30961 - DNA, 113 bp, Homo sapiens
  MAP TO AC005886.1; EXPRESSED IN LUNG, SIGNAL = 0.71; EXPRESSED IN BONE MARROW, SIGNAL = 0.56; EXPRESSED IN ADULT LIVER, SIGNAL = 0.51; SWISSPROT HIT: P50851, EVALUE 2.40e+00; EST_HUMAN HIT: BE007870.1, EVALUE 1.40e+00
ctggcacaaagtaagtttgtgctcggtaaactgagtccatcactcttctaaacccatcctgaccggtgttcactgctgttccagtttccattgaaaacagcatgggggcaaaa

SEQ ID NO: 30962 - DNA, 114 bp, Homo sapiens
  MAP TO AC006484.2; EXPRESSED IN PLACENTA, SIGNAL = 0.93; EXPRESSED IN FETAL LIVER, SIGNAL = 0.71; EXPRESSED IN BONE MARROW, SIGNAL = 0.95; EXPRESSED IN ADULT LIVER, SIGNAL = 0.71; EXPRESSED IN LUNG, SIGNAL = 0.83; NT HIT: AF298209.1, EVALUE 3.90e+00
ttactgtcctgattctctaacccacattttggcgaggtgcttcgcaaatactatgatccttaaaatttctttgaaggttgttttgccattaacttctgtgaattttatgtttcc

SEQ ID NO: 30963 - DNA, 98 bp, Homo sapiens
  MAP TO AC006321.1; EXPRESSED IN PLACENTA, SIGNAL = 0.59; EXPRESSED IN LUNG, SIGNAL = 0.5; EXPRESSED IN BONE MARROW, SIGNAL = 0.57; EXPRESSED IN ADULT LIVER, SIGNAL = 0.59; SWISSPROT HIT: Q10441, EVALUE 9.50e+00; NT HIT: X95283.1, EVALUE 8.20e-01
atttatggcatcgatggtgggcagctcctgtgttctgcacagagggatccccaggttgaaggatgacgtggaagcaatgacgtcgtggtcagggacgt

SEQ ID NO: 30964 - DNA, 261 bp, Homo sapiens
  MAP TO AC003957.1; EXPRESSED IN LUNG, SIGNAL = 0.53; EXPRESSED IN ADULT LIVER, SIGNAL = 0.52; SWISSPROT HIT: P34022, EVALUE 2.00e-17; EST_HUMAN HIT: AJ230823.1, EVALUE 0.00e+00; NT HIT: D38076.1, EVALUE 2.00e-81
atcctccttggtttcctcctccaccaaaagagcttctagcttttccgccactttttttggcatgatcgtttttgcccgatcctttcttttctctccgatctctttcttgcattcttcaaactttgttttgaatttctgtgcattctcaatattcaggaagtggatggccagcagctctggcttggggcactcgttggcgaagtcggcgtgggtgttccagacccaggcatggtcactacccatgttgggcttcagctccat

SEQ ID NO: 30965 - DNA, 300 bp, Homo sapiens
  MAP TO AC002086.1; EXPRESSED IN PLACENTA, SIGNAL = 0.59; EXPRESSED IN ADULT LIVER, SIGNAL = 0.51; EXPRESSED IN LUNG, SIGNAL = 0.7; NT HIT: U37008.1, EVALUE 7.30e-01; EST_HUMAN HIT: AW611964.1, EVALUE 0.00e+00; SWISSPROT HIT: P28933, EVALUE 4.20e+00
ctgccacggattcacctccctctcctcgtcccgtaggagcgtgagtagttgccgcaataggcgcaagagcaggcagaagcgaaagtgatggtccacggcgcagtcagccgctcttgagaatgcgaccacaactgggagcggcagggctggtttcgggagccttggctgagcccattccattccccagtcagagaacaagagttccagtgagagttgcgccccagcggggaacgggcggctttgctgggcttggggctcttggacaaactgcaacacattcccccgcccggagcccgaggc

SEQ ID NO: 30966 - DNA, 86 bp, Homo sapiens
  MAP TO AC002091.1; EXPRESSED IN PLACENTA, SIGNAL = 0.82; EXPRESSED IN ADULT LIVER, SIGNAL = 0.48; EXPRESSED IN LUNG, SIGNAL = 0.8; EXPRESSED IN BONE MARROW, SIGNAL = 0.71; NT HIT: X95632.1, EVALUE 2.80e+00; EST_HUMAN HIT: BE797716.1, EVALUE 1.00e+00
cctttgggtgtaggaggaggaggatgtggttgtctcgggcagcagaatagagaacaaggtggttgcttttctgcacagaggtggtt

SEQ ID NO: 30967 - DNA, 147 bp, Homo sapiens
  MAP TO AC005045.2; EXPRESSED IN LUNG, SIGNAL = 0.5; EXPRESSED IN ADULT LIVER, SIGNAL = 0.48; EST_HUMAN HIT: BF211517.1, EVALUE 5.00e-75; NT HIT: gi11419222, EVALUE 3.00e-63; SWISSPROT HIT: P11466, EVALUE 3.00e-16
aaaccatttgcaaatcaagaagaatataagaaaactgaagaaatagttcaaaaatttcaaagtgggattggagaaaaattgcaccagaaattgcttgaaagagcaaaaggaaaaagaaattgggtatttgttgttataattgaataa

SEQ ID NO: 30968 - DNA, 224 bp, Homo sapiens
  MAP TO AC004104.1; EXPRESSED IN BONE MARROW, SIGNAL =  52; EXPRESSED IN ADULT LIVER, SIGNAL = 0.67; EXPRESSED IN LUNG, SIGNAL = 0.54; SWISSPROT HIT: P22544, EVALUE 4.40e-01; EST_HUMAN HIT: AA189080.1, EVALUE 5.00e-33
aattttcttggggattcttttccttcttctgcagttttcttttctcttgcctttttttttcactatgcattcctgctccagttccaacttctcattagttaattcctcaggaaccacctctaggagctcctcagtgtcatcttcatccacacccgggttaaagttgtttgccgtctcaaccagagctttgtcgatttttgcaacctccccattcttggcaaatc

SEQ ID NO: 30969 - DNA, 252 bp, Homo sapiens
  MAP TO AC004125.1; EXPRESSED IN LUNG, SIGNAL = 0.54; EXPRESSED IN ADULT LIVER, SIGNAL = 0.57; EXPRESSED IN BONE MARROW, SIGNAL = 0.81; SWISSPROT HIT: P23964, EVALUE 2.00e-03; EST_HUMAN HIT: AA572953.1, EVALUE 2.00e-07; NT HIT: U80017.1, EVALUE 4.00e-05
aaggggtgaaatacgtgaaagagtctgttttcatcatgtaatgagaattgttgagataaaagcttttggcctgtagtagtagcgccataatgctatcaaggactctggcttctttcagtatatctctgttgccaaggctggagtgcaatgatatgggattatagctgactgcagcctccatgtccagggctccagtgatcttcccaccttggcctcccaagtaatcaggattacagacatactccagcatac

SEQ ID NO: 30970 - DNA, 123 bp, Homo sapiens
  MAP TO AC006451.1; EXPRESSED IN PLACENTA, SIGNAL = 0.99; EXPRESSED IN LUNG, SIGNAL = 0.48; EXPRESSED IN BONE MARROW, SIGNAL = 0.6; EXPRESSED IN ADULT LIVER, SIGNAL = 0.53; SWISSPROT HIT: Q05209, EVALUE 1.00e-12; EST_HUMAN HIT: AU132040.1, EVALUE 5.00e-50; NT HIT: gi11419317, EVALUE 3.00e-50
cactccatcagcaattttctgagctccatgaatttcatatagttgtagctgtttttcaaacagttgggcaatagctctatgaacaagttcatattgctcctatgaaggagaaaaatgattaaa

SEQ ID NO: 30971 - DNA, 205 bp, Homo sapiens
  MAP TO AC005703.1; EXPRESSED IN LUNG, SIGNAL = 0.46; EXPRESSED IN PLACENTA, SIGNAL = 0.65; EXPRESSED IN BONE MARROW, SIGNAL = 0.51; EXPRESSED IN ADULT LIVER, SIGNAL = 0.51; EST_HUMAN HIT: AI613480.1, EVALUE 1.00e-79; SWISSPROT HIT: P87035, EVALUE 3.30e-01
ctgggccaaatttacagatgacaatattctccgctcccagagtgaacgggcagcttccgctaagctaagagacgacattgaaaacctcttggttgtgactgccaatgagatgtggaatcaattcaacaaagtgaacttgtctttcaccaatcgcattgctgagactgcagatgctaagaataagattcagacgcacttagcaaag

SEQ ID NO: 30972 - DNA, 178 bp, Homo sapiens
  MAP TO AC002092.1; EXPRESSED IN LUNG, SIGNAL = 0.49; EXPRESSED IN ADULT LIVER, SIGNAL = 0.5; EXPRESSED IN PLACENTA, SIGNAL = 0.58; EXPRESSED IN BONE MARROW, SIGNAL = 0.5; NT HIT: AJ277557.1, EVALUE 5.00e-96; EST_HUMAN HIT: T95938.1, EVALUE 1.00e-51; SWISSPROT HIT: Q90512, EVALUE 7.70e-01
atgtcactttcttctcaccacctgcccttgcctgtttgcgtccagtatgcctgggtggagaagtactttggccctgactttctggagcagattgtgctgaccagagacaagaccgtggtctctgctgaccttctcatagacgaccggccggacatcacaggcaagtggcctgcgacag

SEQ ID NO: 30973 - DNA, 127 bp, Homo sapiens
  MAP TO AC004226.1; EXPRESSED IN BONE MARROW, SIGNAL = 0.61; EXPRESSED IN LUNG, SIGNAL = 0.44; EXPRESSED IN ADULT LIVER, SIGNAL = 0.43; EST_HUMAN HIT: AA631233.1, EVALUE 1.00e-10; NT HIT: AL163202.2, EVALUE 1.00e-03
ccagtgacagatgagagacatacactgacacagatattctgcctgtcggtctggctaaggggctctgccctaagtctggagcatcgcctcaataagccggtgaagtttgcattatttagtacagatt

SEQ ID NO: 30974 - DNA, 178 bp, Homo sapiens
  MAP TO AC005562.1; EXPRESSED IN PLACENTA, SIGNAL = 0.65; EXPRESSED IN LUNG, SIGNAL = 0.64; EXPRESSED IN ADULT LIVER, SIGNAL = 0.68; EXPRESSED IN BONE MARROW, SIGNAL = 0.58; SWISSPROT HIT: P35052, EVALUE 8.80e+00; NT HIT: U02298.1, EVALUE 4.10e-01
ttacgtatgtataatttttcttcctccccctccccaaaccgctccaacatctctcctggctgcaaacccgcctcccccagaaacagccacggagccgcctgccaccgggccattagcacgcagggaagggggtgtggagggagggggcaggcagcagggaaggggaaagggggagcca

SEQ ID NO: 30975 - DNA, 196 bp, Homo sapiens
  MAP TO AC002081.1; EXPRESSED IN LUNG, SIGNAL = 0.55; EXPRESSED IN BONE MARROW, SIGNAL = 0.52; EXPRESSED IN ADULT LIVER, SIGNAL = 0.49; SWISSPROT HIT: Q00019, EVALUE 9.90e-01; NT HIT: AF115340.1, EVALUE 4.60e-01
ttgttacagccgtctggcctgctgtcagaagggcccaccacagtgtccatgaatgttgcgatgttagaaaatcctgccggcaattcatcccattcatcaaatttgatgccactgcccaaggaataggtgccttcaccacacttactgcatacctggttcttcatttctagatactctccagaagcacaggagaaag

SEQ ID NO: 30976 - DNA, 212 bp, Homo sapiens
  MAP TO AC004833.1; EXPRESSED IN LUNG, SIGNAL = 0.41; EXPRESSED IN ADULT LIVER, SIGNAL = 0.55; EST_HUMAN HIT: AW173292.1, EVALUE 7.50e-01; SWISSPROT HIT: P17814, EVALUE 4.50e+00; NT HIT: AF042848.1, EVALUE 5.00e-01
aggcccatgccaaaaatacacctggtattcatgctgagatgactaaaataattataacttttggtcatataatgcactcgtttttgaaacttgctgaaatgtactttttgacgctgcaattaaaagcccatctcacttttcctgaggtgcctgttgccatggtgcctgggcattctgaagaggaacttactgaggatgacacttcacagatg

SEQ ID NO: 30977 - DNA, 102 bp, Homo sapiens
  MAP TO AC003677.1; EXPRESSED IN LUNG, SIGNAL = 0.56; EXPRESSED IN ADULT LIVER, SIGNAL = 0.42; EXPRESSED IN BONE MARROW, SIGNAL = 0.49; NT HIT: U77617.1, EVALUE 3.40e+00; SWISSPROT HIT: Q05531, EVALUE 7.20e+00; EST_HUMAN HIT: BF129399.1, EVALUE 5.00e+00
atgggctcctttctccccaggctcccacctcctgtgccaagccaggccataagtggggctacttctatgggtctgttgcaagaaggcaaccagcaggccaag

SEQ ID NO: 30978 - DNA, 195 bp, Homo sapiens
  MAP TO AC005078.1; EXPRESSED IN BONE MARROW, SIGNAL = 0.76; EXPRESSED IN ADULT LIVER, SIGNAL = 0.76; EXPRESSED IN LUNG, SIGNAL = 0.7; EXPRESSED IN FETAL LIVER, SIGNAL = 0.77; EXPRESSED IN PLACENTA, SIGNAL = 0.79; EST_HUMAN HIT: BF369731.1, EVALUE 8.00e-10; NT HIT: gi6753651, EVALUE 5.00e-07; SWISSPROT HIT: P39057, EVALUE 1.00e-15
ggtatagatagtcacatgctgcttcaacagcccctcatttattgccactttgctgatagagggaaggacccacattacatgccagtgaaggactgggaagtgctgaagacgattcttacagaaacgttagacaactacaatgaactaaatgctgccatgcacctagttttgtttgaagatgccatgcaacatgtg

SEQ ID NO: 30979 - DNA, 109 bp, Homo sapiens
  MAP TO AC005181.1; EXPRESSED IN LUNG, SIGNAL = 0.44; EXPRESSED IN BONE MARROW, SIGNAL = 0.54; EXPRESSED IN ADULT LIVER, SIGNAL = 0.47; NT HIT: AF163863.1, EVALUE 2.40e-01; SWISSPROT HIT: Q90115, EVALUE 5.50e+00
gctcctagaggctgcaggtattttcctcactgcgatgttttggctgcagttggtagcgatgaaggaagaaaggagggttttgttgttgttctgtttggttttcttttgt

SEQ ID NO: 30980 - DNA, 95 bp, Homo sapiens
  MAP TO AC003658.1; EXPRESSED IN LUNG, SIGNAL = 0.62; EXPRESSED IN ADULT LIVER, SIGNAL = 0.62; EST_HUMAN HIT: BE145171.1, EVALUE 5.00e-06; SWISSPROT HIT: Q58586, EVALUE 2.50e+00; NT HIT: AL163302.2, EVALUE 2.00e-04
agcaaacctattaggtgggctccattattatcctcatttttcagctgagaaaactgaagcacagagtcattaagtattgtgtccaaactgtacag

SEQ ID NO: 30981 - DNA, 201 bp, Homo sapiens
  MAP TO AC005224.1; EXPRESSED IN BONE MARROW, SIGNAL = 0.63; EXPRESSED IN LUNG, SIGNAL = 0.76; EXPRESSED IN FETAL LIVER, SIGNAL = 0.71; EXPRESSED IN ADULT LIVER, SIGNAL = 0.67; EXPRESSED IN PLACENTA, SIGNAL = 0.67; NT HIT: AB035887.1, EVALUE 4.70e-01; SWISSPROT HIT: P48529, EVALUE 1.30e+00; EST_HUMAN HIT: BE961353.1, EVALUE 1.80e-01
ctgtctgctagtgcctctctccgcacctgagcttctgggacttacgatccatccatctgccacatctggaggctgatcaaccacaaacaactcacagccctcactgatgtgcttttgcacttcccatcccccaaacccacatccccaaaagacaccatctgggtaaaatgaggtggcttccatcaaagtcctcaaaaccaa

SEQ ID NO: 30982 - DNA, 272 bp, Homo sapiens
  MAP TO AC005612.1; EXPRESSED IN BONE MARROW, SIGNAL = 0.57; EXPRESSED IN PLACENTA, SIGNAL = 0.59; EXPRESSED IN LUNG, SIGNAL = 0.72; EXPRESSED IN ADULT LIVER, SIGNAL = 0.59; SWISSPROT HIT: P20591, EVALUE 3.00e-35; NT HIT: AF135187.1, EVALUE 2.00e-59; EST_HUMAN HIT: H61837.1, EVALUE 3.00e-59
tccaaaattgaagacattagagcagaacaagagagagaaggtgagaagctgatccgcctccacttccagatggaacagattgtctactgccaggaccaggtatacaggggtgcattgcagaaggtcagagagaaggagctggaagaagaaaagaagaagaaatcctgggattttggggctttccaatccagctcggcaacagactcttccatggaggagatctttcagcacctgatggcctatcaccaggtacgtcttcgcgtggttcagga

SEQ ID NO: 30983 - DNA, 372 bp, Homo sapiens
  MAP TO AC004013.1; EXPRESSED IN ADULT LIVER, SIGNAL = 0.47; EXPRESSED IN LUNG, SIGNAL = 0.51; EXPRESSED IN PLACENTA, SIGNAL = 0.64; EST_HUMAN HIT: AW513069.1, EVALUE 0.00e+00; NT HIT: AJ010770.1, EVALUE 0.00e+00; SWISSPROT HIT: P50468, EVALUE 7.00e-04
gacctactgaaagagctgcagaaacagctagaggaaaaacacagtcgcatagtagaattgttaaatgagactgaaaaatataaactggattctttgcaaacacgacagcaaatggaaaaagataggcaggttcacaggaaaacactgcagacagaacaggaggccaacactgagggacagaaaaaaatgcatgagctccagtccaaagtggaagatcttcagcgccagctggaagagaaaagacaacaagtttataagttagaccttgaaggacagcgactacaaggaatcatgcaggaattccagaagcaagaactagaacgagaagaaaaacgagaaagtagaagaattctgtatcagaaccttaatgag

SEQ ID NO: 30984 - DNA, 110 bp, Homo sapiens
  MAP TO AC006425.9; EXPRESSED IN BONE MARROW, SIGNAL = 0.66; EXPRESSED IN ADULT LIVER, SIGNAL = 0.56; NT HIT: AF199420.1, EVALUE 1.00e-55; EST_HUMAN HIT: W04310.1, EVALUE 2.00e-55
aactaaagttggatgctgtttccattacacaaagactttcaacatttctatgtctccattccacagtatcttcaatatcagccaaatcttcagcatctaacatccacaca

SEQ ID NO: 30985 - DNA, 206 bp, Homo sapiens
  MAP TO AC005083.1; EXPRESSED IN PLACENTA, SIGNAL = 0.7; EXPRESSED IN LUNG, SIGNAL = 0.49; EXPRESSED IN BONE MARROW, SIGNAL = 0.5; EXPRESSED IN ADULT LIVER, SIGNAL = 0.48; SWISSPROT HIT: P43802, EVALUE 9.80e-01; EST_HUMAN HIT: AW451643.1, EVALUE 1.00e-102
gctcttctgaaaatggattgccaagagttagtcgcacgtctcatccaagaagctgctgttctgacttcagctgtcaagcttggaaaaggctggagggaactagctgaaaagttagtacgactcacaaagcaacaaatggaggcatatgaaattcctcatcgaggaaacactggagatgttgctgttgaggtaagacttctgtttgt

SEQ ID NO: 30986 - DNA, 250 bp, Homo sapiens
  MAP TO AC006457.2; EXPRESSED IN PLACENTA, SIGNAL = 0.69; EXPRESSED IN ADULT LIVER, SIGNAL = 0.55; EXPRESSED IN LUNG, SIGNAL = 0.61; SWISSPROT HIT: Q16816, EVALUE 5.00e-26; NT HIT: gi5453881, EVALUE 1.00e-97
tcagtgctgatctactaccagtaccaccgggtgaacccggtgacccgggagatcgtcatccgagacccacccctacaccctccagcctctgcgccggctcatcgacgcctatgctttccgaatctatggcccctgggcgaggaaggggcagcagcagaactgggcagcccttttcaagaacacacccaaggccgtgctcctctccctggccgaggaggactactgaggggctggccagtcagggagggct

SEQ ID NO: 30987 - DNA, 234 bp, Homo sapiens
  MAP TO AC005741.1; EXPRESSED IN LUNG, SIGNAL = 0.84; EXPRESSED IN PLACENTA, SIGNAL = 0.73; EXPRESSED IN BONE MARROW, SIGNAL = 0.6; EXPRESSED IN ADULT LIVER, SIGNAL = 0.77; NT HIT: U66061.1, EVALUE 3.00e-24; SWISSPROT HIT: Q02224, EVALUE 7.40e-02; EST_HUMAN HIT: BE072177.1, EVALUE 4.00e-15
agaacctgtctttgagctctgagagtttttccttggcttgtttatcctgctgttaatgcttctgactgcattatgaaattcctgcagtgaattttgtacttctagaagttcgggttggttctttcttaaaatggctattttgtctttcagctcttggattattttactggattccttggattctttgcattgggtttcaactttctcctggatcttaataagcattcttgccat

SEQ ID NO: 30988 - DNA, 422 bp, Homo sapiens
  MAP TO AC003098.1; EXPRESSED IN LUNG, SIGNAL = 0.62; EXPRESSED IN BONE MARROW, SIGNAL = 2.6; EXPRESSED IN ADULT LIVER, SIGNAL = 0.49; EST_HUMAN HIT: BE613498.1, EVALUE 9.90e-02; SWISSPROT HIT: P45646, EVALUE 4.90e-01; NT HIT: AF074705.1, EVALUE 1.00e+00
ctagtaggcgttctccagctcggcctggttggctttggcgctccgggcgcggggccgcggcttccggcccttctgcggccgagcggcctcggtcccgaagtccttgagctccgactggttgtggaagcgggtgaggcgcttgcacttgcacgaggccaccaggcgcaccttgcgcgcgcgcggcgcctcaccaccgggacacagcagctgcacgcgctgcgcgcggtagcggtcggggatgcagcggaagtcgggcccactaggtcgccaccacttgccgcggccgatggcgttgggcagcaggcgcgccgggccgcactggccggagcacaccagctcggtgaccggcttggcgctgcggcacggcccatcggtcacgtagcgggtgaagtgcagctcgcggcagctgtactcggacacgt

SEQ ID NO: 30989 - DNA, 89 bp, Homo sapiens
  MAP TO AC004912.1; EXPRESSED IN LUNG, SIGNAL = 0.57; EXPRESSED IN BONE MARROW, SIGNAL = 0.5; EXPRESSED IN ADULT LIVER, SIGNAL = 0.48; NT HIT: gi11430157, EVALUE 1.80e-01; EST_HUMAN HIT: AI039699.1, EVALUE 2.80e-01
gagtgccagaatgacctcccctcccatgtcagcaaccacaccagggcttcccgctactgcatggctgaattgctgcaaaaacacttcca

SEQ ID NO: 30990 - DNA, 120 bp, Homo sapiens
  MAP TO AC005229.1; EXPRESSED IN ADULT LIVER, SIGNAL = 0.54; EXPRESSED IN LUNG, SIGNAL = 0.52; SWISSPROT HIT: Q61290, EVALUE 3.10e+00; NT HIT: AB027513.1, EVALUE 4.10e+00; EST_HUMAN HIT: BE907771.1, EVALUE 1.50e+00
caagctcctaatgcctttcacattgctgcacccaccatcaccaccacaaatcccaacatgcagaagattatgaacagacagataaggctcgctctgcagataggtagggacaggacagta

SEQ ID NO: 30991 - DNA, 150 bp, Homo sapiens
  MAP TO AC005192.1; EXPRESSED IN LUNG, SIGNAL = 0.59; EXPRESSED IN BONE MARROW, SIGNAL = 1.2; EXPRESSED IN ADULT LIVER, SIGNAL = 0.63; EXPRESSED IN PLACENTA, SIGNAL = 1.4; SWISSPROT HIT: O00458, EVALUE 1.00e-19; NT HIT: gi4504606, EVALUE 5.00e-65; EST_HUMAN HIT: AL135535.1, EVALUE 7.00e-65
gactttttttatgaagacatggagtccttgacgcagatgcttagggccttggcaacagatggaaataaacaccgggccaaagtggacaagagaaagcagcggtcagttttcagagatgtcctgagggcagtggaggtaggcttcttaaat

SEQ ID NO: 30992 - DNA, 456 bp, Homo sapiens
  MAP TO AC006322.2; EXPRESSED IN LUNG, SIGNAL = 0.73; EXPRESSED IN ADULT LIVER, SIGNAL = 0.55; EST_HUMAN HIT: BF700780.1, EVALUE 0.00e+00; SWISSPROT HIT: Q14563, EVALUE 2.00e-88; NT HIT: gi11421514, EVALUE 0.00e+00
atcagagtggatgatcatatcatcaggacagatcaaggccttctgctacgtagtctacaacagaaggattcaggcaattacctctgccatgcggtggaacatgggttcatacaaactcttcttaaggtaaccctggaagtcattgacacagagcatttggaagaacttcttcataaagatgatgatggagatggctctaagaccaaagaaatgtccaatagcatgacacctagccagaaggtctggtacagagacttcatgcagctcatcaaccaccccaatctcaacacaatggatgagttctgtgaacaagtttggaaaagggaccgaaaacaacgtcggcaaaggccaggacataccccagggaacagtaacaaatggaagcacttacaagaaaataagaaaggtagaaacaggaggacccacgaatttgagagggcacccaggagtgtctga

SEQ ID NO: 30993 - DNA, 208 bp, Homo sapiens
  MAP TO AC005384.1; EXPRESSED IN PLACENTA, SIGNAL = 0.69; EXPRESSED IN LUNG, SIGNAL = 0.77; EXPRESSED IN FETAL LIVER, SIGNAL = 0.78; EXPRESSED IN BONE MARROW, SIGNAL = 0.88; EXPRESSED IN ADULT LIVER, SIGNAL = 0.79; EST_HUMAN HIT: BF686625.1, EVALUE 4.70e-02; NT HIT: U25990.1, EVALUE 1.20e-01; SWISSPROT HIT: P24630, EVALUE 2.20e+00
aaatctcttcctggctgtttcccaccacctgcccttccccttctctatgctttcctgcagctctgccttgggggtgaggttgctgttgctgcccatggcttggccccttggccagatgttgagggcagacacacagtacccagaccagtgcccagcatcatggagaaggtctcagtcactccttcagaatccatcgcagttgcacaaa

SEQ ID NO: 30994 - DNA, 235 bp, Homo sapiens
  MAP TO AC005832.1; EXPRESSED IN BONE MARROW, SIGNAL = 0.7; EXPRESSED IN ADULT LIVER, SIGNAL = 0.41; SWISSPROT HIT: P36929, EVALUE 3.50e-01; NT HIT: gi9966846, EVALUE 3.00e-98; EST_HUMAN HIT: BF670443.1, EVALUE 4.00e-86
accacgttagagcatgcaaggcctgaagaacccagctgggatgaagattttgcagatgtgtaccatgacttaattcattctcctgcctctgaaactctcttaaatttggaacataattactttgttagtatctcagaactgattggtgaaagagatgtggagctgaaaaaattacgagagaggtatttcaaatttcttgcattatcagaattaaatgttacgttgtcaaatagat

SEQ ID NO: 30995 - DNA, 113 bp, Homo sapiens
  MAP TO AC004465.1; EXPRESSED IN LUNG, SIGNAL = 0.92; EXPRESSED IN FETAL LIVER, SIGNAL = 0.77; EXPRESSED IN BONE MARROW, SIGNAL = 0.86; EXPRESSED IN PLACENTA, SIGNAL = 0.8; EXPRESSED IN ADULT LIVER, SIGNAL = 0.81; EST_HUMAN HIT: AW893057.1, EVALUE 1.40e+00; NT HIT: AJ237609.1, EVALUE 3.90e+00; SWISSPROT HIT: P54246, EVALUE 9.30e+00
gcaatgcaggtcttcttaaatattgaataagcctgccgctccaccagctgccgcggctggggctgaggtaatgttgatattgacaaaggcttaatgtgattaatcaggttaga

SEQ ID NO: 30996 - DNA, 287 bp, Homo sapiens
  MAP TO AC004529.1; EXPRESSED IN PLACENTA, SIGNAL =  11; EXPRESSED IN BONE MARROW, SIGNAL =  48; EXPRESSED IN ADULT LIVER, SIGNAL = 4.1; EXPRESSED IN LUNG, SIGNAL = 1.7; SWISSPROT HIT: P01764, EVALUE 1.00e-42; EST_HUMAN HIT: AW401679.1, EVALUE 1.00e-103; NT HIT: X56163.1, EVALUE 0.00e+00
tggtgcagtctgggggaggcttggtacatcctggggggtccctgagactctcctgtgcaggctctggattcaccttcagtagctatgctatgcactgggttcgccaggctccaggaaaaggtctggagtgggtatcagctattggtactggtggtggcacatactatgcagactccgtgaagggccgattcaccatctccagagacaatgccaagaactccttgtatcttcaaatgaacagcctgagagccgaggacatggctgtgtattactgtgcaagagacaca

SEQ ID NO: 30997 - DNA, 152 bp, Homo sapiens
  MAP TO AC006406.1; EXPRESSED IN PLACENTA, SIGNAL = 0.7; EXPRESSED IN ADULT LIVER, SIGNAL = 0.55; EXPRESSED IN BONE MARROW, SIGNAL =   1; SWISSPROT HIT: P34529, EVALUE 3.00e+00; NT HIT: gi11467607, EVALUE 5.40e+00; EST_HUMAN HIT: BE782926.1, EVALUE 1.30e-01
tccatgagaaggtatccaagacccctgaaaagggtgaggccaggcctaaggagaacagagcagcccattggattcctctggccaatgtgattggctcagtgttagacatgggacctaggccagtccagtcgaatgtctctcagagctgctga

SEQ ID NO: 30998 - DNA, 160 bp, Homo sapiens
  MAP TO AC004132.1; EXPRESSED IN BONE MARROW, SIGNAL = 0.58; EXPRESSED IN ADULT LIVER, SIGNAL = 0.43; EXPRESSED IN LUNG, SIGNAL = 0.54; EST_HUMAN HIT: AI628119.1, EVALUE 4.00e-85; SWISSPROT HIT: P42724, EVALUE 3.00e+00; NT HIT: M13792.1, EVALUE 1.00e-04
ggtcccccaaggcaagagtggagtatggttaaaaaggaatgcagggaagggaaccagtatgtgcaagtcttggctcggtcattcaccagcagtagtgtggacaaattgcttaacctcagtttcttcatctgtaaaatgggggataatgatgcctacgtca

SEQ ID NO: 30999 - DNA, 174 bp, Homo sapiens
  MAP TO AC005666.1; EXPRESSED IN PLACENTA, SIGNAL = 0.74; EXPRESSED IN ADULT LIVER, SIGNAL = 0.53; EXPRESSED IN LUNG, SIGNAL = 0.75; EXPRESSED IN BONE MARROW, SIGNAL = 0.71; SWISSPROT HIT: P11101, EVALUE 5.10e+00; NT HIT: AF181681.2, EVALUE 4.00e-01; EST_HUMAN HIT: AA382291.1, EVALUE 8.00e-59
tggcccttcctgcacaaatactactgaagatggagatggattatgatttaggtgctccttcagtttgacatgagcttgctggatggctgcagattcctgtattgtgctattttcaacaggctgagctgtgtggatggtatagatgtactcaggtgactgtggtagagagcaggc

SEQ ID NO: 31000 - DNA, 127 bp, Homo sapiens
  MAP TO AC006359.3; EXPRESSED IN LUNG, SIGNAL = 0.49; EXPRESSED IN BONE MARROW, SIGNAL = 0.57; EXPRESSED IN ADULT LIVER, SIGNAL = 0.57; EST_HUMAN HIT: AA642035.1, EVALUE 8.00e-49; SWISSPROT HIT: P16382, EVALUE 9.20e+00
tacaatgggcaggaagaacccatcaggcagttgcacctgcaggatggtgccagttctttccacgaaggctggtcagatacccagaaagtatttctccactactacctggacgatgtgtctctctgtc

SEQ ID NO: 31001 - DNA, 183 bp, Homo sapiens
  MAP TO AC005016.1; EXPRESSED IN PLACENTA, SIGNAL = 0.66; EXPRESSED IN ADULT LIVER, SIGNAL = 0.54; EXPRESSED IN LUNG, SIGNAL = 0.65; EST_HUMAN HIT: BF683630.1, EVALUE 1.60e-01; SWISSPROT HIT: Q08810, EVALUE 3.00e+00
tgtaaaactactttcctgaaaacccataatcatatcagtttaaatctaacaataacatttattgatctttactataatttcaaacttcctacagaattaattttagcctacaatataaatgacagccatattcgaagtaaagcacatgtatgtaaagaagcaaacttggtaagaggaggcaat

SEQ ID NO: 31002 - DNA, 123 bp, Homo sapiens
  MAP TO AC004033.3; EXPRESSED IN LUNG, SIGNAL = 0.51; EXPRESSED IN ADULT LIVER, SIGNAL = 0.45; NT HIT: AF267747.1, EVALUE 1.10e+00
tccaacttcctgatggccttcttcctgatgacctgtgtgccatcatgcccaagactcttcatctcattgtatcttcttcagcggcaaagtcaaacagaagggttttgggaaacagactgacct

SEQ ID NO: 31003 - DNA, 100 bp, Homo sapiens
  MAP TO AC006473.2; EXPRESSED IN PLACENTA, SIGNAL = 0.69; EXPRESSED IN LUNG, SIGNAL = 0.8; EXPRESSED IN FETAL LIVER, SIGNAL = 0.9; EXPRESSED IN BONE MARROW, SIGNAL = 0.7; EXPRESSED IN ADULT LIVER, SIGNAL = 1.1; EST_HUMAN HIT: AW377354.1, EVALUE 3.10e-01; NT HIT: U49074.1, EVALUE 8.40e-01
atacaaatcactggactgaaaatattgctgattaaaacttctgagaacaaggctgatagattggcagttttcacaaacaccttcacgtattaagacaata

SEQ ID NO: 31004 - DNA, 204 bp, Homo sapiens
  MAP TO AC005323.1; EXPRESSED IN PLACENTA, SIGNAL = 0.69; EXPRESSED IN LUNG, SIGNAL = 0.53; EXPRESSED IN ADULT LIVER, SIGNAL = 0.4; EXPRESSED IN BONE MARROW, SIGNAL = 0.52; SWISSPROT HIT: gi127772, EVALUE 3.00e-28; EST_HUMAN HIT: AA176745.1, EVALUE 2.00e-19; NT HIT: gi11024711, EVALUE 1.00e-109
ctgagtgtgcagaagttgcacacgttcactggcatccagaagctcttgctctgccattttcctgcctctctcagtccgttccagggatgccctgagctcttcaacttcagcctgcatcaggttagctctgcgctcaaccattgccagttgttccttaaggtcatcttggcctctgatggcatcatccaaatgtagctgagtgtc

SEQ ID NO: 31005 - DNA, 197 bp, Homo sapiens
  MAP TO AC003078.1; EXPRESSED IN LUNG, SIGNAL = 0.54; EXPRESSED IN BONE MARROW, SIGNAL = 0.54; EXPRESSED IN ADULT LIVER, SIGNAL = 0.5; EXPRESSED IN PLACENTA, SIGNAL = 0.58; SWISSPROT HIT: P49940, EVALUE 1.30e+00; EST_HUMAN HIT: BE869457.1, EVALUE 2.70e+00
taaatttggaatattggaaagaaattactggaagaaaagaaaatattagaaacatgggtagtgatgaagcaaagaatctgaaatgcttcactcaaaacctcttgaactgtggaaacgatggggaagagagtatgtcaaatgagatcccggggaaggaatgcgagcttgatagcttgaccaacagcaacaaaatgacc

SEQ ID NO: 31006 - DNA, 247 bp, Homo sapiens
  MAP TO AC003959.1; EXPRESSED IN LUNG, SIGNAL = 0.42; EXPRESSED IN BONE MARROW, SIGNAL = 0.58; EXPRESSED IN ADULT LIVER, SIGNAL = 0.45; EST_HUMAN HIT: AA490106.1, EVALUE 2.20e-01; NT HIT: Z74895.1, EVALUE 9.20e+00; SWISSPROT HIT: P37871, EVALUE 9.50e-01
ctatgaaccatccttccccaaagtgttatcaaactgtgcctttggtggaggcatagctctcgtcggattcttttttgccagaaagatctgtgaacgaaactgctactatgttaactcagagaacagcctccctaataaagaagaggatgtgttcctacaagagccaggttttagttggattgttagtgtgagtgatgaagacctcagaatggctctagaaagaagcccagatctcagctttgcactg

SEQ ID NO: 31007 - DNA, 81 bp, Homo sapiens
  MAP TO AC006525.1; EXPRESSED IN BONE MARROW, SIGNAL = 0.66; EXPRESSED IN ADULT LIVER, SIGNAL = 0.7; EXPRESSED IN PLACENTA, SIGNAL = 0.79; EXPRESSED IN LUNG, SIGNAL = 0.72; EST_HUMAN HIT: AV689230.1, EVALUE 9.70e-01; NT HIT: AB046786.1, EVALUE 1.60e-01
taaaagcggaaaaaactgatgaggtttgaggcttttggttcattgtatctttgtggagtcttgacccatattctcatggag

SEQ ID NO: 31008 - DNA, 166 bp, Homo sapiens
  MAP TO AC003686.1; EXPRESSED IN PLACENTA, SIGNAL = 0.59; EXPRESSED IN LUNG, SIGNAL = 0.57; EXPRESSED IN BONE MARROW, SIGNAL = 0.61; EXPRESSED IN ADULT LIVER, SIGNAL = 0.49; EST_HUMAN HIT: AA470073.1, EVALUE 2.00e-59; NT HIT: D16250.1, EVALUE 6.00e+00; SWISSPROT HIT: O27439, EVALUE 3.90e+00
gctcctaaatacgtctctaatctctctgcttttttccatctctgctgctagaccctcatcagagctgacaacatgtccagcctgcactactgcaagaacttctttgtctatggtagtgtggtcaactgaagaagccggcttagttgctccagtcaggtgctcacac

SEQ ID NO: 31009 - DNA, 76 bp, Homo sapiens
  MAP TO AC006484.2; EXPRESSED IN PLACENTA, SIGNAL = 0.77; EXPRESSED IN LUNG, SIGNAL = 0.72; EXPRESSED IN BONE MARROW, SIGNAL = 0.78; EXPRESSED IN ADULT LIVER, SIGNAL = 0.82; EST_HUMAN HIT: AA100133.1, EVALUE 8.90e-01; NT HIT: L10234.1, EVALUE 6.00e-01
ctgctcatctctcaaccaggctcagagcaactccattgcaacaaagcttccgtgatcatcttagctggaagacggg

SEQ ID NO: 31010 - DNA, 136 bp, Homo sapiens
  MAP TO AC005691.1; EXPRESSED IN LUNG, SIGNAL = 0.59; EXPRESSED IN BONE MARROW, SIGNAL = 0.59; EXPRESSED IN ADULT LIVER, SIGNAL = 0.55; EST_HUMAN HIT: AI435040.1, EVALUE 4.50e-01; NT HIT: X63941.1, EVALUE 3.00e-01
aggagacaaagcggccagcagcaggtgcaggcagataactcttgtcatcttcctccatttcctgcaccaggggcttcagagacttggcagtatggtgggaccacggactccggtacatggacctgagcttaagtcc

SEQ ID NO: 31011 - DNA, 306 bp, Homo sapiens
  MAP TO AC005701.1; EXPRESSED IN PLACENTA, SIGNAL = 0.78; EXPRESSED IN BONE MARROW, SIGNAL = 0.68; EXPRESSED IN ADULT LIVER, SIGNAL = 0.56; EXPRESSED IN LUNG, SIGNAL = 0.62; NT HIT: AJ404468.1, EVALUE 0.00e+00; SWISSPROT HIT: P23098, EVALUE 1.00e-43; EST_HUMAN HIT: AI795798.1, EVALUE 4.00e-25
cttgagcacaaagttgtcctcagcctggagcttcagatccactatcgccttcctaaccaaagcttcgaagttggggtctctcctccgggggacatccagggcgggaaagaggtccccgatcaggcccatgaagatgggcatgtcatcagtcacaatcttggggatgttgaaatcccgcaaggagcgcatcaggacctggtcctcaggccggtcagggtctcctctcttcagggatcctgccaccaccagcacggacttgatggcccgtaggccccagtcgtagtgatcctgtgggcagtgttagat

SEQ ID NO: 31012 - DNA, 126 bp, Homo sapiens
  MAP TO AC004746.1; EXPRESSED IN ADULT LIVER, SIGNAL = 0.63; EXPRESSED IN BONE MARROW, SIGNAL = 0.52; EXPRESSED IN PLACENTA, SIGNAL = 0.64; EXPRESSED IN LUNG, SIGNAL = 0.63; NT HIT: U65300.1, EVALUE 2.80e-01; EST_HUMAN HIT: AI979271.1, EVALUE 1.60e+00; SWISSPROT HIT: P17051, EVALUE 9.20e+00
atcaaaacattagataaggtttttcgaaatgtcaacataggtagcttcctggtcaacaaagccagcattactcctttatttacacaaaagaagtgggttcacagactggcaaagagtgatatctag

SEQ ID NO: 31013 - DNA, 139 bp, Homo sapiens
  MAP TO AC006206.3; EXPRESSED IN PLACENTA, SIGNAL = 0.64; EXPRESSED IN BONE MARROW, SIGNAL = 0.67; EXPRESSED IN ADULT LIVER, SIGNAL = 0.71; EXPRESSED IN LUNG, SIGNAL = 0.42; SWISSPROT HIT: P41139, EVALUE 8.00e-01; NT HIT: U82695.2, EVALUE 4.90e+00; EST_HUMAN HIT: H47799.1, EVALUE 1.20e-01
gccatgtgactcatccgatcgaccagctggggagcagaagggatgagtgtcacttctaggttgaagcctaacagagctgatgagagaccctccaccaccagctcttcccttgcacaccagaaggtcgtgtgctccaggc

SEQ ID NO: 31014 - DNA, 166 bp, Homo sapiens
  MAP TO AC005036.1; EXPRESSED IN ADULT LIVER, SIGNAL = 0.47; EXPRESSED IN LUNG, SIGNAL = 0.5; NT HIT: AF072164.1, EVALUE 2.00e-06; SWISSPROT HIT: P48634, EVALUE 1.30e+00; EST_HUMAN HIT: BE149692.1, EVALUE 3.00e-12
gctctggctcttgagtatgatttcctccaggcccctcaggaagaaatttaggacaaggaacagtggtcagagttgtctttggttccccattttcctgagatctatgtgcctgtggatccattgggcaggagtccagctttatgagaaacaactcagggacatatgc

SEQ ID NO: 31015 - DNA, 98 bp, Homo sapiens
  MAP TO AC004958.1; EXPRESSED IN PLACENTA, SIGNAL = 0.75; EXPRESSED IN BONE MARROW, SIGNAL = 0.65; EXPRESSED IN ADULT LIVER, SIGNAL = 0.65; EXPRESSED IN LUNG, SIGNAL = 0.61; NT HIT: D37977.1, EVALUE 3.00e-03; SWISSPROT HIT: P47030, EVALUE 1.90e+00
agtcccttttggttctcctggaggtacctgtgtacacagtaggggttcaggacttggtggtggtggtggagacggtgaggcatgcagggaaggccagg

SEQ ID NO: 31016 - DNA, 225 bp, Homo sapiens
  MAP TO AC002300.1; EXPRESSED IN PLACENTA, SIGNAL = 0.77; EXPRESSED IN LUNG, SIGNAL = 0.7; EXPRESSED IN BONE MARROW, SIGNAL = 0.61; EXPRESSED IN ADULT LIVER, SIGNAL = 0.67; SWISSPROT HIT: P51476, EVALUE 6.40e+00; NT HIT: gi4503430, EVALUE 2.10e+00
catctcctccatcatcaccatcatcatcctcagcaccatcaccattatcatcaccatcatcagcatcatgaccaccatcaccctcaccatcacctccattatcaccatcaccatcaccattctcaccatcatcaccatcaccaccagagcaacattatggtcacccacatggtttcccagacccaagaagcagcccacagatggggtaacagacccaaaggacat

SEQ ID NO: 31017 - DNA, 126 bp, Homo sapiens
  MAP TO AC004918.1; EXPRESSED IN PLACENTA, SIGNAL = 0.6; EXPRESSED IN LUNG, SIGNAL = 0.76; EXPRESSED IN BONE MARROW, SIGNAL = 0.57; EXPRESSED IN ADULT LIVER, SIGNAL = 0.55; SWISSPROT HIT: P47817, EVALUE 1.00e-07; EST_HUMAN HIT: AA386311.1, EVALUE 3.00e-14
tgccgaacagagaccttctgcagcagctctggccagaaatacagttctccggccttccctgggaaaaacagaagagctccaacagcagctgaatttggaaaagttcaagactgccacactggaaag

SEQ ID NO: 31018 - DNA, 202 bp, Homo sapiens
  MAP TO AC006285.9; EXPRESSED IN PLACENTA, SIGNAL = 0.59; EXPRESSED IN BONE MARROW, SIGNAL = 0.59; EXPRESSED IN ADULT LIVER, SIGNAL = 0.56; EXPRESSED IN LUNG, SIGNAL = 0.42; EST_HUMAN HIT: BE251496.1, EVALUE 1.00e-110; NT HIT: gi11526299, EVALUE 1.00e-110; SWISSPROT HIT: P55957, EVALUE 6.00e-35
gtcaacaacggttccagcctcagggatgagtgcatcacaaacctactggtgtttggcttcctccaaagctgttctgacaacagcttccgcagagagctggacgcactgggccacgagctgccagtgctggctccccagtgggagggctacgatgagctgcagactgatggcaaccgcagcagccactcccgcttgggaagaa

SEQ ID NO: 31019 - DNA, 96 bp, Homo sapiens
  MAP TO AC006197.1; EXPRESSED IN PLACENTA, SIGNAL = 0.68; EXPRESSED IN LUNG, SIGNAL = 0.63; EXPRESSED IN ADULT LIVER, SIGNAL = 0.57; NT HIT: AF260924.1, EVALUE 3.20e+00; EST_HUMAN HIT: AA167810.1, EVALUE 1.20e+00
aaagagttggtgcatgctgtgccctatatttggctgcatgctgaaaagcacaagacttcatccagcacaaccattccacttacacatccaggtaaa

SEQ ID NO: 31020 - DNA, 148 bp, Homo sapiens
  MAP TO AC006355.3; EXPRESSED IN PLACENTA, SIGNAL = 0.61; EXPRESSED IN LUNG, SIGNAL = 0.52; EXPRESSED IN BONE MARROW, SIGNAL = 0.57; EXPRESSED IN ADULT LIVER, SIGNAL =   2; NT HIT: gi6753651, EVALUE 5.00e-03; SWISSPROT HIT: P19451, EVALUE 9.00e+00
ctaccatgaagactttaaagcagcatttaacatttgtatcaacacagaagatggagaagacatagtctcactggcagcgcaaaaccttgtcctgtgcatggtcacacgctcagccaccagggcaggctcagctggctttcaatatgtg

SEQ ID NO: 31021 - DNA, 274 bp, Homo sapiens
  MAP TO AC004806.1; EXPRESSED IN PLACENTA, SIGNAL = 0.62; EXPRESSED IN LUNG, SIGNAL = 0.61; EXPRESSED IN ADULT LIVER, SIGNAL = 0.68; SWISSPROT HIT: P21686, EVALUE 1.20e+00; EST_HUMAN HIT: W00689.1, EVALUE 3.90e+00; NT HIT: AE004458.1, EVALUE 6.60e-01
aggttttaaatggaaccttaatatgtgtttgttttccagggtaaatggatccttctatgagatcttgcaagtggactttggaattgataatagcagtgacctggctggggcccagcagattacctggcaggtggagtacccgattgaggactccatgagtgagctggtcgtctccgagatcttcgtcagccagacaaccttcgtgggcatcgtccctcttgccatggtgaggaatctgggggtttcagaggaagtgtcacaaagaagttttctt

SEQ ID NO: 31022 - DNA, 110 bp, Homo sapiens
  MAP TO AC004817.1; EXPRESSED IN ADULT LIVER, SIGNAL = 0.45; EXPRESSED IN LUNG, SIGNAL = 0.54; SWISSPROT HIT: P32802, EVALUE 2.40e+00; NT HIT: AJ001497.1, EVALUE 6.10e-02
tgatgatcataatttatcgatgcttcagtgggcccaggtggacctggccatggaggccgatctgcctgtctgggccctcatgttcctgttcagtacacatacaggtggtg

SEQ ID NO: 31023 - DNA, 206 bp, Homo sapiens
  MAP TO AC004381.1; EXPRESSED IN LUNG, SIGNAL = 0.68; EXPRESSED IN BONE MARROW, SIGNAL = 0.66; EXPRESSED IN PLACENTA, SIGNAL = 0.68; EXPRESSED IN ADULT LIVER, SIGNAL = 0.44; SWISSPROT HIT: Q9ZMZ0, EVALUE 2.90e+00; EST_HUMAN HIT: AL043299.1, EVALUE 1.00e-112
tgtgacagagctcacgcttgattgtgacaccctcgtgaatgagctggaaggagattctgaaaaccaaggctctatatatctgtctggagtgagtgaaaccttcaaagaacagctattgcaggagccccgcctctttcttggcctggaagctgtgatcttgcctaaagatcttaaaagtggaaagcagaaaaaatactgtttcctga

SEQ ID NO: 31024 - DNA, 185 bp, Homo sapiens
  MAP TO AC005799.1; EXPRESSED IN LUNG, SIGNAL = 0.42; EXPRESSED IN PLACENTA, SIGNAL = 0.73; EXPRESSED IN ADULT LIVER, SIGNAL = 1.7; SWISSPROT HIT: P09012, EVALUE 4.40e-01; EST_HUMAN HIT: AA412321.1, EVALUE 3.00e-95
cagcactgatggtgggaaagtgcctcatgtcttgcagaagtttgctgacaacagggctggaccgggagtagagcccatggcggttaatacccaggtggaactggacccagctggcctcgagtcggagctgcagtggggggtccagggaggtaaggttcatctgctctctgtacatcttgtgtcgc

SEQ ID NO: 31025 - DNA, 125 bp, Homo sapiens
  MAP TO AC004636.1; EXPRESSED IN PLACENTA, SIGNAL = 0.71; EXPRESSED IN LUNG, SIGNAL = 0.64; EXPRESSED IN ADULT LIVER, SIGNAL = 0.49; NT HIT: AF064254.1, EVALUE 8.00e-51; EST_HUMAN HIT: T19992.1, EVALUE 1.00e-50; SWISSPROT HIT: O35488, EVALUE 6.00e-10
aaattttcagcaagccagttttggagtgactgcaagaagtatgatgtgactgtgtttcagtatattggagaactttgtcgctacctttgcaaacaatctaaggtaggcgtaatcattatcagaaa

SEQ ID NO: 31026 - DNA, 311 bp, Homo sapiens
  MAP TO AC004595.1; EXPRESSED IN BONE MARROW, SIGNAL = 0.52; EXPRESSED IN LUNG, SIGNAL = 0.53; EXPRESSED IN ADULT LIVER, SIGNAL = 0.5; SWISSPROT HIT: Q02446, EVALUE 2.00e-39; NT HIT: gi4507168, EVALUE 1.00e-111; EST_HUMAN HIT: AW993165.1, EVALUE 1.00e-111
acctattcagagaagcatcatttaattaccttgattctttttaatttttctataattgtaaacctactatttggcagtgtaattaatgttcggtttttgtttttgctagaggcagtaatgaaccaggaaaaaagaagcagcatatctgtcatattgaaggatgtggtaaagtttatggcaaaacatctcatttacgagcacatcttcgctggcatactggagaaagaccttttatatgcaactggatgttttgtggcaaaagattcacacggagtgatgagctccagagacatagaagaacccatacaggt

SEQ ID NO: 31027 - DNA, 96 bp, Homo sapiens
  MAP TO AC006375.2; EXPRESSED IN FETAL LIVER, SIGNAL = 0.68; EXPRESSED IN ADULT LIVER, SIGNAL = 0.54; EST_HUMAN HIT: AA985254.1, EVALUE 3.00e-01; NT HIT: U39724.1, EVALUE 2.00e-01
cttttcattcttttatccatatcttttaaagggcagaagtttttaattttgataaagtccaattttttctttgttgattgcatttttgtcattgtt

SEQ ID NO: 31028 - DNA, 105 bp, Homo sapiens
  MAP TO AC005873.2; EXPRESSED IN LUNG, SIGNAL = 0.58; EXPRESSED IN BONE MARROW, SIGNAL = 0.54; EXPRESSED IN ADULT LIVER, SIGNAL = 0.52; NT HIT: AB042297.1, EVALUE 8.90e-01
tcatcagcaatgcacaagatgacattgtgcacatcccaataggatgcaatgaaaagaatatagaatcacttttgctgaagtgaatatcaccactaaagattacat

SEQ ID NO: 31029 - DNA, 434 bp, Homo sapiens
  MAP TO AC004219.1; EXPRESSED IN LUNG, SIGNAL = 0.62; EXPRESSED IN BONE MARROW, SIGNAL = 0.7; EXPRESSED IN PLACENTA, SIGNAL = 0.67; EXPRESSED IN FETAL LIVER, SIGNAL = 0.78; EXPRESSED IN ADULT LIVER, SIGNAL = 0.66; SWISSPROT HIT: P45895, EVALUE 3.40e+00; NT HIT: AF206018.1, EVALUE 4.20e+00; EST_HUMAN HIT: BE747231.1, EVALUE 0.00e+00
tgatgggatagtacacctgttgtccctgaattgtattgtctctacatcgttggagaaaatcttctctgaagatcaagtcaacatcacaaaatagcagcaaagtgtcattgtcaaactgggcagaagccatttcaagaccaagacctctggaaaactctcccttcattgggatcagggtcatttctgctttggggtacttgttctggtacccttttatcagctcaatatgcttgctggagtcttggccagaatccctactgaaaaggataatgaccaactttacattctgctttgggataagacacatgttttcaaagttctccatgaatctcaagaaaatgtcataccttccgatgagaggaacgagaatgtgtactttcttttcattgtgccctcccatttctttggcaccttgaaaagaagataatatcttt

SEQ ID NO: 31030 - DNA, 192 bp, Homo sapiens
  MAP TO AC005833.1; EXPRESSED IN LUNG, SIGNAL = 0.55; EXPRESSED IN BONE MARROW, SIGNAL = 0.61; EXPRESSED IN ADULT LIVER, SIGNAL = 0.51; SWISSPROT HIT: P72583, EVALUE 6.70e-02; EST_HUMAN HIT: AW197414.1, EVALUE 5.00e-51; NT HIT: gi11525737, EVALUE 2.00e-68
ctagagagacaccacaagccctacgccttggatctcaccgctgccttgaagcgcaatgctctgcgagtggccgaaatctggatggatgagcacaaacacatggtctacttggcctggaacatacctctccaggtgagtcatggaattgaacagcagcacggaagaatgaaagaggaggaggtggcggttatg

SEQ ID NO: 31031 - DNA, 114 bp, Homo sapiens
  MAP TO AC004050.1; EXPRESSED IN PLACENTA, SIGNAL = 0.93; EXPRESSED IN LUNG, SIGNAL = 0.72; EXPRESSED IN BONE MARROW, SIGNAL = 0.95; EXPRESSED IN ADULT LIVER, SIGNAL = 0.54; EST_HUMAN HIT: BE561971.1, EVALUE 7.00e-58; SWISSPROT HIT: Q03574, EVALUE 1.40e+00; NT HIT: AL163300.2, EVALUE 9.90e-01
ttctgctctgtatgctgcctttatattcggtggtcggcacctaatgaataaacgagcaaagtttgaactgaggaagccattagtgctctggtctctgacccttgcagtcttcag

SEQ ID NO: 31032 - DNA, 99 bp, Homo sapiens
  MAP TO AC004057.1; EXPRESSED IN PLACENTA, SIGNAL = 0.96; EXPRESSED IN BONE MARROW, SIGNAL = 1.1; EXPRESSED IN ADULT LIVER, SIGNAL = 0.56; EXPRESSED IN LUNG, SIGNAL = 0.65; SWISSPROT HIT: Q01484, EVALUE 1.00e-11; EST_HUMAN HIT: F00928.1, EVALUE 3.00e-35; NT HIT: Z26634.2, EVALUE 4.00e-49
ctgagactgtgcattaatattggctccttccttaacaagaactttgacaacttctgcttgtccagccaaagatgcaatgtgaagagcggtatttccctt

SEQ ID NO: 31033 - DNA, 81 bp, Homo sapiens
  MAP TO AC004917.2; EXPRESSED IN LUNG, SIGNAL = 0.6; EXPRESSED IN PLACENTA, SIGNAL = 0.59; EXPRESSED IN BONE MARROW, SIGNAL = 0.58; EXPRESSED IN ADULT LIVER, SIGNAL = 0.56; NT HIT: AF030001.1, EVALUE 5.50e-01; EST_HUMAN HIT: BE391007.1, EVALUE 6.60e-01
gtgtggatggatgcacagagaatgtccacctgcgaggaggggaaagcctggagtgtgagggaacaccagctctggggacaa

SEQ ID NO: 31034 - DNA, 139 bp, Homo sapiens
  MAP TO AC004527.2; EXPRESSED IN ADULT LIVER, SIGNAL = 0.49; EXPRESSED IN LUNG, SIGNAL = 0.57; EXPRESSED IN BONE MARROW, SIGNAL = 0.5; NT HIT: AF275948.1, EVALUE 2.00e-02; SWISSPROT HIT: P28946, EVALUE 4.00e+00; EST_HUMAN HIT: T18862.1, EVALUE 3.00e-30
cggagtggtagcaggcagccatcagcaagagctgctccgtgccaggctgctggaggctagagcctgtggcccagtggcttgcctcactgtggttggtggtggtggtgacagagactgcagcatgaccagagtgatagga

SEQ ID NO: 31035 - DNA, 151 bp, Homo sapiens
  MAP TO AC003078.1; EXPRESSED IN PLACENTA, SIGNAL = 0.8; EXPRESSED IN LUNG, SIGNAL = 0.83; EXPRESSED IN BONE MARROW, SIGNAL = 0.7; EXPRESSED IN ADULT LIVER, SIGNAL = 0.74; SWISSPROT HIT: P27127, EVALUE 1.80e+00; EST_HUMAN HIT: AW263476.1, EVALUE 8.00e+00
taacagtggaaatacgacaatctgtatacgagtagttataattcatgctgatgaaagtagcttccatcttatcattcttgcaatattgaaacaaactccagtgaacttgtttgaagctggttcagtagagattgtttcaacactgaaggaa

SEQ ID NO: 31036 - DNA, 76 bp, Homo sapiens
  MAP TO AC000113.1; EXPRESSED IN ADULT LIVER, SIGNAL = 0.46; EST_HUMAN HIT: AA194201.1, EVALUE 8.90e-01; SWISSPROT HIT: P27989, EVALUE 5.60e+00; NT HIT: L34078.1, EVALUE 9.30e+00
ctcagtagactctggtgccaggcaggtccctgcagactgaagttccaggacaaccccctcaagacccaggttccaa

SEQ ID NO: 31037 - DNA, 214 bp, Homo sapiens
  MAP TO AC000121.1; EXPRESSED IN ADULT LIVER, SIGNAL = 0.62; EST_HUMAN HIT: BE938667.1, EVALUE 1.00e-76; NT HIT: gi4826977, EVALUE 1.00e-117; SWISSPROT HIT: O14063, EVALUE 1.20e+00
gctcctgggaagaaaagccagttgcctgtgtccactgggtcgagactatcttctaaaacgacttgtctgtgagctgaattgatgatcaagatgttatctaaggcccagcaggcttcatacacttcacctacacgaagattttcctgcttccactgaaattggacattctcccctttggcgtcctcaggaaggtagaggatatggatgattgtgc

SEQ ID NO: 31038 - DNA, 196 bp, Homo sapiens
  MAP TO AC004614.1; EXPRESSED IN ADULT LIVER, SIGNAL = 0.44; EXPRESSED IN PLACENTA, SIGNAL = 1.5; EXPRESSED IN LUNG, SIGNAL = 0.85; EXPRESSED IN BONE MARROW, SIGNAL = 0.54; EST_HUMAN HIT: AA099142.1, EVALUE 6.90e-01; SWISSPROT HIT: Q9UHI8, EVALUE 4.60e+00; NT HIT: AB023177.1, EVALUE 1.00e-102
cggcgcattaccaatgagcccactggaggctctggggtaaccggaaactgccctcacttactggaagccattccctgtgaagagcctgcctgttatgactggaaagcagtgagactgggaaactgcgagccagataacggaaaggagtgtggtccaggcacgcaagttcaagaggttgtgtgcatcaacagtgatg

SEQ ID NO: 31039 - DNA, 285 bp, Homo sapiens
  MAP TO AC003693.1; EXPRESSED IN PLACENTA, SIGNAL = 0.69; EXPRESSED IN ADULT LIVER, SIGNAL = 0.6; EXPRESSED IN LUNG, SIGNAL = 0.68; EXPRESSED IN BONE MARROW, SIGNAL = 0.57; NT HIT: AJ270996.1, EVALUE 0.00e+00; SWISSPROT HIT: O94759, EVALUE 4.00e-12; EST_HUMAN HIT: H44846.1, EVALUE 4.00e-06
ctgccggatttcctccagcaccagcgtaaagacccagaagtagagggtgacctcgggccctgaggggccctgggggggcggcctgaagtccaccagcaggacgtaggtgaacaggaagaggaaggcgaagtacatgaccacgttccccaggaacacagtcacgggagcgccccagaatttccgccagcgtgtgagcaggaagacagcacgtgggcctcggtcaccctgagccctcggcgcctccaccagctcctccaccctgtgccgcagagaagttcgcagtgg

SEQ ID NO: 31040 - DNA, 91 bp, Homo sapiens
  MAP TO AC002300.1; EXPRESSED IN LUNG, SIGNAL = 0.43; EXPRESSED IN ADULT LIVER, SIGNAL = 0.42; NT HIT: AL163283.2, EVALUE 9.00e-13; EST_HUMAN HIT: H69214.1, EVALUE 8.00e-11
atacaaattttttttcaataaaagttacatggagtgtgcgtgcctctcctgcctccacttccacctcctccacctctttcacctctgccac

SEQ ID NO: 31041 - DNA, 262 bp, Homo sapiens
  MAP TO AC004540.1; EXPRESSED IN LUNG, SIGNAL = 0.44; EXPRESSED IN BONE MARROW, SIGNAL = 0.57; EXPRESSED IN ADULT LIVER, SIGNAL = 0.64; EST_HUMAN HIT: BF210488.1, EVALUE 6.00e-02; SWISSPROT HIT: P40457, EVALUE 3.70e-01; NT HIT: AL163208.2, EVALUE 6.30e-01
actgagatgttactatgcagcacataacaacgtatctctctctatcccattcctcttcagcttctttcaaactcctgacaactttagcctctttctgattttccagacccagcccacactggctcttgtctttctcccccttttctttaaccctccagatctgttcctcactgttctcccagtagctctcagagtaaatctgacacggcagtccctggccctctcggctcctccccactcgaattccaacttttgcagccat

SEQ ID NO: 31042 - DNA, 237 bp, Homo sapiens
  MAP TO AC004543.1; EXPRESSED IN PLACENTA, SIGNAL = 0.65; EXPRESSED IN ADULT LIVER, SIGNAL = 0.7; EXPRESSED IN LUNG, SIGNAL = 0.72; EXPRESSED IN BONE MARROW, SIGNAL = 0.55; SWISSPROT HIT: P21894, EVALUE 2.60e-02; EST_HUMAN HIT: BF688423.1, EVALUE 8.40e-01
agagtgatgcagggaatgctccctttctgagaacatcctcctctgttcataactggctagtcgacaagtgagccaggaagagagagtgcagcccccgatcccaatgcacgcgagagacatggaggcaaggtgcagtgggtatagggaggaagttttctttgtgactgcccggaggaactgaaaattcaggatgcccccaataagtccacagatacagcaggctgaaaagaggatcat

SEQ ID NO: 31043 - DNA, 78 bp, Homo sapiens
  MAP TO AC004388.1; EXPRESSED IN PLACENTA, SIGNAL = 0.71; EXPRESSED IN LUNG, SIGNAL = 0.69; EXPRESSED IN BONE MARROW, SIGNAL = 0.61; EXPRESSED IN ADULT LIVER, SIGNAL = 0.57; NT HIT: Z49632.1, EVALUE 1.60e-01
gacatcttaaattctctaagtggagatttcttatattcttcacagtacacctgtttaaaaattgtagtccacagaaat

SEQ ID NO: 31044 - DNA, 165 bp, Homo sapiens
  MAP TO AC002996.1; EXPRESSED IN ADULT LIVER, SIGNAL = 0.53; EXPRESSED IN LUNG, SIGNAL = 0.6; EXPRESSED IN BONE MARROW, SIGNAL = 0.68; EST_HUMAN HIT: BE544889.1, EVALUE 4.00e-54; NT HIT: AF202049.1, EVALUE 9.60e-02
tggaaggagtgtccctgggggcttcttcctcagaactagatcacgattagccagcctgatgtagtaagttggatttgactgcccgtgatcaaactgaagtagttccaatgggcctgcaagtttgaaaacaaagaaaactcaaaccagccctggaggacagatctg

SEQ ID NO: 31045 - DNA, 146 bp, Homo sapiens
  MAP TO AC006121.1; EXPRESSED IN PLACENTA, SIGNAL = 0.59; EXPRESSED IN LUNG, SIGNAL = 0.54; EXPRESSED IN HELA, SIGNAL =  10; EXPRESSED IN FETAL LIVER, SIGNAL = 0.68; EXPRESSED IN ADULT LIVER, SIGNAL = 0.44; EXPRESSED IN BONE MARROW, SIGNAL = 0.52; SWISSPROT HIT: Q93008, EVALUE 1.00e-23; NT HIT: X98296.1, EVALUE 5.00e-77; EST_HUMAN HIT: BE694065.1, EVALUE 2.00e-74
ctgttgatcatgtcatccaacttggccaagtcagtatgtggaaatgcaggttcctcatcttcaagctgtggtggggcatcaccttgaccttgctcatctgggggagttgccggggaattttcattggaagaatcaggcgatgaagt

SEQ ID NO: 31046 - DNA, 121 bp, Homo sapiens
  MAP TO AC004827.1; EXPRESSED IN LUNG, SIGNAL = 0.89; EXPRESSED IN FETAL LIVER, SIGNAL = 0.72; EXPRESSED IN BONE MARROW, SIGNAL = 0.84; EXPRESSED IN ADULT LIVER, SIGNAL = 0.82; EXPRESSED IN PLACENTA, SIGNAL =   1; SWISSPROT HIT: Q99435, EVALUE 5.40e+00
atatggacaaacgatctgctctcctctttataatgcagataaaactgatgtatgtgttttttaagagcatattttccctgcacatgcttctcattatccgagaggcctggactcaatcagt

SEQ ID NO: 31047 - DNA, 125 bp, Homo sapiens
  MAP TO AC004829.2; EXPRESSED IN PLACENTA, SIGNAL = 1.1; EXPRESSED IN BONE MARROW, SIGNAL = 0.76; EXPRESSED IN LUNG, SIGNAL = 0.7; EXPRESSED IN ADULT LIVER, SIGNAL = 0.84; NT HIT: AF270648.1, EVALUE 9.30e-01; EST_HUMAN HIT: AW663893.1, EVALUE 1.10e+00
atttccttttgtgtttttcatcttaatcgtcttgtacatatcaatcagatcaatcttcctaggcttccactctaattttgtttttcccctgcttaaaaccttcatagttgccaatttattattca

SEQ ID NO: 31048 - DNA, 139 bp, Homo sapiens
  MAP TO AC002477.1; EXPRESSED IN ADULT LIVER, SIGNAL = 0.43; EXPRESSED IN LUNG, SIGNAL = 0.42; EST_HUMAN HIT: BE791978.1, EVALUE 1.00e-72
ctccttcttttctatggctaataccactttcctgcttcctttctgctgctgaatctccagacttggtgctgtcatcagggggacagagtcgatttcggcttcgagctcctggttggtaaagctgcatcgctggacgatc

SEQ ID NO: 31049 - DNA, 272 bp, Homo sapiens
  MAP TO AC005209.1; EXPRESSED IN PLACENTA, SIGNAL = 0.63; EXPRESSED IN BONE MARROW, SIGNAL = 0.55; EXPRESSED IN ADULT LIVER, SIGNAL = 0.57; EXPRESSED IN LUNG, SIGNAL = 0.62; NT HIT: AF257737.1, EVALUE 1.00e-130; SWISSPROT HIT: P23098, EVALUE 3.00e-32; EST_HUMAN HIT: AA382715.1, EVALUE 1.00e-95
gttctgagcgtggggtggtgtttcttcttcaccagactcccattccagtcaccccagccctggatcccctgaggatgctgatggatgatgctgacgtggctgcctggcagaacgagggcctcccagccgaccgcatgtccgtggagaatgccaccattctcatcaactgtgagcgctggccactcatggttgaccctcagctacaaggcatcaaatggatcaagaataaatatggtgaagatctccgggtcacgcagattggtcagaaaggg

SEQ ID NO: 31050 - DNA, 75 bp, Homo sapiens
  MAP TO AC003658.1; EXPRESSED IN ADULT LIVER, SIGNAL = 0.51; EXPRESSED IN LUNG, SIGNAL = 0.54; SWISSPROT HIT: P10978, EVALUE 9.70e+00; NT HIT: AJ223986.1, EVALUE 1.50e-01; EST_HUMAN HIT: AW148828.1, EVALUE 3.50e+00
tcagtcatcctgaagctcatatgaaaagcaaggatgaagaggccttggagcgaaatggtacctacaaggagcagg

SEQ ID NO: 31051 - DNA, 89 bp, Homo sapiens
  MAP TO AC006083.1; EXPRESSED IN LUNG, SIGNAL = 0.44; EXPRESSED IN BONE MARROW, SIGNAL = 0.51; EXPRESSED IN ADULT LIVER, SIGNAL = 0.47; NT HIT: U09504.1, EVALUE 2.90e+00; EST_HUMAN HIT: BE881455.1, EVALUE 2.80e-01
gaatgcagccagaatgacacctttttcagccttatgggactcagtagaggatccatttaagccatgtccagacttctgacccaaggaaa

SEQ ID NO: 31052 - DNA, 111 bp, Homo sapiens
  MAP TO AC004739.1; EXPRESSED IN PLACENTA, SIGNAL = 0.63; EXPRESSED IN LUNG, SIGNAL = 0.51; EXPRESSED IN ADULT LIVER, SIGNAL = 0.5; NT HIT: AF197881.1, EVALUE 9.60e-01; EST_HUMAN HIT: AI493847.1, EVALUE 1.40e+00
tttcagtcatcatctttcatgacaaaggactgttactgagacttcagatgttattcagtggtccaattacctctcgctctggtgctatgcaggttgccattacaataaaca

SEQ ID NO: 31053 - DNA, 108 bp, Homo sapiens
  MAP TO AC002537.1; EXPRESSED IN ADULT LIVER, SIGNAL = 0.5; EXPRESSED IN PLACENTA, SIGNAL = 0.66; EXPRESSED IN LUNG, SIGNAL = 0.54; EXPRESSED IN BONE MARROW, SIGNAL = 0.53; SWISSPROT HIT: Q93050, EVALUE 3.00e-07; EST_HUMAN HIT: BF359744.1, EVALUE 1.00e-31; NT HIT: L31770.1, EVALUE 9.00e-32
ctgaataatctcagcatcctcctctgtcggtccgttgcccaccctgatcccaccaaagttgagagttccctacacagatgaacagaaagagtagaatttgcctgggct

SEQ ID NO: 31054 - DNA, 96 bp, Homo sapiens
  MAP TO AC006120.1; EXPRESSED IN LUNG, SIGNAL = 0.74; EXPRESSED IN FETAL LIVER, SIGNAL = 0.75; EXPRESSED IN BONE MARROW, SIGNAL = 0.59; EXPRESSED IN PLACENTA, SIGNAL = 0.88; EXPRESSED IN ADULT LIVER, SIGNAL = 0.67; NT HIT: AE001719.1, EVALUE 8.00e-01; EST_HUMAN HIT: AI819755.1, EVALUE 3.00e-47
gaagtgaagaagaaaaatgggagaagctggatgcagaatttgatcactttgtggttgatatgaagccctttgttctaaaattacctcataggacag

SEQ ID NO: 31055 - DNA, 110 bp, Homo sapiens
  MAP TO AC004741.1; EXPRESSED IN LUNG, SIGNAL = 0.62; EXPRESSED IN BONE MARROW, SIGNAL = 0.51; EXPRESSED IN ADULT LIVER, SIGNAL = 0.41; EXPRESSED IN PLACENTA, SIGNAL = 0.67; NT HIT: AL445067.1, EVALUE 2.40e-01; EST_HUMAN HIT: BF509740.1, EVALUE 6.00e-46; SWISSPROT HIT: Q9Z8J2, EVALUE 9.30e+00
aatttcccaagagatttgtgtagttatggatacagaagaagataacaaacatgtaggtcatcttcttgaagaagtgctgaaaagtgaattaaatgtaagtattcaaagac

SEQ ID NO: 31056 - DNA, 124 bp, Homo sapiens
  MAP TO AC004982.1; EXPRESSED IN LUNG, SIGNAL = 0.55; EXPRESSED IN BONE MARROW, SIGNAL = 0.66; EXPRESSED IN ADULT LIVER, SIGNAL = 0.59; SWISSPROT HIT: Q80905, EVALUE 1.40e+00
ctgggccattaaaggcaatgaacaccacctcttcgaaccctgggttgaaaaactttctcctccaggtttggacaggtttatctgagtagctggggattgttacagctacttcaataactgatcc

SEQ ID NO: 31057 - DNA, 80 bp, Homo sapiens
  MAP TO AC004888.1; EXPRESSED IN BONE MARROW, SIGNAL = 0.74; EXPRESSED IN LUNG, SIGNAL = 0.51; EXPRESSED IN ADULT LIVER, SIGNAL = 0.54; NT HIT: AJ010969.1, EVALUE 6.00e-38; EST_HUMAN HIT: AA452499.1, EVALUE 9.50e-01
ggatccgggcagccaaaagcggaagcgcaaatgcttacatgcagagcaaacggaatggtttactcagtaatcagctgcag

SEQ ID NO: 31058 - DNA, 303 bp, Homo sapiens
  MAP TO AC004626.1; EXPRESSED IN PLACENTA, SIGNAL = 0.59; EXPRESSED IN LUNG, SIGNAL = 0.67; EXPRESSED IN BONE MARROW, SIGNAL = 0.56; EXPRESSED IN ADULT LIVER, SIGNAL = 0.48; EST_HUMAN HIT: BE549744.1, EVALUE 5.00e-46; SWISSPROT HIT: O14746, EVALUE 1.40e+00
ttcctcatcattcaccaagaagaaccagcgaaacttcacaaccaacggactgcagttggtgatggtaacgtagcgaatgagctcagtatcgttcaggatgcagccaaaatccagctcctttgtctcaaagctgaggttggggtaatgcacttctccgcgcaggtccaggctgtctatctgagggtgttccacatacttaattgctagaatttcttctgccacccagttgttcagatcgtttctgtaggaagggtcaaacttgatcagcaggtttttttcttcatcaatttccagtttaatagg

SEQ ID NO: 31059 - DNA, 120 bp, Homo sapiens
  MAP TO AC004080.1; EXPRESSED IN LUNG, SIGNAL = 0.51; EXPRESSED IN ADULT LIVER, SIGNAL = 0.43; SWISSPROT HIT: P20126, EVALUE 2.40e+00
ggtgccctgcagggactggttgcccaaaaacctctcactgaagaaaaaaaccgcagctaggtttttctgggtggggaactggatgccagcctggtccacgcggctctgggctcccagcat

SEQ ID NO: 31060 - DNA, 158 bp, Homo sapiens
  MAP TO AC000113.1; EXPRESSED IN LUNG, SIGNAL = 0.64; EXPRESSED IN BONE MARROW, SIGNAL = 0.51; EXPRESSED IN ADULT LIVER, SIGNAL = 0.62; SWISSPROT HIT: P19704, EVALUE 4.00e+00; NT HIT: X58434.1, EVALUE 3.60e-01; EST_HUMAN HIT: F08745.1, EVALUE 1.40e-01
tcttaatcaaagcagtgggaccagggtcatctccacctgctgtgagcgcaaattcaacattgtgtttgcaggaagtgagaccacagggtttaggctttggagccagaccagcgtaggtttaaattccagttttaccacttgctcactgtggaccttag

SEQ ID NO: 31061 - DNA, 145 bp, Homo sapiens
  MAP TO AC005007.1; EXPRESSED IN BONE MARROW, SIGNAL = 0.55; EXPRESSED IN LUNG, SIGNAL = 0.57; EXPRESSED IN ADULT LIVER, SIGNAL = 0.62; EXPRESSED IN PLACENTA, SIGNAL = 0.66; EXPRESSED IN FETAL LIVER, SIGNAL = 0.72; NT HIT: gi11421326, EVALUE 2.00e-76; EST_HUMAN HIT: BE254599.1, EVALUE 3.00e-76
gtgcttctggtgatagttgcttctctctctcttgcaaagacattttacaataggactgtagagccaagtagttttttctcttccactttctgtctaacctatctgcatgttgcttacaataagcaaagaatggatctgctatatc

SEQ ID NO: 31062 - DNA, 476 bp, Homo sapiens
  MAP TO AC003093.1; EXPRESSED IN BONE MARROW, SIGNAL = 0.67; EXPRESSED IN ADULT LIVER, SIGNAL = 0.54; EXPRESSED IN PLACENTA, SIGNAL = 0.65; EXPRESSED IN LUNG, SIGNAL = 0.71; EXPRESSED IN FETAL LIVER, SIGNAL = 0.67; SWISSPROT HIT: P26992, EVALUE 2.90e+00; NT HIT: AJ006345.1, EVALUE 1.20e+00; EST_HUMAN HIT: D29214.1, EVALUE 2.90e-02
gtgagcaggacaaggcccatgaaggtcttactgacattgctcaagggctccatacacctttacttaagaatcaaatcaacatctcctgccacaaacaaaacatgtacaaagaacagcctgtgtgctatgcagacttctccgtagcccagctacacgtctggatcagcacttattttggggaacacgggttgcatgcaagaaccagagccccgccgactttcactggaggtggtcagtcgctccacggtggagttcagaatggtgaccacgcaggtgcctacctcctccacgggagaggaaaacaagagctcaaacaaaacatcatgctgcacgtggaaacgccaaggacttcgcctccttcctgcagctctgtggctccctgtctggctctcagcaagctgcatcacaccttccctccccgggagctctggcgcttgccagatttgctaggcaggctctatacttattgcaagtgg

SEQ ID NO: 31063 - DNA, 92 bp, Homo sapiens
  MAP TO AC004739.1; EXPRESSED IN LUNG, SIGNAL = 0.57; EXPRESSED IN ADULT LIVER, SIGNAL = 0.58; EXPRESSED IN BONE MARROW, SIGNAL = 0.54; NT HIT: AB042297.1, EVALUE 3.00e-12; EST_HUMAN HIT: AA832070.1, EVALUE 1.00e-09; SWISSPROT HIT: P08547, EVALUE 7.00e-05
gtcatcaggaaaatgcaaatcaaatccacaatgagatatcacttcccacacacgaggatgattataataaagacaggtaataacaggtgttg

SEQ ID NO: 31064 - DNA, 128 bp, Homo sapiens
  MAP TO AC006352.3; EXPRESSED IN PLACENTA, SIGNAL = 1.7; EXPRESSED IN BONE MARROW, SIGNAL = 4.1; EXPRESSED IN ADULT LIVER, SIGNAL = 0.92; EST_HUMAN HIT: AW406939.1, EVALUE 2.00e-43; SWISSPROT HIT: P23083, EVALUE 3.00e-14; NT HIT: X92211.1, EVALUE 3.00e-66
cccacttcctggtgcagctggtgcagtctggggctgaggtgaagaagcctggggcctcagtgaaggtctcctgcaaggcttctggatacaccttcacctactgctacttgcactgggtgcgatgggtc

SEQ ID NO: 31065 - DNA, 194 bp, Homo sapiens
  MAP TO AC004129.1; EXPRESSED IN LUNG, SIGNAL = 0.44; EXPRESSED IN ADULT LIVER, SIGNAL = 0.53; NT HIT: M19870.1, EVALUE 4.50e-01; EST_HUMAN HIT: T03080.1, EVALUE 3.00e-37; SWISSPROT HIT: P49898, EVALUE 4.40e-01
aggcccgcgagtgacgtcacctctcccgacaccacctcgttgtcgtacgaccaaaggcctgtcgtaacggccgggaaaagcctcgagaagaagggcacgcacgccgtacaccctaacatgctcgccagcatgcgcgcgcaggtccttggcgcaggcattgggactggagccaatgaggtgcggcgacgttactg

SEQ ID NO: 31066 - DNA, 163 bp, Homo sapiens
  MAP TO AC005304.1; EXPRESSED IN BONE MARROW, SIGNAL = 0.61; EXPRESSED IN ADULT LIVER, SIGNAL = 0.68; EXPRESSED IN PLACENTA, SIGNAL = 0.73; EXPRESSED IN LUNG, SIGNAL = 0.62; EST_HUMAN HIT: AI762827.1, EVALUE 1.40e-01; SWISSPROT HIT: P12859, EVALUE 4.00e+00
ctgagagcgtatccataagcaattctattaaggatatcagaggccctcaacgtgtactggagagtcagcacttgaaaaccaacatctaagcaaggttcttccagattctcagcttgagcaataacaagaatagctacaagcagctgagcaaagtctagcatca

SEQ ID NO: 31067 - DNA, 157 bp, Homo sapiens
  MAP TO AC002529.1; EXPRESSED IN PLACENTA, SIGNAL = 0.63; EXPRESSED IN BONE MARROW, SIGNAL = 0.52; EXPRESSED IN ADULT LIVER, SIGNAL = 0.43; EXPRESSED IN LUNG, SIGNAL = 0.5; SWISSPROT HIT: Q60591, EVALUE 3.00e+00; NT HIT: AL163303.2, EVALUE 2.30e-02
aagctggagcagccaggatgccggcagcagtgtctcaaggataagcaggacaacggagcccttgacttggcccatgaaacctttctttcctcttaggccttggtttggaagggggattgtgatggcagagcctgactccaagatctctgagatgccc

SEQ ID NO: 31068 - DNA, 159 bp, Homo sapiens
  MAP TO AC004981.1; EXPRESSED IN ADULT LIVER, SIGNAL = 0.43; EXPRESSED IN PLACENTA, SIGNAL = 0.63; EST_HUMAN HIT: T53770.1, EVALUE 1.40e-01
tttagatggtggtagagaggagggcactaatgtcctaaataaaggccaagaaactgaggtttgctgtgaaaatggatttctctttagtaagaccattaaaaatgaggttcattcatttaacaggtattcaaagaatgattaacatatggttaacactgc

SEQ ID NO: 31069 - DNA, 201 bp, Homo sapiens
  MAP TO AC000001.1; EXPRESSED IN LUNG, SIGNAL = 0.42; EXPRESSED IN ADULT LIVER, SIGNAL = 0.44; EST_HUMAN HIT: AW984065.1, EVALUE 2.80e+00; SWISSPROT HIT: P45015, EVALUE 5.00e+00; NT HIT: AE000297.1, EVALUE 1.00e-109
atgtcgtttggcggtcattttcgccattaccgcttgtctgtctgctggcgttatcgcttcattcggcctgaacacaaaacggcgttcacagctcgctttccagtcgataaccgcctgggtcagatggtcgccaaaccctttcacttgcttaacgccacgacgggtaacatctgcggctgtttcaataccaaaagaccgtaa

SEQ ID NO: 31070 - DNA, 89 bp, Homo sapiens
  MAP TO AC005221.1; EXPRESSED IN PLACENTA, SIGNAL = 2.3; EXPRESSED IN ADULT LIVER, SIGNAL = 0.45; EXPRESSED IN LUNG, SIGNAL = 0.59; EXPRESSED IN BONE MARROW, SIGNAL = 0.65; NT HIT: AL161563.2, EVALUE 2.90e+00; EST_HUMAN HIT: BF125690.1, EVALUE 1.80e-02
cctgttggcttccaattggagaaaatgcaagagatgtgacagttgggcctggatgtgccactgtggcctggttctcgaccctcacaaaa

SEQ ID NO: 31071 - DNA, 133 bp, Homo sapiens
  MAP TO AC004894.1; EXPRESSED IN ADULT LIVER, SIGNAL = 0.44; EXPRESSED IN PLACENTA, SIGNAL = 0.6; EXPRESSED IN LUNG, SIGNAL = 0.49; SWISSPROT HIT: Q61767, EVALUE 9.20e+00
aaagtcagaaatagaatctccatcttctgatatttagtccattgggtttggtttccagtggctttggtttctttcatattaccaagctgcttcaatatcaggttatcattcagcaacatcaatattattgtta

SEQ ID NO: 31072 - DNA, 247 bp, Homo sapiens
  MAP TO AC004869.1; EXPRESSED IN PLACENTA, SIGNAL = 0.68; EXPRESSED IN BONE MARROW, SIGNAL = 0.59; EXPRESSED IN ADULT LIVER, SIGNAL = 0.55; EXPRESSED IN LUNG, SIGNAL = 0.59; EST_HUMAN HIT: BE871911.1, EVALUE 5.70e-02; SWISSPROT HIT: P22808, EVALUE 1.90e-01
agccatagctcattagttgtctggctcccattgggatatgaacaaaataaaccaccattcccattacgatcctcacagccttgttccccaaagtgctcattttcatcttatatttcttcttccattttctagacatcattggcattctagttttccaaatcagaaatgttatgatcctcattgctcttttaccttacatatgcaatttgtcagaaaagcaccgattcttctccttgtttccttcttg

SEQ ID NO: 31073 - DNA, 87 bp, Homo sapiens
  MAP TO AC005772.1; EXPRESSED IN LUNG, SIGNAL = 0.46; EXPRESSED IN PLACENTA, SIGNAL = 0.67; EXPRESSED IN ADULT LIVER, SIGNAL = 0.61; EST_HUMAN HIT: BF683714.1, EVALUE 1.10e+00
actgattctgtggctgaatttacaagaagaagcagaggaaagagagacggtagcaggggaggaacaaaagtcaattgttaccaatag

SEQ ID NO: 31074 - DNA, 276 bp, Homo sapiens
  MAP TO AB019440.1; EXPRESSED IN PLACENTA, SIGNAL = 0.67; EXPRESSED IN LUNG, SIGNAL = 0.73; EXPRESSED IN HELA, SIGNAL = 2.2; EXPRESSED IN ADULT LIVER, SIGNAL = 0.62; EST_HUMAN HIT: AW405627.1, EVALUE 0.00e+00; NT HIT: M99637.1, EVALUE 0.00e+00; SWISSPROT HIT: P23083, EVALUE 2.00e-39
gaggtgaagaagcctggggcctcagtgaaggtctcctgcaaggcttctggatacaccttcaccagttatgatatcaactgggtgcgacaggccactggacaagggcttgagtggatgggatggatgaaccctaacagtggtaacacaggctatgcacagaagttccagggcagagtcaccatgaccaggaacacctccataagcacagcctacatggagctgagcagcctgagatctgaggacacggccgtgtattactgtgcgagaggcacagtg

SEQ ID NO: 31075 - DNA, 115 bp, Homo sapiens
  MAP TO AC003083.1; EXPRESSED IN LUNG, SIGNAL = 0.67; EXPRESSED IN PLACENTA, SIGNAL = 0.63; EXPRESSED IN ADULT LIVER, SIGNAL = 0.56; SWISSPROT HIT: P08547, EVALUE 5.40e+00; EST_HUMAN HIT: AA688423.1, EVALUE 2.00e-06; NT HIT: AJ006345.1, EVALUE 1.00e-03
aaaaataggcaaattgagctttgtctagacttaaaacttttgtatgttgaagaacactatgaagaaagtgaaaagacagcccacaaaataagctattttgcatctaatatatctg

SEQ ID NO: 31076 - DNA, 95 bp, Homo sapiens
  MAP TO AC005681.1; EXPRESSED IN LUNG, SIGNAL = 0.58; EXPRESSED IN ADULT LIVER, SIGNAL = 0.65; EXPRESSED IN PLACENTA, SIGNAL = 0.64; EXPRESSED IN FETAL LIVER, SIGNAL = 0.68; EXPRESSED IN BONE MARROW, SIGNAL = 0.79; EST_HUMAN HIT: AA605132.1, EVALUE 7.40e-02
ctactttccattttcatttctcagaatcaggcagattgatagaaacaagagtaattttgaagaaaatgtcagaataacacactgggaagatatag

SEQ ID NO: 31077 - DNA, 107 bp, Homo sapiens
  MAP TO AC005324.1; EXPRESSED IN LUNG, SIGNAL = 0.64; EXPRESSED IN ADULT LIVER, SIGNAL = 0.41; SWISSPROT HIT: P22872, EVALUE 3.20e+00; EST_HUMAN HIT: BE971689.1, EVALUE 3.40e-01
atgtcaatttccttccagttctgccctctgaggaccctgccctttcccaaaaggggtatcttaagaaggaaaatatggctgctctttgccggacagcagagtcccag

SEQ ID NO: 31078 - DNA, 91 bp, Homo sapiens
  MAP TO AC005690.7; EXPRESSED IN PLACENTA, SIGNAL = 0.78; EXPRESSED IN LUNG, SIGNAL = 0.6; EXPRESSED IN BONE MARROW, SIGNAL = 0.75; EXPRESSED IN ADULT LIVER, SIGNAL = 0.54; NT HIT: U93688.1, EVALUE 1.90e-01
gctgctgtcagcatatgaggcaataagagaggtaagcaatcacaaaaatcttccctccttccagattgttactctggacccagtgacaaag

SEQ ID NO: 31079 - DNA, 268 bp, Homo sapiens
  MAP TO AC004664.1; EXPRESSED IN LUNG, SIGNAL = 0.65; EXPRESSED IN BONE MARROW, SIGNAL = 0.62; EXPRESSED IN ADULT LIVER, SIGNAL = 0.68; SWISSPROT HIT: P34926, EVALUE 3.80e-01; EST_HUMAN HIT: AW996499.1, EVALUE 0.00e+00; NT HIT: gi11435662, EVALUE 0.00e+00
acccctttggcagatgcagaaaacggaggcacagagagggcgtgacttgtctgaggtcacacgtgaatcagtcatggagatgggaccagaacccaggcttcccagctccaagtccagggctttttctgcatctgatgttttcaggggtgagacagggaccatcagggcacaaagaggggctctgggtgggcagggcagagacgagtgcagtcctgttgagcagcaacaagtgtgggctcagctgctgcagccacgggtgcaggtgtgg

SEQ ID NO: 31080 - DNA, 112 bp, Homo sapiens
  MAP TO AC003070.1; EXPRESSED IN LUNG, SIGNAL = 0.57; EXPRESSED IN ADULT LIVER, SIGNAL = 0.45; EST_HUMAN HIT: AI832252.1, EVALUE 7.00e-49; SWISSPROT HIT: Q92622, EVALUE 3.70e-01; NT HIT: AB002354.2, EVALUE 4.00e-49
tgttcctggtacttgcgccggcgggcacagcgggggcagcccttcttcaccacagcctggcagctctggtggaagacggtcttgcactcggcacacctggggagagagcagt

SEQ ID NO: 31081 - DNA, 117 bp, Homo sapiens
  MAP TO AC002990.1; EXPRESSED IN LUNG, SIGNAL = 0.55; EXPRESSED IN BONE MARROW, SIGNAL = 0.51; EXPRESSED IN ADULT LIVER, SIGNAL =   4; EST_HUMAN HIT: AA626274.1, EVALUE 3.80e-01; SWISSPROT HIT: Q01279, EVALUE 1.40e+00; NT HIT: AF003249.1, EVALUE 1.00e+00
gtgaatgctgtggttccagggagattgggagcctcgacctacctgcagttaatactgaggttagaatgtccgcgccttgtcatcctctcctacttcataatcctgggctctaccagg

SEQ ID NO: 31082 - DNA, 86 bp, Homo sapiens
  MAP TO AC005728.1; EXPRESSED IN LUNG, SIGNAL = 0.44; EXPRESSED IN ADULT LIVER, SIGNAL = 0.57; NT HIT: gi11439575, EVALUE 2.00e-41; EST_HUMAN HIT: AU139072.1, EVALUE 4.10e+00; SWISSPROT HIT: P17752, EVALUE 3.00e-11
tcttgaaaagttgtgataagacattcctgtttgcaggtaatcttgggatcaaagggctttactttggcatgtccagaaagtgcatg

SEQ ID NO: 31083 - DNA, 221 bp, Homo sapiens
  MAP TO AC005045.2; EXPRESSED IN ADULT LIVER, SIGNAL = 0.94; EXPRESSED IN LUNG, SIGNAL = 0.67; EXPRESSED IN BONE MARROW, SIGNAL = 0.51; SWISSPROT HIT: P21439, EVALUE 8.00e-34; NT HIT: gi9961253, EVALUE 1.00e-111; EST_HUMAN HIT: AI913320.1, EVALUE 3.10e+00
tatcagaggctttacctgtggtaatttcatgataaactcataggcgttggcctctttgacagctttctttatctcatccatggttacatttccacggccataacaaatattttcagcaattgtggtggaaaacagcaccggctcctgactcaccacaccaatgatttccctcagatagtttacattaaagttcctaatatcctgcccatcaatgttaatct

SEQ ID NO: 31084 - DNA, 243 bp, Homo sapiens
  MAP TO AC004922.2; EXPRESSED IN LUNG, SIGNAL = 0.95; EXPRESSED IN BONE MARROW, SIGNAL =   1; EXPRESSED IN PLACENTA, SIGNAL = 1.6; EXPRESSED IN FETAL LIVER, SIGNAL = 0.75; EXPRESSED IN ADULT LIVER, SIGNAL = 0.87; NT HIT: gi11420756, EVALUE 1.00e-125; SWISSPROT HIT: O15143, EVALUE 2.00e-41; EST_HUMAN HIT: BE278823.1, EVALUE 1.00e-125
cagtcattctcctgctcgaaataacagatggagatcacacgagagccgctgcccacagcaaacttgttctcgttgggggcccagcgcacgcagcgggcagcccggttgatccgcaggatgaccagcgtgggcttccatgtgcggcccttcagcgtccacacgtaggcgttgcggtctgtgccgcaggtcacaatacggttactctcgggggcccagtcgatgcctgtggggggatggagggaa

SEQ ID NO: 31085 - DNA, 104 bp, Homo sapiens
  MAP TO AC005184.1; EXPRESSED IN ADULT LIVER, SIGNAL = 0.47; EXPRESSED IN PLACENTA, SIGNAL = 0.59; EXPRESSED IN LUNG, SIGNAL = 0.56; EST_HUMAN HIT: BF002935.1, EVALUE 1.30e+00; NT HIT: M81182.1, EVALUE 8.80e-01; SWISSPROT HIT: P43599, EVALUE 9.40e+00
atgtggtttgtgtcatcgtcttggtcctgcccttgagtattatggaattcagtaatatgtgtgtgatcttccttcttcacactcaggcaggatggtccctgcat

SEQ ID NO: 31086 - DNA, 466 bp, Homo sapiens; identical to SEQ ID NO: 14549
  MAP TO AC006287.1; EXPRESSED IN LUNG, SIGNAL = 0.57; EXPRESSED IN BONE MARROW, SIGNAL = 0.57; EXPRESSED IN ADULT LIVER, SIGNAL = 0.56; SWISSPROT HIT: Q18491, EVALUE 3.30e-01; EST_HUMAN HIT: AW842798.1, EVALUE 2.00e-12; NT HIT: AL161539.2, EVALUE 4.60e+00

SEQ ID NO: 31087 - DNA, 246 bp, Homo sapiens
  MAP TO AC004893.1; EXPRESSED IN BONE MARROW, SIGNAL = 0.49; EXPRESSED IN ADULT LIVER, SIGNAL = 0.53; EXPRESSED IN LUNG, SIGNAL = 0.62; NT HIT: gi11420658, EVALUE 0.00e+00; SWISSPROT HIT: P38811, EVALUE 4.00e-07; EST_HUMAN HIT: AW499551.1, EVALUE 0.00e+00
aatagctctcagcatgatcccagttcaaataacgctatgcttggggttcatgcatcagcttcagcgatcatccagtatggaaaaatcgcccggaaacaaggactggtcaatgtagctctggatatattaagtcggattcatactattccaactgttcctatcgtggattgcttccagaagattcgacagcaagttaaatgctacctccagctggcaggcgtcatgggcaaaaacgagtgcatgcag

SEQ ID NO: 31088 - DNA, 176 bp, Homo sapiens
  MAP TO AC006411.1; EXPRESSED IN PLACENTA, SIGNAL = 0.92; EXPRESSED IN LUNG, SIGNAL = 0.75; EXPRESSED IN BONE MARROW, SIGNAL = 0.85; EXPRESSED IN ADULT LIVER, SIGNAL = 0.44; SWISSPROT HIT: P46940, EVALUE 6.00e-24; NT HIT: gi4506786, EVALUE 1.00e-87; EST_HUMAN HIT: AA191536.1, EVALUE 2.00e-87
ttcaggactttgtcgctgcagggtagccagctccttctgatagagatcggcggcaaatggatacacctggggcagctgggcttcgggattcatcagttccaaaacagtcttctcagcaacacccttctggattgcagcattaatcagtgctactgctgccaatcctgtgtaaaaaa

SEQ ID NO: 31089 - DNA, 131 bp, Homo sapiens
  MAP TO AC004126.1; EXPRESSED IN ADULT LIVER, SIGNAL = 0.47; EXPRESSED IN LUNG, SIGNAL = 0.5; SWISSPROT HIT: P53188, EVALUE 1.20e-01; EST_HUMAN HIT: AW953543.1, EVALUE 6.00e-68; NT HIT: gi9625578, EVALUE 4.50e+00
ctggcggcgcctctccttctcctcctccaggtgacgggcaaagtccttggccagcttcctctcctgtcgttccttcatcttccgctgccacgatgtgcgcaggggcttgtcctgaagcatctgggagaatc

SEQ ID NO: 31090 - DNA, 187 bp, Homo sapiens
  MAP TO AC005725.1; EXPRESSED IN BONE MARROW, SIGNAL = 0.61; EXPRESSED IN ADULT LIVER, SIGNAL = 0.72; EXPRESSED IN PLACENTA, SIGNAL = 0.61; EXPRESSED IN LUNG, SIGNAL = 0.78; NT HIT: AE001212.1, EVALUE 1.70e+00; EST_HUMAN HIT: AV730347.1, EVALUE 4.20e-02
tggggaggcggcatttaagcagggatttgaagggtatggaggagtcagccaggtcaacagggtgagctgacaactgggaaattgaggtggtgttgctaagccttccaaacagcagcaacaatctctgcaatctttctgagaactcagggagattagggaagaccagcaagtcaagagcctggtgatg

SEQ ID NO: 31091 - DNA, 301 bp, Homo sapiens
  MAP TO AC005209.1; EXPRESSED IN BONE MARROW, SIGNAL = 0.64; EXPRESSED IN ADULT LIVER, SIGNAL = 0.46; EXPRESSED IN LUNG, SIGNAL = 0.42; SWISSPROT HIT: P23098, EVALUE 4.00e-22; EST_HUMAN HIT: BE003199.1, EVALUE 1.10e+00; NT HIT: AB002355.1, EVALUE 0.00e+00
cgtggtaacggatgttgagctcatgcctttgtttcctgtacagcgtcacttcagcgtgtttgtcctctccttcccgggggcagatgccctgtcctctatctacagcatcatcctcactcagcatctgaagctcggaaacttcccggcgtccctgcagaaatccatccccccactgatcgatctggccctcgccttccaccagaaaattgctaccaccttcctacccacaggaatcaaattccactacatcttcaacctcagagattttgccaacattttccaggtgagttcatcggctccg

SEQ ID NO: 31092 - DNA, 182 bp, Homo sapiens
  MAP TO AC005040.2; EXPRESSED IN BONE MARROW, SIGNAL = 0.52; EXPRESSED IN ADULT LIVER, SIGNAL = 0.47; EXPRESSED IN PLACENTA, SIGNAL = 0.81; EXPRESSED IN LUNG, SIGNAL = 0.61; EST_HUMAN HIT: AI358466.1, EVALUE 2.50e+00; NT HIT: AL163252.2, EVALUE 4.20e-01; SWISSPROT HIT: P43804, EVALUE 3.00e+00
tcgcccaattagatgaggtcctgaatagaacaaacattgaccttgctggaacaagaaggaattcggctagcaggtggccatcagactcgactgccatcaaaaaaattgcaacagcagcatttttcttggtctctaattttcctgcctaccctgagatcatggacttagcctccgtaatcatg

SEQ ID NO: 31093 - DNA, 110 bp, Homo sapiens
  MAP TO AC000120.1; EXPRESSED IN ADULT LIVER, SIGNAL = 0.46; SWISSPROT HIT: Q16850, EVALUE 3.00e-14; EST_HUMAN HIT: AA452440.1, EVALUE 2.00e-55; NT HIT: gi4503242, EVALUE 1.00e-55
catctagtaaagtttggagaatgtcatcaattttttcttgagactgtctgcgtttctggattgccttatagaaaatatccttgatttcccgatgagctctgtccctgcgt

SEQ ID NO: 31094 - DNA, 310 bp, Homo sapiens
  MAP TO AC002978.1; EXPRESSED IN BONE MARROW, SIGNAL = 0.57; EXPRESSED IN LUNG, SIGNAL = 0.55; EXPRESSED IN ADULT LIVER, SIGNAL = 0.57; SWISSPROT HIT: Q64092, EVALUE 1.00e-01; NT HIT: U33846.1, EVALUE 7.60e-01; EST_HUMAN HIT: AA378327.1, EVALUE 3.00e-38
atgagcacccccagaggaaaaatatcaaacagaagatgggaccctgaatcccaaggccaggaacaaaggcaggtcaccacctgagtccccttccaatgcttcacctctgccaggcccggcctttgaattagatagccaggaagccaccggaaattcagccctttcagaagcagcacagaaaaccacagtttctgggcagccttgtctaccatcatccaggaccatatatttagcactagccaaggtgctcacgtttgaaatcccatctgccggaagaaaggttaccatgacagaatgtcaagttcgaaga

SEQ ID NO: 31095 - DNA, 217 bp, Homo sapiens
  MAP TO AC006071.1; EXPRESSED IN ADULT LIVER, SIGNAL = 0.51; EXPRESSED IN LUNG, SIGNAL = 0.49; SWISSPROT HIT: Q99062, EVALUE 2.40e-01; NT HIT: AJ277557.1, EVALUE 1.00e-119
cactgggtggccatggtggttgaccagcagttgtgggagtgagatgaacgacatggcctcattcatccgttcctggggatttagatactgtctttgtgccagctgtcccacctgcgttgcctcggcccgggactgccctctgagctccagacactcagacccgatgtatctgtccctggggtgctggtttccttgtgcatggcagtgctgtctggtg

SEQ ID NO: 31096 - DNA, 128 bp, Homo sapiens
  MAP TO AC005961.1; EXPRESSED IN BONE MARROW, SIGNAL = 0.54; EXPRESSED IN ADULT LIVER, SIGNAL = 0.52; EXPRESSED IN LUNG, SIGNAL = 0.6; EST_HUMAN HIT: AA995908.1, EVALUE 1.10e-01; SWISSPROT HIT: P35995, EVALUE 1.80e+00; NT HIT: AY005150.1, EVALUE 4.40e+00
agaggaggaggcccatcttctgctgcttgtgctgcctctgaaggaaagtgggcccaaggaggcatttggttttctgtggcagctgtagcagaggcccccttgactcatgcctcaattccattagtaat

SEQ ID NO: 31097 - DNA, 268 bp, Homo sapiens
  MAP TO AC006079.1; EXPRESSED IN PLACENTA, SIGNAL = 0.74; EXPRESSED IN LUNG, SIGNAL = 0.64; EXPRESSED IN BONE MARROW, SIGNAL = 0.84; EXPRESSED IN ADULT LIVER, SIGNAL = 0.78; SWISSPROT HIT: Q13469, EVALUE 6.50e-01; NT HIT: X04769.1, EVALUE 6.50e-01
tcaatggtacccttatgcctgggaattttttccccaatttagcaaatgccatcaagtcttcatctctgatagaaagaatcctgagcatatcctctatcagtttattgcctcttctcataactggagccacttccactcccttaagaggcaaatggcagaaaaggtgggagacgtcttggtgttgacttgcactgctaatgaacaggttaacttgcagggggctgtgcaaatgctttttcacatgcatgggcacttcttccatggctct

SEQ ID NO: 31098 - DNA, 144 bp, Homo sapiens
  MAP TO AC005969.4; EXPRESSED IN ADULT LIVER, SIGNAL = 0.64; EXPRESSED IN BONE MARROW, SIGNAL = 0.76; EXPRESSED IN PLACENTA, SIGNAL = 0.64; EXPRESSED IN LUNG, SIGNAL = 0.61; SWISSPROT HIT: P04445, EVALUE 4.00e+00; NT HIT: D84281.1, EVALUE 1.30e+00; EST_HUMAN HIT: BE082528.1, EVALUE 1.00e-75
gggtcaggccccaagggtcggaatctctgtgctaccttccagaatactgaaacatttgagttccaagatgaagtgggagcacttttgttatctgtgtgccagactgtgagccaaggaattttgtgtttcttgccatcttacaag

SEQ ID NO: 31099 - DNA, 171 bp, Homo sapiens
  MAP TO AC005201.1; EXPRESSED IN ADULT LIVER, SIGNAL = 0.43; EXPRESSED IN LUNG, SIGNAL = 0.41; SWISSPROT HIT: P02895, EVALUE 1.30e+00; NT HIT: AL161577.2, EVALUE 3.90e-01; EST_HUMAN HIT: AA382700.1, EVALUE 3.80e-02
ttctttcaaggattccaattatacctatgttgctcttctttgcgattcttttatatttatcactatttctggccctgtttacctctgtgttcatttttgcttcattttcttgacttttctcatcttcctctgtattgtttagtacagttttggtcatatctctttctttct

SEQ ID NO: 31100 - DNA, 201 bp, Homo sapiens
  MAP TO AC005342.1; EXPRESSED IN PLACENTA, SIGNAL = 0.62; EXPRESSED IN LUNG, SIGNAL = 0.74; EXPRESSED IN BONE MARROW, SIGNAL = 0.62; EXPRESSED IN ADULT LIVER, SIGNAL = 0.64; SWISSPROT HIT: P32742, EVALUE 2.20e+00; EST_HUMAN HIT: BE546494.1, EVALUE 7.00e-01; NT HIT: AJ271741.1, EVALUE 1.20e-01
agtagggctgggtatgcacaccagacagttctagaagatgctaacaaaggtttctctcactctgcaattatcaccatgtctggccttctgaagggggagaccgagcagagtgtttcttttcagaagatccaggaagtacaaatcctatcaaatagcactgccttctcccgccttgcaattaaggtggtgctttacccataa

SEQ ID NO: 31101 - DNA, 88 bp, Homo sapiens
  MAP TO AC005216.1; EXPRESSED IN ADULT LIVER, SIGNAL = 0.44; EXPRESSED IN HELA, SIGNAL = 6.8; EXPRESSED IN LUNG, SIGNAL = 0.43; NT HIT: gi9625875, EVALUE 7.20e-01
aaaatacagaaatccagattgtaagcatcatgctaacgaccagcttgatgtcttcaaagatgttactgtcatgaaagatcaaaaaaag

SEQ ID NO: 31102 - DNA, 216 bp, Homo sapiens
  MAP TO AC003688.1; EXPRESSED IN LUNG, SIGNAL = 0.72; EXPRESSED IN BONE MARROW, SIGNAL = 0.72; EXPRESSED IN ADULT LIVER, SIGNAL = 0.65; EXPRESSED IN PLACENTA, SIGNAL = 0.72; EXPRESSED IN FETAL LIVER, SIGNAL = 0.7; SWISSPROT HIT: P49748, EVALUE 1.00e-32; EST_HUMAN HIT: BE546239.1, EVALUE 1.00e-109; NT HIT: L46590.1, EVALUE 1.00e-118
tgggccccctgagaagaagatgggcatcaaggcttcaaacacagcagaggtgttctttgatggagtacgggtgccatcggagaacgtgctgggtgaggttgggagtggcttcaaggttgccatgcacatcctcaacaatggaaggtttggcatggctgcggccctggcaggtaccatgagaggcatcattgctaaggcggtgagtaccctgcccga

SEQ ID NO: 31103 - DNA, 149 bp, Homo sapiens
  MAP TO AC004976.1; EXPRESSED IN BONE MARROW, SIGNAL = 0.55; EXPRESSED IN LUNG, SIGNAL = 0.53; EXPRESSED IN FETAL LIVER, SIGNAL = 0.72; EXPRESSED IN ADULT LIVER, SIGNAL = 0.61; SWISSPROT HIT: P41250, EVALUE 3.00e-23; EST_HUMAN HIT: BE302249.1, EVALUE 1.00e-78; NT HIT: D30658.1, EVALUE 9.00e-79
catggagtatctcacaaagtagacgattcctctgggtcaatcggaaggcgctatgccaggactgatgagattggcgtggcttttggtgtcaccattgactttgacacagtgaacaagaccccccacactgcaactctgagggaccgtga

SEQ ID NO: 31104 - DNA, 461 bp, Homo sapiens
  MAP TO AC005325.1; EXPRESSED IN LUNG, SIGNAL = 0.51; EXPRESSED IN BONE MARROW, SIGNAL = 0.53; EXPRESSED IN ADULT LIVER, SIGNAL = 0.53; SWISSPROT HIT: Q14934, EVALUE 1.90e-01; EST_HUMAN HIT: AA399959.1, EVALUE 0.00e+00; NT HIT: gi10946851, EVALUE 4.50e+00
ggctgggtccattctcatgacggtgaataccctacaggggaaaaaaatgatagagagtggcctccagtctggagacttttccctgtcccagtcatggccctcctgcctcccaccacccgctgacttggagatcctgcagcagaaggtggccggggtgcaacgggaactggaggactttaagaaagaggcattgaagtccattcattaccttgaagacgccttctgcgagatgaatggagccctggtgcaacaggaggagcaggcggctcgcgtgaggcagcggctaagggaggaggaggaccgtggcatcgtgcgcaacaaggttctcaccttcctgttgccgcgcgagaaacagctccgggagcactgcaagcggctggaggacctgctgctggacaggggacgtgacgccctgcgtgccaccaagaagagccaggctgactgaacctcgtgggtggcac

SEQ ID NO: 31105 - DNA, 238 bp, Homo sapiens
  MAP TO AC004982.1; EXPRESSED IN LUNG, SIGNAL = 0.63; EXPRESSED IN BONE MARROW, SIGNAL = 0.53; EXPRESSED IN ADULT LIVER, SIGNAL = 0.66; EXPRESSED IN PLACENTA, SIGNAL = 0.6; NT HIT: gi11421140, EVALUE 0.00e+00; SWISSPROT HIT: P75775, EVALUE 3.40e+00; EST_HUMAN HIT: AL046347.2, EVALUE 0.00e+00
agacataattggagtgggttggataagcaaagtgatattcaaaatttaaatgaagagagaatcttagctttacagctttgtgggtggataaagaaaggaacggatgtagacgtggggccatttttgaactcccttgtacaagaaggggaatgggaaagagctgctgctgtggcattgttcaacttggatattcgccgagcaatccaaatcctgaatgaaggggcatcttctgaaaaag

SEQ ID NO: 31106 - DNA, 240 bp, Homo sapiens
  MAP TO AC000061.1; EXPRESSED IN ADULT LIVER, SIGNAL = 0.42; NT HIT: M55126.1, EVALUE 0.00e+00; SWISSPROT HIT: P13569, EVALUE 7.00e-42; EST_HUMAN HIT: AI990099.1, EVALUE 0.00e+00
gtgagccgagtctttaagttcattgacatgccaacagaaggtaaacctaccaagtcaaccaaaccatacaagaatggccaactctcgaaagttatgattattgagaattcacacgtgaagaaagatgacatctggccctcagggggccaaatgactgtcaaagatctcacagcaaaatacacagaaggtggaaatgccatattagagaacatttccttctcaataagtcctggccagagg

SEQ ID NO: 31107 - DNA, 313 bp, Homo sapiens
  MAP TO AC005053.1; EXPRESSED IN LUNG, SIGNAL = 1.5; EXPRESSED IN FETAL LIVER, SIGNAL = 0.87; EXPRESSED IN ADULT LIVER, SIGNAL = 0.57; EXPRESSED IN BONE MARROW, SIGNAL = 0.59; NT HIT: gi9558758, EVALUE 0.00e+00; SWISSPROT HIT: Q04121, EVALUE 7.70e+00; EST_HUMAN HIT: BE439545.1, EVALUE 0.00e+00
gagaccagcatgctaaaaagacctgtgcttttgcatttgcaccaaacagcccatgctgatgaatttgactgcccttcagaacttcagcacacacaggaactctttccacagtggcacttgccaattaaaatagctgctattatagcatctctgacttttctttacactcttctgagggaagtaattcaccctttagcaacttcccatcaacaatatttttataaaattccaatcctggtcatcaacaaagtcttgccaatggtttccatcactctcttggcattggtttacctgccaggtgtgatagcagcaa

SEQ ID NO: 31108 - DNA, 382 bp, Homo sapiens
  MAP TO AC004066.1; EXPRESSED IN LUNG, SIGNAL = 0.63; EXPRESSED IN ADULT LIVER, SIGNAL = 0.57; EXPRESSED IN PLACENTA, SIGNAL = 0.6; NT HIT: gi11437202, EVALUE 1.00e-123; SWISSPROT HIT: P25623, EVALUE 1.60e+00
aagcctccaaagcttgtctttgcctaatatggagcccaaagaagccactgggaaagaaaacatggtcaccaagaaaaagaatctggccttcttgaggtctagactctatatgctggagagaaggaagactgacactgtggttgagagcagtgtttctggggaccactctggcaccttgaggaggagccaatctgacaggactgaatacaaccagaaattacaaggtaaccaaaaagaaatcaattgtcccagttactgcactcccagctccatttctgctacgtttccaattgcaaagaaaacacacaaggcagaggggaaaattgaataccacctctccttcccacaaaataagaagatgaaagtaaatgtgacctataaa

SEQ ID NO: 31109 - DNA, 182 bp, Homo sapiens
  MAP TO AC003049.1; EXPRESSED IN PLACENTA, SIGNAL = 0.73; EXPRESSED IN LUNG, SIGNAL = 0.87; EXPRESSED IN FETAL LIVER, SIGNAL = 0.76; EXPRESSED IN BONE MARROW, SIGNAL = 0.66; EXPRESSED IN ADULT LIVER, SIGNAL = 0.63; EST_HUMAN HIT: BF222646.1, EVALUE 1.00e-05; SWISSPROT HIT: P34913, EVALUE 8.70e+00
ggtaatatggaggaggaagaggaggaagaggaagaagaagaggaggaagaggaacagaaggaggaggaggaaaaggaggaggaggaggatactctcaccatgcgttttctctgtgaccccagaatactctcagcatgtgaaaggctggcttcccattgccttttgccatgattggacgcttc

SEQ ID NO: 31110 - DNA, 163 bp, Homo sapiens
  MAP TO AC005207.1; EXPRESSED IN LUNG, SIGNAL = 0.67; EXPRESSED IN BONE MARROW, SIGNAL = 0.5; EXPRESSED IN PLACENTA, SIGNAL = 0.71; EXPRESSED IN ADULT LIVER, SIGNAL = 0.45; EST_HUMAN HIT: T07864.1, EVALUE 5.60e-01; NT HIT: gi11425291, EVALUE 4.00e-87; SWISSPROT HIT: P49593, EVALUE 6.00e-09
caaactacacgagatttgctgcagctgggtgaaagacttccccctccgcaggagaccccagctttattatgagacatcaatccatgccatcaaaaacatgcgcaggaaaatggaggacaaacatgtctgcattcctgactttaatatgctcttcaacctagag

SEQ ID NO: 31111 - DNA, 420 bp, Homo sapiens
  MAP TO AC006115.1; EXPRESSED IN LUNG, SIGNAL = 0.58; EXPRESSED IN ADULT LIVER, SIGNAL = 0.49; NT HIT: gi11526411, EVALUE 1.70e-02; SWISSPROT HIT: Q9UL58, EVALUE 1.00e-25; EST_HUMAN HIT: AI014264.1, EVALUE 4.00e-04
gatattcaataaacagaagcagccagttgcttcctccttctcaccttccttctcacatgcctgaataaagtttgccaccatggttcctgcctctttgctgttcttgggctgttttgacctcacccatgtctgaatctcctctggcagggtgctcagaaactgtgtcagcactagttgctctatcatctgctccttggtgaggatctctggctgcagccattgcaaacagagctcctggatttggctcacagcttgatgaggcccattcactgacaggtactgaaaatccccaaacttttgatgagaaactttcagtgtctctgtttctagtttcttctcttgaccacacacacaaaagatgtagggattcctcaagatatctgaaacccctgtcacatccagcatctctacaccttggcc

SEQ ID NO: 31112 - DNA, 191 bp, Homo sapiens
  MAP TO AC005066.1; EXPRESSED IN PLACENTA, SIGNAL = 0.64; EXPRESSED IN FETAL LIVER, SIGNAL = 0.7; EXPRESSED IN BONE MARROW, SIGNAL = 0.79; EXPRESSED IN ADULT LIVER, SIGNAL = 0.72; EXPRESSED IN LUNG, SIGNAL = 0.71; SWISSPROT HIT: P07219, EVALUE 7.60e-01; NT HIT: Z14098.1, EVALUE 1.10e-01
aggagaatacagaggaggaggcaattaattctgccagaataaatcagattgaaaatgagcctctgagcgagttattcaatcatggaaagaacatgagaagaaaagacagaaataagaggggaaatgccaagactggaagtgcaggtgcccagggcagagtcggctgtggtacctgaggcagtgttgagtgg

SEQ ID NO: 31113 - DNA, 104 bp, Homo sapiens
  MAP TO AC006083.1; EXPRESSED IN BONE MARROW, SIGNAL = 0.6; EXPRESSED IN FETAL LIVER, SIGNAL = 0.68; EXPRESSED IN ADULT LIVER, SIGNAL = 0.61; EXPRESSED IN PLACENTA, SIGNAL = 0.88; EXPRESSED IN LUNG, SIGNAL = 0.69; SWISSPROT HIT: P21345, EVALUE 9.40e+00; EST_HUMAN HIT: AA918505.1, EVALUE 3.30e-01; NT HIT: AF287967.1, EVALUE 2.20e-01
aataacagctgaggaccccactccagccaaacacaaaacaatcacaggtgataaaaacgtcaccaagagaacttctgtaatatgcacaacaatttcccccagat

SEQ ID NO: 31114 - DNA, 164 bp, Homo sapiens
  MAP TO AC005326.1; EXPRESSED IN LUNG, SIGNAL = 0.47; EXPRESSED IN ADULT LIVER, SIGNAL = 0.41; EST_HUMAN HIT: L44513.1, EVALUE 5.60e-01; SWISSPROT HIT: Q9VND8, EVALUE 1.80e+00
aggagctgggatttgcgaacatcctgatgatgggcaatcgacaggcttggaggagagtaaggagtctttctaaggaagaaaagagatcattggcaaagatgtggagggtgattcttgaagatagcaggaagacaatgatggctagaattgagagcatgtcttgg

SEQ ID NO: 31115 - DNA, 166 bp, Homo sapiens
  MAP TO AC004629.1; EXPRESSED IN LUNG, SIGNAL = 0.47; EXPRESSED IN ADULT LIVER, SIGNAL = 0.41; EST_HUMAN HIT: BF129444.1, EVALUE 2.20e+00; SWISSPROT HIT: Q09908, EVALUE 7.80e-01; NT HIT: AF033334.1, EVALUE 1.50e+00
tttcctgtttcattcactgtagcaaggaacctgggtagtatcatagatcccaccctatcaataatcctcatcaaattctgagggttctgcttccggaattcctcttgaatgtgatttctgctcattccacctgtcactatcattgttgagataattataatcatgt

SEQ ID NO: 31116 - DNA, 210 bp, Homo sapiens
  MAP TO AC005741.1; EXPRESSED IN BONE MARROW, SIGNAL = 0.55; EXPRESSED IN ADULT LIVER, SIGNAL = 1.1; EXPRESSED IN LUNG, SIGNAL = 0.54; EST_HUMAN HIT: AW854301.1, EVALUE 3.00e-34; SWISSPROT HIT: Q92351, EVALUE 1.30e+00; NT HIT: AJ271735.1, EVALUE 1.00e-50
ctggaggtggaaaatgcaattgacatgctgaagaatgcattagagtctcttcatagcagaattgatcaagcagaagagagaattagtgagcttaaagataggctatttgaaaatatacagtcagaggagacaaaggaaaaagaagaaagaaagaatgaagcatgcctacaagacctggaaaatagcctcagaagggtaaatctcagttat

SEQ ID NO: 31117 - DNA, 318 bp, Homo sapiens
  MAP TO AC002303.1; EXPRESSED IN BONE MARROW, SIGNAL = 0.53; EXPRESSED IN ADULT LIVER, SIGNAL = 0.46; EXPRESSED IN PLACENTA, SIGNAL = 0.62; EXPRESSED IN LUNG, SIGNAL = 0.57; SWISSPROT HIT: P07768, EVALUE 1.90e+00; EST_HUMAN HIT: BF569862.1, EVALUE 0.00e+00; NT HIT: gi11431469, EVALUE 0.00e+00
cttttgatgacctcattctccaccattgagctgtctaccacgatgatctgctccgggatcctgacatccacagaaatgaggcccagagagaagagggtcaggacggccacacaatttcctccagggccgtccagtgaaaaggccaccatgtcgtttgtgggctcgttattatcctggtctttgaaagagaaacgatcaggctggtccaacttgccggcagcccgcattctgtccaaaaactggaatgactccgtgcagatggtgcttggaaatcgccacgtaaaaatcctacagacaaaaagaaaggaagggcctgac

SEQ ID NO: 31118 - DNA, 264 bp, Homo sapiens
  MAP TO AC004033.3; EXPRESSED IN LUNG, SIGNAL = 0.64; EXPRESSED IN BONE MARROW, SIGNAL = 0.53; EXPRESSED IN ADULT LIVER, SIGNAL = 0.58; EST_HUMAN HIT: BF529931.1, EVALUE 1.00e-128; SWISSPROT HIT: Q13105, EVALUE 9.60e-02; NT HIT: Y08172.1, EVALUE 1.00e-02
atgcgatgggcctcgatgtgtctgccctccaccaccagcacaacatcgaagaggattccgctgtcccggagagccagcagccctcggagcagagcctgggagtgctgtgcgctgcggtaggtgttgttcacgcagtgtgggtgtgagggctgtgcaggcaacttgcagagctgggtgaactcctgctcctctgccatcctgacagccacaagatcccttacaactgtggcctgacagttggcaaaacaggggacaggggtgagc

SEQ ID NO: 31119 - DNA, 302 bp, Homo sapiens
  MAP TO AC006151.3; EXPRESSED IN ADULT LIVER, SIGNAL = 0.52; EXPRESSED IN LUNG, SIGNAL = 0.51; NT HIT: gi11431896, EVALUE 4.70e-02; EST_HUMAN HIT: BF028851.1, EVALUE 7.00e-02
atgctttgctattctagatcttaagctagatgatatatttcttaaagctactgatattgtattaaaagaggttgctgagatactcagtagtgtatacctgaaatctgtttttattggctacttcttggtttctttcatcttaggtgaagatgacaacacaatgcagaaggagaaacatgacatcataaattttgacaccaaattttgatttaaaattgtagtaatagccacaacaaatactgcataaacctcagatgtagcaaataaaaatgaggtcctttcctaccctatgcttgaaatat

SEQ ID NO: 31120 - DNA, 382 bp, Homo sapiens
  MAP TO AC004049.1; EXPRESSED IN BONE MARROW, SIGNAL = 0.51; EXPRESSED IN LUNG, SIGNAL = 0.47; EXPRESSED IN ADULT LIVER, SIGNAL = 0.43; NT HIT: U05013.1, EVALUE 2.40e-01; SWISSPROT HIT: Q9QVY8, EVALUE 6.20e+00
aaattcttggtcacactctcagctggacccttggtgctacctggagatccctctacttgttgatgggcagcttcccgggccactcctctcaggtactctactgaaggtttttcattctcctcaagctccagttctgccacctcacttcttactctcagcccaaaagcaggtaactccatcaacttccttcctccccctcccctgccctctacttaaaaacctcacgcaaccagagcacctctgcctttttcctgtctgtttcagtaaaaagtgtgtcctgcctccccaaggcaaggcaaaccaatccttacaactggagtctgtccccttcctttttcctctttcaggaggacgctgccttctcagccctctgctgcggcag

SEQ ID NO: 31121 - DNA, 164 bp, Homo sapiens
  MAP TO AC006368.2; EXPRESSED IN ADULT LIVER, SIGNAL = 0.53; EXPRESSED IN LUNG, SIGNAL = 0.57; EXPRESSED IN BONE MARROW, SIGNAL = 0.49; NT HIT: V00683.1, EVALUE 3.80e-01; SWISSPROT HIT: Q45105, EVALUE 6.80e+00
tggttgagctagatgataataatataaatctctctaaagaggatcagacagataacatcaaaagcaccagggtcctacatactcagagctttcagaaattcaagactggcttctatctccttgggaggaaaaacatcatgcatatgtttggtcagaaaagaaaa

SEQ ID NO: 31122 - DNA, 213 bp, Homo sapiens
  MAP TO AC005209.1; EXPRESSED IN PLACENTA, SIGNAL = 0.59; EXPRESSED IN LUNG, SIGNAL = 0.52; EXPRESSED IN ADULT LIVER, SIGNAL = 0.67; EXPRESSED IN BONE MARROW, SIGNAL = 0.81; SWISSPROT HIT: P39057, EVALUE 1.00e-17; EST_HUMAN HIT: AW845975.1, EVALUE 3.00e+00; NT HIT: AJ404468.1, EVALUE 1.00e-107
gatattgaagaccctgtggagcagacccaaagcccgaacctgtattgtcactttgcaaatggtattggggagcccaaatacatgcctgtacagtcttgggaacttttgacccagactctggtggaggccttggagaaccacaatgaagtcaacacagtgatggacctagttctctttgaggatgccatgcgccatgtgtaagtgtgcttctcc

SEQ ID NO: 31123 - DNA, 220 bp, Homo sapiens
  MAP TO AC004169.3; EXPRESSED IN LUNG, SIGNAL = 0.51; EXPRESSED IN BONE MARROW, SIGNAL = 0.52; EXPRESSED IN PLACENTA, SIGNAL = 0.67; EXPRESSED IN ADULT LIVER, SIGNAL = 0.49; SWISSPROT HIT: Q01597, EVALUE 3.60e+00; EST_HUMAN HIT: AW062464.1, EVALUE 5.00e-02
caggagttctgtgtgaaacacctgagaagtgtcctcaaaaccaccaccatgcctttcttcaccccttttcctcctttccaacgactgggatatgcagacaatggctggcacagctgcagctactctggaccttgttggaagtggaagccaggcagagtgaggtataaagaagaaacatggatccctcacacgaaggaacatcaaaccagtcccatgctga

SEQ ID NO: 31124 - DNA, 125 bp, Homo sapiens
  MAP TO AC005078.1; EXPRESSED IN LUNG, SIGNAL = 0.56; EXPRESSED IN ADULT LIVER, SIGNAL = 0.47; EXPRESSED IN BONE MARROW, SIGNAL = 0.54; SWISSPROT HIT: P39057, EVALUE 2.00e-09; NT HIT: gi6753651, EVALUE 8.00e-17
tcagcgatgaagatgtggacaagataatttctggaattcataatgaagttcatgctctgggcatggtagactccagggaaaactgttggaaattctttatggccagggtgcgactacagctcaaa

SEQ ID NO: 31125 - DNA, 154 bp, Homo sapiens
  MAP TO AC004460.1; EXPRESSED IN LUNG, SIGNAL = 0.43; EXPRESSED IN BONE MARROW, SIGNAL = 0.7; EXPRESSED IN ADULT LIVER, SIGNAL = 0.54; SWISSPROT HIT: P55453, EVALUE 3.00e+00; NT HIT: X06091.1, EVALUE 3.50e-01
tgctacagtcagcctgggtcaacctgctgcatatccgttgtatttctctggctgggatcatgctgcctgggaaatctgacattcttaagaatgttgttggattgatggcagctcttagagggatggtagatagttcagtagccatcttcagcaa

SEQ ID NO: 31126 - DNA, 228 bp, Homo sapiens
  MAP TO AC004134.1; EXPRESSED IN LUNG, SIGNAL = 0.42; EXPRESSED IN BONE MARROW, SIGNAL = 0.54; EXPRESSED IN PLACENTA, SIGNAL = 0.59; EXPRESSED IN ADULT LIVER, SIGNAL = 0.4; SWISSPROT HIT: P21851, EVALUE 3.00e-40; EST_HUMAN HIT: AU140744.1, EVALUE 1.00e-124; NT HIT: gi11425572, EVALUE 1.00e-125
tatgagatcccgtagagaatccagaaatccctgatcttccaccatttgggcattgatatcatggagttttgccacgcagactgctgctgttttccgaacatagggatcctcatccttcaagcacttgcggagcggctcacagagatattctgtaattttgtctacccggatgcaccccatggttctgactgccaaggctcgaatcaaaggattaggatcttcacagtc

SEQ ID NO: 31127 - DNA, 137 bp, Homo sapiens
  MAP TO AC005881.2; EXPRESSED IN LUNG, SIGNAL = 0.63; EXPRESSED IN BONE MARROW, SIGNAL = 0.49; EXPRESSED IN ADULT LIVER, SIGNAL = 0.45; EST_HUMAN HIT: H92568.1, EVALUE 1.80e+00; SWISSPROT HIT: P10586, EVALUE 6.10e-01; NT HIT: AF242431.1, EVALUE 3.10e-01
ttctcaaaataggaatcattatagtagaagagggtgtgactttgctccagagacctgtggaccttcctactggggtttgtcatagactccatataacatccctgtatgccacagacactgagcatcactggctctgt

SEQ ID NO: 31128 - DNA, 134 bp, Homo sapiens
  MAP TO AC006084.1; EXPRESSED IN FETAL LIVER, SIGNAL = 0.67; EXPRESSED IN PLACENTA, SIGNAL = 0.64; EXPRESSED IN LUNG, SIGNAL =   1; EXPRESSED IN BONE MARROW, SIGNAL = 0.74; EXPRESSED IN ADULT LIVER, SIGNAL = 0.5; EST_HUMAN HIT: BF692923.1, EVALUE 1.00e-69; NT HIT: gi11417306, EVALUE 7.00e-70; SWISSPROT HIT: P87253, EVALUE 1.80e+00
cagcatgctggctccaacccaggccaaagggttacaaccacctataaccagtccccagccagcttcctcagctccatattaccatcacagcctgattacaatagcagtaaaatcccttccgctatggattccaa

SEQ ID NO: 31129 - DNA, 129 bp, Homo sapiens
  MAP TO AC006150.2; EXPRESSED IN PLACENTA, SIGNAL = 0.7; EXPRESSED IN LUNG, SIGNAL = 0.54; EXPRESSED IN BONE MARROW, SIGNAL = 0.61; EXPRESSED IN ADULT LIVER, SIGNAL = 0.54; NT HIT: AF126177.1, EVALUE 4.50e+00
ctttttctcctttccacttcttgcattttattctccctgtcaccatgttattctttccattcttatcattcttattgcattctctatatattgctttttctgtactcatcattttccaagtcttttggt

SEQ ID NO: 31130 - DNA, 483 bp, Homo sapiens
  MAP TO AC002310.1; EXPRESSED IN PLACENTA, SIGNAL =  13; EXPRESSED IN LUNG, SIGNAL = 0.52; EXPRESSED IN ADULT LIVER, SIGNAL = 0.53; EXPRESSED IN BONE MARROW, SIGNAL = 2.1; NT HIT: AF072567.1, EVALUE 1.00e-03; EST_HUMAN HIT: BF590267.1, EVALUE 0.00e+00; SWISSPROT HIT: P52742, EVALUE 1.00e-55
ctacgtgtgcgggaagagctttgcctggcgctccacactggtggagcacgtctacagtcacactggcgagaagcccttccactgcactgactgcggcaagggcttcggccacgcttcctccctgagcaaacaccgggccatccatcgtggggagcggccccaccgctgtctggagtgtggccgggccttcacgcagcgctcggcgctgacttcgcacctgcgcgtccacaccggcgagaaaccctatggctgcgccgactgtggccgccgcttcagccagagctctgccctctaccagcaccggcgcgtgcacagcggcgagacccccttcccctgcccggactgtggccgcgccttcgcctacccctcggacctgcggcgccacgtgcgcacccacaccggcgagaagccctacccgtgcccggactgcgggcgctgcttccgccagagctcggagatggcagcccacaggcgcacccacag

SEQ ID NO: 31131 - DNA, 171 bp, Homo sapiens
  MAP TO AC006254.10; EXPRESSED IN LUNG, SIGNAL = 0.48; EXPRESSED IN FETAL LIVER, SIGNAL = 5.1; EXPRESSED IN ADULT LIVER, SIGNAL = 7.8; NT HIT: X69536.1, EVALUE 8.00e-92; EST_HUMAN HIT: AI207441.1, EVALUE 5.00e-60; SWISSPROT HIT: P19827, EVALUE 5.00e-17
ctgcttcactttctggcctctcatggagccactgatgtcaatcacaaaaaccacgttcttgttcatgtttgtcaggttttggggggcaaagaagtgggcaaagtggttattggccacctgaaatagaggagaacgagtgaggccactctcacagcaccccttgcccatcct

SEQ ID NO: 31132 - DNA, 99 bp, Homo sapiens
  MAP TO AC000004.1; EXPRESSED IN PLACENTA, SIGNAL = 0.73; EXPRESSED IN ADULT LIVER, SIGNAL =  18; EXPRESSED IN LUNG, SIGNAL = 0.7; EXPRESSED IN FETAL LIVER, SIGNAL = 0.79; EXPRESSED IN BONE MARROW, SIGNAL = 0.79; NT HIT: AL163303.2, EVALUE 5.00e-27; EST_HUMAN HIT: F06752.1, EVALUE 7.00e-24; SWISSPROT HIT: O08429, EVALUE 9.50e+00
gaggaagtaactgtagatgtggtggaaatagcaagagaattagaattagaagtggagcctgaagatggagctgacttgctgcaatctcatgatcaaact

SEQ ID NO: 31133 - DNA, 164 bp, Homo sapiens
  MAP TO AC001228.1; EXPRESSED IN LUNG, SIGNAL = 0.41; EXPRESSED IN BONE MARROW, SIGNAL = 0.54; EXPRESSED IN ADULT LIVER, SIGNAL = 0.51; SWISSPROT HIT: P35441, EVALUE 4.50e-01; EST_HUMAN HIT: AA406180.1, EVALUE 2.00e-87; NT HIT: gi4505526, EVALUE 1.00e-87
gggacccacggtcggcggcctcctgtaccgcagctttggcgtccccgtcttcggccacgtgcaggttgctatcaatacccttgtcctcctggtcctctggaggaaacctatgccccagaggaaggacaaagtccggtgaccgctgcccagacacagactggcaa

SEQ ID NO: 31134 - DNA, 154 bp, Homo sapiens
  MAP TO AC002123.1; EXPRESSED IN ADULT LIVER, SIGNAL = 0.45; EXPRESSED IN LUNG, SIGNAL = 0.5; NT HIT: M27013.1, EVALUE 5.50e+00; SWISSPROT HIT: O84799, EVALUE 5.20e+00; EST_HUMAN HIT: BF681515.1, EVALUE 1.30e-01
agctcttgagaatctgcctccttgtcttcacagagctgagcacagagccctctttaccctagcggctgcgcagctcaggcttcatcactgtggtgataacagagacctgctcgatgctgatgatgttatgatcctgagtcaaggatttgacttt

SEQ ID NO: 31135 - DNA, 90 bp, Homo sapiens
  MAP TO AC004540.1; EXPRESSED IN PLACENTA, SIGNAL = 0.71; EXPRESSED IN ADULT LIVER, SIGNAL = 0.46; EXPRESSED IN LUNG, SIGNAL = 0.62; EXPRESSED IN FETAL LIVER, SIGNAL = 0.7; EXPRESSED IN BONE MARROW, SIGNAL = 0.52; NT HIT: gi11427373, EVALUE 1.20e-02; SWISSPROT HIT: P20693, EVALUE 9.50e+00; EST_HUMAN HIT: R54765.1, EVALUE 3.00e-41
aagtggatatgctcagagacatcctggcccaccccaaagaagatgctgctgcactcagaagacgccagagctagccaccacccacactgc

SEQ ID NO: 31136 - DNA, 108 bp, Homo sapiens
  MAP TO AC004920.1; EXPRESSED IN PLACENTA, SIGNAL = 0.71; EXPRESSED IN LUNG, SIGNAL = 0.71; EXPRESSED IN BONE MARROW, SIGNAL = 0.63; EXPRESSED IN ADULT LIVER, SIGNAL = 0.64; EST_HUMAN HIT: BE733213.1, EVALUE 1.40e+00; NT HIT: gi11416821, EVALUE 2.30e-01; SWISSPROT HIT: P45855, EVALUE 9.40e+00
cgagcacttctcaagtgccaagcacatgcctaagtactttacctggattgcctcactcaatcccaagctcagccctacgagagaagaaccctcacttctccattatgg

SEQ ID NO: 31137 - DNA, 91 bp, Homo sapiens
  MAP TO AC004925.1; EXPRESSED IN BONE MARROW, SIGNAL = 0.55; EXPRESSED IN PLACENTA, SIGNAL = 0.65; EXPRESSED IN LUNG, SIGNAL = 0.67; EXPRESSED IN ADULT LIVER, SIGNAL = 0.6; NT HIT: gi8394023, EVALUE 3.00e-03; EST_HUMAN HIT: BE884820.1, EVALUE 3.00e-44
gcaagaagttccacatgagggcgatttggatataatttttcaggatggtgcaactaaaaccccagatgtcaagctacaaaatacatcatta

SEQ ID NO: 31138 - DNA, 156 bp, Homo sapiens
  MAP TO AC005023.1; EXPRESSED IN PLACENTA, SIGNAL = 0.59; EXPRESSED IN LUNG, SIGNAL = 0.54; EXPRESSED IN ADULT LIVER, SIGNAL = 0.46; NT HIT: U15176.1, EVALUE 9.00e-02; EST_HUMAN HIT: AI243732.1, EVALUE 2.00e-09
gctgctggctctgggtgcactgcctatgggttagtgctgttctgcaagaagcaataccagttcaataaaagttgctctatctcactacctgctcatcctccatccgggcaaaatcccaatttggcagcttgcctgtcctacgtcaaagataaggag

SEQ ID NO: 31139 - DNA, 111 bp, Homo sapiens
  MAP TO AC006327.3; EXPRESSED IN LUNG, SIGNAL = 0.44; EXPRESSED IN ADULT LIVER, SIGNAL = 0.47; NT HIT: gi11466344, EVALUE 3.80e+00; EST_HUMAN HIT: AW079100.1, EVALUE 3.60e-01
catgtggtatctgcctaataaatgtttacagagtggatgcatgcgtgaatatctgtggatttggtttcttgaccatggtttcatggggaaagcaactgagggatatacgaa

SEQ ID NO: 31140 - DNA, 204 bp, Homo sapiens
  MAP TO AC006464.3; EXPRESSED IN LUNG, SIGNAL = 0.45; EXPRESSED IN ADULT LIVER, SIGNAL = 0.47; EST_HUMAN HIT: AW893062.1, EVALUE 3.00e-31; SWISSPROT HIT: Q9YD22, EVALUE 2.20e+00
gtgatgagcttgtcgcctgctcccttatctctgttaatcaaggcagcaccaattctgacagaggagatgtacggagacatccagccagctgcctgggagctcctgctcagcatggatgagcacatggcaggggcagcaggtaaagaaagaccacctggaaccctgtgcctgctgccactgctgttactgatccaagtgtttaaa

SEQ ID NO: 31141 - DNA, 154 bp, Homo sapiens
  MAP TO AC005028.1; EXPRESSED IN PLACENTA, SIGNAL = 0.61; EXPRESSED IN FETAL LIVER, SIGNAL = 0.72; EXPRESSED IN LUNG, SIGNAL = 0.57; EXPRESSED IN ADULT LIVER, SIGNAL = 0.68; EST_HUMAN HIT: AU127370.1, EVALUE 5.00e-66; NT HIT: AJ250408.1, EVALUE 1.00e-81; SWISSPROT HIT: P10071, EVALUE 2.00e-18
ctctgaccgatggaggtagtataggagacctcagtgccatcgatgaaaccccaatcatggactcaaccatttccactgcaaccacagcccttgctttgcaagccaggagaaacccggcagggaccaaatggatggagcacgtaaaactagaaag

SEQ ID NO: 31142 - DNA, 85 bp, Homo sapiens
  MAP TO AC005886.1; EXPRESSED IN LUNG, SIGNAL = 0.59; EXPRESSED IN ADULT LIVER, SIGNAL = 0.42; NT HIT: gi11525868, EVALUE 4.40e-02; SWISSPROT HIT: P07918, EVALUE 7.30e+00; EST_HUMAN HIT: BE278869.1, EVALUE 1.00e+00
ccaagtgaggcagagtagaggtcagagttttcgctggctgaaaactgatcattttcatgccaagctgttgaatgattctggccat

SEQ ID NO: 31143 - DNA, 240 bp, Homo sapiens
  MAP TO AC004241.1; EXPRESSED IN PLACENTA, SIGNAL = 0.63; EXPRESSED IN BONE MARROW, SIGNAL = 0.58; EXPRESSED IN ADULT LIVER, SIGNAL = 0.58; EXPRESSED IN LUNG, SIGNAL = 0.66; EXPRESSED IN FETAL LIVER, SIGNAL = 0.67; EST_HUMAN HIT: BF671355.1, EVALUE 1.00e-127; SWISSPROT HIT: Q02909, EVALUE 3.20e-01; NT HIT: Y15113.1, EVALUE 2.30e+00
aaaccactcaagaaggttattattgaagaaactggtaatttgatacagactattgatgtgccagatagcactactgctgctgctccagagaataatcctattaatctagcaaatgtaatagcagccacaggcaccacaagtaagaagaattcaagccaagatgacctttttcccacaagtgatactccaagagcaaaagtattgaaaatagaagaagtcagtgatacttcatccctgcag

SEQ ID NO: 31144 - DNA, 112 bp, Homo sapiens
  MAP TO AC002287.1; EXPRESSED IN LUNG, SIGNAL = 0.48; EXPRESSED IN ADULT LIVER, SIGNAL = 0.41; EXPRESSED IN BONE MARROW, SIGNAL = 0.51; EST_HUMAN HIT: AI742622.1, EVALUE 3.00e-54
tcctgcttgtccttcaggtatcagcaccagcatcacttcctccaagaagccctcattatccccctctatgcaagaaagaattcatcctttgcttctctctgcctcctgaata

SEQ ID NO: 31145 - DNA, 247 bp, Homo sapiens
  MAP TO AC004765.2; EXPRESSED IN LUNG, SIGNAL = 0.59; EXPRESSED IN BONE MARROW, SIGNAL = 0.71; EXPRESSED IN ADULT LIVER, SIGNAL = 0.48; EXPRESSED IN PLACENTA, SIGNAL = 0.6; EXPRESSED IN FETAL LIVER, SIGNAL = 0.8; EST_HUMAN HIT: N35841.1, EVALUE 1.00e-123; NT HIT: AF061944.1, EVALUE 1.00e-123; SWISSPROT HIT: Q01577, EVALUE 9.00e-18
gtatctgaaaaggtttaaagtgatgaagatcaaagttctaagaagctggtgccgtcagatccttaaaggtcttcagtttcttcatactcgaactccacctatcattcaccgcgatcttaaatgtgacaacatctttatcaccggccctactggctcagtcaagattggagacctcggtctggcaaccctgaagcgggcttcttttgccaagagtgtgataggtatgtttcaggtgtaccttggagcc

SEQ ID NO: 31146 - DNA, 238 bp, Homo sapiens
  MAP TO AC002289.1; EXPRESSED IN LUNG, SIGNAL = 0.56; EXPRESSED IN FETAL LIVER, SIGNAL = 0.68; EXPRESSED IN ADULT LIVER, SIGNAL = 0.45; EXPRESSED IN BONE MARROW, SIGNAL = 0.51; NT HIT: AF170253.1, EVALUE 2.20e+00; SWISSPROT HIT: Q92974, EVALUE 3.40e+00; EST_HUMAN HIT: T87354.1, EVALUE 2.10e-01
cagtgcagccacaagccccagcaaataatttcctaggacatcactgacattcggacttgaagtgtcctcactgtcagatctgaggccacagcagtgaagcccgacttcagcatcatctgggtctggggctctgagagcaactgaacctttctccttcctctgttgtgctgtgggctccaaggcaggtgacaaatggaaaccaagttgaggggaaagttcgggtagagcccgtgctggt

SEQ ID NO: 31147 - DNA, 155 bp, Homo sapiens
  MAP TO AC006312.8; EXPRESSED IN ADULT LIVER, SIGNAL = 0.43; SWISSPROT HIT: O07643, EVALUE 1.80e+00; EST_HUMAN HIT: AW601779.1, EVALUE 2.00e-71
gtactccaacctcgacctgaagacccaggaggcctatgagatggccgtgagaggcctgatccggcccatgaacaagtccccgatgctgataactggcatccgatgcctctactttgcacctccggaattcctcttaggtaggttggccaaggaag

SEQ ID NO: 31148 - DNA, 348 bp, Homo sapiens
  MAP TO AC006313.1; EXPRESSED IN ADULT LIVER, SIGNAL = 0.47; SWISSPROT HIT: P47890, EVALUE 2.00e-30; NT HIT: U86236.1, EVALUE 6.00e-08; EST_HUMAN HIT: AI827216.1, EVALUE 0.00e+00
gaccagtgtgtcccattttgttctcttgggcatttccacccacccagaagagcaaatcccactcttccttgttttctcactcatgtacgcaatcaatatttctggcaacttggccatcatcacactgattctctctgctccacgcctccacatccccatgtacatcttcctcagtaacttggccttgacagacatctgcttcacctccaccacggtccccaagatgctgcagattattttctcccctacaaaggtaatttcctacacaggctgtttagcccaaacttatttcttcatttgcttcgccgtcatggaaaacttcatcctggctgtgatggcctatgacag

SEQ ID NO: 31149 - DNA, 205 bp, Homo sapiens
  MAP TO AC005069.2; EXPRESSED IN ADULT LIVER, SIGNAL = 0.48; EST_HUMAN HIT: AI610765.1, EVALUE 7.20e-01; SWISSPROT HIT: P77148, EVALUE 1.30e+00
ggtgttttctttgctcaagaggaagacaccccctcaggaactcactttcctcaaaggatcacttgtcaacctcaagttgccctatgagcctccagaaaagggccagaatctccacaaagactcacttgacatactcacaaagctctgctatgaacactattttcccaaccttaaatctcaggaggactaccaaatgcaggccagt

SEQ ID NO: 31150 - DNA, 195 bp, Homo sapiens
  MAP TO AC005034.1; EXPRESSED IN ADULT LIVER, SIGNAL = 0.42; SWISSPROT HIT: P49406, EVALUE 1.00e-29; NT HIT: gi11431048, EVALUE 2.00e-98; EST_HUMAN HIT: AW242686.1, EVALUE 4.00e-98
gtgtcgagatttgctttgaactttataatcctcgggtccaggagattcaggtggtcaaattagagaaacggctggatgatagcttgctatacttacgagatgcccttcctgaatatagcacttttgatgtgaatatgaagccagtagtacaagagcctaaccaaaaagttcctgttaatgaggtatgggttatac

SEQ ID NO: 31151 - DNA, 79 bp, Homo sapiens
  MAP TO AC006484.2; EXPRESSED IN PLACENTA, SIGNAL = 0.61; EXPRESSED IN ADULT LIVER, SIGNAL = 0.48; EXPRESSED IN LUNG, SIGNAL = 0.46; EST_HUMAN HIT: AA366275.1, EVALUE 2.40e-01; NT HIT: AF288153.1, EVALUE 4.00e-02
ggacttggtggtgaacaggagaggagagacacagtacatgcctgtccagaacttacattgcagaggggaagaccagcag

SEQ ID NO: 31152 - DNA, 94 bp, Homo sapiens
  MAP TO AC005191.1; EXPRESSED IN PLACENTA, SIGNAL = 0.58; EXPRESSED IN ADULT LIVER, SIGNAL = 0.45; EXPRESSED IN LUNG, SIGNAL = 0.42; NT HIT: U65406.1, EVALUE 3.10e+00; EST_HUMAN HIT: BF316067.1, EVALUE 7.30e-02
aaacccagttggcaaatgtgctgcttcctctccatgtctgcctctgcagcttctgctggcccatcaagttgctcccacactagcagagagcaaa

SEQ ID NO: 31153 - DNA, 387 bp, Homo sapiens
  MAP TO AB019441.1; EXPRESSED IN ADULT LIVER, SIGNAL = 0.63; EXPRESSED IN LUNG, SIGNAL = 0.49; NT HIT: X92224.1, EVALUE 0.00e+00; SWISSPROT HIT: P06331, EVALUE 1.00e-25; EST_HUMAN HIT: AW402042.1, EVALUE 1.00e-123
ggactggtgaagccctcgcagaccctctcactcacctgtgccatctccggggacagtgtctctagcaacagtgctgcttggaactggatcaggcagtccccatcgagaggccttgagtggctgggaaggacatactacaggtccaagtggtataatgattatgcagtatctgtgaaaagtcgaataaccatcaacccagacacatccaagaaccagttctccctgcagctgaactctgtgactcccgaggacacggctgtgtattactgtgcaagagacacagtgaggggaagtcagtgtgagcccagacacaaacctccctgcagggatgctcaggaccccagaaggcacccagcactaccagcgcagggcccagaccaggagcag

SEQ ID NO: 31154 - DNA, 261 bp, Homo sapiens
  MAP TO AC006518.17; EXPRESSED IN PLACENTA, SIGNAL = 0.84; EXPRESSED IN ADULT LIVER, SIGNAL = 0.55; EXPRESSED IN LUNG, SIGNAL = 0.57; EXPRESSED IN BONE MARROW, SIGNAL = 0.57; NT HIT: gi6753237, EVALUE 1.60e-01; SWISSPROT HIT: P08923, EVALUE 4.20e+00
caggcttctccttggctggtgagtgcaggaagacaacaggtgatgcctgcaaatatcactcagctcagacccttaccctgacattctccagtgtaagcaatgagagaaagagattaatgtatcaggaaataataaacatcagctatgatctcaccacacacaaccacaacagaggtgacggaggagctgaaacagacactgtcagtgagtgagggtggggtcaaatcgagaagcaggactgcagcaggagcttaggcactt

SEQ ID NO: 31155 - DNA, 195 bp, Homo sapiens
  MAP TO AC006530.4; EXPRESSED IN PLACENTA, SIGNAL = 0.61; EXPRESSED IN LUNG, SIGNAL = 0.52; EXPRESSED IN BONE MARROW, SIGNAL = 0.52; EXPRESSED IN ADULT LIVER, SIGNAL = 0.52; NT HIT: AF063018.1, EVALUE 2.00e-15; EST_HUMAN HIT: BE062951.1, EVALUE 1.00e-85; SWISSPROT HIT: P48437, EVALUE 5.00e-21
tagtgcatattgagagcttgaaaaagttctgaattgcggagaaccaccagcattttgggatttgtgacaccatctgaaattgcttgccgggcagatttttccatttggatgtaataaaactcacgaaagttgctgaaccacttgatcatctgggaggtaatgcagcggttgaactgtacaaacaagaggtccatc

SEQ ID NO: 31156 - DNA, 302 bp, Homo sapiens
  MAP TO AC005216.1; EXPRESSED IN ADULT LIVER, SIGNAL = 0.56; EXPRESSED IN LUNG, SIGNAL = 0.51; NT HIT: AB040927.1, EVALUE 1.00e-05; SWISSPROT HIT: P38159, EVALUE 2.80e-01; EST_HUMAN HIT: BE736034.1, EVALUE 0.00e+00
acaaaggtcgccagtcatcccgcacaaaaaacctgtccctggtgtcctcgtcctccagaggcaacacgtctaccctccgtaggggcccagggtccaggaggaaggtgcctgggcagttttccatcacaacagccttgaacactctcaaccggatggtccattctccttcagggcgccatatggtagagatcagcaccccagtgctcatcagctccagcaacccctctgtgatcacccagcccatggagaaagcagacgttccttccagctgtgtgggacaggtagggaagaaacgcctggga

SEQ ID NO: 31157 - DNA, 195 bp, Homo sapiens
  MAP TO AC006406.1; EXPRESSED IN LUNG, SIGNAL = 0.54; EXPRESSED IN BONE MARROW, SIGNAL = 0.53; EXPRESSED IN ADULT LIVER, SIGNAL = 0.55; SWISSPROT HIT: P32066, EVALUE 5.00e+00; NT HIT: AE004031.1, EVALUE 4.60e-01
gaaagcagggagctaggaaagaaagatattctaggagagaaaacaggcgctgctatggagaaaggcataggagacaatgtcctgtttggggcactcaaaatcagccaatgtacctgtaacaaagtgtatgtgaaggaatctgatcaaagtggtgctgcaaaactggatgaggacacgcaccctgaagggaagcac

SEQ ID NO: 31158 - DNA, 76 bp, Homo sapiens
  MAP TO AC006305.1; EXPRESSED IN LUNG, SIGNAL = 0.6; EXPRESSED IN BONE MARROW, SIGNAL = 0.54; EXPRESSED IN ADULT LIVER, SIGNAL = 0.52; EST_HUMAN HIT: AA992102.1, EVALUE 3.50e+00
ctccagatgatggctggcaatgtagccattgagaaaatgaattctccgtttcccatcagcaagagcatgtacaaca

SEQ ID NO: 31159 - DNA, 145 bp, Homo sapiens
  MAP TO AC006411.1; EXPRESSED IN LUNG, SIGNAL = 0.71; EXPRESSED IN BONE MARROW, SIGNAL = 0.64; EXPRESSED IN ADULT LIVER, SIGNAL = 0.52; EXPRESSED IN FETAL LIVER, SIGNAL = 0.68; EST_HUMAN HIT: BF673726.1, EVALUE 1.00e-63; SWISSPROT HIT: P46940, EVALUE 4.00e-23; NT HIT: gi4506786, EVALUE 7.00e-64
ctgttctcgatcatagatttttttcagggacactactttgggagagaagaagttccccagtttggcaaggtagaccccattcctaagcccctcctccagttctgtggtgggaggcagatcttcccctaggcatgcttccatccac

SEQ ID NO: 31160 - DNA, 317 bp, Homo sapiens
  MAP TO AB019440.1; EXPRESSED IN ADULT LIVER, SIGNAL = 0.42; EXPRESSED IN FETAL LIVER, SIGNAL = 0.8; SWISSPROT HIT: P23083, EVALUE 2.00e-39; NT HIT: M99641.1, EVALUE 0.00e+00; EST_HUMAN HIT: AW402189.1, EVALUE 0.00e+00
gtgcccactcccaggttcagctggtgcagtctggagctgaggtgaagaagcctggggcctcagtgaaggtctcctgcaaggcttctggttacacctttaccagctatggtatcagctgggtgcgacaggcccctggacaagggcttgagtggatgggatggatcagcgcttacaatggtaacacaaactatgcacagaagctccagggcagagtcaccatgaccacagacacatccacgagcacagcctacatggagctgaggagcctgagatctgacgacacggccgtgtattactgtgcgagagacacagtgtga

SEQ ID NO: 31161 - DNA, 108 bp, Homo sapiens
  MAP TO AC004502.1; EXPRESSED IN LUNG, SIGNAL = 0.56; EXPRESSED IN BONE MARROW, SIGNAL = 0.49; EXPRESSED IN ADULT LIVER, SIGNAL = 0.57; NT HIT: AL114166.1, EVALUE 1.50e-02; EST_HUMAN HIT: BE178284.1, EVALUE 1.40e+00; SWISSPROT HIT: Q9R001, EVALUE 5.00e-03
gacaaaaagaagccaatggcccaaaaaggatctggcattgttcatcagcagtgtatgtcatccctggcagcttggagggaaccatcacagaattgacactctgcggat

SEQ ID NO: 31162 - DNA, 197 bp, Homo sapiens
  MAP TO AC006464.3; EXPRESSED IN BONE MARROW, SIGNAL = 0.57; EXPRESSED IN LUNG, SIGNAL = 0.68; EXPRESSED IN ADULT LIVER, SIGNAL = 0.5; NT HIT: D87458.1, EVALUE 1.20e-01; EST_HUMAN HIT: AA877907.1, EVALUE 1.70e-01; SWISSPROT HIT: P33485, EVALUE 6.50e+00
gtaggattaatcatgtactttgtgcggaccccctgcgagtgggggatggatgccatttcagccaccctgacattcctgtgggaggtggtgggttacgtggagggcctcttcttcaaggatctcaagcagacgatgaagaaggagcagtgtgaggtgaagctcctggtgaccgcttcaatgccaggtaagccactact

SEQ ID NO: 31163 - DNA, 458 bp, Homo sapiens
  MAP TO AC005702.1; EXPRESSED IN LUNG, SIGNAL = 0.44; EXPRESSED IN BONE MARROW, SIGNAL = 0.54; EXPRESSED IN ADULT LIVER, SIGNAL = 0.53; NT HIT: gi11525850, EVALUE 0.00e+00; SWISSPROT HIT: P14430, EVALUE 4.20e-01; EST_HUMAN HIT: AW956307.1, EVALUE 0.00e+00
gagacagaggcctgaagcaaagacatctgggtcagagaaaaagtatttaagggccatgcaagccaatcgtagccaactgcacagtcctccaggaactggaagcagtgaggatgcctcaacccctcagtgtgtccacacaagattgacaggagagggttcttgccctcattctggagatgttcatatccagataaactccatacctaaagaatgtgcagaaaatgcaagctccagaaatataaggtcaggtgtccatagctgtgcccatggatgtgtacacagtcgcttacggggtcactcccacagtgaagcaaggctgactgatgatactgccgcagaatctggagatcatggtagtagctccttctcagaattccgctatctcttcaagtggctgcaaaaaagtcttccatatattttgattctgagcgtcaaacttgttatgcagcatataacag

SEQ ID NO: 31164 - DNA, 201 bp, Homo sapiens
  MAP TO AC002476.1; EXPRESSED IN LUNG, SIGNAL = 0.55; EXPRESSED IN FETAL LIVER, SIGNAL = 0.72; EXPRESSED IN ADULT LIVER, SIGNAL = 0.48; EST_HUMAN HIT: AW163047.1, EVALUE 1.00e-106; SWISSPROT HIT: Q13619, EVALUE 1.00e-26; NT HIT: AB014595.1, EVALUE 1.00e-106
ctataagttcagctggtttatttggtcttttgttaatgaacgtttcaaatgcttctttcatggcattgataaatttctcattcttcagaaagcagatatcaattatatggtcaaccttatctttaaaatccagcaattcttgaaccatggttttatctttttcaggattaattacaatagtgctgccaaatgcctaaaaca

SEQ ID NO: 31165 - DNA, 100 bp, Homo sapiens
  MAP TO AC004142.1; EXPRESSED IN ADULT LIVER, SIGNAL = 0.42; EXPRESSED IN LUNG, SIGNAL = 0.41; EST_HUMAN HIT: BE244891.1, EVALUE 2.00e-18; NT HIT: AF181897.1, EVALUE 7.00e-20
gagttctggatagatcaaaccagccccaacattctcttaagccaaatcctaatccacagcaaagccctaactctcttcaattctgtgaagcccgaaagag

SEQ ID NO: 31166 - DNA, 373 bp, Homo sapiens
  MAP TO AC005020.1; EXPRESSED IN LUNG, SIGNAL = 0.8; EXPRESSED IN ADULT LIVER, SIGNAL = 0.47; SWISSPROT HIT: Q62245, EVALUE 2.70e+00; NT HIT: AE004347.1, EVALUE 1.50e-02; EST_HUMAN HIT: AA829568.1, EVALUE 5.40e+00
tctacaaaattccacttgtccttcaaggctcagatcaaatatcatgttcttcatgaagcctccagtgccctaggccaggagagggtcttctttcccctccagagttctccagaatgcaaattctgtgacagtccttttcatgctctgcttggcatcagtcaagtgcaccccaaatgctaccccaaacaggactgtttgttcttaagttgtataaaagatcctgtttatccaaataaccccatccacagaagaatctatcacagcacctggtgtaaaacaatgactcagtacaagtgtgctgctatagctaatgatggtgacggtgacaatgatgacaaggacgatgacagcaaacactggagaaagaacactg

SEQ ID NO: 31167 - DNA, 85 bp, Homo sapiens
  MAP TO AC002549.1; EXPRESSED IN LUNG, SIGNAL = 0.55; EXPRESSED IN PLACENTA, SIGNAL = 1.3; EXPRESSED IN BONE MARROW, SIGNAL = 3.8; EXPRESSED IN ADULT LIVER, SIGNAL = 0.88; EST_HUMAN HIT: BE044007.1, EVALUE 1.00e+00; NT HIT: gi9631294, EVALUE 1.10e-02
gtaaacaaatcttcctttactctgagacttctccaatgtatcattcaatgatttatgcactggggcttctcgttcacaacgactg

SEQ ID NO: 31168 - DNA, 299 bp, Homo sapiens
  MAP TO AC004690.1; EXPRESSED IN ADULT LIVER, SIGNAL = 0.45; EXPRESSED IN LUNG, SIGNAL = 0.46; NT HIT: S67798.1, EVALUE 0.00e+00; EST_HUMAN HIT: BE503684.1, EVALUE 0.00e+00; SWISSPROT HIT: P38567, EVALUE 9.00e-47
aacattgtggcagatagtgtggagggtgaagcattgtagaaaatttgaggttcttctgtctccatgggaggttttagaaaagcatctatacagacaccatcagcaatacacacatcaacagcatcagtgtcttttacatcagctttctccttacaactcaaggtgctataacagctgcaataaaatttttcagaaaattgctccaggtcttcaagtgtcggttttccacgtactgtgaactttccacctttctcaagttgaatagcaaaattatctgggttgaggtgaagatagtcact

SEQ ID NO: 31169 - DNA, 194 bp, Homo sapiens
  MAP TO AC005040.2; EXPRESSED IN ADULT LIVER, SIGNAL = 0.44; SWISSPROT HIT: P06180, EVALUE 1.70e+00
ccactgagctcggccacctgggtgaggaagcggaggattctaagttggccccaggtgccagatttggccttgaggagggtgaaagcacatttgctgagaaggggacagatttagctgtggagtttgagatgctcatgggctgcaggactgcatactgcaagtccgtagttaagaatgcagagttagagtctgaa

SEQ ID NO: 31170 - DNA, 134 bp, Homo sapiens
  MAP TO AC000120.1; EXPRESSED IN LUNG, SIGNAL = 0.47; EXPRESSED IN ADULT LIVER, SIGNAL = 0.41; NT HIT: gi11419404, EVALUE 7.00e-70; EST_HUMAN HIT: M62210.1, EVALUE 1.00e-69; SWISSPROT HIT: Q13625, EVALUE 1.10e+00
aatgaatgggtgcccagtggtcactatctaactggttgactgaaaatctttcactgagaagacggcttagtaattctgaatctccttcacaggcgcttcggtggagaggaaaatcatctacccactgtcgttcc

SEQ ID NO: 31171 - DNA, 142 bp, Homo sapiens
  MAP TO AC004537.1; EXPRESSED IN ADULT LIVER, SIGNAL = 0.45; EXPRESSED IN LUNG, SIGNAL = 0.48; EST_HUMAN HIT: R73942.1, EVALUE 2.00e-74; NT HIT: gi9506658, EVALUE 1.00e-74
ttccacagcctcttctaacaatgcctacaatgtgaattcctcccaacctctgggatcctataacattggctcgttatcttcaggaactggtgcaggggcaattaccatggcagctgctcaagcagttcaggctacagctcag

SEQ ID NO: 31172 - DNA, 134 bp, Homo sapiens
  MAP TO AC002460.1; EXPRESSED IN BONE MARROW, SIGNAL = 0.65; EXPRESSED IN LUNG, SIGNAL = 0.56; EXPRESSED IN ADULT LIVER, SIGNAL = 0.63; SWISSPROT HIT: P09029, EVALUE 4.10e+00; EST_HUMAN HIT: BE782290.1, EVALUE 1.10e-01
aaaaaggagaagactgtgtccactgaggcccattgtgtatatgtgaagcttgctggttatacagaagacctccttttatgctggaccttgctttcttatctgtgcttacagcttggtctttcaggctgcccctt

SEQ ID NO: 31173 - DNA, 96 bp, Homo sapiens
  MAP TO AC004740.1; EXPRESSED IN LUNG, SIGNAL = 0.46; EXPRESSED IN BONE MARROW, SIGNAL = 0.51; EXPRESSED IN ADULT LIVER, SIGNAL = 0.46; NT HIT: AB042297.1, EVALUE 1.00e-11; EST_HUMAN HIT: AA058575.1, EVALUE 2.00e-11; SWISSPROT HIT: P08547, EVALUE 1.10e-02
caacattttctgtcttttgatagtagccatccaaatgagcgtgaagtggtatctcattgtagttttgatttgcatttacctaatgattatcaatag

SEQ ID NO: 31174 - DNA, 75 bp, Homo sapiens
  MAP TO AC002465.1; EXPRESSED IN ADULT LIVER, SIGNAL = 0.59; EXPRESSED IN LUNG, SIGNAL = 0.64; EXPRESSED IN BONE MARROW, SIGNAL = 0.63; NT HIT: AJ006345.1, EVALUE 1.00e-05; EST_HUMAN HIT: AV728645.1, EVALUE 1.00e-09
acaaagacttcaatgaagccattataaatatgttcaaagaactaaaagaaaccatggttaaggaagtaaagaaag

SEQ ID NO: 31175 - DNA, 89 bp, Homo sapiens
  MAP TO AC004674.1; EXPRESSED IN BONE MARROW, SIGNAL = 0.51; EXPRESSED IN ADULT LIVER, SIGNAL = 0.51; EXPRESSED IN LUNG, SIGNAL = 0.54; EST_HUMAN HIT: AI905826.1, EVALUE 1.10e+00; NT HIT: U34631.1, EVALUE 7.30e-01
ctggatattggcagaacctgaaggtcaacacattggtacaggcaccgtcatttattgtctgggcatctataaaaatctcaaggtcatta

SEQ ID NO: 31176 - DNA, 184 bp, Homo sapiens
  MAP TO AC002543.1; EXPRESSED IN LUNG, SIGNAL = 0.51; EXPRESSED IN ADULT LIVER, SIGNAL = 0.44; EXPRESSED IN BONE MARROW, SIGNAL = 0.62; EST_HUMAN HIT: BE744916.1, EVALUE 6.40e-01; SWISSPROT HIT: O34204, EVALUE 5.10e+00; NT HIT: M58643.1, EVALUE 4.30e-01
aggagatcacatcccaaccagggcctgcgcacagggcttcaaggaaatgaccagcagcaaagtgaccgaggtgcacagcgaagccagaatcaatgcagaagattgggagacatctactttcagcttccaagtaaccaccttactgggggtgaaagacagaaacatctgctttctccctatgtcc

SEQ ID NO: 31177 - DNA, 148 bp, Homo sapiens
  MAP TO AC002488.1; EXPRESSED IN LUNG, SIGNAL = 0.55; EXPRESSED IN BONE MARROW, SIGNAL = 0.67; EXPRESSED IN ADULT LIVER, SIGNAL = 0.67; SWISSPROT HIT: P53036, EVALUE 6.10e-01; EST_HUMAN HIT: W39445.1, EVALUE 3.00e-05; NT HIT: AL163247.2, EVALUE 2.00e-15
tgttttctgatcataactctcctgatgaaaatggaatctggtccagccagaatgaagaaactgacagacgatgatgatgaaagcaatccccagctgtccacattgctcattagcataagacactcccaccagtgccatcacagtttgc

SEQ ID NO: 31178 - DNA, 126 bp, Homo sapiens
  MAP TO AC002546.1; EXPRESSED IN LUNG, SIGNAL = 0.54; EXPRESSED IN ADULT LIVER, SIGNAL = 0.56; EXPRESSED IN PLACENTA, SIGNAL = 0.67; EXPRESSED IN BONE MARROW, SIGNAL = 0.81; NT HIT: U39656.1, EVALUE 4.00e-65; SWISSPROT HIT: P52564, EVALUE 5.00e-19; EST_HUMAN HIT: BE963965.2, EVALUE 6.00e-65
ccttcgatttccctatgattcatggggaactccatttcagcagctcaaacaggtggtagaggagccatcgccacaactcccagcagacaagttctctgcagagtttgttgactttacctcacagtg

SEQ ID NO: 31179 - DNA, 155 bp, Homo sapiens
  MAP TO AC006120.1; EXPRESSED IN LUNG, SIGNAL = 0.52; EXPRESSED IN ADULT LIVER, SIGNAL = 0.43; SWISSPROT HIT: P20020, EVALUE 2.30e+00; EST_HUMAN HIT: BE149117.1, EVALUE 7.00e-59; NT HIT: AK024439.1, EVALUE 8.90e-02
ccaaatccagcacgagcaaaaggttcaagcccagagggattaccagcctgggtactgggtgagctggagacaagtgaacacaaattaaatgaatcatggaaactctcttctggagaagataacactttagtacagtcgccaactgatgtctacag

SEQ ID NO: 31180 - DNA, 228 bp, Homo sapiens
  MAP TO AC002064.1; EXPRESSED IN ADULT LIVER, SIGNAL = 0.57; EXPRESSED IN PLACENTA, SIGNAL = 0.68; EXPRESSED IN LUNG, SIGNAL = 0.65; EXPRESSED IN BONE MARROW, SIGNAL = 0.69; EST_HUMAN HIT: BE463857.1, EVALUE 4.00e-58; SWISSPROT HIT: P44837, EVALUE 4.30e-01
attggagaaatatggaatgaaatatatgaagaaataaaattagaaaaattaagaccagtcactacagataaaaaagctttggaagctattacaacagcatcagaaaatattggaaagatggttgcttctctgcaaagtgatataattgaaagccaagcatgccaagacatgcaaaatgaacaaaaagtatatgcaaaagtaagctacataggtagtgaggagggagaa

SEQ ID NO: 31181 - DNA, 200 bp, Homo sapiens
  MAP TO AC003036.1; EXPRESSED IN LUNG, SIGNAL = 0.6; EXPRESSED IN BONE MARROW, SIGNAL = 0.52; EXPRESSED IN ADULT LIVER, SIGNAL = 0.64; EXPRESSED IN PLACENTA, SIGNAL = 0.69; NT HIT: gi5032158, EVALUE 2.00e-52; EST_HUMAN HIT: AL039261.1, EVALUE 3.00e-52; SWISSPROT HIT: Q07632, EVALUE 2.90e+00
agagccgtcggacgcgctggcacccactttgtctcctcgggcgttccagcacacctcgaagatgccgccagtgcctcggtagctgtggacaagatttccactctgcaaagcaaagcagctgtcacttacaacgcaaggggcgcctgcgacagatgcaggtgtggaatgtgcgctcctccggccctgacgtttcgtcatga

SEQ ID NO: 31182 - DNA, 191 bp, Homo sapiens
  MAP TO AC001231.1; EXPRESSED IN LUNG, SIGNAL = 0.45; EXPRESSED IN ADULT LIVER, SIGNAL = 0.41; SWISSPROT HIT: P15171, EVALUE 4.40e-01; NT HIT: gi4501974, EVALUE 4.50e-01; EST_HUMAN HIT: BF326962.1, EVALUE 1.70e-01
cactttgcagaatccgtggtgctctcccatggcccccaccagagctggccacctctcacggaatgaccacactgactttttattacagggtgtggtgttcctgtctgctaccctgtagaacataataacttccagaaagaaggatttgggtgaggaagggtactgcggaggatgatgatcagaaggaaatc

SEQ ID NO: 31183 - DNA, 515 bp, Homo sapiens
  MAP TO AC003958.1; EXPRESSED IN PLACENTA, SIGNAL = 0.63; EXPRESSED IN LUNG, SIGNAL = 0.47; EXPRESSED IN BONE MARROW, SIGNAL = 0.52; EXPRESSED IN ADULT LIVER, SIGNAL = 0.43; SWISSPROT HIT: O76015, EVALUE 5.00e-46; EST_HUMAN HIT: BF569905.1, EVALUE 7.00e-25; NT HIT: Y16795.1, EVALUE 0.00e+00
atgacttctgaccattgcagttccctcctcagcgggcaggtttcagaggccaacgctgcctctctgtgcctcttggctaatgtggcacatgccaatcgagtccgtgtggggtcgactcccctgggccgcctcagcctctgtctgcccccaacctgccacaccacttgtcccttgccagggacctgccacattcctggcaacatcggaatctgtggggcctaccgcgaaaacaccctgaacggccacgagaaggagaccatgcagttcctaaacgaccgcctggccaactacctggagaaggtgcgccagctggagtgggacaatgcagaactggagaccaaactccatgagaggagcaagtgccacgagtccagcgtgtgccgaaactaccagtcctacttctgcaccatccaggagctccagcagaaggtgaggtttgcggtgcaccagatcaggggtcaggaatctgcttactgcctgtcggccaaatccggcccaccacctgcttttgcaaa

SEQ ID NO: 31184 - DNA, 104 bp, Homo sapiens
  MAP TO AC002429.1; EXPRESSED IN ADULT LIVER, SIGNAL = 0.51; EXPRESSED IN LUNG, SIGNAL = 0.53; EXPRESSED IN BONE MARROW, SIGNAL = 0.56; EST_HUMAN HIT: AI813693.1, EVALUE 5.10e+00; NT HIT: gi4505264, EVALUE 3.50e+00
tacccaaacagtggactcagcagtcaaaaggaacaaatggctatatcattatcatcatcatcatcatcatcatcatcattgatgaatttcaaaataattaccct

SEQ ID NO: 31185 - DNA, 137 bp, Homo sapiens
  MAP TO AC006313.1; EXPRESSED IN ADULT LIVER, SIGNAL = 0.48; EXPRESSED IN LUNG, SIGNAL = 0.53; NT HIT: AF110520.1, EVALUE 1.20e+00
gattgtaaaagtagcagttaatgtaactgtagcctctgtcagagatttcttcaaacccctcagcagaggagcagcttatattgaagatcaagcctgcctttatgtggaattgctttctctccctttcttggtagttt

SEQ ID NO: 31186 - DNA, 418 bp, Homo sapiens
  MAP TO AC004636.1; EXPRESSED IN LUNG, SIGNAL = 0.53; EXPRESSED IN ADULT LIVER, SIGNAL = 0.48; NT HIT: AF314149.1, EVALUE 2.60e-01; SWISSPROT HIT: P27601, EVALUE 5.50e+00; EST_HUMAN HIT: AW299318.1, EVALUE 3.90e-01
ggttgcttgtaatcacttgggatgtaaaaaggcaaaaaattttacccctgagggatacaaagggaagaaacatgataattgtcctcattatttattccatgacctagacacttacatacatactgacacttcggagatttatttttttcattattcttaaaggaatcatcatcagtgtttactgatagacaatattcctcgtttaaattgtgctaaaatgtaggattacaatcaatcccaggttatttaataaggtagttatagacagaaaaccagttgtttcacatattgcaaatcttcagtgcaacttcacataatccattagggatagacttaccatagtggaagcatcttctttagaaagtgagccatctctaagcatgcagctttaacagggcatctggcatggaggtagaaa

SEQ ID NO: 31187 - DNA, 262 bp, Homo sapiens
  MAP TO AC005803.1; EXPRESSED IN PLACENTA, SIGNAL = 0.58; EXPRESSED IN ADULT LIVER, SIGNAL = 0.75; EXPRESSED IN LUNG, SIGNAL = 0.44; EXPRESSED IN BONE MARROW, SIGNAL = 0.49; NT HIT: gi11425128, EVALUE 0.00e+00; SWISSPROT HIT: Q09499, EVALUE 7.00e-05
gtcagcttgctcttggcctctgtctccttggggaacgggtacttccactttgtgatgcgccccacctccccagacatgaaggtcagatagcgcagggtctccacagcgacattgatgtgcatcaccttcctcagaccctcccgctgccagacataaaaggccaccacaggggaggcgtagttttggatccacaggacgtccccagattcactgtccacagtcaccaccagcccatcaccattggacacaaagtgggacatct

SEQ ID NO: 31188 - DNA, 461 bp, Homo sapiens
  MAP TO AC005755.1; EXPRESSED IN ADULT LIVER, SIGNAL = 0.53; EXPRESSED IN PLACENTA, SIGNAL = 0.59; EXPRESSED IN LUNG, SIGNAL = 0.6; EXPRESSED IN BONE MARROW, SIGNAL = 0.69; EST_HUMAN HIT: AU117333.1, EVALUE 0.00e+00; SWISSPROT HIT: P49069, EVALUE 1.00e-82; NT HIT: gi11416248, EVALUE 0.00e+00
aagaagaaagtcaaacaaaatcaaagcagcaggacagtgataaactgaactccctcagcgttccttccgtttcaaagcgagtagtgctgggtgattcagtcagtacaggaacaactgaccagcagggtggtgtggccgaggtaaaggggacccaactgggagacaaattggactcgttcattaaaccacctgagtgcagtagtgatgtcaaccttgagctccggcagcggaacagaggggacctgacagcggactcggtccagaggggttcccgccatggcctagagcagtacctttccagattcgaagaagcaatgaagctaaggaaacagctgattagtgaaaaacccagtcaagaggatggaaatacaacagaagaatttgactcttttcgaatatttagattggtgggatgtgctcttcttgctcttggagtcagagcttttgtttgcaaatacttg

SEQ ID NO: 31189 - DNA, 526 bp, Homo sapiens
  MAP TO AC004079.1; EXPRESSED IN LUNG, SIGNAL = 0.61; EXPRESSED IN PLACENTA, SIGNAL = 0.57; EXPRESSED IN BONE MARROW, SIGNAL = 0.52; EXPRESSED IN ADULT LIVER, SIGNAL = 0.43; SWISSPROT HIT: O43365, EVALUE 3.00e-51; NT HIT: Y11717.1, EVALUE 5.00e-74; EST_HUMAN HIT: BE613963.1, EVALUE 0.00e+00
ggttttctgctttgtgttttgtcgagactctttcatccaggggaagatttgtttggccactgtgggtgagttgagcagggggctcttggccgcgttggcaggggtagggttgttgctggcattctgaggaggggaggcagaagagggaggcgggggcgcggcaggggtaggtgcagggggctgaggtgcgggctgaggcggctgtggggcagggggcgcggcctggggcggcggcgggtgcaggggcggctctcccaggcttggaggctggctaggtggggcgctcagggtgcgcaggcacgcctcactcagttcgtgtgccttggggtggcccccggcgctggagggagactggagggagcaggcgggtcggtggtactcgccgtcggcgcccaaagcggcggacgccgggtacggctgctgattggcattataagcgaacccgttggctgcctggtaggggtagccaccgtagatcgccgagctgtcgtagtaggtcgctttttgcatcgcgttgtttcacgat

SEQ ID NO: 31190 - DNA, 108 bp, Homo sapiens
  MAP TO AC005940.3; EXPRESSED IN PLACENTA, SIGNAL = 1.3; EXPRESSED IN ADULT LIVER, SIGNAL = 0.81; EXPRESSED IN LUNG, SIGNAL = 0.59; EXPRESSED IN FETAL LIVER, SIGNAL = 0.68; EXPRESSED IN BONE MARROW, SIGNAL = 0.76; NT HIT: AL031866.1, EVALUE 9.20e-01; EST_HUMAN HIT: BE972818.1, EVALUE 1.00e-31; SWISSPROT HIT: Q04786, EVALUE 3.20e+00
tggagacaatctatatttgcggagtagatgagatgagcacccaagatgtcttttcctattttaaagaatatcctccagctcacatcgaatggttggatgatacctcct

SEQ ID NO: 31191 - DNA, 133 bp, Homo sapiens
  MAP TO AC004033.3; EXPRESSED IN PLACENTA, SIGNAL = 0.89; EXPRESSED IN LUNG, SIGNAL = 0.74; EXPRESSED IN FETAL LIVER, SIGNAL = 0.85; EXPRESSED IN ADULT LIVER, SIGNAL = 0.73; EXPRESSED IN BONE MARROW, SIGNAL = 0.85; NT HIT: AB037839.1, EVALUE 2.00e-17; EST_HUMAN HIT: AL045386.2, EVALUE 5.00e-16; SWISSPROT HIT: P51869, EVALUE 1.40e+00
cgtagcccagggtgaacagcagtgcacaggtgaggggcctgatgcagaacagagaggccatgaagaaagccagcagtagccagggcagtgtcaggtagctgcctaggaagtgcaggttgagcctgtggccgct

SEQ ID NO: 31192 - DNA, 88 bp, Homo sapiens
  MAP TO AC005999.1; EXPRESSED IN PLACENTA, SIGNAL = 0.63; EXPRESSED IN BONE MARROW, SIGNAL = 0.66; EXPRESSED IN ADULT LIVER, SIGNAL = 0.52; EXPRESSED IN LUNG, SIGNAL = 0.54; NT HIT: gi6978720, EVALUE 4.60e-02; EST_HUMAN HIT: C01557.1, EVALUE 1.10e+00
catgacatcctcagcatcactgctgcccacagaaatccacccagaggccgcagtagtggcctggctgcggctcctctcaaaatgagaa

SEQ ID NO: 31193 - DNA, 237 bp, Homo sapiens
  MAP TO AC002554.1; EXPRESSED IN ADULT LIVER, SIGNAL = 0.48; EXPRESSED IN LUNG, SIGNAL = 0.48; EXPRESSED IN BONE MARROW, SIGNAL = 0.51; EST_HUMAN HIT: AA224259.1, EVALUE 1.00e-122; NT HIT: AJ000083.1, EVALUE 3.60e-02; SWISSPROT HIT: Q62893, EVALUE 3.50e+00
cccacctgcatgcaggacctgggcagtagccatggggaagatctggaaggagaatgctccagaaaactggaccagaagctgccagagctccgtggagtgggtgatcctgccatgatctcctctgatacctcctacctgtcctctagaggaagaatgattaaatggttctgggattcagctgaggagggctacaggacctaccacatggatgagtatgatgaggacaagaaccccagt

SEQ ID NO: 31194 - DNA, 170 bp, Homo sapiens
  MAP TO AC005737.1; EXPRESSED IN LUNG, SIGNAL = 0.64; EXPRESSED IN FETAL LIVER, SIGNAL =  24; EXPRESSED IN BONE MARROW, SIGNAL = 0.5; EXPRESSED IN ADULT LIVER, SIGNAL = 0.49; EST_HUMAN HIT: N45161.1, EVALUE 1.50e-01; SWISSPROT HIT: Q61999, EVALUE 1.50e-01; NT HIT: AJ243211.1, EVALUE 6.00e-03
caattgtagattaggtagatctcctgcatgtctctagattgtgagctctgaggaagaaggatggtcactgtgtctgtcttgttcaccacaatgtcagccactttcacagtgttggacttgtagtacgtgctcgttaaaagcttgtggaaagattgactgggattactttt

SEQ ID NO: 31195 - DNA, 171 bp, Homo sapiens
  MAP TO AC002112.1; EXPRESSED IN PLACENTA, SIGNAL = 0.64; EXPRESSED IN BONE MARROW, SIGNAL = 0.54; EXPRESSED IN ADULT LIVER, SIGNAL = 0.48; EXPRESSED IN LUNG, SIGNAL = 0.68; EST_HUMAN HIT: BE792960.1, EVALUE 5.90e-01; NT HIT: AF129458.1, EVALUE 2.50e-02
acggccctggccgccgccgccaccgccgccctgttggtgcggccgcttcctgatcatgtgcagcggcagccgccgcccggagccgggagcccgcgagcgccccagtccgggccggcgcccccgccagcacccgcggcaggagacgaggagccgcggcaggcgctgccctga

SEQ ID NO: 31196 - DNA, 180 bp, Homo sapiens
  MAP TO AC004051.1; EXPRESSED IN ADULT LIVER, SIGNAL = 0.6; EXPRESSED IN LUNG, SIGNAL = 0.63; EXPRESSED IN BONE MARROW, SIGNAL = 0.53; EST_HUMAN HIT: N80599.1, EVALUE 6.20e-01; NT HIT: AK024456.1, EVALUE 2.70e-02
atagtttcacagttcgtaattagtaaagtatgcaacacagttttgactgaaaaacagcaatgttctcaagtatcagaaatgatgcttgaatttggcaaagtagtcagtcccaattatgtagtgaacatgctcttttttggaactaaatggctaggaaagcatgtgtggggttctgaggat

SEQ ID NO: 31197 - DNA, 146 bp, Homo sapiens
  MAP TO AC004049.1; EXPRESSED IN LUNG, SIGNAL = 0.48; EXPRESSED IN BONE MARROW, SIGNAL = 0.68; EXPRESSED IN ADULT LIVER, SIGNAL = 0.42; NT HIT: AF229080.1, EVALUE 3.30e-01; EST_HUMAN HIT: AA307490.1, EVALUE 2.00e-62; SWISSPROT HIT: P11533, EVALUE 2.30e+00
aatcatcatgaataatcaaaaagtggtagctgtgctactgcaagagtgcaagcaagtgctggatcagctcttgttggaagcgccagatgtgtcggaagaggacaagagcgaggaccagcgctgcagaggtgaggttctgatgggag

SEQ ID NO: 31198 - DNA, 231 bp, Homo sapiens
  MAP TO AC003026.1; EXPRESSED IN ADULT LIVER, SIGNAL = 0.42; SWISSPROT HIT: P33527, EVALUE 3.00e-06; EST_HUMAN HIT: AA306629.1, EVALUE 1.00e-123; NT HIT: AF022843.1, EVALUE 1.00e-110
atggttcagacccacaatagcagtcccagcagggagccctccgaccctgcccaaggcatctgtacggttgacacccttgtgctttgcttctccagacagctcagcagctcctcctcctatagtggggacatcagcaggcaccacaacagcaccgcagaactgcagaaagctgaggccaagaaggaggagacctggaagctgatggaggctgacaaggcgcagacagggcag

SEQ ID NO: 31199 - DNA, 84 bp, Homo sapiens
  MAP TO AC004831.1; EXPRESSED IN ADULT LIVER, SIGNAL = 0.44; EXPRESSED IN LUNG, SIGNAL = 0.46; NT HIT: AL114656.1, EVALUE 1.70e-01; EST_HUMAN HIT: AA353907.1, EVALUE 2.60e-01
acccatccttaaaatcattctttggcatcttccgattcttggagtttttccatgtctttttattttcctgaaagcaaaggactg

SEQ ID NO: 31200 - DNA, 277 bp, Homo sapiens
  MAP TO AC005863.1; EXPRESSED IN ADULT LIVER, SIGNAL = 0.44; EXPRESSED IN LUNG, SIGNAL = 0.47; NT HIT: L15299.1, EVALUE 4.30e-02; EST_HUMAN HIT: BF577242.1, EVALUE 2.50e-01; SWISSPROT HIT: P36080, EVALUE 1.20e+00
aggccatctgagacttcttttaagtcttctcaccttggatcacttgaggcttgcaagattcttggccccactgatctctatcacacacatcagatgggttctagtcttgaacttgtgtctcctctgtcctcttccttcctggctcaaattttataagcctgtcttgtttgggatcttcttttcccaccttcctggtgcttctctttgtcttgtccttctcctcagcctccttacattcactttgccctggatagaatccacagtatttatcatcatt

SEQ ID NO: 31201 - DNA, 94 bp, Homo sapiens
  MAP TO AC000097.1; EXPRESSED IN FETAL LIVER, SIGNAL = 1.5; EXPRESSED IN ADULT LIVER, SIGNAL = 5.2; SWISSPROT HIT: P71689, EVALUE 5.50e+00; NT HIT: AK024427.1, EVALUE 2.00e-01
cttgcctgctgagacatagggctccacgggtctctctcctggggccgggctgactgtggcctgcgaggggcagtcatcgtgttgggttttcctg

SEQ ID NO: 31202 - DNA, 211 bp, Homo sapiens
  MAP TO AC005746.1; EXPRESSED IN ADULT LIVER, SIGNAL = 0.44; EXPRESSED IN LUNG, SIGNAL = 0.47; SWISSPROT HIT: P23688, EVALUE 3.80e+00; NT HIT: Z71560.1, EVALUE 5.00e-01
acatgttcttgacgtactgtgtggtcaagaagctggaactgggggggctgaacaagggccaagccttgcacttcagcttcctgacctggcagccattcagagagaccctgctaagtgctatttcctaaatacactctcttttcataacaatcttaccacattgctttcctttacaagcgctcttaaaaaagagaactggactccttctggt

SEQ ID NO: 31203 - DNA, 158 bp, Homo sapiens
  MAP TO AC003074.1; EXPRESSED IN ADULT LIVER, SIGNAL = 0.42; NT HIT: AJ286667.1, EVALUE 9.10e-02; SWISSPROT HIT: O98691, EVALUE 8.90e+00
gaagaccactattccctgcccaaatgcaattcaacttccagatttgttccatttcctgaggggacagttggctttgcctgtgagcttttcttggaggaagacttcatttctggaacttctacacagaacctggccctcagagttcctgaagcttccat

SEQ ID NO: 31204 - DNA, 126 bp, Homo sapiens
  MAP TO AC004535.1; EXPRESSED IN LUNG, SIGNAL = 0.64; EXPRESSED IN ADULT LIVER, SIGNAL = 0.48; EXPRESSED IN PLACENTA, SIGNAL = 0.74; EXPRESSED IN BONE MARROW, SIGNAL = 0.6; SWISSPROT HIT: P50391, EVALUE 5.40e+00
gagaagtgtgccgcagagagaggaagaaaatgcaccactttttgatggctacgatgtgccatattttgtgacatggactttcatatacattttctacttaatatgcacagcgatcctcaaagacaa

SEQ ID NO: 31205 - DNA, 161 bp, Homo sapiens
  MAP TO AC005016.1; EXPRESSED IN LUNG, SIGNAL = 0.47; EXPRESSED IN ADULT LIVER, SIGNAL = 0.4; NT HIT: M75984.1, EVALUE 9.30e-02; SWISSPROT HIT: P01581, EVALUE 3.00e+00; EST_HUMAN HIT: BE677068.1, EVALUE 1.40e-01
gtctgtattctgtcgctgaagagagtgaggataattcagatgaccctgagcgccaaacaactcaacggtgtaaaaataaggcacaacccctggaactttataatacaagtcataacacaaatgagacctgggtcataaagacccaaaaggaaatcaaagag

SEQ ID NO: 31206 - DNA, 201 bp, Homo sapiens
  MAP TO AC005969.4; EXPRESSED IN LUNG, SIGNAL = 0.6; EXPRESSED IN BONE MARROW, SIGNAL = 0.49; EXPRESSED IN ADULT LIVER, SIGNAL = 0.47; NT HIT: AE002513.2, EVALUE 1.90e+00; SWISSPROT HIT: P26659, EVALUE 3.00e-03
atggatttaaatctgaaagaacaggttgtcattttagatgaagctcataacatcgaggactgtgctcgggaatcagcaagttacagtgtaacagaagttcagcttcggtttgctcgggatgaactagatagtatggtcaacaataatataaggaagaaagatcatgaacccctacgagctgtgtgctgtagcctcattaag

SEQ ID NO: 31207 - DNA, 279 bp, Homo sapiens
  MAP TO AC006350.2; EXPRESSED IN LUNG, SIGNAL = 0.61; EXPRESSED IN ADULT LIVER, SIGNAL = 1.4; NT HIT: AJ289880.1, EVALUE 6.80e-01; EST_HUMAN HIT: AI538173.1, EVALUE 2.00e-39; SWISSPROT HIT: P21784, EVALUE 2.80e-02
atttagttttgtttttggtttttgccacatccacaatctcttttatgatttccttgattggctctgttgtaaatcctgtgatgtcacgcataatacctgggtacagttttctccagcagtaatttattgtttcagacttgatgactttcacagctttttctataacaatgatggcatcttcaatggtataatccttccagactttcatgatgtattctctatcagggttctcttctattgcattgacaagactttccatagaatgccatgtgtaatgag

SEQ ID NO: 31208 - DNA, 189 bp, Homo sapiens
  MAP TO AC005026.1; EXPRESSED IN LUNG, SIGNAL = 0.42; EXPRESSED IN ADULT LIVER, SIGNAL = 0.46; NT HIT: gi11420641, EVALUE 1.00e-102; SWISSPROT HIT: P10071, EVALUE 2.00e-24; EST_HUMAN HIT: AI906355.1, EVALUE 1.00e-88
gtagccctacgtatccggacctgcccttcattaggatctccccacaccggaaccccactgctgcttccgagtctcccttcagccctccacatccctacattaatccctacatggactatatccgctccttgcacagcagcccatcgctctccatgatctcagcaacccgtgggctgagccctacagatg

SEQ ID NO: 31209 - DNA, 369 bp, Homo sapiens
  MAP TO AB003151.1; EXPRESSED IN BONE MARROW, SIGNAL = 4.4; EXPRESSED IN FETAL LIVER, SIGNAL = 0.9; EXPRESSED IN LUNG, SIGNAL = 0.43; EXPRESSED IN ADULT LIVER, SIGNAL = 0.53; NT HIT: M62420.1, EVALUE 0.00e+00; SWISSPROT HIT: P16152, EVALUE 1.00e-48; EST_HUMAN HIT: AW968044.1, EVALUE 0.00e+00
atgtcgtccggcatccatgtagcgctggtgactggaggcaacaagggcatcggcttggccatcgtgcgcgacctgtgccggctgttctcgggggacgtggtgctcacggcgcgggacgtgacgcggggccaggcggccgtacagcagctgcaggcggagggcctgagcccgcgcttccaccagctggacatcgacgatctgcagagcatccgcgccctgcgcgacttcctgcgcaaggagtacgggggcctggacgtgctggtcaacaacgcgggcatcgccttcaagggtatggggaggggacgtggcctccccgaagaagaaccgatgcactggggctcctggcgtctgcggggtccataacgcctc

SEQ ID NO: 31210 - DNA, 300 bp, Homo sapiens
  MAP TO AC002094.1; EXPRESSED IN LUNG, SIGNAL = 0.53; EXPRESSED IN BONE MARROW, SIGNAL = 0.75; EXPRESSED IN ADULT LIVER, SIGNAL = 0.46; EST_HUMAN HIT: AI133435.1, EVALUE 0.00e+00; NT HIT: gi11426686, EVALUE 0.00e+00; SWISSPROT HIT: P04004, EVALUE 7.00e-56
agttcattagccgggactggcacggtgtgccagggcaagtggacgcagccatggctggccgcatctacatctcaggcatggcaccccgcccctccttggccaagaaacaaaggtttaggcatcgcaaccgcaaaggctaccgttcacaacgaggccacagccgtggccgcaaccagaactcccgccggccatcccgcgccacgtggctgtccttgttctccagtgaggagagcaacttgggagccaacaactatgatgactacaggatggactggcttgtgcctgccacctgtgaaccca

SEQ ID NO: 31211 - DNA, 86 bp, Homo sapiens
  MAP TO AC002067.1; EXPRESSED IN LUNG, SIGNAL = 0.54; EXPRESSED IN BONE MARROW, SIGNAL = 0.6; EXPRESSED IN ADULT LIVER, SIGNAL = 0.47; EST_HUMAN HIT: AW904026.1, EVALUE 3.00e-41; NT HIT: gi11422047, EVALUE 2.00e-41; SWISSPROT HIT: O43913, EVALUE 2.00e-10
ttaaccctggttggccatgacgatcagcttgatggaccaaaatacaaatgcacagtgtctctagacttcatcagagctattgcaag

SEQ ID NO: 31212 - DNA, 198 bp, Homo sapiens
  MAP TO AC000061.1; EXPRESSED IN BONE MARROW, SIGNAL = 0.57; EXPRESSED IN ADULT LIVER, SIGNAL = 0.48; SWISSPROT HIT: P13569, EVALUE 8.00e-32; NT HIT: gi11422155, EVALUE 1.00e-108; EST_HUMAN HIT: AW852058.1, EVALUE 1.00e-107
gtcatagaagagaacaaagtgcggcagtacgattccatccagaaactgctgaacgagaggagcctcttccggcaagccatcagcccctccgacagggtgaagctctttccccaccggaactcaagcaagtgcaagtctaagccccagattgctgctctgaaagaggagacagaagaagaggtgcaagatacaaggctt

SEQ ID NO: 31213 - DNA, 222 bp, Homo sapiens
  MAP TO AC006186.1; EXPRESSED IN ADULT LIVER, SIGNAL = 0.53; EST_HUMAN HIT: BE785642.1, EVALUE 1.00e-120; NT HIT: gi9506686, EVALUE 1.00e-120
ctggcgtctgtcctcaccatgcctagcctttgggaccgcttctcgtcgtcgtccacctcctcttcgccctcgtccttgccccgaactcccaccccagatcggccgccgcgctcagcctgggggtcggcgacccgggaggaggggtttgaccgctccacgagcctggagagctcggactgcgagtccctggacagcagcaacagtggcttcgggccggagaag

SEQ ID NO: 31214 - DNA, 126 bp, Homo sapiens
  MAP TO AC005031.1; EXPRESSED IN PLACENTA, SIGNAL = 0.59; EXPRESSED IN ADULT LIVER, SIGNAL = 0.45; EXPRESSED IN LUNG, SIGNAL = 0.53; EXPRESSED IN BONE MARROW, SIGNAL = 0.55; SWISSPROT HIT: Q13075, EVALUE 6.00e-06; NT HIT: U80017.1, EVALUE 1.00e-52; EST_HUMAN HIT: U19036.1, EVALUE 5.00e-50
ggagtaagaaatcctcagaggaaattacccagtatattcaaagctacaagggatttgttgacataacggtaatgtataacagcaatttttttctcaagtttttggattacctgtaagtgtctgact

SEQ ID NO: 31215 - DNA, 131 bp, Homo sapiens
  MAP TO AC003034.1; EXPRESSED IN LUNG, SIGNAL = 0.6; EXPRESSED IN PLACENTA, SIGNAL = 0.62; EXPRESSED IN BONE MARROW, SIGNAL = 1.6; EXPRESSED IN ADULT LIVER, SIGNAL = 0.55; EST_HUMAN HIT: AA962431.1, EVALUE 6.00e-59; SWISSPROT HIT: P38940, EVALUE 2.40e+00; NT HIT: AF126145.1, EVALUE 1.00e-22
gtggtgaaggcatttgtggtcctggccttgcagttcctgtcccatgacccagaacagctcaccaaggagctgcagcagcatgtgaagtcagtgacagccccatacaagtacccaagaaaggtaaggccttt

SEQ ID NO: 31216 - DNA, 178 bp, Homo sapiens
  MAP TO AC005873.2; EXPRESSED IN LUNG, SIGNAL = 0.46; EXPRESSED IN ADULT LIVER, SIGNAL = 0.47; SWISSPROT HIT: O13969, EVALUE 1.30e+00; NT HIT: M84594.1, EVALUE 4.10e-01; EST_HUMAN HIT: AA873803.1, EVALUE 6.20e-01
acatccatactcaaaaatgcctttggtagatactatggcaccattaaacagtctgtgggaggacccgagattaaaccagctatcagtataacatggagttttgatcaaaacttgaacatacttctggatttgctgacggaccactggccctatgaggtgacccccagaaaaatgtttc

SEQ ID NO: 31217 - DNA, 158 bp, Homo sapiens
  MAP TO AC004027.1; EXPRESSED IN LUNG, SIGNAL = 0.44; EXPRESSED IN ADULT LIVER, SIGNAL = 0.46; NT HIT: AF003528.1, EVALUE 1.00e-25; SWISSPROT HIT: P11260, EVALUE 7.00e-04; EST_HUMAN HIT: AV700745.1, EVALUE 1.00e-29
aagcaaaaagtttgaaaaacttatttgaggtaataattgaggaaaacttccctggccttgctagagatttagatattcaaatacaagaagttcaaagaactcctgcgagagtcattgcaaaaaagctcatcaacaaggagtatagttatcaggctatc

SEQ ID NO: 31218 - DNA, 400 bp, Homo sapiens
  MAP TO AC006095.1; EXPRESSED IN ADULT LIVER, SIGNAL = 0.46; EST_HUMAN HIT: BE090733.1, EVALUE 0.00e+00; NT HIT: AF058994.1, EVALUE 0.00e+00; SWISSPROT HIT: P97785, EVALUE 7.00e-61
atgcctgtctttctctgcatttgcagtggagcacattcccaaaggaacaactgcctggatgcagcgaaggcctgcaacctcgacgacatttgcaagaagtacaggtcggcgtacatcaccccgtgcaccaccagcgtgtccaatgatgtctgcaaccgccgcaagtgccacaaggccctccggcagttctttgacaaggtcccggccaagcacagctacggaatgctcttctgctcctgccgggacatcgcctgcacagagcggaggcgacagaccatcgtgcctgtgtgctcctatgaagagagggagaagcccaactgtttgaatttgcaggactcctgcaagacgaattacatctgcaggtaagtgggcactggcagctggtgattaatgaggtgac

SEQ ID NO: 31219 - DNA, 119 bp, Homo sapiens
  MAP TO AC005926.1; EXPRESSED IN ADULT LIVER, SIGNAL = 0.48; EXPRESSED IN LUNG, SIGNAL = 0.73; EXPRESSED IN BONE MARROW, SIGNAL = 0.57; NT HIT: D14567.1, EVALUE 6.60e-02; SWISSPROT HIT: P51805, EVALUE 7.10e+00
aatcagactcttcaggagcagtatccaagattctatagtttgtaagactgccaaggtggttccaatatgcagccatgatttagaaccatttgattatattaataaagtatttaataagt

SEQ ID NO: 31220 - DNA, 160 bp, Homo sapiens
  MAP TO AC002485.1; EXPRESSED IN LUNG, SIGNAL = 0.62; EXPRESSED IN BONE MARROW, SIGNAL = 0.59; EXPRESSED IN ADULT LIVER, SIGNAL = 0.61; SWISSPROT HIT: P36492, EVALUE 4.00e+00; NT HIT: AL163210.2, EVALUE 9.30e-02; EST_HUMAN HIT: AA847499.1, EVALUE 1.40e-01
aggcacaggcacgggtaccagctccatgcacagctatggctgggccagaagtagcacagcagcttccgctatgggcaccgacatctggacaaggaaaatgtggttgtgccagaaaactcagaggccagcaactgtggagccccaaggggtgagggaggac

SEQ ID NO: 31221 - DNA, 168 bp, Homo sapiens; identical to SEQ ID NO: 27775
  MAP TO AC002543.1; EXPRESSED IN LUNG, SIGNAL = 0.63; EXPRESSED IN BONE MARROW, SIGNAL = 0.77; EXPRESSED IN ADULT LIVER, SIGNAL = 0.47; NT HIT: gi11422027, EVALUE 8.00e-24; SWISSPROT HIT: P47755, EVALUE 7.00e-08; EST_HUMAN HIT: BF242503.1, EVALUE 1.00e-23

SEQ ID NO: 31222 - DNA, 273 bp, Homo sapiens
  MAP TO AC005013.1; EXPRESSED IN BONE MARROW, SIGNAL = 0.66; EXPRESSED IN ADULT LIVER, SIGNAL = 0.49; NT HIT: gi11421735, EVALUE 6.00e-60; EST_HUMAN HIT: AU117379.1, EVALUE 8.00e-60
atgaacaccatgggacacatgatggagatgatgggctcccggcaggaccagacgccacaccatcacatgcactcgcacccgcatcagcaccagacactgccaccccatcacccttacccacaccagcaccagcacccagcacaccatcctcaccctcaaccccatcaccagcagaaccatccacatcaccactcccattcccaccttcatgcacacccagcacatcaccagacctcgccacatccgcccctgcacaccggcaaccaagcacag

SEQ ID NO: 31223 - DNA, 112 bp, Homo sapiens
  MAP TO AC003953.1; EXPRESSED IN PLACENTA, SIGNAL = 0.58; EXPRESSED IN LUNG, SIGNAL = 0.63; EXPRESSED IN ADULT LIVER, SIGNAL = 0.6; EXPRESSED IN BONE MARROW, SIGNAL = 0.58; NT HIT: AL161545.2, EVALUE 6.20e-02
attttttttttcgacagctcccttttccactgcttctatgatgaatttccttggtcttattcctaaaatttccactcctttcaaactgcatttttacactttgacttttatg

SEQ ID NO: 31224 - DNA, 218 bp, Homo sapiens
  MAP TO AC004141.1; EXPRESSED IN LUNG, SIGNAL = 0.45; EXPRESSED IN ADULT LIVER, SIGNAL = 0.46; EST_HUMAN HIT: AA883179.1, EVALUE 1.90e-01; SWISSPROT HIT: O15072, EVALUE 2.10e-02; NT HIT: AB023177.1, EVALUE 1.00e-120
gcccacattgactcgcacacagatgacttttcttgtctgcatgccgacagagcaggaggcctccccattccaagtcgtagttgtgttgaaggacgatactgaggtgtcctcaatgcactggccccagggaccagtttgccagtggtacactgtgcaaggatgctcattacagcttcgtacttcttgcaaagcactgctatttggacagcgaattccac

SEQ ID NO: 31225 - DNA, 406 bp, Homo sapiens
  MAP TO AC003695.1; EXPRESSED IN BONE MARROW, SIGNAL = 0.52; EXPRESSED IN LUNG, SIGNAL = 0.68; EXPRESSED IN ADULT LIVER, SIGNAL = 0.56; SWISSPROT HIT: P98092, EVALUE 2.40e-02
tcctccgcccaagatcccagctgcgcctcagtgctgacttggaggtcttggatctgcagggcctccggccggaccgggagttggcccgggtttctgtgctgtccactgacagcggcattgagcgggaccttcccacgggggctgatgagctgcctgcacccggcagccctgagatggagcgagccgggctgcagcgcaaagggggcatcaagaagcgtgcatggcccctggacttcttgatgcctggcagctgggacgggcccccagggctgcaccggaggacaggccggcccagtggggatggggaaatgctgcccggcgtgtcccggctgcacacagcccgggtacttgtgctcggagatgacaggatgctggggcgcctggcccaggcctaccacagactcag

SEQ ID NO: 31226 - DNA, 180 bp, Homo sapiens
  MAP TO AC003082.1; EXPRESSED IN BONE MARROW, SIGNAL = 0.59; EXPRESSED IN LUNG, SIGNAL = 0.66; EXPRESSED IN ADULT LIVER, SIGNAL = 0.56; SWISSPROT HIT: P04706, EVALUE 1.70e+00; NT HIT: gi9256542, EVALUE 2.70e-02
agtgctgatgctagtggctcgctctttggtcctggctctgactccaccagcagtaacaaccagcagtggtggaggctgtgggtgcaatagacttttatcatggccactcttctggaagatgtcactgccagcaactcctgactcagctttggcagcagctgccgcatcgaagactgttgt

SEQ ID NO: 31227 - DNA, 210 bp, Homo sapiens
  MAP TO AC003029.1; EXPRESSED IN LUNG, SIGNAL = 0.56; EXPRESSED IN BONE MARROW, SIGNAL = 0.59; EXPRESSED IN ADULT LIVER, SIGNAL = 0.49; NT HIT: M20453.1, EVALUE 1.00e-91; SWISSPROT HIT: P05091, EVALUE 3.00e-27; EST_HUMAN HIT: AI907063.1, EVALUE 6.00e-88
gtggatgaaactcagtttaagaagatcctcggctacatcaacacggggaagcaagagggggcgaagctgctgtgtggtgggggcattgctgctgaccgtggttacttcatccagcccactgtgtttggagatgtgcaggatggcatgaccatcgccaaggaggaggtgagcacttggggccagtgctctggaaacattcttggcgggagg

SEQ ID NO: 31228 - DNA, 180 bp, Homo sapiens
  MAP TO AC004057.1; EXPRESSED IN ADULT LIVER, SIGNAL = 0.42; EXPRESSED IN LUNG, SIGNAL = 0.45; EXPRESSED IN FETAL LIVER, SIGNAL = 0.74; SWISSPROT HIT: Q01484, EVALUE 4.00e-31; NT HIT: gi10947053, EVALUE 4.00e-97; EST_HUMAN HIT: BF341901.1, EVALUE 6.00e-04
attggctctcttgtctaaaaggagtttggttacacggtagtggccacagtgcgcagcaacgtggagggctgtcaggtagtctagggtgacatcatcaacaggtgccttgtgctgtaacaggtgcttcacacattccacgtggtctccctgggcagccatgtgtagtggagacagcccatt

SEQ ID NO: 31229 - DNA, 147 bp, Homo sapiens
  MAP TO AC005571.1; EXPRESSED IN LUNG, SIGNAL = 0.58; EXPRESSED IN ADULT LIVER, SIGNAL = 0.46; NT HIT: L09734.1, EVALUE 3.30e-01; EST_HUMAN HIT: AA555015.1, EVALUE 3.20e-02; SWISSPROT HIT: P47747, EVALUE 9.00e+00
atgtggtgtggaacaacgtgatgatgcagaaggattctctgtccgtatcctgccacgcccaccctcccacttctctcagcctcctttgctggctcctgctcttcttcccagcctcaaaatactgacttctccaggccttaatcctgg

SEQ ID NO: 31230 - DNA, 165 bp, Homo sapiens
  MAP TO AC004062.1; EXPRESSED IN PLACENTA, SIGNAL = 0.79; EXPRESSED IN LUNG, SIGNAL = 0.53; EXPRESSED IN ADULT LIVER, SIGNAL = 0.48; EST_HUMAN HIT: AA747718.1, EVALUE 2.20e+00; NT HIT: gi6678753, EVALUE 9.60e-02; SWISSPROT HIT: P22178, EVALUE 1.30e+00
gtaggaaaacaacactttggagagaaagcacactttactgtcccctacacagtattctctggagtggttaacatagaagttgcaccgcaggattatccactgcccactgcctttgctggcaagttgttaaggaatctgattaatggaggaaatatggttttggca

SEQ ID NO: 31231 - DNA, 464 bp, Homo sapiens
  MAP TO AC000111.1; EXPRESSED IN ADULT LIVER, SIGNAL = 0.44; EXPRESSED IN PLACENTA, SIGNAL = 0.73; EXPRESSED IN LUNG, SIGNAL = 0.5; EST_HUMAN HIT: W52051.1, EVALUE 3.00e-39; NT HIT: gi6995995, EVALUE 0.00e+00; SWISSPROT HIT: P13569, EVALUE 2.00e-82
ctgtctcctggacagaaacaaaaaaacaatcttttaaacagactggagagtttggggaaaaaaggaagaattctattctcaatccaatcaactctatacgaaaattttccattgtgcaaaagactcccttacaaatgaatggcatcgaagaggattctgatgagcctttagagagaaggctgtccttagtaccagattctgagcagggagaggcgatactgcctcgcatcagcgtgatcagcactggccccacgcttcaggcacgaaggaggcagtctgtcctgaacctgatgacacactcagttaaccaaggtcagaacattcaccgaaagacaacagcatccacacgaaaagtgtcactggcccctcaggcaaacttgactgaactggatatatattcaagaaggttatctcaagaaactggcttggaaataagtgaagaaattaacgaagaagacttaaag

SEQ ID NO: 31232 - DNA, 96 bp, Homo sapiens
  MAP TO AC006451.1; EXPRESSED IN ADULT LIVER, SIGNAL = 0.4; EST_HUMAN HIT: AU132052.1, EVALUE 3.00e-47; NT HIT: gi11419317, EVALUE 2.00e-47; SWISSPROT HIT: Q05209, EVALUE 6.00e-14
cacaacattatactcccatatcatcctccaaaaatctattactgtatttgctaaaggtccttgagttgctacatatgcttttggcccatagacgcc

SEQ ID NO: 31233 - DNA, 311 bp, Homo sapiens
  MAP TO AB019439.1; EXPRESSED IN LUNG, SIGNAL = 0.42; EXPRESSED IN ADULT LIVER, SIGNAL = 0.51; EST_HUMAN HIT: AW403220.1, EVALUE 0.00e+00; NT HIT: L29155.1, EVALUE 0.00e+00; SWISSPROT HIT: P01764, EVALUE 3.00e-43
gtgtccagtgtgaggtgcagctggtggagtctgggggaggcctggtcaagcctggggggtccctgagactctcctgtgcagcctctggattcaccttcagtagctatagcatgaactgggtccgccaggctccagggaaggggctggagtgggtctcatccattagtagtagtagtagttacatatactacgcagactcagtgaagggccgattcaccatctccagagacaacgccaagaactcactgtatctgcaaatgaacagcctgagagccgaggacacggctgtgtattactgtgcgagagacaca

SEQ ID NO: 31234 - DNA, 286 bp, Homo sapiens
  MAP TO AC000403.1; EXPRESSED IN PLACENTA, SIGNAL = 0.72; EXPRESSED IN BONE MARROW, SIGNAL = 0.57; EXPRESSED IN ADULT LIVER, SIGNAL = 0.61; EXPRESSED IN LUNG, SIGNAL = 0.84; SWISSPROT HIT: P47181, EVALUE 6.40e+00; NT HIT: AJ005158.1, EVALUE 2.70e+00; EST_HUMAN HIT: BF679213.1, EVALUE 1.00e+00
ggccaggcccaggccaatcactgtatcccaccccttggctcttgggattattccaaggttgctcaaccaaagtgcagcttccagcaatgctatctttaccagaactggcagggaagtcccttctttcccctttggtgggcggcggttaggggtgatgctcattctctgcagcaataagtgtgtaataacaaggtccctaaccttctggttcctgttgctcttccccagtgttctccccataagcctccttaagataaaatctactttgagatatgtttttgcagcc

SEQ ID NO: 31235 - DNA, 100 bp, Homo sapiens
  MAP TO AC004130.1; EXPRESSED IN BONE MARROW, SIGNAL = 0.54; EXPRESSED IN ADULT LIVER, SIGNAL = 0.5; EXPRESSED IN LUNG, SIGNAL = 0.57; EST_HUMAN HIT: AW850168.1, EVALUE 3.10e-01; SWISSPROT HIT: P27206, EVALUE 7.20e+00; NT HIT: gi11024659, EVALUE 3.30e+00
gccatgttttgaggatgttcaaaaactctatagagagatccatgtgacaaagcacacaggccacctgacaatagccagcacccagctgcaagtgagccat

SEQ ID NO: 31236 - DNA, 106 bp, Homo sapiens
  MAP TO AC005191.1; EXPRESSED IN ADULT LIVER, SIGNAL = 0.55; NT HIT: AF177946.1, EVALUE 2.30e-01; EST_HUMAN HIT: AV686104.1, EVALUE 1.30e+00
ccatggcatggtgctattactcttagctacactaaaaagaagtcagtggacatgtatctcatggcaacaccacaggcccttgattatcatcagaataaaaattccg

SEQ ID NO: 31237 - DNA, 202 bp, Homo sapiens
  MAP TO AC005045.2; EXPRESSED IN LUNG, SIGNAL = 0.48; EXPRESSED IN ADULT LIVER, SIGNAL =   1; EST_HUMAN HIT: N41481.1, EVALUE 7.10e-01; NT HIT: gi9961251, EVALUE 1.00e-110; SWISSPROT HIT: P21439, EVALUE 2.00e-27
ttccagcagcttccagttcttttttatctcttttggcatttccagccaacaatttcatttcaacaattcctgacacagcaataattggaacaactgctaatagcaatagggttaactgccaaccgtagataaatgatatgataataccagttccaaggttagctatattctgtgcaattaaagccaacctggttcctgtggc

SEQ ID NO: 31238 - DNA, 98 bp, Homo sapiens
  MAP TO AC004944.1; EXPRESSED IN ADULT LIVER, SIGNAL = 0.61; EXPRESSED IN LUNG, SIGNAL = 0.48; NT HIT: M22638.1, EVALUE 3.20e+00; EST_HUMAN HIT: BE674473.1, EVALUE 7.70e-02; SWISSPROT HIT: P28329, EVALUE 2.50e+00
atccaatgggctgtatggacaggaagatgcccagcaaggtgtgggcccagggtctcggcccttctttgtgttgaggcaccatcaccaacattattatt

SEQ ID NO: 31239 - DNA, 286 bp, Homo sapiens
  MAP TO AC005873.2; EXPRESSED IN LUNG, SIGNAL = 0.54; EXPRESSED IN ADULT LIVER, SIGNAL = 0.41; SWISSPROT HIT: O67099, EVALUE 2.20e+00
aatcctagcaaatctgccaaaagaccaggcaggctttctgaagaagtcatcagtgcagtctgagccaggaggaataaaactttcaggcttactgacatatctattaatagtttttgaaacagaagaaagaaggaaacttagtgttttgaattcctttttccaagcagcaaagagccttctgctggggctggggcatgccagctacttctcatattccccagagttcatgtgtgaggtgtcatacatggagcaagtgctcagagaagctttggtgaataatgaattc

SEQ ID NO: 31240 - DNA, 193 bp, Homo sapiens
  MAP TO AC004216.1; EXPRESSED IN LUNG, SIGNAL = 0.41; EXPRESSED IN ADULT LIVER, SIGNAL = 0.43; SWISSPROT HIT: Q06124, EVALUE 1.00e-33; NT HIT: L07527.1, EVALUE 1.00e-105; EST_HUMAN HIT: AA579707.1, EVALUE 2.00e-90
ctgacagcgaatcataacatgggtcactttagacttgccgtcattgctctcccctttgtcatcaccagtgcgcacagaaagaacaaaatctccagggtggctctggctctctcgtacaagaaaactaccatgttttcctttttcagttaataatttctctgcttctttcccagagagatgtccatgaaaccac

SEQ ID NO: 31241 - DNA, 153 bp, Homo sapiens
  MAP TO AC000382.1; EXPRESSED IN LUNG, SIGNAL = 0.52; EXPRESSED IN ADULT LIVER, SIGNAL = 0.46; NT HIT: AF035737.1, EVALUE 1.00e-10; SWISSPROT HIT: P34088, EVALUE 4.00e+00; EST_HUMAN HIT: H55076.1, EVALUE 1.00e-57
cgtggactcgatagctgatatgagcaatgtcaccaccatcctgctctccacggaatcatcttcaacagactcctcatcttcaatggactcctcatcttccatgggcagagtggaaactgcaacttgtgccatgatccctgtgcaaaaaagtag

SEQ ID NO: 31242 - DNA, 264 bp, Homo sapiens
  MAP TO AC006252.4; EXPRESSED IN ADULT LIVER, SIGNAL = 2.8; SWISSPROT HIT: P13196, EVALUE 2.00e-44; NT HIT: gi11449701, EVALUE 0.00e+00; EST_HUMAN HIT: AV707162.1, EVALUE 0.00e+00
cagggatgatgtggctggggcagtggacaacagggaggccggcatccattagcatctgtctcatgagtttgacgttgcgctggtgctggcggcgaagcacccgtccctcagcgctcttcaggatccgcacagactccagggctccagccagcagcatgggtggcagagaggtggtgaagatgaagccagcagcataggaccgtacggtgtcaatcagagaactcgtgctggcgatgtaccctccaacacaaccaaaggctttgc

SEQ ID NO: 31243 - DNA, 96 bp, Homo sapiens
  MAP TO AC000113.1; EXPRESSED IN ADULT LIVER, SIGNAL = 0.48; EXPRESSED IN LUNG, SIGNAL = 0.51; SWISSPROT HIT: P24004, EVALUE 2.50e+00; NT HIT: AF153980.1, EVALUE 1.30e-02; EST_HUMAN HIT: BE905844.1, EVALUE 1.20e+00
ttcacaacttcatgaattgttacttttcccattttacagatgagaaacggcacagagaggttagaaacttggtcgaagtcacacagctcataaaag

SEQ ID NO: 31244 - DNA, 324 bp, Homo sapiens
  MAP TO AB019439.1; EXPRESSED IN ADULT LIVER, SIGNAL = 0.44; NT HIT: M99683.1, EVALUE 0.00e+00; SWISSPROT HIT: P06331, EVALUE 1.00e-26; EST_HUMAN HIT: AW403420.1, EVALUE 0.00e+00
gggtcctgccccaggtgcagctgcaggagtcgggcccaggactggtgaagccttcacagaccctgtccctcacctgtactgtctctggtggctccatcagcagtggtggttactactggagctggatccgccagcacccagggaagggcctggagtggattgggtacatctattacagtgggagcacctactacaacccgtccctcaagagtcgagttaccatatcagtagacacgtctaagaaccagttctccctgaagctgagctctgtgactgccgcggacacggccgtgtattactgtgcgagagacacaatgaggggag

SEQ ID NO: 31245 - DNA, 126 bp, Homo sapiens
  MAP TO AC005034.1; EXPRESSED IN ADULT LIVER, SIGNAL = 0.41; SWISSPROT HIT: P28166, EVALUE 4.10e+00; EST_HUMAN HIT: BF128224.1, EVALUE 1.00e-01; NT HIT: Z72999.1, EVALUE 1.10e+00
gcatgtggagagtctgggctgatcttgactctccatgtgggccctccctgatatggagctgaaccaaaccttggcaagccgagtaaaaattcagtaacactggagccttcacaacccatgtctctc

SEQ ID NO: 31246 - DNA, 177 bp, Homo sapiens
  MAP TO AL137225.7; EXPRESSED IN ADULT LIVER, SIGNAL = 0.57; EXPRESSED IN PLACENTA, SIGNAL = 0.59; EXPRESSED IN FETAL LIVER, SIGNAL = 0.54; EXPRESSED IN BONE MARROW, SIGNAL = 0.45; EST_HUMAN HIT: AA634045.1, EVALUE 1.50e-01; SWISSPROT HIT: P27918, EVALUE 1.30e+00; NT HIT: AJ229043.1, EVALUE 7.00e-03
cctgtggtgcagcagcaaaagggcaaaaccatcaagcttgctgatgccggggaggccctcacgttccctgagggttatgccaaaggctcgtcgcagctgctgctcccagccaccttcctctctgcagagcttgcccttctgcagaagtcctttcatgtgaatatccaggatacaatg

SEQ ID NO: 31247 - DNA, 405 bp, Homo sapiens
  MAP TO AC015842.4; EXPRESSED IN BONE MARROW, SIGNAL = 0.55; EXPRESSED IN ADULT LIVER, SIGNAL = 0.7; EXPRESSED IN PLACENTA, SIGNAL = 0.69; EXPRESSED IN FETAL LIVER, SIGNAL = 0.51; SWISSPROT HIT: P36018, EVALUE 1.00e+00; NT HIT: AL161546.2, EVALUE 6.40e-02; EST_HUMAN HIT: BF217200.1, EVALUE 0.00e+00
atccagaatgtgggtaaaactgagcactataatgagagtttagtaatctggcctctagttttgtgtctgccagtaacttactttctgagggagtcttatctgggcctcagttcactcatttacaaactttgcgaatttgaactggaaccagatgccctgtggcagtctcagaattctctccagaactctgctggctggaggatgcatactaggagaaagacatctcaggatgagattgtgctctattatatgtcacgtttgctttgcactgagaggcctattgttaatactgccaatacctacagcatctcagacacagcgagaagcagcaatcacttccttctgaaggacagagaccacatgtatcaaaatccctgtctctggaccatctggctgctgattgta

SEQ ID NO: 31248 - DNA, 170 bp, Homo sapiens
  MAP TO AC016057.3; EXPRESSED IN BONE MARROW, SIGNAL = 0.44; EXPRESSED IN ADULT LIVER, SIGNAL = 0.55; EXPRESSED IN PLACENTA, SIGNAL = 0.69; EXPRESSED IN FETAL LIVER, SIGNAL = 0.46; NT HIT: gi6601589, EVALUE 3.00e-91; SWISSPROT HIT: P57078, EVALUE 1.00e-03; EST_HUMAN HIT: AA972567.1, EVALUE 5.00e-91
ctggctgcaaaatgcagaggtgatttcttatctttgcttttggaatgaatggacacattaaagccaagtaggttatttacagaaccagggcccccctgtctacatgcataatgtagaggagtacacccatcgttgtcttcatccattaccagctctttgatctgttgcat

SEQ ID NO: 31249 - DNA, 162 bp, Homo sapiens
  MAP TO AC021786.2; EXPRESSED IN ADULT LIVER, SIGNAL = 0.65; EXPRESSED IN PLACENTA, SIGNAL = 0.54; EST_HUMAN HIT: BF310258.1, EVALUE 1.40e-01
ataatgagcaccaccttggctatggctactgattatataaccgtgagcatttatgtcttcaatagtatgttagtaatctttgaagacacaaatctcaaatttgcagaagctggcttcacttgttcagaggaagacattgatgatgagtgcttttttcgccaa

SEQ ID NO: 31250 - DNA, 120 bp, Homo sapiens
  MAP TO AL161646.3; EXPRESSED IN PLACENTA, SIGNAL = 0.5; EXPRESSED IN ADULT LIVER, SIGNAL = 0.63; EXPRESSED IN FETAL LIVER, SIGNAL = 0.48; NT HIT: AF050737.1, EVALUE 6.70e-02; EST_HUMAN HIT: BE252469.1, EVALUE 2.50e-02; SWISSPROT HIT: P24563, EVALUE 9.30e+00
gccccttggaagagcaagatgatgtacagattgtcctacctgaagactgtggaggagaggaaggtgtctcatctccccagtctccaaatcgtcagcattaagaagtgtttgttgaataaa

SEQ ID NO: 31251 - DNA, 101 bp, Homo sapiens
  MAP TO AC021239.3; EXPRESSED IN PLACENTA, SIGNAL = 0.57; EXPRESSED IN ADULT LIVER, SIGNAL = 0.53; EXPRESSED IN BONE MARROW, SIGNAL = 0.42; EXPRESSED IN FETAL LIVER, SIGNAL = 0.51; NT HIT: AL161572.2, EVALUE 8.50e-01; EST_HUMAN HIT: H57548.1, EVALUE 1.30e+00
atttccatccctgcattactccaagagaatctgatttatcagattgataatgggaccaggaagaactctgtatttctaacaggatctcagatgattccatg

SEQ ID NO: 31252 - DNA, 264 bp, Homo sapiens
  MAP TO AL133414.3; EXPRESSED IN FETAL LIVER, SIGNAL = 0.52; EXPRESSED IN PLACENTA, SIGNAL = 0.59; EXPRESSED IN ADULT LIVER, SIGNAL = 0.53; EXPRESSED IN BONE MARROW, SIGNAL = 0.49; SWISSPROT HIT: P43626, EVALUE 3.00e-45; NT HIT: gi7657276, EVALUE 0.00e+00; EST_HUMAN HIT: AW951147.1, EVALUE 4.00e-71
gtcgcctggtgaaatcagaagagacagtcatcctgcaatgttggtcagatgtcatgtttgaacacttccttctgcacagagaggggatgtttaacgacactttgcgcctcattggagaacaccatgatggggtctccaaggccaacttctccatcagtcgcatgaagcaagacctggcagggacctacagatgctacggttctgttactcactccccctatcagttgtcagctcccagtgaccctctggacatcgtgatcatag

SEQ ID NO: 31253 - DNA, 140 bp, Homo sapiens
  MAP TO AL157377.1; EXPRESSED IN ADULT LIVER, SIGNAL = 0.56; EXPRESSED IN FETAL LIVER, SIGNAL = 0.49; EXPRESSED IN PLACENTA, SIGNAL = 0.52; EST_HUMAN HIT: BF106829.1, EVALUE 4.70e-01; SWISSPROT HIT: P06802, EVALUE 7.00e-10; NT HIT: gi4826895, EVALUE 7.00e-67
tgccgaaaacctgatcagcatttcaagccctatttgactcctgatttgccaaagcgactgcactatgccaagaacgtcagaatcgacaaagttcatctctttgtggatcaacagtggctggctgttaggttcgtgtatct

SEQ ID NO: 31254 - DNA, 383 bp, Homo sapiens
  MAP TO AC022268.3; EXPRESSED IN PLACENTA, SIGNAL = 0.5; EXPRESSED IN ADULT LIVER, SIGNAL = 0.56; EXPRESSED IN BONE MARROW, SIGNAL = 0.51; SWISSPROT HIT: P53566, EVALUE 1.60e+00; NT HIT: X97252.1, EVALUE 2.40e-01
ccagcatggtaaggatcacctcctcatccagatgagctgtcccttcccgcaaacagctttctccctcctcttcagcccagcttctgctgatgctgcttggcttggaggacacgttttcatcttcagacctactatcttcatcactctcaccttccaagcctcttcttgcagacaattcctctaagtcttcactgtctgactggctgcccccagcaggcaggaggttccaggctgagctgctggtgtgatacagggactgcacagaccgcgagagaaacttggacagtgagcgccgctctgcatagttggcttctctctggctggccttggcagcatttccaaaccagttggaaatgcgcaccgtgggtctcctctccccatca

SEQ ID NO: 31255 - DNA, 89 bp, Homo sapiens
  MAP TO AC019058.3; EXPRESSED IN PLACENTA, SIGNAL = 0.56; EXPRESSED IN ADULT LIVER, SIGNAL = 0.58; NT HIT: AF096926.1, EVALUE 1.60e-01; EST_HUMAN HIT: R68831.1, EVALUE 1.20e-02
cttttattttatctgttttggagttagaataatcacattgttgaagaatgtctttaaaattattatttggatggtactcactggttttc

SEQ ID NO: 31256 - DNA, 87 bp, Homo sapiens
  MAP TO AL161722.2; EXPRESSED IN ADULT LIVER, SIGNAL = 0.57; EXPRESSED IN FETAL LIVER, SIGNAL = 0.59; EXPRESSED IN PLACENTA, SIGNAL = 0.56; EXPRESSED IN BONE MARROW, SIGNAL = 0.43; SWISSPROT HIT: Q06442, EVALUE 4.30e+00; NT HIT: X66742.1, EVALUE 2.80e+00; EST_HUMAN HIT: AW868503.1, EVALUE 2.70e-01
gtggatggtaacaaacacttcttttggatggtgatagtgctggtagaggagtacacagcggaaaacattttcaaagaggtgatgtaa

SEQ ID NO: 31257 - DNA, 235 bp, Homo sapiens
  MAP TO AC019214.2; EXPRESSED IN ADULT LIVER, SIGNAL = 0.55; EXPRESSED IN PLACENTA, SIGNAL = 0.51; EXPRESSED IN BONE MARROW, SIGNAL = 0.47; SWISSPROT HIT: Q09811, EVALUE 1.00e-09; NT HIT: AF135183.1, EVALUE 1.00e-88; EST_HUMAN HIT: AA155882.1, EVALUE 2.00e-87
tcatgattactcctccaaaggacactcagcttctccaccatctcatgctgcttgtccctttggatcctacaggtttgtcgcccattggaatattgccaagtctatggctgggtactaccaggagtctggccgggctggcagggatgggaagccttcctggtgccgtctctattactccaggaatgaccgggaccaagtcagcttcctgatcaggaaggaagtagcaaaactccag

SEQ ID NO: 31258 - DNA, 167 bp, Homo sapiens
  MAP TO AC019083.5; EXPRESSED IN PLACENTA, SIGNAL = 0.5; EXPRESSED IN ADULT LIVER, SIGNAL = 0.54; EXPRESSED IN BONE MARROW, SIGNAL = 0.48; NT HIT: AB040887.1, EVALUE 1.50e+00; EST_HUMAN HIT: AI953632.1, EVALUE 8.90e+00; SWISSPROT HIT: Q19238, EVALUE 8.80e+00
agataaaaaaatacattgcatacctaaaacaagtacaagttgccatggaaacagattcattagtgaagaggaaagagatcttggaaattaaagacataaaagacaaaataaaaattaaaaaaattaaacagaatttagaacataatgttgaaatgagagaactttag

SEQ ID NO: 31259 - DNA, 89 bp, Homo sapiens
  MAP TO AC007989.2; EXPRESSED IN PLACENTA, SIGNAL = 0.64; EXPRESSED IN ADULT LIVER, SIGNAL = 0.67; EXPRESSED IN BONE MARROW, SIGNAL = 0.7; NT HIT: AL115371.1, EVALUE 7.30e-01; EST_HUMAN HIT: AA442271.1, EVALUE 5.00e-43
tggtgtgggaagcatcatgagaacacggtctttgatggggataattactctgaatctaccaggctgattaagccacagcagatcagcag

SEQ ID NO: 31260 - DNA, 109 bp, Homo sapiens
  MAP TO AC021973.2; EXPRESSED IN PLACENTA, SIGNAL = 1.5; EXPRESSED IN FETAL LIVER, SIGNAL = 0.71; EXPRESSED IN LUNG, SIGNAL = 1.3; EXPRESSED IN ADULT LIVER, SIGNAL = 0.66; SWISSPROT HIT: P32958, EVALUE 5.50e+00; NT HIT: AJ006397.1, EVALUE 2.40e-01; EST_HUMAN HIT: AI202729.1, EVALUE 3.50e-01
gatgctgcctcttgctgtggcaacagacacaaggctgggttgggagcaatcagagacagatgggaaagacctgctggaagaatcccggaacatagaagctggaatccat

SEQ ID NO: 31261 - DNA, 130 bp, Homo sapiens
  MAP TO AC025516.2; EXPRESSED IN ADULT LIVER, SIGNAL = 0.72; EXPRESSED IN PLACENTA, SIGNAL = 0.74; EXPRESSED IN BONE MARROW, SIGNAL = 0.58; EST_HUMAN HIT: BE787177.1, EVALUE 6.70e+00; SWISSPROT HIT: P97857, EVALUE 4.10e-02; NT HIT: U17643.1, EVALUE 7.30e-02
tgctcagtgacttgtggaattgggataatgaagagacaagtgaaatgcattaccaaacatggtttgtccagtgacttatgtttaaaccatttaaaaccaggtgctcaaaagaaatgttatgccaatgact

SEQ ID NO: 31262 - DNA, 105 bp, Homo sapiens
  MAP TO AC007489.3; EXPRESSED IN FETAL LIVER, SIGNAL = 0.47; EXPRESSED IN BONE MARROW, SIGNAL = 0.43; EXPRESSED IN ADULT LIVER, SIGNAL = 0.51; NT HIT: AF260225.1, EVALUE 8.90e-01; SWISSPROT HIT: Q11194, EVALUE 9.40e+00
attgactgaacttattaatcacaataatcttagtctgcatctgcatatacctatgtctggattgcctacacttctgttttatttccatttttttttcctcttgac

SEQ ID NO: 31263 - DNA, 302 bp, Homo sapiens
  MAP TO AC015493.4; EXPRESSED IN PLACENTA, SIGNAL = 0.46; EXPRESSED IN ADULT LIVER, SIGNAL = 0.53; EXPRESSED IN FETAL LIVER, SIGNAL = 0.49; NT HIT: AF238485.1, EVALUE 2.90e+00; SWISSPROT HIT: P80394, EVALUE 1.10e-02; EST_HUMAN HIT: BE963251.2, EVALUE 4.30e+00
gaggtatggatgctcctgaggcggcccttgtggaaagtgatgatggtattgcggcagcagcggctctcatagtagtagcagttgagattgctgctggctgtgcagcagcacttacagttgggatcattggcccaagagcagcaacaccaatggcagttggggctctcagaacaggtgcagtggcagaactggcagttccgctcatctttgtaagggcaggggaagcaggtgcagttccgctctgaggtgaagatgaacttgcagcacagacaggagcataactgaggacaacatctctgcca

SEQ ID NO: 31264 - DNA, 151 bp, Homo sapiens
  MAP TO AC025011.2; EXPRESSED IN ADULT LIVER, SIGNAL = 0.52; NT HIT: AF096879.1, EVALUE 5.40e+00; EST_HUMAN HIT: BE772052.1, EVALUE 5.10e-01; SWISSPROT HIT: P24607, EVALUE 1.80e+00
actccctgtccagtcaccttcactgcaacaaccatcttaccaaggggtgctgtcactgctcctgtccactttctggccgtcagatgcctcgagagttcttcttgcccttgataaggaataaacttgtcagttgcatgtggcagtttttcaa

SEQ ID NO: 31265 - DNA, 226 bp, Homo sapiens
  MAP TO AL034344.24; EXPRESSED IN PLACENTA, SIGNAL = 0.53; EXPRESSED IN ADULT LIVER, SIGNAL = 0.6; EXPRESSED IN BONE MARROW, SIGNAL = 0.43; EXPRESSED IN FETAL LIVER, SIGNAL = 0.55; SWISSPROT HIT: Q01098, EVALUE 7.60e-01
gaaagggtctttcatggatgcagcagcaaaggtaactctgccgacccggcaggggaccatggctactgctcagcgcccacagggcagggcctctcgtgcagccgattgagccattctctgcatcctcagtccccacccggaggacaggtcgggcactggctccctggagggtcggcacagcctctgaattcccgatgaacacccggttgttccagccaggttctcc

SEQ ID NO: 31266 - DNA, 130 bp, Homo sapiens
  MAP TO AC015493.4; EXPRESSED IN ADULT LIVER, SIGNAL = 0.55; EXPRESSED IN PLACENTA, SIGNAL = 0.5; EST_HUMAN HIT: BE169717.1, EVALUE 4.30e-01; NT HIT: Y10887.2, EVALUE 7.30e-02; SWISSPROT HIT: P53935, EVALUE 1.40e+00
ctctcagacttttctctgactctcccccaaccacaccccaccttacctatttcaactacccatcttcctacccctggagacaataataacatgtttggtcctaatagtgagaggagtgtgatccaagaag

SEQ ID NO: 31267 - DNA, 133 bp, Homo sapiens
  MAP TO AC025129.2; EXPRESSED IN PLACENTA, SIGNAL = 0.48; EXPRESSED IN ADULT LIVER, SIGNAL = 0.54; NT HIT: Z70200.1, EVALUE 3.00e-01
agacacaggagctcatcagagacacattcggcatggcgcagctcttctgcagcagcatccgaatcgaaggcacattgaggaggcaccgagccctccagggaggcttgtgtgtgttccagtcattgctatcagg

SEQ ID NO: 31268 - DNA, 87 bp, Homo sapiens
  MAP TO AC010492.4; EXPRESSED IN PLACENTA, SIGNAL = 0.5; EXPRESSED IN ADULT LIVER, SIGNAL = 0.65; EXPRESSED IN FETAL LIVER, SIGNAL = 0.62; EXPRESSED IN BONE MARROW, SIGNAL = 0.6; NT HIT: AF072099.1, EVALUE 8.00e-07; EST_HUMAN HIT: R10963.1, EVALUE 7.00e-42
atgaaggaaagacctagctcgcgcctgcacacagaaggtgctcacatcaatgacgtcatccccattcccaacgtcatcacgctcaag

SEQ ID NO: 31269 - DNA, 109 bp, Homo sapiens
  MAP TO AC013618.3; EXPRESSED IN PLACENTA, SIGNAL = 0.59; EXPRESSED IN BONE MARROW, SIGNAL = 0.48; EXPRESSED IN ADULT LIVER, SIGNAL = 0.66; EXPRESSED IN FETAL LIVER, SIGNAL = 0.54; NT HIT: U66059.1, EVALUE 1.00e-12; EST_HUMAN HIT: AI129113.1, EVALUE 4.00e-07; SWISSPROT HIT: P11369, EVALUE 4.00e-04
ctctaagatcagaaacaataaatgtatgtctaatatcaccatttctattcaacatagtagtagaagtctcaaccacagcaatcatgcaagaaaaagaaataaaagtcat

SEQ ID NO: 31270 - DNA, 310 bp, Homo sapiens
  MAP TO AC025747.3; EXPRESSED IN BONE MARROW, SIGNAL = 0.55; EXPRESSED IN ADULT LIVER, SIGNAL = 0.51; EXPRESSED IN FETAL LIVER, SIGNAL = 0.64; EXPRESSED IN PLACENTA, SIGNAL = 0.54; SWISSPROT HIT: O95239, EVALUE 9.00e-54; EST_HUMAN HIT: BE783232.1, EVALUE 0.00e+00; NT HIT: AF179308.1, EVALUE 0.00e+00
atgaaggaagaggtgaagggaattcctgtaagagtggcactgcgttgtcgccctctggtccccaaagagattagcgagggctgccagatgtgcctttccttcgtgcccggggagactcaggtggtggttggtactgataaatccttcacctacgattttgtgtttgacccctgtactgagcaggaagaagtcttcaataaagcagtagcgccgctcataaaaggcatatttaaaggatataatgcaacggtcctggcctatgggcagactggctctggaaaaacctattcaatgggaggtgcatacactg

SEQ ID NO: 31271 - DNA, 141 bp, Homo sapiens
  MAP TO AC011255.3; EXPRESSED IN PLACENTA, SIGNAL = 0.55; EXPRESSED IN ADULT LIVER, SIGNAL = 0.55; EST_HUMAN HIT: BE512670.1, EVALUE 3.00e-02; NT HIT: X68395.1, EVALUE 8.00e-02
ggacatccacaaccacaaaacacaaacacattatcattatcactaatgatagcattaccagtaccaaattgttgttgggaaaagtgtttgggggctgggtcaacagtcattccaacggtcagcataaggctgatgaagaaa

SEQ ID NO: 31272 - DNA, 382 bp, Homo sapiens
  MAP TO AC021356.5; EXPRESSED IN PLACENTA, SIGNAL = 0.62; EXPRESSED IN ADULT LIVER, SIGNAL = 0.6; SWISSPROT HIT: P32542, EVALUE 1.00e-06; EST_HUMAN HIT: AW265529.1, EVALUE 2.00e-43; NT HIT: AL163246.2, EVALUE 6.00e-79
aaggctgtgtatgccctgaatcagcatccaatatatggtactgtttctcccatagccagtattcagggatcttggaatcaaggggtggaagtggaagtggcaccactcaccaacacccctagtgatctactagcaaaattcttgcttcctgttcccataacattacattctgctggcctagacatcctagttccagagagaggaatgctgccaccaagagacacaacaatgattccactaaactggaagttaagattgccacctggccactttgggctcctcttatctctaaatcgacaggctaagaagggagttacagtgtgggctagggtgattgacccaaattatcaagacaaaatcagtctactattccacaatggag

SEQ ID NO: 31273 - DNA, 144 bp, Homo sapiens
  MAP TO AC011660.4; EXPRESSED IN ADULT LIVER, SIGNAL = 0.55; EXPRESSED IN BONE MARROW, SIGNAL = 0.45; EXPRESSED IN PLACENTA, SIGNAL = 0.59; SWISSPROT HIT: P47879, EVALUE 4.00e+00; EST_HUMAN HIT: BE271043.1, EVALUE 1.90e+00; NT HIT: U29397.1, EVALUE 8.20e-02
atgttcaagttcctcaatgtagctaaaggactgatactaatgttcggtttagtaggagcaattctgtgccatgtgattgcttatgagtgcgtgtttatgagtgtgtttggggtagaaagaggtgttcggatagagctggggttt

SEQ ID NO: 31274 - DNA, 196 bp, Homo sapiens
  MAP TO AC019083.5; EXPRESSED IN ADULT LIVER, SIGNAL = 0.56; EXPRESSED IN FETAL LIVER, SIGNAL = 0.54; EXPRESSED IN BONE MARROW, SIGNAL = 0.53; NT HIT: gi6912349, EVALUE 1.00e-106; SWISSPROT HIT: P29775, EVALUE 2.00e-13; EST_HUMAN HIT: AI991109.1, EVALUE 1.00e-106
ctcatagctcggctgagcttttcataggtcatgctgctgttgttcttctttttaccccatagctgagccactgcctctgatttcaagaacctgaagacgccctcagatcggtcttcccattttattaatcctgggttcttgtctgggttcaagaggatgtcgcggatgaattcccataagtgagtccctctcgggt

SEQ ID NO: 31275 - DNA, 188 bp, Homo sapiens
  MAP TO AC015873.2; EXPRESSED IN BONE MARROW, SIGNAL = 0.46; EXPRESSED IN ADULT LIVER, SIGNAL = 0.58; EXPRESSED IN PLACENTA, SIGNAL = 0.53; EST_HUMAN HIT: AW665550.1, EVALUE 4.00e-36; SWISSPROT HIT: P27512, EVALUE 3.40e-01; NT HIT: gi4885546, EVALUE 9.00e-61
ctctgccaacaggctctcttggcatggggagcagaccttctatttcatcaggctgaccttggccaacatctccctggatgagctctggcagtctgcctttaaccacagcgagatgttctttgctgaccaggtccacaaatgctgcaagtgcatcgtcaagcagggccagaccctcttcatcccctcag

SEQ ID NO: 31276 - DNA, 186 bp, Homo sapiens
  MAP TO AC021308.3; EXPRESSED IN ADULT LIVER, SIGNAL = 0.55; EXPRESSED IN BONE MARROW, SIGNAL = 0.43; EST_HUMAN HIT: T56230.1, EVALUE 2.60e+00; NT HIT: gi11038638, EVALUE 4.30e-01; SWISSPROT HIT: Q10473, EVALUE 2.00e-12
aacacctgaaggataaattggaagaatacatggcccgattttccaaagtgaggattgttcgcaccaagaaaagagaaggactcatccggacccgtctcctgggggcatctatggccagaggagaagtcctgacattcctggactcccactgcgaggtcaatgtgaactggctgcccccactcctca

SEQ ID NO: 31277 - DNA, 105 bp, Homo sapiens
  MAP TO AC018525.4; EXPRESSED IN PLACENTA, SIGNAL = 0.73; EXPRESSED IN ADULT LIVER, SIGNAL = 0.62; EXPRESSED IN FETAL LIVER, SIGNAL = 0.48; EXPRESSED IN BONE MARROW, SIGNAL = 0.66; SWISSPROT HIT: P23710, EVALUE 3.20e+00; EST_HUMAN HIT: BF210322.1, EVALUE 3.30e-01; NT HIT: X93484.1, EVALUE 8.90e-01
cccctgtcagaaggctccgaggatgatgcaggtctgtatcagcctgataagggaaaagaggattcaaaatggctttggagagactccgtgggagtggagtgtgct

SEQ ID NO: 31278 - DNA, 137 bp, Homo sapiens
  MAP TO AC022609.2; EXPRESSED IN PLACENTA, SIGNAL = 0.54; EXPRESSED IN ADULT LIVER, SIGNAL = 0.51; EXPRESSED IN BONE MARROW, SIGNAL = 0.47; EST_HUMAN HIT: AA932237.1, EVALUE 4.60e-01
cctctttaagtccttgctcatggcagtaaaaatattaatggtcatttcacatggtgatgtattcctcaagaaggtagaatcactgaagtaatagaaactgcagaggcgtttggatttgatagccaggaaggtttcat

SEQ ID NO: 31279 - DNA, 130 bp, Homo sapiens
  MAP TO AC018377.4; EXPRESSED IN PLACENTA, SIGNAL = 0.51; EXPRESSED IN FETAL LIVER, SIGNAL = 0.49; EXPRESSED IN BONE MARROW, SIGNAL = 0.48; EXPRESSED IN ADULT LIVER, SIGNAL = 0.53; SWISSPROT HIT: P32756, EVALUE 9.20e+00; NT HIT: Y11666.1, EVALUE 8.00e-05; EST_HUMAN HIT: BE819372.1, EVALUE 6.70e+00
atctacagaaggagctggaggagaaggaggaagtggggaggaagaggagaattagggtaatgaaggtaacctttaccttggagaacatcccagctgtcagtgatggccagcatctctgcctattcttctc

SEQ ID NO: 31280 - DNA, 180 bp, Homo sapiens
  MAP TO AC015999.3; EXPRESSED IN PLACENTA, SIGNAL =   1; EXPRESSED IN BONE MARROW, SIGNAL = 0.43; EXPRESSED IN ADULT LIVER, SIGNAL = 0.52; SWISSPROT HIT: P06159, EVALUE 3.90e+00; NT HIT: U19832.1, EVALUE 1.70e+00; EST_HUMAN HIT: BE872060.1, EVALUE 9.70e+00
agatttataagcattctggatcttcttccgttttgaaggtgtcatcgagtttctattggtaccctgactgtaggaggtcccttcctcatgcacactcaggcattgcatgactagcccttccttgtgctcatgctccacattcagaatctcagttccactgatatatgcctctgcatctcc

SEQ ID NO: 31281 - DNA, 81 bp, Homo sapiens
  MAP TO AC016786.4; EXPRESSED IN ADULT LIVER, SIGNAL = 0.62; EXPRESSED IN PLACENTA, SIGNAL = 0.73; EST_HUMAN HIT: BE799822.1, EVALUE 9.70e-01
ctatttgtgcttcttctcttcatggacatgatatttacattcttccagggtctccttcctcttactcccagggaagtgact

SEQ ID NO: 31282 - DNA, 104 bp, Homo sapiens
  MAP TO AL161634.1; EXPRESSED IN FETAL LIVER, SIGNAL = 0.57; EXPRESSED IN PLACENTA, SIGNAL = 0.52; EXPRESSED IN ADULT LIVER, SIGNAL = 0.57; EXPRESSED IN BONE MARROW, SIGNAL = 0.51; EST_HUMAN HIT: AI830547.1, EVALUE 3.30e-01; NT HIT: L23312.1, EVALUE 2.20e-01
agcagtggctgaatctgatggggatgaggaggaaaacgctgtgcaacgcaccgctatactcttgacttcaagatgctcaggcttcatagacatttttctggcca

SEQ ID NO: 31283 - DNA, 102 bp, Homo sapiens
  MAP TO AP001421.1; EXPRESSED IN PLACENTA, SIGNAL = 0.48; EXPRESSED IN FETAL LIVER, SIGNAL =   1; EXPRESSED IN BONE MARROW, SIGNAL = 0.47; EXPRESSED IN ADULT LIVER, SIGNAL = 0.6; NT HIT: U09964.1, EVALUE 2.20e-01
actttcgagatcacataccaagaccttcagctggatggtccctgtagctgctgtgaccactagaagcagggttaggggcgagactaatttaatatcaattaa

SEQ ID NO: 31284 - DNA, 96 bp, Homo sapiens
  MAP TO AC019281.4; EXPRESSED IN ADULT LIVER, SIGNAL = 0.57; EST_HUMAN HIT: AW614205.1, EVALUE 8.20e-01
atacacaaacacattcttcccaaatactgaaggaaaacattactgcatcaatggaaatatcttcaatgatgtagtccccacaaactctaagaggat

SEQ ID NO: 31285 - DNA, 133 bp, Homo sapiens
  MAP TO AC022939.2; EXPRESSED IN BONE MARROW, SIGNAL = 0.5; EXPRESSED IN ADULT LIVER, SIGNAL = 0.54; EXPRESSED IN FETAL LIVER, SIGNAL = 0.5; NT HIT: gi8923248, EVALUE 3.00e-69; SWISSPROT HIT: Q10212, EVALUE 4.10e+00; EST_HUMAN HIT: BF333194.1, EVALUE 4.00e-69
ctcattcttatggatttccattcgtaggcggtcaatgttattcatggtctctgctaatttaggctgcaaactccctggatcccccatttgtggattcttctcatatacatctttcattttgttgagtgcatct

SEQ ID NO: 31286 - DNA, 158 bp, Homo sapiens
  MAP TO AC025498.2; EXPRESSED IN PLACENTA, SIGNAL = 0.48; EXPRESSED IN ADULT LIVER, SIGNAL = 0.57; EXPRESSED IN BONE MARROW, SIGNAL = 0.53; SWISSPROT HIT: P13319, EVALUE 4.00e+00; NT HIT: U91328.1, EVALUE 3.60e-01
aatgactttttatgacccagctagggagaaaaaggatgccccaagcattgtcactactaagtctagagcaatgctggcaactaatgctatcgtcatggccagctgtgaaaaatcaagcaaacaaacaaaaccctacatctggattacttctattaaat

SEQ ID NO: 31287 - DNA, 82 bp, Homo sapiens
  MAP TO AL031661.28; EXPRESSED IN PLACENTA, SIGNAL = 0.51; EXPRESSED IN ADULT LIVER, SIGNAL = 0.56; EXPRESSED IN BONE MARROW, SIGNAL = 0.44; NT HIT: AP000004.1, EVALUE 5.60e-01; EST_HUMAN HIT: R77002.1, EVALUE 1.70e-01
tcaaagcagttagcagcaaaaccaggtttcaaatccttgtttttctggttccaaaatttatgctcttgaccatgaggcaatt

SEQ ID NO: 31288 - DNA, 174 bp, Homo sapiens
  MAP TO AL161756.1; EXPRESSED IN ADULT LIVER, SIGNAL = 0.65; EXPRESSED IN BONE MARROW, SIGNAL = 0.47; EST_HUMAN HIT: W26468.1, EVALUE 2.00e-93; SWISSPROT HIT: P33485, EVALUE 5.90e-01; NT HIT: AB023228.1, EVALUE 1.00e-93
cctgagtctccgcaggacggctgtgacccgcctctgaaggttgtcccagcgctggttgccctcgtggaccatctgcttcagcctgctggccgtgtctgtgcggttctcccgggccagccgccggtactgcttgttgatgagctccagctgagtgagccgctcatgaatctgccg

SEQ ID NO: 31289 - DNA, 143 bp, Homo sapiens
  MAP TO AL139824.7; EXPRESSED IN ADULT LIVER, SIGNAL = 0.52; NT HIT: AL163303.2, EVALUE 5.00e+00
gtttgccaataaacagatttttacttcctccatacacattttatttgtttttgttgttaggattgtcatcaacattaggatgacaagaatctccagtaaaatattgaataagggtgatgacagaagaccttcttgccttgttc

SEQ ID NO: 31290 - DNA, 99 bp, Homo sapiens
  MAP TO AL121881.25; EXPRESSED IN ADULT LIVER, SIGNAL = 0.59; EXPRESSED IN PLACENTA, SIGNAL = 0.48; EST_HUMAN HIT: AI908256.1, EVALUE 6.00e-18; SWISSPROT HIT: Q46920, EVALUE 4.20e+00; NT HIT: AF167463.1, EVALUE 4.00e-06
ttcctgctgacgaggggacggagagttttttgggttgacagtaggagcaatgccgtctgtagatgtttttgggtagttgtctgtgaaatggccgtgatc

SEQ ID NO: 31291 - DNA, 160 bp, Homo sapiens
  MAP TO AC016113.4; EXPRESSED IN PLACENTA, SIGNAL = 0.5; EXPRESSED IN ADULT LIVER, SIGNAL = 0.52; EXPRESSED IN FETAL LIVER, SIGNAL = 0.5; EXPRESSED IN BONE MARROW, SIGNAL = 0.42; SWISSPROT HIT: Q92328, EVALUE 6.00e-01; NT HIT: AL113179.1, EVALUE 9.30e-02; EST_HUMAN HIT: BF026359.1, EVALUE 5.50e-01
gaagccagaagtcaaggatcccagtgaggagctcaggcagaagctgaaagagaaggatagagaaggtcagcaaacaagtgagggcaaccaggccaaacaggacagttcctcctttgcgcctcagtgtctgctcctgtcttttgatggggatgtcaaaggc

SEQ ID NO: 31292 - DNA, 105 bp, Homo sapiens
  MAP TO AC020693.3; EXPRESSED IN ADULT LIVER, SIGNAL = 0.65; EXPRESSED IN PLACENTA, SIGNAL = 0.51; EXPRESSED IN FETAL LIVER, SIGNAL = 0.48; EST_HUMAN HIT: H42881.1, EVALUE 1.30e+00; SWISSPROT HIT: Q04605, EVALUE 7.20e+00
gaaaatcaggaaaaaaagtataaaaatcttactcatttttccacaccacagactaaggctggcaaagtagtgctgcaagcagtgctaaccatctccaatgaccag

SEQ ID NO: 31293 - DNA, 163 bp, Homo sapiens
  MAP TO AC008269.3; EXPRESSED IN BONE MARROW, SIGNAL = 0.47; EXPRESSED IN ADULT LIVER, SIGNAL = 0.51; EST_HUMAN HIT: BE874300.1, EVALUE 7.00e-87; SWISSPROT HIT: Q08662, EVALUE 1.30e+00; NT HIT: AF223470.1, EVALUE 4.00e-87
tgtcagcagctcactgatgatgtctttttgcagaagctgattaaaaggagccaggggaaagtaattcatcaagcaaaatgaatatactgcatccaataagttttcagaagaaatagtgtgaagataaccagtcagagcactagccataacttccacgaactgt

SEQ ID NO: 31294 - DNA, 89 bp, Homo sapiens
  MAP TO AC020704.3; EXPRESSED IN ADULT LIVER, SIGNAL = 0.66; EXPRESSED IN PLACENTA, SIGNAL = 0.82; SWISSPROT HIT: P40489, EVALUE 4.20e+00; NT HIT: AJ002153.2, EVALUE 2.90e+00
atgactaagaaaaagagaaggaatacacatatgacaaatatctggaaggaaatatcggatatcatcacagaacctaagacattaacagg

SEQ ID NO: 31295 - DNA, 180 bp, Homo sapiens
  MAP TO AL157836.3; EXPRESSED IN PLACENTA, SIGNAL = 0.51; EXPRESSED IN ADULT LIVER, SIGNAL = 0.53; EXPRESSED IN FETAL LIVER, SIGNAL = 0.52; SWISSPROT HIT: P14837, EVALUE 3.90e+00; NT HIT: U57431.1, EVALUE 4.20e-01; EST_HUMAN HIT: BE972197.1, EVALUE 2.50e+00
tcaaagagtgtggtgatgttgggagtgatagagggaaggcagcacgaagtggcttacaggagggaagtcaaaaggggtggaaagccaaatgctgctgaccaaaagctggtggtggcactgtggtaacgcagcaatgccaagcacatcatctgtagcaaccttgtggcccataaaggtgat

SEQ ID NO: 31296 - DNA, 128 bp, Homo sapiens
  MAP TO AC012629.4; EXPRESSED IN PLACENTA, SIGNAL = 0.55; EXPRESSED IN FETAL LIVER, SIGNAL = 0.52; EXPRESSED IN ADULT LIVER, SIGNAL = 0.54; EXPRESSED IN BONE MARROW, SIGNAL = 0.48; SWISSPROT HIT: Q01149, EVALUE 3.10e+00
atggagcagagggtgcagccattcttggtcactgccccacagctcttccccctattacttgccaacagaaccccagctgtgtccagggactggaaggccttgagcttctgggggctgagctccccctc

SEQ ID NO: 31297 - DNA, 288 bp, Homo sapiens
  MAP TO AL121579.2; EXPRESSED IN ADULT LIVER, SIGNAL = 0.65; EXPRESSED IN PLACENTA, SIGNAL = 0.45; EST_HUMAN HIT: R17806.1, EVALUE 1.00e-95; SWISSPROT HIT: P32019, EVALUE 4.40e-01
aaagttagtgcttgtaaggagttcctccttttcatcaacagtcagagaaggagtcgcagtgatagcaatggttaacatggccttggcaagtccactttcaggagatattctctctggctggctggaaccaaatacttcttcagctgaggggacacctgactcagtaggtgtggaaacaccagggcgttctgtttgcatgagcccagcttgtccaggctgggtttctttgttaatcgagaatgctttatttaatgatgttgccgatggtactgctgacatcatcattgg

SEQ ID NO: 31298 - DNA, 116 bp, Homo sapiens
  MAP TO AC022174.2; EXPRESSED IN ADULT LIVER, SIGNAL = 0.58; NT HIT: AF257519.1, EVALUE 1.00e+00
gatgtctttaaaaatgataatattagtggcaatatcattagtgatagcagtagtgatgatgtctgtggtagtcatagttgtagaagtacccagcacataaactgcttttaccatat

SEQ ID NO: 31299 - DNA, 212 bp, Homo sapiens
  MAP TO AC010829.5; EXPRESSED IN PLACENTA, SIGNAL = 0.64; EXPRESSED IN ADULT LIVER, SIGNAL = 0.61; EXPRESSED IN FETAL LIVER, SIGNAL = 0.55; EXPRESSED IN BONE MARROW, SIGNAL = 0.51; SWISSPROT HIT: P76389, EVALUE 3.00e-01; NT HIT: M28428.1, EVALUE 2.00e+00
caaataaagcatttagcaagtccgcagatggtatggctgcaagaagccttgccatagggatgataaatccaaatccattcaagaatctactgctgcagaggcaaatcactgtatcttccatgataggaacccaagtgattggctggcctcccttggatatggtaccaagatggatgttggtagatataaatgccagctttcttaatccacag

SEQ ID NO: 31300 - DNA, 106 bp, Homo sapiens
  MAP TO AC019342.4; EXPRESSED IN PLACENTA, SIGNAL = 0.51; EXPRESSED IN ADULT LIVER, SIGNAL = 0.53; EXPRESSED IN BONE MARROW, SIGNAL = 0.44; NT HIT: U72775.1, EVALUE 3.60e+00
ggatgtgctggaataccgcagaccactgacacccagaaaacttcaccgatatggcagacccctgaaacttggtaggtttacctcccaccatctggcgatcatgcat

SEQ ID NO: 31301 - DNA, 165 bp, Homo sapiens
  MAP TO AC011957.2; EXPRESSED IN ADULT LIVER, SIGNAL = 0.54; NT HIT: gi7305518, EVALUE 3.80e-01; SWISSPROT HIT: Q9N0L8, EVALUE 1.00e+00
atggacacctgtgtcctgtgcttccatctcacactgttcaccctcattctggtcacagaactgatcattgtctgtctgtgtgccggtcccctcttgtctgtgacctcctcaaaggccatggccatctgtgtgtccccagcacccaccaccagtgcctggctcaaa

SEQ ID NO: 31302 - DNA, 106 bp, Homo sapiens
  MAP TO AL139825.9; EXPRESSED IN PLACENTA, SIGNAL = 0.48; EXPRESSED IN FETAL LIVER, SIGNAL = 0.47; EXPRESSED IN BONE MARROW, SIGNAL = 0.44; EXPRESSED IN ADULT LIVER, SIGNAL = 0.52; NT HIT: U39702.1, EVALUE 9.00e-01; EST_HUMAN HIT: BE773939.1, EVALUE 5.30e+00
gtatactcgataatgatgttagcttggtttataattcaagcattaggtaataaagacaaggtacagttaattctgcattggagactcatattaacaaacgtttttg

SEQ ID NO: 31303 - DNA, 99 bp, Homo sapiens
  MAP TO AL158012.2; EXPRESSED IN PLACENTA, SIGNAL = 0.83; EXPRESSED IN ADULT LIVER, SIGNAL = 0.62; NT HIT: AL163282.2, EVALUE 7.00e-23; EST_HUMAN HIT: AA383873.1, EVALUE 4.00e-25; SWISSPROT HIT: Q12947, EVALUE 4.20e+00
ctttgttccagttcccaacaagtttctcatttccatctgagaccacctcagcctggactttattatccacaccactctcagcatttttgtcaaagccat

SEQ ID NO: 31304 - DNA, 142 bp, Homo sapiens
  MAP TO AC007989.2; EXPRESSED IN BONE MARROW, SIGNAL = 0.56; EXPRESSED IN ADULT LIVER, SIGNAL = 0.58; EXPRESSED IN PLACENTA, SIGNAL = 0.55; EXPRESSED IN FETAL LIVER, SIGNAL = 0.58; NT HIT: M27470.1, EVALUE 1.30e+00; EST_HUMAN HIT: BF568633.1, EVALUE 4.80e-01; SWISSPROT HIT: P79746, EVALUE 1.00e+00
gatttggatatgtagggaagaaaagcaggaagaacatgagaaaggtgattatggtacaggtcaggatggccatagagatggtatgtgtccatggcattgttggaaggatggtcagtgtggatggaacggtgtgtaagatggt

SEQ ID NO: 31305 - DNA, 94 bp, Homo sapiens
  MAP TO AL138702.3; EXPRESSED IN ADULT LIVER, SIGNAL = 0.57; EXPRESSED IN FETAL LIVER, SIGNAL = 0.49; EXPRESSED IN BONE MARROW, SIGNAL = 0.45; NT HIT: Y16023.1, EVALUE 3.10e+00; EST_HUMAN HIT: N39160.1, EVALUE 1.90e-02; SWISSPROT HIT: P08077, EVALUE 9.50e+00
ttgtgccaagcgctgctgctgtagtagtgaccacatcagatgtgactcctgttgtcatgaaagttacagtagagcaggaggcaactttaaacaa

SEQ ID NO: 31306 - DNA, 120 bp, Homo sapiens
  MAP TO AC013818.3; EXPRESSED IN PLACENTA, SIGNAL = 0.55; EXPRESSED IN ADULT LIVER, SIGNAL = 0.65; NT HIT: AJ235273.1, EVALUE 4.10e+00
tcaaagttttgtgctttgttccaaatatggcttaacctcaaacactttattacctaatgtgaacacaagttttattatctccgccaaagtgttcatgttcagcacagactttatgatcat

SEQ ID NO: 31307 - DNA, 132 bp, Homo sapiens
  MAP TO AL157377.1; EXPRESSED IN PLACENTA, SIGNAL = 0.45; EXPRESSED IN FETAL LIVER, SIGNAL = 0.49; EXPRESSED IN ADULT LIVER, SIGNAL = 0.53; SWISSPROT HIT: P06802, EVALUE 4.10e-02; NT HIT: gi11419429, EVALUE 1.00e-68; EST_HUMAN HIT: BE000062.1, EVALUE 1.70e+00
gaatggaccagacttattgtaacaagatggaatacatgactgattattttcccagaataaacttcttctacatgtacgaagggcctgccccccgcatccgagctcataatatacctcatgacttttttagtt

SEQ ID NO: 31308 - DNA, 75 bp, Homo sapiens
  MAP TO AC018516.3; EXPRESSED IN BONE MARROW, SIGNAL = 0.49; EXPRESSED IN ADULT LIVER, SIGNAL = 0.74; EXPRESSED IN FETAL LIVER, SIGNAL = 0.48
acaaaaaagaagaagaagaagaagaagaagaagaagaagaagaagaagatccagagaagagaaaagatagccaac

SEQ ID NO: 31309 - DNA, 113 bp, Homo sapiens
  MAP TO AL132857.3; EXPRESSED IN PLACENTA, SIGNAL = 0.51; EXPRESSED IN ADULT LIVER, SIGNAL = 0.52; EXPRESSED IN BONE MARROW, SIGNAL = 0.44; SWISSPROT HIT: P77891, EVALUE 5.40e+00; EST_HUMAN HIT: AW970093.1, EVALUE 3.60e-01; NT HIT: gi11465652, EVALUE 2.50e-01
taaatgctacaatgaagataggtttagaaaaattcctgagatacagaatcataaaactggtagggtccttagaaattaccaaatctattctcctactatcttctgtatcagat

SEQ ID NO: 31310 - DNA, 120 bp, Homo sapiens
  MAP TO AC018425.3; EXPRESSED IN PLACENTA, SIGNAL = 0.61; EXPRESSED IN ADULT LIVER, SIGNAL = 1.1; NT HIT: U07000.1, EVALUE 4.10e+00; EST_HUMAN HIT: BF361856.1, EVALUE 3.90e-01; SWISSPROT HIT: Q12866, EVALUE 9.30e+00
atgtcaaagacctacgttttatacatgcacatgtacacatttatgtctgtctacatagatctagacatgcacaaatgtggggtaagcaaggagcaggaagtggacatggaggatgaggtg

SEQ ID NO: 31311 - DNA, 181 bp, Homo sapiens
  MAP TO AC012241.4; EXPRESSED IN ADULT LIVER, SIGNAL = 0.71; EXPRESSED IN PLACENTA, SIGNAL = 0.5; EXPRESSED IN FETAL LIVER, SIGNAL = 0.5; SWISSPROT HIT: P00789, EVALUE 1.00e+00; NT HIT: gi11431544, EVALUE 9.00e-98; EST_HUMAN HIT: BF334662.1, EVALUE 3.00e-40
ttgctcgaaggactgaaggtgtgacctcaatttcacttgttgcttggtaaggctgaaaggctgagacattgttggtgccaagctcactaccaaatatctctgggctctgggtacccgtggaactggcactggtgccatcacctccgtgatgtggatcctgctcatcaaacactgctaccag

SEQ ID NO: 31312 - DNA, 173 bp, Homo sapiens
  MAP TO AC018578.3; EXPRESSED IN BONE MARROW, SIGNAL = 0.46; EXPRESSED IN PLACENTA, SIGNAL = 0.61; EXPRESSED IN ADULT LIVER, SIGNAL = 0.52; SWISSPROT HIT: O67098, EVALUE 6.70e+00; NT HIT: AL031866.1, EVALUE 6.20e+00; EST_HUMAN HIT: BE837779.1, EVALUE 6.00e-01
ttggcgaggtgctgcacgaatgcagggatgaagacaggcttattgagttcaaggagtttagaatccaatggacacgcagcaggtttctgtttatatgagaccatttgggaattatgttgtggttcctggcattccaggcatttaacattcttcacaatttggttcttcttttt

SEQ ID NO: 31313 - DNA, 291 bp, Homo sapiens
  MAP TO AC008739.5; EXPRESSED IN PLACENTA, SIGNAL = 4.4; EXPRESSED IN FETAL LIVER, SIGNAL = 5.2; EXPRESSED IN BONE MARROW, SIGNAL = 0.56; EXPRESSED IN LUNG, SIGNAL = 1.9; EXPRESSED IN ADULT LIVER, SIGNAL = 1.4; EXPRESSED IN HELA, SIGNAL = 4.5; EST_HUMAN HIT: AI570293.1, EVALUE 1.00e-101; NT HIT: gi11434787, EVALUE 1.00e-101; SWISSPROT HIT: P05783, EVALUE 2.00e-39
ttaatgtctgagaactttggtgttgttggtctcagacaccattttgccatccaccatctggcgggttgtggtcttttggatggtttgcttggagttgctgctgtccaggacatcaccaagattgaagtcctcgccatcttccagcaggcggtggtaggtggcgatctcagcctcctgcttgactttgatgttcagcggggccttgtactcctgggcctggtactgcccctctgccagggtctgtaccagctctgactccaggtgcagcaggatcctgttgatctgctccat

SEQ ID NO: 31314 - DNA, 177 bp, Homo sapiens
  MAP TO AC018516.3; EXPRESSED IN ADULT LIVER, SIGNAL = 0.78; EXPRESSED IN BONE MARROW, SIGNAL = 0.54; EXPRESSED IN PLACENTA, SIGNAL = 0.57; EXPRESSED IN FETAL LIVER, SIGNAL = 0.46; SWISSPROT HIT: P26039, EVALUE 8.80e+00; NT HIT: AL163252.2, EVALUE 1.60e+00; EST_HUMAN HIT: AW371201.1, EVALUE 4.00e-42
gatagaccactggaacaatgagaaggagagaattctactggtcacagacaagactctcttgatctgcaaatacgacttcatcatgctgagttgtgtgcagctgcagcggattcctctgagcgctgtctatcgcatctgcctgggcaagttcaccttccctgggatgtccctggacaa

SEQ ID NO: 31315 - DNA, 234 bp, Homo sapiens
  MAP TO AL118505.13; EXPRESSED IN PLACENTA, SIGNAL = 0.52; EXPRESSED IN ADULT LIVER, SIGNAL = 0.6; EXPRESSED IN BONE MARROW, SIGNAL = 0.48; NT HIT: Z24725.1, EVALUE 2.00e-06; EST_HUMAN HIT: AI199117.1, EVALUE 1.00e-129; SWISSPROT HIT: P93043, EVALUE 7.30e+00
atatatcccaagactggtcagactttgctctttggtgggaacagaagcattgctggcttctgaaaacccactggaccctggacaaatatggggtccaggcagatgcaaagcttctcttcacccctcagcataaaatgctgcgccttcgtctgccgaatttgaagatggtgaggttgcgagtcagcttctcagctgtggtttttaaagctgtcagtgatatctgcaaaatcctga

SEQ ID NO: 31316 - DNA, 264 bp, Homo sapiens
  MAP TO AL133414.3; EXPRESSED IN BONE MARROW, SIGNAL = 0.44; EXPRESSED IN PLACENTA, SIGNAL = 0.52; EXPRESSED IN ADULT LIVER, SIGNAL = 0.61; EXPRESSED IN FETAL LIVER, SIGNAL = 1.2; NT HIT: X89893.1, EVALUE 0.00e+00; EST_HUMAN HIT: AW951147.1, EVALUE 3.00e-81; SWISSPROT HIT: P43631, EVALUE 5.00e-48
gtcccctggtgaaatcagaagagacagtcatcctgcaatgttggtcagatgtcaggtttgagcacttccttctgcacagagaggggaagtataaggacactttgcacctcattggagagcaccatgatggggtctccaaggccaacttctccatcggtcccatgatgcaagaccttgcagggacctacagatgctacggttctgttactcactccccctatcagttgtcagctcccagtgaccctctggacatcgtcatcacag

SEQ ID NO: 31317 - DNA, 120 bp, Homo sapiens
  MAP TO AL137225.7; EXPRESSED IN PLACENTA, SIGNAL = 0.51; EXPRESSED IN ADULT LIVER, SIGNAL = 0.52; NT HIT: AB011679.1, EVALUE 2.70e-01; EST_HUMAN HIT: BF303788.1, EVALUE 3.90e-01
atgacctatccccagtctgaccactcattgaccctgccccagactgaccaagaccaccagataacccagccccagactgatcatttagtggccctggcccagtttgaccataaccactag

SEQ ID NO: 31318 - DNA, 135 bp, Homo sapiens
  MAP TO AL138811.1; EXPRESSED IN ADULT LIVER, SIGNAL = 0.59; EST_HUMAN HIT: N22384.1, EVALUE 1.10e-01; SWISSPROT HIT: O75330, EVALUE 1.80e-02
ctgaaactttttgtcttcctcaaatgttttttgattgcataatttgttataatgttcttgtaacttaatatgagtttctttaagggatgataattcatttttaatcttattaatttctccattaagttcttcagc

SEQ ID NO: 31319 - DNA, 200 bp, Homo sapiens
  MAP TO AL121881.25; EXPRESSED IN ADULT LIVER, SIGNAL = 0.51; SWISSPROT HIT: P22909, EVALUE 2.20e+00
aactagcttctcctacttcttcggtaacctttgggataatgtagcaatggtggcctatattcccttctggctccttgttaatctccgccatcttagagcaaaagtaggctatagcctcttttatttcttcaggaacatcttctattgtagaacaacagtagcgtacagtgtcttcctcttcttcactaaactctgccatc

SEQ ID NO: 31320 - DNA, 77 bp, Homo sapiens
  MAP TO AL139186.3; EXPRESSED IN ADULT LIVER, SIGNAL = 0.53; EST_HUMAN HIT: BE965719.2, EVALUE 1.50e-02; NT HIT: AP001518.1, EVALUE 6.10e-01
atggccttcattaatttgaagaatatagccttcaatgccaagatggcaaaaaacaaaataaacgtgcaacctaattg

SEQ ID NO: 31321 - DNA, 172 bp, Homo sapiens
  MAP TO AL133173.13; EXPRESSED IN ADULT LIVER, SIGNAL = 0.52; SWISSPROT HIT: Q10709, EVALUE 6.70e+00; NT HIT: AB032975.1, EVALUE 2.50e-02; EST_HUMAN HIT: AI797613.1, EVALUE 4.00e-82
atggcgtgtaagcattttaggccccagaatgcccataagtagagctccatttggagctgtgatcgagatggctaaaaatgctactgacatcacatccttcgcatatggttccaagtggggtgcagagactcttgctgtttctagagccagaggacctaacacagcctacatt

SEQ ID NO: 31322 - DNA, 149 bp, Homo sapiens
  MAP TO AC007989.2; EXPRESSED IN ADULT LIVER, SIGNAL = 0.59; NT HIT: AB042297.1, EVALUE 1.30e+00; SWISSPROT HIT: P35017, EVALUE 7.90e-01; EST_HUMAN HIT: AW845172.1, EVALUE 5.00e-01
aaaacgtcttcctgggccagatcaatactgggcttcaacttcatttcttaactacaattccttacagttatgtaagtattttaccagccaccttcatgaagatcatctcatttcatcatctcctagacattatcattcccattttaaag

SEQ ID NO: 31323 - DNA, 152 bp, Homo sapiens
  MAP TO AC022474.3; EXPRESSED IN ADULT LIVER, SIGNAL = 0.52; EXPRESSED IN BONE MARROW, SIGNAL = 0.46; EXPRESSED IN FETAL LIVER, SIGNAL = 0.5; EST_HUMAN HIT: H38109.1, EVALUE 3.30e-02; NT HIT: D63999.1, EVALUE 5.40e+00
cagttttcatcactgccaccacagccacagccacactcatcaaagccataatcacccatgcctggaggtttgcaaaaacctcccaagtaatcacccttttcagtttgatctctcaaactacatttcctataaaacctctcccaatcaaaata

SEQ ID NO: 31324 - DNA, 171 bp, Homo sapiens
  MAP TO AC012571.3; EXPRESSED IN ADULT LIVER, SIGNAL = 0.55; EXPRESSED IN FETAL LIVER, SIGNAL = 0.46; EXPRESSED IN BONE MARROW, SIGNAL = 0.48; NT HIT: M18440.1, EVALUE 3.90e-01; EST_HUMAN HIT: BF105633.1, EVALUE 2.30e+00; SWISSPROT HIT: P19705, EVALUE 3.00e+00
atatcatctgtattttacagattaataaactcaggctccagtatgtgatgccaggccatataacttgtgagtgccgaggaattctgtctgaaacagtccaggctttttctaccatacatgcaacctctattcggagagttggtgaggctgctgtgaccaaactcttaaaag

SEQ ID NO: 31325 - DNA, 162 bp, Homo sapiens
  MAP TO AC015999.3; EXPRESSED IN ADULT LIVER, SIGNAL = 0.57; EXPRESSED IN BONE MARROW, SIGNAL = 0.45; EXPRESSED IN PLACENTA, SIGNAL = 0.53; NT HIT: M96629.1, EVALUE 9.40e-02; SWISSPROT HIT: O42574, EVALUE 5.20e+00; EST_HUMAN HIT: AW273820.1, EVALUE 8.00e-71
aaagagaaaacaggcaccgatcattgctgctttgactgttacatctagatctgcaggaacatgaattccgaaattgtcagcatttgtgaagacatcatttacaaatcctgaccagtactttgaaatcttcccaattgtaagcttttcattaatggttttcac

SEQ ID NO: 31326 - DNA, 87 bp, Homo sapiens
  MAP TO AC013396.4; EXPRESSED IN ADULT LIVER, SIGNAL = 0.94; EXPRESSED IN PLACENTA, SIGNAL = 0.55; EXPRESSED IN FETAL LIVER, SIGNAL = 0.6; EXPRESSED IN BONE MARROW, SIGNAL = 0.48; NT HIT: gi11431168, EVALUE 5.00e-42; SWISSPROT HIT: P46952, EVALUE 8.00e-10; EST_HUMAN HIT: AW630080.1, EVALUE 2.00e-36
ggtgccccactcaccacagaggtttgccaacaccgtggggctggtggttgagcgaaggcggctggagaccgagctagatgggctcag

SEQ ID NO: 31327 - DNA, 80 bp, Homo sapiens
  MAP TO AC009467.3; EXPRESSED IN BONE MARROW, SIGNAL = 0.44; EXPRESSED IN ADULT LIVER, SIGNAL = 0.51; EST_HUMAN HIT: AV730743.1, EVALUE 1.00e-37
tttctacgggatctagaaataccatttttaagttggctcacaacaaatacttcagtgtctttaatatgccagtcactgtt

SEQ ID NO: 31328 - DNA, 223 bp, Homo sapiens
  MAP TO AC019342.4; EXPRESSED IN ADULT LIVER, SIGNAL = 0.52; EXPRESSED IN BONE MARROW, SIGNAL = 0.7; NT HIT: gi11428833, EVALUE 5.30e-01; EST_HUMAN HIT: BE396731.1, EVALUE 3.10e+00; SWISSPROT HIT: P34611, EVALUE 9.60e-01
gccacctcctaagactctctactttctcatgctgctttgctttcagactcttcattttcatccctcttgttagttctgggataaccttgtcccactctgccacgaggagtgtgagcctctgtccaggcttgagctgcagtggctgcacccctgcctccactgtgacatcctttggttgcagctgcagaagcatccttagcagattcctcagctggagatgcag

SEQ ID NO: 31329 - DNA, 117 bp, Homo sapiens
  MAP TO AC022796.3; EXPRESSED IN PLACENTA, SIGNAL = 0.48; EXPRESSED IN ADULT LIVER, SIGNAL = 0.56; EXPRESSED IN BONE MARROW, SIGNAL = 0.48; NT HIT: Y15874.2, EVALUE 2.60e-01
atgatagccccgcagttcctgaaaaaggtcaaagagagaaaggtgacactgactcaggttgagaataggaggatgtattctgtcatgctccaagcagccttgtccctgaggagacag

SEQ ID NO: 31330 - DNA, 103 bp, Homo sapiens
  MAP TO AL161743.2; EXPRESSED IN ADULT LIVER, SIGNAL = 0.54; NT HIT: X61308.1, EVALUE 1.40e-02; EST_HUMAN HIT: AW861744.1, EVALUE 3.30e-01
aaaggcagtgcagctactcatcatcatcctcatcatcctcatccccatccccactcccagcaccaccatcatcaccattgttaataatttttggtcaggtgct

SEQ ID NO: 31331 - DNA, 159 bp, Homo sapiens
  MAP TO AL138828.4; EXPRESSED IN PLACENTA, SIGNAL = 1.5; EXPRESSED IN ADULT LIVER, SIGNAL = 1.5; SWISSPROT HIT: P22531, EVALUE 3.00e-03
ctaatgaccaactccatctccatactgcaactcagagactccatctccatactgcaactcagagactccatctccatactgcaactcagagactccatctccatactgcaactcagagactccatctccatactgcaactcagagactccatctccata

SEQ ID NO: 31332 - DNA, 281 bp, Homo sapiens
  MAP TO AL160008.1; EXPRESSED IN ADULT LIVER, SIGNAL = 1.5; EXPRESSED IN LUNG, SIGNAL = 9.1; EXPRESSED IN PLACENTA, SIGNAL = 1.5; EST_HUMAN HIT: AI683358.1, EVALUE 0.00e+00; SWISSPROT HIT: P32455, EVALUE 8.00e-41; NT HIT: gi6996011, EVALUE 1.00e-106
cgctaatttcttttgaaacagatggtccacatccttgaaagagttcttcatatagacttcagtggcctccctctcactaaccctgtgcaggtccagcagctcctggagggtttctgcgggcagctgcaccttctggcccatctgctggtcatagtgggcaatagccttttgcactgcggctgagttctctatctgggccaaggccaggactgcgttctccatgcagggcagatcccctctgctgatagcattgatataggtcagcactaggctctctagac

SEQ ID NO: 31333 - DNA, 84 bp, Homo sapiens
  MAP TO AC023084.2; EXPRESSED IN ADULT LIVER, SIGNAL = 1.6; EXPRESSED IN FETAL LIVER, SIGNAL = 1.8; EXPRESSED IN PLACENTA, SIGNAL = 1.5; EXPRESSED IN HELA, SIGNAL = 1.9; EXPRESSED IN LUNG, SIGNAL = 2.3; SWISSPROT HIT: P03949, EVALUE 1.90e+00; NT HIT: D86964.1, EVALUE 3.00e-40; EST_HUMAN HIT: AI972709.1, EVALUE 2.60e-01
ctccacacgtctcctgtattcgcaccacatcgccgatctgcagggagagctggggggctccgctgccttggaagttgtatatgg

SEQ ID NO: 31334 - DNA, 166 bp, Homo sapiens
  MAP TO AC022311.3; EXPRESSED IN ADULT LIVER, SIGNAL = 1.6; EST_HUMAN HIT: AA897511.1, EVALUE 1.00e-88; NT HIT: AF054612.1, EVALUE 3.80e-01
agaagttagaacacttgaaattagctaagcgagaatgccatcagcagtgcatcgatctcagctgcatccaggtgtatcagttgaatggcagagggactagaaattacatttcacgaagaaaatttacagaactaaagatatttaggctgcaaaagaaaagactaag

SEQ ID NO: 31335 - DNA, 320 bp, Homo sapiens
  MAP TO AC002060.3; EXPRESSED IN ADULT LIVER, SIGNAL = 3.8; EXPRESSED IN BONE MARROW, SIGNAL = 1e+02; EXPRESSED IN FETAL LIVER, SIGNAL =   2; EXPRESSED IN LUNG, SIGNAL =  78; EST_HUMAN HIT: AA809080.1, EVALUE 0.00e+00; SWISSPROT HIT: P01842, EVALUE 8.00e-55; NT HIT: X57819.1, EVALUE 0.00e+00
gtcagcccaaggccaaccccactgtcactctgttcccgccctcctctgaggagctccaagccaacaaggccacactagtgtgtctgatcagtgacttctacccgggagctgtgacagtggcctggaaggcagatggcagccccgtcaaggcgggagtggagaccaccaaaccctccaaacagagcaacaacaagtacgcggccagcagctacctgagcctgacgcccgagcagtggaagtcccacagaagctacagctgccaggtcacgcatgaagggagcaccgtggagaagacagtggcccctacagaatgttcatag

SEQ ID NO: 31336 - DNA, 169 bp, Homo sapiens
  MAP TO AC018553.2; EXPRESSED IN ADULT LIVER, SIGNAL = 1.6; NT HIT: U79186.1, EVALUE 1.50e+00; EST_HUMAN HIT: AA037439.1, EVALUE 9.10e+00
cgacccgctctgccatcacagatgcggcggcctccatgtgaccgttaatagtccccgccgcctggaagttctgacagcgccctgaagcccatttgtcatctaaatggtccgtccccttcttaaacatcattttggcccaaggtccattcatggggcctgccgggtgttc

SEQ ID NO: 31337 - DNA, 242 bp, Homo sapiens; identical to SEQ ID NO: 29772
  MAP TO AC018505.3; EXPRESSED IN FETAL LIVER, SIGNAL = 1.6; EXPRESSED IN ADULT LIVER, SIGNAL = 2.5; EST_HUMAN HIT: T92574.1, EVALUE 3.40e+00; SWISSPROT HIT: P54817, EVALUE 1.60e+00

SEQ ID NO: 31338 - DNA, 417 bp, Homo sapiens
  MAP TO AC010322.4; EXPRESSED IN ADULT LIVER, SIGNAL =   4; EST_HUMAN HIT: BE718835.1, EVALUE 9.80e-02; SWISSPROT HIT: P23266, EVALUE 3.00e-29; NT HIT: gi6679169, EVALUE 7.00e-05
ctggcgtctcataagtacaggatactgcaggggctggcacacagcaacataacggtcataagacatgaggaccaacaggacgccctcagccacacccatcagtgtgaggaagaatatttgagctgcaccacctccataggaggtggcaccttctccccgcagaaagtctgatgccatcttggggatggtgaccatgggacagccaatgtcaaacagggagagctggctgagcaggaagtacatgggtgtgtggagccgggagtccacacggatcaagaagagaagaacggtgttgcccagaaggcctatgacaaacatgacagccaccagggagaagaggagctggcgtgatcctgagtgactgaagaggcccaccagaatgaagtctgaggccaccgactgattcacatcccccat

SEQ ID NO: 31339 - DNA, 90 bp, Homo sapiens
  MAP TO AL109925.11; EXPRESSED IN ADULT LIVER, SIGNAL = 1.7; SWISSPROT HIT: P36871, EVALUE 3.00e-10; EST_HUMAN HIT: BE535490.1, EVALUE 1.00e-43; NT HIT: gi11423553, EVALUE 8.00e-44
gatgtacagccgaatggtggccccggcactcccagtgccgctcagtcggaagacgattcgagaaccatctgtgaaaatgaggcgcaagcc

SEQ ID NO: 31340 - DNA, 168 bp, Homo sapiens
  MAP TO AL135787.3; EXPRESSED IN ADULT LIVER, SIGNAL = 4.8; EXPRESSED IN FETAL LIVER, SIGNAL = 3.4; NT HIT: D49387.1, EVALUE 5.00e-90; SWISSPROT HIT: Q14914, EVALUE 1.00e-26; EST_HUMAN HIT: BE884686.1, EVALUE 7.00e-90
cctggcatgccaactgtccccagagccaaagacagtggtattgtgtctggccactctgtcagcagcttttccagatctttcccatcagaaatggagtgcgttgtccagcctggagaagccagtacaatagttccttttggtagggctacatttttactttccacaact

SEQ ID NO: 31341 - DNA, 104 bp, Homo sapiens
  MAP TO AL133454.2; EXPRESSED IN PLACENTA, SIGNAL = 1.4; EXPRESSED IN ADULT LIVER, SIGNAL = 1.5; EXPRESSED IN LUNG, SIGNAL = 1.6; SWISSPROT HIT: Q9Z1M4, EVALUE 1.00e-06; EST_HUMAN HIT: AV729958.1, EVALUE 3.30e-01; NT HIT: gi4759051, EVALUE 1.00e-39
ctagatatctcagcttgggaatttttttctccatcaacagtgaaaggagatgctccagttagtaattcatacattagaacacccaaactccaccagtcaactgc

SEQ ID NO: 31342 - DNA, 124 bp, Homo sapiens
  MAP TO AC019230.2; EXPRESSED IN ADULT LIVER, SIGNAL = 1.6; EXPRESSED IN LUNG, SIGNAL = 2.7; EXPRESSED IN BONE MARROW, SIGNAL = 1.9; SWISSPROT HIT: Q01285, EVALUE 5.40e+00; NT HIT: gi11526311, EVALUE 4.30e+00
aggtggaaatcatctcagaggctgcctcggccatgtctggaaacaaatgctgattgtctgctggagctgtcagctgcaactcccacaagtgggctttcaatgtgtcctggctttcttgctgcat

SEQ ID NO: 31343 - DNA, 140 bp, Homo sapiens
  MAP TO AC022325.3; EXPRESSED IN LUNG, SIGNAL = 8.1; EXPRESSED IN ADULT LIVER, SIGNAL = 1.4; EST_HUMAN HIT: W22727.1, EVALUE 7.30e+00; SWISSPROT HIT: O60683, EVALUE 4.00e+00; NT HIT: AL021127.2, EVALUE 3.10e-01
cttccccaaagccttcctccccctttttggggttcattaatttccttttcatttctgaaggcagtttgttttgtcttcagcattttcacatctctgaccgttactttcctggcttgttttatttccttttcatttttcat

SEQ ID NO: 31344 - DNA, 233 bp, Homo sapiens
  MAP TO AL132800.2; EXPRESSED IN PLACENTA, SIGNAL =   2; EXPRESSED IN LUNG, SIGNAL = 2.5; EXPRESSED IN ADULT LIVER, SIGNAL = 4.4; NT HIT: AB002321.1, EVALUE 1.00e-128; SWISSPROT HIT: P34129, EVALUE 8.40e-01; EST_HUMAN HIT: BE887554.1, EVALUE 1.00e-128
tcaaaagttaagactgagcagggcctcagacagttggttgatgtcccggcagtatggctcccgctgcaggatgaagtccactttgtgatcctgaccccaaaacacctccagcagctgccgccggagccgctctgtttcccgggtcttccgaatgccaccactacctttttcctcttctctcccctgctgctgtttaccatgttctgcaaagcccctggaaggatgctgagcct

SEQ ID NO: 31345 - DNA, 238 bp, Homo sapiens
  MAP TO AL121652.2; EXPRESSED IN PLACENTA, SIGNAL = 1.4; EXPRESSED IN BONE MARROW, SIGNAL = 2.8; EXPRESSED IN ADULT LIVER, SIGNAL =   2; EXPRESSED IN FETAL LIVER, SIGNAL =   2; EXPRESSED IN HELA, SIGNAL = 2.2; EXPRESSED IN LUNG, SIGNAL = 3.6; SWISSPROT HIT: P54819, EVALUE 3.00e-32; EST_HUMAN HIT: AB005622.1, EVALUE 7.00e-94; NT HIT: gi11423962, EVALUE 5.00e-94
cagtttcccagcatccatagttgcgttcagctttttttctagctctgagccagaagccaccatggccctcagcctgtccccagtagccgaatggcagacacagaagttttcagccaatatgggtgcctgggtgcctttaccgtccccgggaggccccagcagcacggcctggatgcctttaggatactcgggttctgccgctggcacgctgggagccatgtccgctgaagtccttgta

SEQ ID NO: 31346 - DNA, 364 bp, Homo sapiens
  MAP TO AC011455.3; EXPRESSED IN ADULT LIVER, SIGNAL =   2; EXPRESSED IN LUNG, SIGNAL = 2.1; EST_HUMAN HIT: BE392589.1, EVALUE 0.00e+00; NT HIT: gi11056055, EVALUE 0.00e+00; SWISSPROT HIT: O15235, EVALUE 9.00e-58
ttcttctgcacgtggccacagtcgtacttgccacgcacaacggtgagcttgacgcctggcaggtcctgggtgcggccgccctccacaaggacaatctggtgctcctgcagggtgtggccctccccagggatgaagcagacggcctcgcggccagtgctgagccgcactcgacagcacttgcgattggctgagttgggcttcttcggcttgcgggtaaacgtgcacaggaccacacccttcagctgcggccggccttccgtggggcccagcttccgaggcggccgcttggggggccccaggcggtgcatctggttcagggtagccatggagcaggtagcccagagccggggaaccagagctgggc

SEQ ID NO: 31347 - DNA, 407 bp, Homo sapiens
  MAP TO AP001243.1; EXPRESSED IN ADULT LIVER, SIGNAL = 1.7; EXPRESSED IN BONE MARROW, SIGNAL =  75; EXPRESSED IN LUNG, SIGNAL =  37; NT HIT: X72815.1, EVALUE 0.00e+00; EST_HUMAN HIT: AW406380.1, EVALUE 0.00e+00; SWISSPROT HIT: P04207, EVALUE 1.00e-51
ataccactggagaaatagtgatgacgcagtctccagccaccctgtctgtgtctccaggggaaagagccaccctctcctgcagggccagtcagagtgttagcagcaacttagcctggtaccagcagaaacctggccaggctcccaggctcctcatctatggtgcatccaccagggccactggtatcccagccaggttcagtggcagtgggtctgggacagagttcactctcaccatcagcagcctgcagtctgaagattttgcagtttattactgtcagcagtataataactggcctcccacagtgattcaacatgaaacaaaaacctcaagaagaccatcagtgtttactagattataccagctgcttcctttacagacagctagtgtggtggccactcagttttag

SEQ ID NO: 31348 - DNA, 188 bp, Homo sapiens
  MAP TO AC016950.8; EXPRESSED IN ADULT LIVER, SIGNAL = 4.3; SWISSPROT HIT: P28685, EVALUE 6.00e-13; NT HIT: AB040929.1, EVALUE 1.00e-102; EST_HUMAN HIT: BF672670.1, EVALUE 2.60e+00
cctttgttattataaacacccactttaacttcatatggtgaatatggcacgatgctttcattcctaaagacatatcttggggtgtcaggggatgtcaccactgtctggatccaggtggtaaccccaagagggcggaaagcaacaacatacccaaaaccttcaccattctgtagttcttcagggactgg

SEQ ID NO: 31349 - DNA, 147 bp, Homo sapiens
  MAP TO AL157791.1; EXPRESSED IN FETAL LIVER, SIGNAL = 2.9; EXPRESSED IN LUNG, SIGNAL = 3.4; EXPRESSED IN ADULT LIVER, SIGNAL = 1.6; NT HIT: gi11433426, EVALUE 1.00e-77; SWISSPROT HIT: P50402, EVALUE 4.00e+00; EST_HUMAN HIT: AI703483.1, EVALUE 2.00e-77
atggagcaggtggtggacctgggaaatcccctggtggaaaataatctcgagaagctccaaacatggctcctggaggaggtggggggaaaggaggtcctcttctcaagaatgggcctcttgcatccactggaaacaatggacctctga

SEQ ID NO: 31350 - DNA, 244 bp, Homo sapiens
  MAP TO AC007345.2; EXPRESSED IN ADULT LIVER, SIGNAL = 1.5; EXPRESSED IN BONE MARROW, SIGNAL = 2.3; SWISSPROT HIT: Q22516, EVALUE 4.00e-18; NT HIT: AB037837.1, EVALUE 4.00e-11; EST_HUMAN HIT: AU121677.1, EVALUE 0.00e+00
acgaaactgcatcttagcagatgaaatgggtcttggcaaaactattcaatcaattacattcctctatgaaatccttctgactggtataagaggacctttcctgattattgctccactttctactattgcaaactgggagagagaatttcgtacgtggactgatattaacgttgtggtttatcatgggagcctgattagcagacaaatgatacagcaatacgagatgtacttcagggattcacag

SEQ ID NO: 31351 - DNA, 111 bp, Homo sapiens
  MAP TO AL135792.3; EXPRESSED IN HELA, SIGNAL = 1.7; EXPRESSED IN ADULT LIVER, SIGNAL = 1.4; EXPRESSED IN FETAL LIVER, SIGNAL = 1.8; EXPRESSED IN PLACENTA, SIGNAL = 1.4; NT HIT: AF041427.1, EVALUE 9.60e-01; EST_HUMAN HIT: AI792041.1, EVALUE 1.40e+00; SWISSPROT HIT: P29716, EVALUE 1.40e+00
ctcaaagtttactctttcttcaaagcctgttttgatgctgtacttcatgcccccaaccactgacttataccaattggatataactgtctcttcatttgagccccctaccat

SEQ ID NO: 31352 - DNA, 187 bp, Homo sapiens
  MAP TO AC012568.3; EXPRESSED IN ADULT LIVER, SIGNAL = 1.5; EXPRESSED IN LUNG, SIGNAL = 3.1; NT HIT: AB004929.1, EVALUE 4.00e-94; SWISSPROT HIT: P42003, EVALUE 2.00e-19; EST_HUMAN HIT: R64732.1, EVALUE 1.00e-76
gatgcaacctgaagatcttcaacaaccaggagttcgctgccctcctggcccagtcggtcaaccagggctttgaggctgtctaccagttgacccgaatgtgcaccatccgcatgagcttcgtcaaaggctggggagcggagtacaggtcagttatgggtgctgcctacatcaggggacccaactccag

SEQ ID NO: 31353 - DNA, 334 bp, Homo sapiens
  MAP TO AC007869.2; EXPRESSED IN FETAL LIVER, SIGNAL = 1.6; EXPRESSED IN PLACENTA, SIGNAL = 5.7; EXPRESSED IN ADULT LIVER, SIGNAL = 1.6; EXPRESSED IN HELA, SIGNAL = 1.7; EXPRESSED IN LUNG, SIGNAL = 2.5; SWISSPROT HIT: O35548, EVALUE 2.90e+00; NT HIT: AF069489.1, EVALUE 5.20e-02; EST_HUMAN HIT: AW836290.1, EVALUE 2.00e-92
atgtgctggtggacggacagccatgtgaccgcgaggctgtggcggcctgccaggtgggcgaccccgtgcgcctggaggtgcggctgaccaaccggagcccgcgcagcgtagggcccttcgccctcactgtggtccccttccaggaccaccagaacggcgtgcacaactacgacctgcacgacaccgtctccttcgtgggctccagcaccttctacctcgacgcggtgcgtggtggtgtgcaaggcggtctgggagcctctggccatgtggtcatcatccccccttccctgggtggtgggctttggggtcagcatatgtccagcagacgatagca

SEQ ID NO: 31354 - DNA, 158 bp, Homo sapiens
  MAP TO AL158845.1; EXPRESSED IN PLACENTA, SIGNAL = 2.1; EXPRESSED IN ADULT LIVER, SIGNAL = 3.3; EST_HUMAN HIT: BE737786.1, EVALUE 1.40e-01; NT HIT: AF037625.1, EVALUE 9.10e-02; SWISSPROT HIT: O18870, EVALUE 5.20e+00
ctcccccagcttcctcatgctcttttccttgtctgctttcctacttggcaccatgtaatatttatgattattatatattatctctccctgctccacagcatgggaattaagtttattagggcactgatgttttgtctgtgcaatttcctgatatgtat

SEQ ID NO: 31355 - DNA, 80 bp, Homo sapiens
  MAP TO AC023820.2; EXPRESSED IN PLACENTA, SIGNAL = 1.8; EXPRESSED IN ADULT LIVER, SIGNAL = 1.6; EST_HUMAN HIT: BE296917.1, EVALUE 2.40e-01
gttctcagtgccttcaggacaggaccctggccaacttacttattacggtatctccagttatgaccacagtgcctgctcta

SEQ ID NO: 31356 - DNA, 336 bp, Homo sapiens
  MAP TO AC008962.4; EXPRESSED IN ADULT LIVER, SIGNAL =  14; EST_HUMAN HIT: AV661332.1, EVALUE 8.00e-76; SWISSPROT HIT: Q16696, EVALUE 3.00e-27; NT HIT: U22028.1, EVALUE 1.00e-116
tcagtagatggaacagcgatggttgatatagttgggattgtgaggattattatgacaggggctaatttgaatgggcctgtgttgtctgccctccccactgccagcctgatttccctctgcctggctttgcagctcctcccattggctgctggggtgtaccccttgcatgcggatgagaaacgagtcaatgaagtcccgtggggaattgggatccagcgtgcactggttgtgctccactttcttggcaatgaagtcctccagcccttgcagctccttaaaggcctgttgctgtggtcctggcaggtgtttcatcaccgaagagaacatctcatagag

SEQ ID NO: 31357 - DNA, 149 bp, Homo sapiens
  MAP TO AL138970.2; EXPRESSED IN ADULT LIVER, SIGNAL = 1.7; EXPRESSED IN PLACENTA, SIGNAL = 1.3; EST_HUMAN HIT: BF092708.1, EVALUE 1.30e-01; SWISSPROT HIT: P12675, EVALUE 1.00e+00; NT HIT: AF227986.1, EVALUE 1.30e+00
atgaaagaaatccattcaaatggaaggttatctgatgtcatcaaaaccatgcctgtgttgctcttaaacaccaccaaagatgctggcaagaccacaccagccagaaccatcactcccaaatctggtggccaagcaacttcctttcctct

SEQ ID NO: 31358 - DNA, 143 bp, Homo sapiens
  MAP TO AC010745.2; EXPRESSED IN ADULT LIVER, SIGNAL = 1.6; SWISSPROT HIT: P51825, EVALUE 1.00e+00; NT HIT: gi9506428, EVALUE 8.20e-02; EST_HUMAN HIT: AI656325.1, EVALUE 1.20e-01
atgaaatatgcaagcatctgtaggcttgtccttggcattcagagaatgggctttgggccacagactcattctgccacctaccagctggtggggttggatagtcacataccatcaggtcttgttctcattggccatgggagtag

SEQ ID NO: 31359 - DNA, 163 bp, Homo sapiens
  MAP TO AC021881.2; EXPRESSED IN LUNG, SIGNAL = 1.8; EXPRESSED IN ADULT LIVER, SIGNAL = 1.4; NT HIT: AB040537.1, EVALUE 4.00e-87; EST_HUMAN HIT: AW079000.1, EVALUE 2.20e+00; SWISSPROT HIT: Q13206, EVALUE 4.00e-25
gtccagtatctgtaccgagtgttttgccggctacgtcctggtgtttctatccttgcactccatggtcgacagcagcaaatgagaagaatggaagtctataatgagtttgtccgtaagagagctgcagtactctttgctactgatattgcagccaggggtctgg

SEQ ID NO: 31360 - DNA, 205 bp, Homo sapiens
  MAP TO AC023075.2; EXPRESSED IN ADULT LIVER, SIGNAL = 1.5; EST_HUMAN HIT: AW450487.1, EVALUE 7.20e-01; SWISSPROT HIT: P51386, EVALUE 1.70e+00
gaatgctggcggggaagataacaacttaatggcagaatcaacagatttaagtggaatcaagagcttcttgggccagcagaagcaagtaaatggcacatgtaaagtggatgtgatcacttaccgtcaagatagcaatgatacagtaatcttggttcagggagtggccagacatgcagagatttctggcactcccatttggactata

SEQ ID NO: 31361 - DNA, 177 bp, Homo sapiens
  MAP TO AL158823.1; EXPRESSED IN ADULT LIVER, SIGNAL = 1.6; EXPRESSED IN LUNG, SIGNAL = 2.3; SWISSPROT HIT: P29059, EVALUE 2.30e+00; EST_HUMAN HIT: BF675135.1, EVALUE 9.60e+00
atttgaaagcatgcaagcagctgcagatggtttcaggctggcccacagaagccagctgtgtttcccctccagagaggccgtgggaaatgacagcaacagctgcccaatgatgtccagtgaaaaaaggcggccgctgtttgcacctgaaagcacgtggctttctttgtctgccttggc

SEQ ID NO: 31362 - DNA, 113 bp, Homo sapiens
  MAP TO AC015620.3; EXPRESSED IN PLACENTA, SIGNAL = 1.8; EXPRESSED IN ADULT LIVER, SIGNAL = 1.6; EXPRESSED IN BONE MARROW, SIGNAL = 1.7; EXPRESSED IN FETAL LIVER, SIGNAL = 1.8; EXPRESSED IN HELA, SIGNAL = 1.8; SWISSPROT HIT: P50542, EVALUE 7.20e-02; NT HIT: AJ245503.1, EVALUE 2.00e-57; EST_HUMAN HIT: T04868.1, EVALUE 3.00e-57
cttctcactagccgagatggttacttggttctgggcttcttggttctcagatatccagttcctccgagccatttcttcccattctgcttgcatcttatcccaaaactctgtat

SEQ ID NO: 31363 - DNA, 208 bp, Homo sapiens
  MAP TO AL158841.1; EXPRESSED IN BONE MARROW, SIGNAL = 1.6; EXPRESSED IN LUNG, SIGNAL = 1.6; EXPRESSED IN ADULT LIVER, SIGNAL = 1.4; SWISSPROT HIT: P57382, EVALUE 4.90e+00; NT HIT: gi9994174, EVALUE 1.20e-01; EST_HUMAN HIT: AA436065.1, EVALUE 1.90e-01
tttctttttgtataaaatggagattctggtgaatgaaaatgagatcatatatatcaagcacattaagaacctgttacaatataccactcaattcatgaatggcgattacatgaacttcttgaagttaggaaacatgttcagcttcttcctccttgtgtttttggcacaatgcccagtacccagggggtacacaatagttattaaataa

SEQ ID NO: 31364 - DNA, 96 bp, Homo sapiens
  MAP TO AL158845.1; EXPRESSED IN ADULT LIVER, SIGNAL = 1.7; EXPRESSED IN LUNG, SIGNAL =   2; EXPRESSED IN PLACENTA, SIGNAL = 1.3; EST_HUMAN HIT: AI141875.1, EVALUE 2.10e-01; NT HIT: AL112994.1, EVALUE 6.80e-01
actaaattgaggagatagaacctcatgtggtataaaaccatgaaaaaagaagaaacaatgtcgtacgtcatgtagtagacttgtaagaagattcca

SEQ ID NO: 31365 - DNA, 87 bp, Homo sapiens
  MAP TO AC020559.2; EXPRESSED IN ADULT LIVER, SIGNAL = 1.5; EXPRESSED IN LUNG, SIGNAL = 1.6; NT HIT: Z14312.1, EVALUE 2.80e+00; EST_HUMAN HIT: AA640560.1, EVALUE 7.00e-42
aggaaaagacagtgagagagcaagagcagattgagaagcagaagagtgagtcgcaaaaagagaaaatgacagaaatggagcaccctg

SEQ ID NO: 31366 - DNA, 395 bp, Homo sapiens
  MAP TO AL136170.2; EXPRESSED IN ADULT LIVER, SIGNAL =  30; EXPRESSED IN FETAL LIVER, SIGNAL =  12; SWISSPROT HIT: P01008, EVALUE 4.00e-72; NT HIT: gi11422599, EVALUE 0.00e+00; EST_HUMAN HIT: AI207425.1, EVALUE 0.00e+00
ggcctgtggaagtcaaagttcagccctgagaacacaaggaaggaactgttctacaaggctgatggagagtcgtgttcagcatctatgatgtaccaggaaggcaagttccgttatcggcgcgtggctgaaggcacccaggtgcttgagttgcccttcaaaggtgatgacatcaccatggtcctcatcttgcccaagcctgagaagagcctggccaaggtagagaaggaactcaccccagaggtgctgcaagagtggctggatgaattggaggagatgatgctggtggtccacatgccccgcttccgcattgaggacggcttcagtttgaaggagcagctgcaagacatgggccttgtcgatctgttcagccctgaaaagtccaaactcccaggttt

SEQ ID NO: 31367 - DNA, 76 bp, Homo sapiens
  MAP TO AC022267.2; EXPRESSED IN ADULT LIVER, SIGNAL = 1.6; EXPRESSED IN FETAL LIVER, SIGNAL = 1.7; EST_HUMAN HIT: AI208703.1, EVALUE 4.00e-03; NT HIT: X77208.1, EVALUE 6.00e-01
aatatcagagaagtgtgaacgccacccagggactttgcatcctcttctgggggaacgggttagtgtgatttcagat

SEQ ID NO: 31368 - DNA, 78 bp, Homo sapiens
  MAP TO AC018388.4; EXPRESSED IN PLACENTA, SIGNAL = 1.4; EXPRESSED IN ADULT LIVER, SIGNAL = 1.7; EXPRESSED IN HELA, SIGNAL = 1.7; NT HIT: X95275.1, EVALUE 9.60e+00; EST_HUMAN HIT: BF572539.1, EVALUE 5.90e-02
cccttctgatgctcatggaagatgttattatatttaatttgttctaagtcagctacagcttcattatcactctgaaaa

SEQ ID NO: 31369 - DNA, 247 bp, Homo sapiens
  MAP TO AC008962.4; EXPRESSED IN ADULT LIVER, SIGNAL = 9.9; SWISSPROT HIT: Q16696, EVALUE 1.00e-31; EST_HUMAN HIT: AW577399.1, EVALUE 1.00e-73; NT HIT: U22028.1, EVALUE 0.00e+00
ccaaggtccatgaggagattgacagagtgatcggcaagaaccggcagcccaagtttgaggaccgggccaagatgccctacacagaggcagtgatccacgagatccaaagatttggagacatgctccccatgggtttggcccacagggtcaacaaggacaccaagtttcgggatttcttcctccctaaggtgctgtctcccctccaccaccaccactcagactacggggacttccagcctctctctgt

SEQ ID NO: 31370 - DNA, 289 bp, Homo sapiens
  MAP TO AL121985.13; EXPRESSED IN BONE MARROW, SIGNAL = 2.4; EXPRESSED IN LUNG, SIGNAL = 2.8; EXPRESSED IN ADULT LIVER, SIGNAL = 1.6; EST_HUMAN HIT: AA488894.1, EVALUE 0.00e+00; SWISSPROT HIT: P09326, EVALUE 4.00e-51; NT HIT: M37766.1, EVALUE 0.00e+00
caagcacttgcagcttgatcttccattcttgctcattcccagtctttttcaacaccctcatgatgtaggtgctgttgtcctctttctggaccttagagatgtacagtgcgccactctgaggatcaagtctgaccctgcctttaaatttggattcaaagtacttagattttctggaatcccattctacaatcttctggtcgaaagtataaaaccaggttagttgtttgtagttctcaggcaggctctcagagatgttcagagtcacgttgctgccggagaccacggtcat

SEQ ID NO: 31371 - DNA, 117 bp, Homo sapiens
  MAP TO AL137190.2; EXPRESSED IN ADULT LIVER, SIGNAL = 1.4; EXPRESSED IN PLACENTA, SIGNAL =   3; EXPRESSED IN LUNG, SIGNAL = 1.7; EST_HUMAN HIT: BE958630.1, EVALUE 5.90e+00; SWISSPROT HIT: P39933, EVALUE 7.10e+00
gctgatctctcagctcaccctgacaggtggctcatgggagtaggaaggaccttggcatctgcaacaagcagacctgaggcactgatagctctcctggacaagaggctcatgagagtg

SEQ ID NO: 31372 - DNA, 175 bp, Homo sapiens
  MAP TO AC009575.4; EXPRESSED IN ADULT LIVER, SIGNAL = 3.2; NT HIT: gi11436925, EVALUE 3.00e-94; EST_HUMAN HIT: AI791444.1, EVALUE 5.00e-94; SWISSPROT HIT: P53068, EVALUE 1.00e-04
caacttgagttggtggaaccaagtggctggattcatgttcccttaactgacaatcataagaagccaactcgtacattcatgatacagattgctgttctagccaatcaccagaatggaagagacacccatatgagacaaattaaaatatacacaccagtagaagagagctccattg

SEQ ID NO: 31373 - DNA, 219 bp, Homo sapiens
  MAP TO AC024581.1; EXPRESSED IN ADULT LIVER, SIGNAL = 1.4; SWISSPROT HIT: P52354, EVALUE 8.00e+00; NT HIT: AF077337.1, EVALUE 3.30e-02
ttgtcatcccggtccttagggttatgctcactgctgcctatattgatcctttcatctgtccttccagaacactcttcatcagcttttattaacatcttacatgaaaatccaagacattttttagctgggtccattttctcagaattctctccttctccttcctcccctctgttgctactaagccaacatgttcctatccgactgactctatccctgagc

SEQ ID NO: 31374 - DNA, 225 bp, Homo sapiens
  MAP TO AL136418.1; EXPRESSED IN ADULT LIVER, SIGNAL =   5; EST_HUMAN HIT: BE084180.1, EVALUE 1.00e-115; NT HIT: AB032957.1, EVALUE 1.00e-124; SWISSPROT HIT: P46316, EVALUE 2.90e+00
aactgcttatgaatgggtaaatccagctgcctatggacttgtagtagtaacgtcatcagaaggaagaaatctaccttatggccgcttagaagacatactaagtcgtgataattcagctttaaattgtcatagcaatgatgataagaatgcctggtttgccatagatctgggtctctgggtgataccatcagcatatacacttcgtcatgctcgtggttatggaag

SEQ ID NO: 31375 - DNA, 360 bp, Homo sapiens
  MAP TO AL157789.1; EXPRESSED IN ADULT LIVER, SIGNAL = 2.2; NT HIT: gi11435250, EVALUE 0.00e+00; SWISSPROT HIT: Q14973, EVALUE 7.00e-64; EST_HUMAN HIT: W01479.1, EVALUE 0.00e+00
ctacctgaggttcatgtcccccttcatggccagactgaagacattggacaggttccctccaggtgagcagccacagaccaagatggccagtgcctcaatgttcttcagccggaagaccttgcccagcacaaaggccgtgaggggcatgatgccatactgtgccaccagggcgatggccagccctttaggcttccataagtgagccttgatcttgctgaactccatggtgcagcccagcgagagcatgatgaagaacaacatgaacaccaggatgacgctcagtgccaggtctgtggggcgcttgccaaagttgggtggcagggtgaagttgaatggggcagacgcgttgtgggcctccat

SEQ ID NO: 31376 - DNA, 179 bp, Homo sapiens
  MAP TO AL138734.2; EXPRESSED IN FETAL LIVER, SIGNAL = 1.5; EXPRESSED IN ADULT LIVER, SIGNAL = 1.8; NT HIT: AJ297357.1, EVALUE 4.00e-07; EST_HUMAN HIT: AW778769.1, EVALUE 7.00e-10; SWISSPROT HIT: P44596, EVALUE 1.30e+00
ctgtactgcatgttactgtactgaatactgtaggcaattgtgacatagggtaagtatttgtaaatatttgtgtttttaaacatagaaaaggtagagtaaaaatacggtattataatcttatggggtccatcattgactgaaacattgttatgtggtacatgagtataatctacccacac

SEQ ID NO: 31377 - DNA, 78 bp, Homo sapiens
  MAP TO AC021993.2; EXPRESSED IN ADULT LIVER, SIGNAL = 2.2; NT HIT: X07471.1, EVALUE 1.60e-01; EST_HUMAN HIT: BE268821.1, EVALUE 9.20e-01
ggaggatatgtagtcagcgttgagtttacaggagttctcaagtaaaaatgctgcttttgatgtgtaaaaggagatgtc

SEQ ID NO: 31378 - DNA, 190 bp, Homo sapiens
  MAP TO AL136039.1; EXPRESSED IN PLACENTA, SIGNAL = 1.7; EXPRESSED IN BONE MARROW, SIGNAL = 1.5; EXPRESSED IN LUNG, SIGNAL = 2.3; EXPRESSED IN ADULT LIVER, SIGNAL = 1.4; EST_HUMAN HIT: BF359310.1, EVALUE 8.00e-87; SWISSPROT HIT: Q9ZE81, EVALUE 4.40e-01; NT HIT: AB024759.1, EVALUE 1.00e-103
aggcaggactaaaatgaaccttactctgatcaagaataaaggctgcattgctttgtgccacttcatagccctgttcagccaggaggaggtactggatcactgcagcattgtaatcgccatctttatagctgttataggcagtcataagcctttcagaccaacggcctcgttcacatacattcttaaacaa

SEQ ID NO: 31379 - DNA, 197 bp, Homo sapiens
  MAP TO AL117355.2; EXPRESSED IN ADULT LIVER, SIGNAL = 6.3; NT HIT: gi11437358, EVALUE 1.00e-107; SWISSPROT HIT: P20721, EVALUE 1.70e+00; EST_HUMAN HIT: AV712896.1, EVALUE 1.00e-107
ttgtatatcaacaaagccaatatctggaatagtgccttagatgcattcagaaatcgaaactttaatccttcatatgcaattgaagtagcatatgttattgaaaatgataattttggaagtgagcatcctggatcaaagcaagaatttctgagtctcttaatgcaacatcttgagaactcatcattgtttgaagggtc

SEQ ID NO: 31380 - DNA, 378 bp, Homo sapiens
  MAP TO AC007345.2; EXPRESSED IN ADULT LIVER, SIGNAL = 1.5; EXPRESSED IN HELA, SIGNAL =   2; EST_HUMAN HIT: W88964.1, EVALUE 0.00e+00; SWISSPROT HIT: P38126, EVALUE 1.00e-07; NT HIT: gi11321606, EVALUE 9.00e-69
atggtcaacgctgtcttgacccaaattaatcagattaaaaggcattttaatgtagtgattccagctacttccaacatcaccgtgaagattgacatagcctttgtggacaggtctgatatcaagcagtatatcagtctgcgctctgcagcagccatcttcaaaatttacgttttctgtttggaagaactggtcaagtgccaggtcatataccctcctcagcagctattaaccctccaaaagctggagatgattggcttcattgaaaacaatgtgtcaaaattgagcttccttttgagtgacatttcaaagaatatcgagggcctccatggccagttcctgaggaaactcctttttctggtgcatacactgtgtgtccag

SEQ ID NO: 31381 - DNA, 169 bp, Homo sapiens
  MAP TO AL133475.14; EXPRESSED IN ADULT LIVER, SIGNAL = 1.8; NT HIT: AL163209.2, EVALUE 3.00e-08; SWISSPROT HIT: P08547, EVALUE 6.00e-09; EST_HUMAN HIT: BE145654.1, EVALUE 4.00e-05
gaagaaaagaaataataaaaatcagagcagaaatcagtgaaactgaaaactggaaaacaacagagaaagtcaatataaccaaaagctgcttctttgaaaacatcaataaaattgaaatctctatctaggctaagaaaaaaagaaagaagatgcaaattactaacatcag

SEQ ID NO: 31382 - DNA, 115 bp, Homo sapiens
  MAP TO AL137160.2; EXPRESSED IN PLACENTA, SIGNAL = 1.4; EXPRESSED IN BONE MARROW, SIGNAL = 1.5; EXPRESSED IN ADULT LIVER, SIGNAL = 1.9; EXPRESSED IN FETAL LIVER, SIGNAL = 1.6; NT HIT: AJ286143.1, EVALUE 1.00e+00; SWISSPROT HIT: P03006, EVALUE 4.10e+00; EST_HUMAN HIT: AA973540.1, EVALUE 3.70e-01
gcctggcaggaggactgcccacactctaccaaagattctgccaccatcacttttatctcagcagctaaagctttccctaagacaaccaatttccctgctacaatgctctggtacc

SEQ ID NO: 31383 - DNA, 224 bp, Homo sapiens
  MAP TO AC025488.1; EXPRESSED IN ADULT LIVER, SIGNAL = 5.9; EXPRESSED IN FETAL LIVER, SIGNAL = 3.8; SWISSPROT HIT: P16662, EVALUE 8.00e-37; EST_HUMAN HIT: AA987868.1, EVALUE 3.00e-99; NT HIT: gi4507822, EVALUE 1.00e-107
atataaagagagtgttatgaaattatcaagaattcaacatgatcaaccagtgaagcccctggatcgagcagtcttctggattgaatttgtcatgcgccacaaaggagccaaacaccttcgagttgcagcccgtgacctcacctggttccagtaccactctttggatgtgattgggtttctgctggcctgtgtggcaactgtgacatttatcatcacaaagtgtt

SEQ ID NO: 31384 - DNA, 331 bp, Homo sapiens
  MAP TO AL157791.1; EXPRESSED IN ADULT LIVER, SIGNAL = 5.8; EXPRESSED IN FETAL LIVER, SIGNAL = 7.1; NT HIT: gi9630557, EVALUE 3.20e+00; SWISSPROT HIT: P57599, EVALUE 2.80e+00; EST_HUMAN HIT: AL040793.1, EVALUE 0.00e+00
aattcagcaactgtttgaagaaatcctgagtaatagtaggcaactgaaatggctgtcctgtgggtttatgctggaaatagtaaccccaacatcactgtcatctctctctaatgctgttgccaacaccatggagcacctcagtttactggacaataatattcctggtaacagcactcttattactgcagttgaactggagcgatttgtgaatctgcactcacttgccttggatttttgtgactttacagctgagatggcaagagtcttaactgatagcaaccatgtgcctttgcaacgactgtctcttctggttcacaatgtttctgtaatg

SEQ ID NO: 31385 - DNA, 112 bp, Homo sapiens
  MAP TO AL133485.1; EXPRESSED IN PLACENTA, SIGNAL = 1.7; EXPRESSED IN ADULT LIVER, SIGNAL =   3; NT HIT: gi11433356, EVALUE 8.00e-57; SWISSPROT HIT: P23444, EVALUE 2.40e+00; EST_HUMAN HIT: BF515899.1, EVALUE 1.40e+00
atccccaaatcttcacaaacttcttgcagtttctcttctatccagtcttggggaggggaagatccactctgtgaagcattcaagtcatctgggttccaaaaccttaactggc

SEQ ID NO: 31386 - DNA, 203 bp, Homo sapiens
  MAP TO AC025488.1; EXPRESSED IN ADULT LIVER, SIGNAL =  10; EXPRESSED IN FETAL LIVER, SIGNAL =   4; EST_HUMAN HIT: BF689099.1, EVALUE 5.00e-76; NT HIT: gi4507822, EVALUE 4.00e-94; SWISSPROT HIT: P36537, EVALUE 1.00e-32
tgtcttcagtgcattcagcaggtctgtactcgacattgtgtggaagtccagtctaacagctgctcccttggccttcatgtgagcaatgttatcaggttgatcccaaaacaatggaatgcccaccatagggatcccatgatagattgcctcatagatgccacttgctccaccatgagttataaaagctctggtttttggatgac

SEQ ID NO: 31387 - DNA, 132 bp, Homo sapiens
  MAP TO AC023128.2; EXPRESSED IN ADULT LIVER, SIGNAL = 1.5; EXPRESSED IN FETAL LIVER, SIGNAL = 1.6; NT HIT: U89282.1, EVALUE 7.40e-02; EST_HUMAN HIT: BE873279.1, EVALUE 1.70e+00; SWISSPROT HIT: P56523, EVALUE 3.10e+00
atgcccatcgcccaaatgcagttctatcccgtaactgagaatggcaccaccaagaatataggccagggacctggagtcatctttgacactgctcctttccttaccacccaaatcaatgccatcaagtcctgt

SEQ ID NO: 31388 - DNA, 231 bp, Homo sapiens
  MAP TO AL136338.1; EXPRESSED IN HELA, SIGNAL = 4.3; EXPRESSED IN ADULT LIVER, SIGNAL = 8.3; SWISSPROT HIT: O00330, EVALUE 2.10e-01; EST_HUMAN HIT: BF361964.1, EVALUE 1.00e-115; NT HIT: S82412.1, EVALUE 2.20e+00
cctggcaaattccatgggtttaggaagaaggcacatgaccatgacatcgaagcgaacatcacatacggtcttcagccatttggtgacaaactgaggcttcagcttttccaccagacttcccacttcatcatccatcatatacgcagtggagtgaaaccactgaaacaccatggccaccagccgggccaagctttctgtaggcgtgttctcactgggtgtgcagaggctcac

SEQ ID NO: 31389 - DNA, 143 bp, Homo sapiens
  MAP TO AC020714.2; EXPRESSED IN ADULT LIVER, SIGNAL = 1.9; EXPRESSED IN BONE MARROW, SIGNAL = 1.7; SWISSPROT HIT: P55004, EVALUE 9.00e+00; EST_HUMAN HIT: BE258724.1, EVALUE 5.00e-75; NT HIT: gi6715588, EVALUE 3.00e-75
cccttgtatttgaaaaacactttccagcgaccattgattctttccaggatgcagtgaagtgtttgtctgaatttgcgtgcaatgcagctttcccagacacaagtatggaagcaattcgacttattcgccattgtgcaaaatat

SEQ ID NO: 31390 - DNA, 252 bp, Homo sapiens
  MAP TO AL158153.2; EXPRESSED IN ADULT LIVER, SIGNAL = 1.6; EXPRESSED IN LUNG, SIGNAL = 6.7; SWISSPROT HIT: Q91641, EVALUE 2.00e-25; NT HIT: U37376.1, EVALUE 3.90e-02; EST_HUMAN HIT: BF573955.1, EVALUE 9.00e-72
atgtacattgaggcctcccatatggtgtatggacaaaaagcacgcctcttgtccaggcctctgcgaggagtctctggaaaacactgcttgacctttttctaccacatgtatggagggggcactggcctgctgagtgtttatctgaaaaaggaagaagacagtgaagagtccctcttatggaggagaagaggtgaacagagcatttcctggctacgagcactgattgaatacagctgtgagaggcaacaccag

SEQ ID NO: 31391 - DNA, 185 bp, Homo sapiens
  MAP TO AL133445.2; EXPRESSED IN ADULT LIVER, SIGNAL = 1.5; SWISSPROT HIT: P24605, EVALUE 2.90e+00; NT HIT: L33697.1, EVALUE 2.80e-02; EST_HUMAN HIT: AA773816.1, EVALUE 6.40e-01
ggttctttgaggagtgcatccggaatgccgagctggaggccaagatgcctgtgatcatgaagaactccgtgtacatccataaggcagccactcgccgcatcaagagctgccgcttccaccgacgccggtccagcacctcctggaatgacagtgagtgtggctgtctgcgtgccctggtgggatgg

SEQ ID NO: 31392 - DNA, 87 bp, Homo sapiens
  MAP TO AC010322.4; EXPRESSED IN ADULT LIVER, SIGNAL =   2; EXPRESSED IN BONE MARROW, SIGNAL = 3.3; EXPRESSED IN LUNG, SIGNAL = 1.8; SWISSPROT HIT: P34092, EVALUE 4.00e-10; EST_HUMAN HIT: BF509556.1, EVALUE 7.00e-42; NT HIT: X98411.1, EVALUE 5.00e-42
aaaaatggcttcgagcagttttgcatcaacttcgtcaatgagaagctgcagcaaatctttatcgaacttaccctgaaggccgagcag

SEQ ID NO: 31393 - DNA, 162 bp, Homo sapiens
  MAP TO AC017089.2; EXPRESSED IN FETAL LIVER, SIGNAL = 1.8; EXPRESSED IN ADULT LIVER, SIGNAL = 3.6; SWISSPROT HIT: P98161, EVALUE 3.00e+00; EST_HUMAN HIT: AI792950.1, EVALUE 6.00e-07; NT HIT: AL163210.2, EVALUE 4.00e-04
ctagggttgtgtaaagaagtctaacttccctctttgctggtgttgcagttccttttcctggaagtccagggccagaatatctaaagctctggagttttcatgtgtgcctgagcagatgctctgctgatactccatgtagttctgtgtgtcagactgaaggtc

SEQ ID NO: 31394 - DNA, 196 bp, Homo sapiens
  MAP TO AC018686.3; EXPRESSED IN ADULT LIVER, SIGNAL = 1.4; NT HIT: M23080.1, EVALUE 4.60e-01
ctgtctggcccttatctccaccgttaggcttcagaaaattgaaaaggctacttctccagctccttcctctcagctctgaaaccatggggcccaagagagctgtaccagctgtaagatgactggttagatcagcaactgtaagggaaagaaacatctgttggtactctctgtcacgaatcattctcacggtttccat

SEQ ID NO: 31395 - DNA, 154 bp, Homo sapiens
  MAP TO AC022205.2; EXPRESSED IN ADULT LIVER, SIGNAL = 1.7; EST_HUMAN HIT: AI377428.1, EVALUE 2.00e-40
cttttctttcttcttcctctcacattcttcagcattttttttctttaaccattcttgatatttttcttttgctttttcttgcaagtattctttctccagttcctttgctgctttttcctccatttctttattaattttttgttctctttctttt

SEQ ID NO: 31396 - DNA, 211 bp, Homo sapiens
  MAP TO AC009499.2; EXPRESSED IN ADULT LIVER, SIGNAL = 1.4; NT HIT: AL163302.2, EVALUE 3.20e-02; SWISSPROT HIT: P05311, EVALUE 3.30e-01
ccactcttgtccagggtattttctgaatatagcttatgggctcaggaatcatcccttccttcttgcctgcagaaagaggaagctccagccatttcctgacttcagatgtcctcaggccagagtccagcaccagttgatctccctgcaaactaaaggggtcaatctccagttctcccacaaaaaaatgtatcactttcccttcttcagacat

SEQ ID NO: 31397 - DNA, 146 bp, Homo sapiens
  MAP TO AC008044.4; EXPRESSED IN ADULT LIVER, SIGNAL = 1.8; NT HIT: AF111168.2, EVALUE 5.00e-77; EST_HUMAN HIT: AA324291.1, EVALUE 1.20e-01; SWISSPROT HIT: P03317, EVALUE 2.30e+00
tcaatgtgagaaaagagcagaggaaagagctgacacgtttccccttccttgtagcaccaaccggcgtctcacagctgaagcccttggtaagacaatggagagggtgccgcaaaagtcaccactggccccactgccctgtagggaga

SEQ ID NO: 31398 - DNA, 167 bp, Homo sapiens
  MAP TO AL121933.9; EXPRESSED IN ADULT LIVER, SIGNAL = 1.4; SWISSPROT HIT: P24873, EVALUE 2.00e-01; NT HIT: gi11431266, EVALUE 6.00e+00; EST_HUMAN HIT: AW965713.1, EVALUE 8.90e+00
tcatttcttgtttgtgtgggagtgtgcacagcggggctggggacgggggaggtgaagtgtttttcccttctttttaccttccccctctttcacctttaatcttggttttccttttttggaatctacatcttcctccaagggctgatctttgtcttcttgaatttctg

SEQ ID NO: 31399 - DNA, 160 bp, Homo sapiens
  MAP TO AL121981.8; EXPRESSED IN ADULT LIVER, SIGNAL = 1.4; EXPRESSED IN FETAL LIVER, SIGNAL = 1.7; NT HIT: AF159132.1, EVALUE 2.30e-02; SWISSPROT HIT: P36454, EVALUE 6.00e-01; EST_HUMAN HIT: AW936231.1, EVALUE 2.20e+00
tattttgtgcttttccacataatgtctaagagagatttatttttgtgtttgtaagttcttgtgttcttagctagctgctttgcaaacatgtccgttgaggtggagttaatattgttagaggccaggcagtgaagtgtcatttttgtcaggctcgtaatca

SEQ ID NO: 31400 - DNA, 167 bp, Homo sapiens
  MAP TO AL157883.2; EXPRESSED IN ADULT LIVER, SIGNAL = 1.4; EST_HUMAN HIT: AA358177.1, EVALUE 1.50e-01; SWISSPROT HIT: P13458, EVALUE 6.70e+00; NT HIT: X98999.1, EVALUE 2.50e-02
atggtggtgttggaaatactacttcccatggaaagaaaagagaacttcttgagcaaaaatctgattccaggccaggtgcaggaaatgtccaagatgagtgtggagcatcttatcatactagagagcaaggattctaccaaagactactgtggtcacgacaaaaggat

SEQ ID NO: 31401 - DNA, 174 bp, Homo sapiens
  MAP TO AC016910.2; EXPRESSED IN ADULT LIVER, SIGNAL = 1.5; NT HIT: AJ251885.1, EVALUE 1.00e-04; SWISSPROT HIT: Q02788, EVALUE 1.50e-01; EST_HUMAN HIT: BF575129.1, EVALUE 6.00e-01
aggcatcagggtaggcaatggcaaggagcagcgttcctacaagagcagggacggagaacctcacgaggatagtgacaatcaagaaaggacaactgcaaaccctggctgtgaggagaccgggggagaaaggggtgatccctttcctcactcccctaagggtcacggccaacactc

SEQ ID NO: 31402 - DNA, 178 bp, Homo sapiens
  MAP TO AL138849.5; EXPRESSED IN ADULT LIVER, SIGNAL = 1.7; NT HIT: D83776.1, EVALUE 5.00e-96; EST_HUMAN HIT: AA448593.1, EVALUE 5.00e-91; SWISSPROT HIT: P08468, EVALUE 2.30e+00
cttcaattgcaatgcacttggaagtccactgcttctcaaaagttgtcaacagctttttctgccgaatgctaattacatattccttgaaatcaaactcttcagtatagaaacgaagcagtcccagccaaagctcccctaatgattctgtgttctttccaagtgaaggtaaacgcttttt

SEQ ID NO: 31403 - DNA, 182 bp, Homo sapiens
  MAP TO AL138806.5; EXPRESSED IN ADULT LIVER, SIGNAL = 1.6; NT HIT: M73770.1, EVALUE 1.70e+00; SWISSPROT HIT: Q02108, EVALUE 1.00e+00; EST_HUMAN HIT: BF333356.1, EVALUE 6.30e-01
gaatttatgtccattttataagaaacattgatatcctggaagggccagaagggcagacagatggctggttagatgttcaaatttctgagctcattcgtcttggtaaactctttgacgtgctgcaagaggcaccagtgcatgggggcataagcaggaactctgagggccagatggcctggaat

SEQ ID NO: 31404 - DNA, 229 bp, Homo sapiens
  MAP TO AC011458.2; EXPRESSED IN ADULT LIVER, SIGNAL = 1.4; NT HIT: AF248630.1, EVALUE 9.00e-03; SWISSPROT HIT: P18723, EVALUE 1.60e-01; EST_HUMAN HIT: BE314293.1, EVALUE 1.00e-105
aagtctggtggagagactcttggacgtaaagaagggaatgaacacagagaaactttcagccagattcctattgtcacctgaacaagaaaagtcaaactggagtgaaaccatgcaaatgagcgtgtgtgggaaagtcttcctccgtcattcattcctggacaggcacagagagctcatgctggacacaaacgatctgagtgtggtggggaatggagaagacgccccgtaa

SEQ ID NO: 31405 - DNA, 138 bp, Homo sapiens
  MAP TO AL109914.16; EXPRESSED IN ADULT LIVER, SIGNAL = 1.5; EST_HUMAN HIT: BF358735.1, EVALUE 1.20e-01
gagtcaatgaaaagggtgtcaaggctgcaggatggagcctgtgtttgtttaagaaggagcctgatgacatcacgtcggcctcctgctccagaaggctcaggagctgtgaaacggcacagcctcctagcccagttgttg

SEQ ID NO: 31406 - DNA, 92 bp, Homo sapiens
  MAP TO AC011366.3; EXPRESSED IN ADULT LIVER, SIGNAL = 2.5; EST_HUMAN HIT: R22890.1, EVALUE 2.80e-01
aatacatcccatgagaaaaaacaaattataactggtagcaacatgaaagaactgtcaataatgcataaaattagggatttaaattttgaaag

SEQ ID NO: 31407 - DNA, 222 bp, Homo sapiens
  MAP TO AC010436.4; EXPRESSED IN ADULT LIVER, SIGNAL =  46; EST_HUMAN HIT: AA559191.1, EVALUE 2.00e-01
agctccagtgtgggagtgcatgcagcttctgacctctgggtattgttccttcttcctttattacttccagacctcctccattttcccttttgcacttccagctcttccaacacctatgaaacttcccggtattgaaatgcacagtgttgttgttgttgttgttgttgttgttgttgttgttgttgttgttgctgctgctgctgttgttgtttctgaccaggc

SEQ ID NO: 31408 - DNA, 141 bp, Homo sapiens
  MAP TO AC010447.2; EXPRESSED IN ADULT LIVER, SIGNAL = 1.4; EST_HUMAN HIT: BF304211.1, EVALUE 1.90e+00; SWISSPROT HIT: Q10993, EVALUE 3.10e+00; NT HIT: AF174585.1, EVALUE 1.30e+00
tcaaccacttagcatgcctccaagtatctttcctttgctaaatttccacataatgactatcacttcagcattgatgactttcccatctatacctttagctctaatcatttttgtaaacttcaggtctacatttttagctgt

SEQ ID NO: 31409 - DNA, 163 bp, Homo sapiens
  MAP TO AC020741.2; EXPRESSED IN ADULT LIVER, SIGNAL = 1.8; SWISSPROT HIT: Q07518, EVALUE 6.80e+00; NT HIT: U37070.1, EVALUE 9.50e-02; EST_HUMAN HIT: AV723794.1, EVALUE 2.20e+00
caacccaaccatgagccttacagagtttgaaatgtacactaatatagctatgactctaacctacatattacactctgtcattcaccatggtagtatctcttggaaagagaatacttaccctcctgaacatacccgcctaatcctttgtacaaagtatccttcc

SEQ ID NO: 31410 - DNA, 168 bp, Homo sapiens
  MAP TO AC010322.4; EXPRESSED IN ADULT LIVER, SIGNAL = 1.4; NT HIT: X98411.1, EVALUE 5.00e-90; SWISSPROT HIT: P34092, EVALUE 8.00e-11; EST_HUMAN HIT: BE939740.1, EVALUE 5.00e-57
agccccccaggcatcatgagcgtcttggacgacgtgtgcgccaccatgcacgccacgggcgggggagcagaccagacactgctgcagaagctgcaggcggctgtggggacccacgagcatttcaacagctggagcgccggcttcgtcatccaccactacgctggcaag

SEQ ID NO: 31411 - DNA, 127 bp, Homo sapiens
  MAP TO AC008543.4; EXPRESSED IN ADULT LIVER, SIGNAL = 1.7; NT HIT: gi11525976, EVALUE 2.00e-39; SWISSPROT HIT: P16415, EVALUE 5.00e-17; EST_HUMAN HIT: AW197285.1, EVALUE 3.00e-39
gactcagtggcatttgaggatgtggctataaacttcacctgtgaggagtgggctttgctgggtccatcacagaagagtctctacagagatgtgatgcaggaaaccatcagaaacctggactgtatag

SEQ ID NO: 31412 - DNA, 108 bp, Homo sapiens
  MAP TO AC007564.9; EXPRESSED IN FETAL LIVER, SIGNAL = 1.3; EXPRESSED IN ADULT LIVER, SIGNAL = 1.8; EXPRESSED IN HELA, SIGNAL = 1.7; EXPRESSED IN PLACENTA, SIGNAL = 1.9; EXPRESSED IN LUNG, SIGNAL = 1.2; EXPRESSED IN BONE MARROW, SIGNAL = 2.5; SWISSPROT HIT: P40992, EVALUE 5.50e+00; NT HIT: AB013746.3, EVALUE 3.70e+00; EST_HUMAN HIT: BF131040.1, EVALUE 5.40e+00
ttctgtttaaaacagtggctgttccggtatgttttgcatgtgtcatataccaccatactatgtttttaatgtcacatccctgaaaactagtaacactgaacttaagta

SEQ ID NO: 31413 - DNA, 112 bp, Homo sapiens
  MAP TO AP000359.1; EXPRESSED IN ADULT LIVER, SIGNAL = 2.1; EXPRESSED IN FETAL LIVER, SIGNAL = 1.8; EXPRESSED IN PLACENTA, SIGNAL = 1.4; SWISSPROT HIT: P23824, EVALUE 7.10e+00; NT HIT: AF217490.1, EVALUE 4.00e-12; EST_HUMAN HIT: AA284465.1, EVALUE 7.00e-15
gtacactgtactgaacatgtagtatttgatccatcaccccctcccatccttccccgcagtccccaaagtccattgcatcattcttacgcctttgcatcctcatagttcagct

SEQ ID NO: 31414 - DNA, 204 bp, Homo sapiens
  MAP TO AP000129.1; EXPRESSED IN ADULT LIVER, SIGNAL = 1.7; EXPRESSED IN FETAL LIVER, SIGNAL = 1.3; EXPRESSED IN PLACENTA, SIGNAL = 1.6; EXPRESSED IN HELA, SIGNAL = 1.3; EXPRESSED IN BONE MARROW, SIGNAL = 1.7; EXPRESSED IN LUNG, SIGNAL = 1.5; NT HIT: AL163227.2, EVALUE 4.80e-01; EST_HUMAN HIT: BE613631.1, EVALUE 7.20e-01; SWISSPROT HIT: Q92499, EVALUE 5.70e-01
ccgaagacccacatagaagaggaggagttacatacaaaagacaaattcccagaggccacagcccctgggagtacgtctttaaaagtgattaaaggccaacatggtagactgtccaaactctacttcttccaacagaattacattatctgcaccttctgccatgtgattttccagcacctcccactagactaggcagggtacaca

SEQ ID NO: 31415 - DNA, 245 bp, Homo sapiens
  MAP TO AP000233.1; EXPRESSED IN ADULT LIVER, SIGNAL = 1.7; EXPRESSED IN FETAL LIVER, SIGNAL = 3.3; EXPRESSED IN PLACENTA, SIGNAL = 3.3; EXPRESSED IN HELA, SIGNAL = 1.5; EXPRESSED IN LUNG, SIGNAL = 1.5; NT HIT: AL163252.2, EVALUE 4.00e-05; SWISSPROT HIT: Q9ZD57, EVALUE 7.30e-01; EST_HUMAN HIT: AI672476.1, EVALUE 6.00e-05
gtaagttctcctaccctactccatcactggcttcattcaagattttctctttgtcttttgtctttggttttctgcagtttgaatacattactaggcatgtacatattttggtatttgtttgcttagtgttctctgagctttctgaatatgtgatttggtgtctgccattagttaaaaaaaatacctctgccattgttatttcaaatagttctccattttatctttatttctttcttgtgttctaa

SEQ ID NO: 31416 - DNA, 214 bp, Homo sapiens
  MAP TO AC004909.2; EXPRESSED IN PLACENTA, SIGNAL = 1.3; EXPRESSED IN ADULT LIVER, SIGNAL = 1.6; EXPRESSED IN FETAL LIVER, SIGNAL = 1.4; NT HIT: gi11525786, EVALUE 2.00e+00; EST_HUMAN HIT: BE816687.1, EVALUE 3.00e+00; SWISSPROT HIT: P54660, EVALUE 3.00e-01
aatagataattttagattagctatgcacgattctgcgagcacgcatggatgttttgacactggtattaaacagaagctaaatgtttgtagaaccacctctgtaaatgcatataattcgacagattccattctcgagaaacctatgactttccctccttggaagtctatggaagtctgtaataggaaagaatgtaataatagaggcaaaaaagtt

SEQ ID NO: 31417 - DNA, 154 bp, Homo sapiens
  MAP TO AC007719.1; EXPRESSED IN BONE MARROW, SIGNAL = 1.8; EXPRESSED IN LUNG, SIGNAL = 1.3; EXPRESSED IN FETAL LIVER, SIGNAL = 3.1; EXPRESSED IN ADULT LIVER, SIGNAL =   3; EXPRESSED IN PLACENTA, SIGNAL = 2.8; NT HIT: gi6680220, EVALUE 8.90e-02; EST_HUMAN HIT: AW025117.1, EVALUE 1.30e-01; SWISSPROT HIT: P44933, EVALUE 3.00e+00
gaaaaactttagggttccctttaatttataccatattattctatgtaattgtttttatatatttatctacatatatctcactggtcttgccagagcacagaggttcattgctattatgacaggtatgctaatagtgacaacaaacgtttggatc

SEQ ID NO: 31418 - DNA, 105 bp, Homo sapiens
  MAP TO AP000359.1; EXPRESSED IN ADULT LIVER, SIGNAL =   2; EXPRESSED IN HELA, SIGNAL = 1.6; EXPRESSED IN PLACENTA, SIGNAL = 3.4; EXPRESSED IN LUNG, SIGNAL = 1.8; EXPRESSED IN BONE MARROW, SIGNAL = 2.5; EXPRESSED IN FETAL LIVER, SIGNAL = 3.2; NT HIT: M55630.1, EVALUE 2.00e-38; EST_HUMAN HIT: BF342838.1, EVALUE 3.00e-23
ccaaaacactgccaaagctacgactgcttcaagtttagtgaagattgatccccatgacaatagagtgacgactgtagcagatgcgctggtttttttgttctactt

SEQ ID NO: 31419 - DNA, 184 bp, Homo sapiens
  MAP TO AB016897.1; EXPRESSED IN PLACENTA, SIGNAL = 1.4; EXPRESSED IN FETAL LIVER, SIGNAL = 1.5; EXPRESSED IN ADULT LIVER, SIGNAL = 1.5; NT HIT: AJ271735.1, EVALUE 3.00e-05; EST_HUMAN HIT: AA837299.1, EVALUE 4.00e-05; SWISSPROT HIT: Q44059, EVALUE 3.00e+00
gactcctatacatctggtgaaaaaattgtctcttccaattttatggagtaggtttcaggaggaaagacttagggtgcatggttctagatggacacagcaatgtagtctccatattgttcctttagctgtcatacacactagtggtgtttgtgagtttctcagtggcctacagtgagggagtctg

SEQ ID NO: 31420 - DNA, 101 bp, Homo sapiens
  MAP TO AP000356.1; EXPRESSED IN ADULT LIVER, SIGNAL = 1.9; EST_HUMAN HIT: BE710306.1, EVALUE 3.20e-01; NT HIT: gi11426873, EVALUE 2.20e-01
cccagtagcaatatggctagtgcaggctccctcaacagccttatttccgttggtctaatcagagaacaggcttcaaccatggacatctacatgtgtgaccc

SEQ ID NO: 31421 - DNA, 2935 bp, Homo sapiens; identical to SEQ ID NO: 27160
  MAP TO AC008174.2; EXPRESSED IN PLACENTA, SIGNAL = 1.6; EXPRESSED IN LUNG, SIGNAL = 1.4; EXPRESSED IN BONE MARROW, SIGNAL = 1.5; EXPRESSED IN FETAL LIVER, SIGNAL = 1.6; EXPRESSED IN ADULT LIVER, SIGNAL = 1.8; EST_HUMAN HIT: BF090135.1, EVALUE 7.20e-01; NT HIT: AL139074.2, EVALUE 7.60e+00; SWISSPROT HIT: Q62209, EVALUE 6.00e-03

SEQ ID NO: 31422 - DNA, 161 bp, Homo sapiens
  MAP TO AC009290.1; EXPRESSED IN HELA, SIGNAL = 1.3; EXPRESSED IN PLACENTA, SIGNAL = 3.3; EXPRESSED IN LUNG, SIGNAL = 1.2; EXPRESSED IN FETAL LIVER, SIGNAL = 1.4; EXPRESSED IN ADULT LIVER, SIGNAL = 1.9; NT HIT: AL163268.2, EVALUE 4.00e-35; SWISSPROT HIT: P70213, EVALUE 3.00e-04; EST_HUMAN HIT: AA001786.1, EVALUE 2.00e-46
  unsure 43
ttttccacaatttcagctcgttctctacaggagataggtctcntcagggaaaccttggcagatttgaggctcagtatctgcttctgaagttgggagatagaatccctgggttcctcattttctttcatcactttgtctactgaacttaggagcaaccaacc

SEQ ID NO: 31423 - DNA, 119 bp, Homo sapiens
  MAP TO AC006427.13; EXPRESSED IN ADULT LIVER, SIGNAL =   5; NT HIT: AF096268.1, EVALUE 7.00e-08; EST_HUMAN HIT: BE503023.1, EVALUE 4.00e-13; SWISSPROT HIT: Q09439, EVALUE 2.40e+00
tattcaagaccatcacaaataggcacagcaactatggcaatgggattttgcagtacagagaggttgcactcaactccaaatacagcatgggcaagtgggaatctatagccaaggagccc

SEQ ID NO: 31424 - DNA, 103 bp, Homo sapiens
  MAP TO AC004624.6; EXPRESSED IN ADULT LIVER, SIGNAL = 1.5; EXPRESSED IN PLACENTA, SIGNAL = 1.4; EST_HUMAN HIT: AW862195.1, EVALUE 8.20e-02; NT HIT: AF278704.1, EVALUE 8.70e-01
ttggccagaaaagaaaagaaagagcgcggtgtcttgtccagaggaaaggccgtggccctagaaattggtatggttggtctctgtagctcacacaaaaatgaac

SEQ ID NO: 31425 - DNA, 169 bp, Homo sapiens
  MAP TO AL049649.4; EXPRESSED IN PLACENTA, SIGNAL = 1.8; EXPRESSED IN HELA, SIGNAL = 1.3; EXPRESSED IN BONE MARROW, SIGNAL = 2.2; EXPRESSED IN LUNG, SIGNAL = 1.6; EXPRESSED IN FETAL LIVER, SIGNAL = 2.2; EXPRESSED IN ADULT LIVER, SIGNAL = 2.2; NT HIT: U60169.1, EVALUE 2.50e-02; EST_HUMAN HIT: AW605900.1, EVALUE 5.80e-01
gattagggagttctgtttccacaaatccttagcaaggagtatgctcacaaagcatgtaattacactaacaactaacatgatagatttcttagactcaagatcacacaacaaagtaataataataacaatacttatatctctggggcactgcttttctactgttgggatc

SEQ ID NO: 31426 - DNA, 177 bp, Homo sapiens
  MAP TO AP000352.2; EXPRESSED IN PLACENTA, SIGNAL = 1.3; EXPRESSED IN LUNG, SIGNAL = 1.3; EXPRESSED IN ADULT LIVER, SIGNAL = 1.5; EXPRESSED IN FETAL LIVER, SIGNAL = 1.4; EST_HUMAN HIT: H55341.1, EVALUE 2.00e-90; NT HIT: gi11417860, EVALUE 2.00e-95; SWISSPROT HIT: P20135, EVALUE 6.00e-12
ctgcatcatctccaccacggccaccaggtcagccagtgagatttggttcccggtgatgaacatcttatcgtgcagaaaatactcctcaaagagctgcaggctgttcttcacctcttccactgcatgctccatcttctcagctgaaacttcctcccctgttatctttgggatcagcaa

SEQ ID NO: 31427 - DNA, 131 bp, Homo sapiens
  MAP TO AC004832.3; EXPRESSED IN ADULT LIVER, SIGNAL = 4.7; EXPRESSED IN FETAL LIVER, SIGNAL = 2.9; EXPRESSED IN PLACENTA, SIGNAL = 1.2; NT HIT: gi11417966, EVALUE 4.00e-68; SWISSPROT HIT: Q9Y217, EVALUE 4.10e+00; EST_HUMAN HIT: AI783703.1, EVALUE 6.00e-68
tgtcctgcggtttgacaacacctacagcttcattcatgccaagaaggtcaatttcactgtggaggtcctgcttccagacaaagcctcagaagagaagatgaaacagctgggggcaggcaccccgaaataac

SEQ ID NO: 31428 - DNA, 88 bp, Homo sapiens
  MAP TO AC009290.1; EXPRESSED IN PLACENTA, SIGNAL = 1.4; EXPRESSED IN ADULT LIVER, SIGNAL = 1.5; NT HIT: L28709.1, EVALUE 7.20e-01; EST_HUMAN HIT: T57366.1, EVALUE 1.00e-09
ctcaacaatagccagattgttgacaaaccgccttgaggtaatctctggaatttcgggtgtccatgcctggcttgtttcaagattagcc

SEQ ID NO: 31429 - DNA, 104 bp, Homo sapiens
  MAP TO AP000111.1; EXPRESSED IN LUNG, SIGNAL = 1.3; EXPRESSED IN FETAL LIVER, SIGNAL = 1.7; EXPRESSED IN ADULT LIVER, SIGNAL = 1.6; EXPRESSED IN PLACENTA, SIGNAL = 2.2; NT HIT: AJ271735.1, EVALUE 5.70e-02; EST_HUMAN HIT: AW360954.1, EVALUE 8.30e-02
tgcccgcagcgcatgctaaccagtgtggctaccgaacgtttgagatgtgtttcatgtgactgagagaccgagctcttaattctgtttaattttaatcatttaaa

SEQ ID NO: 31430 - DNA, 685 bp, Homo sapiens
  MAP TO AC007567.1; EXPRESSED IN LUNG, SIGNAL = 1.3; EXPRESSED IN ADULT LIVER, SIGNAL = 1.6; EXPRESSED IN PLACENTA, SIGNAL = 7.9; EXPRESSED IN HELA, SIGNAL = 1.7; NT HIT: AB026898.1, EVALUE 0.00e+00; EST_HUMAN HIT: AA368311.1, EVALUE 1.00e-130; SWISSPROT HIT: P03356, EVALUE 3.00e-29
cagcccaacccatcaccctcacagagccccgggtatgcttgaccattgagggccaggaggttaactgtttcctggacactggctcggccttctcagtcttactctcctgtcccggacaactgtcttccacatctgtcactatccgaggggtcctaggacagccagtcacttgatacttctcccagccactaagttgtgactggggaactttactctttcacatgcttttctaattatgcctgaaagccccactcccttgttagggagagacattctagcaaaagcaggggccattatacacctgaacataggagaaggaacaaccgtttgtggtcccttgcttgaggaaggaattaatcctgaagtctgggcaacagaaggacaatatggatgagcaaaaaatgcccatcctgttcaaattaaactaaaggattctgtcccctttccctaccaaaggcagtacccccttagacccgaggcccaacaaagactcaataaaattaaggaactaaaagcccaaggcttagtaaaaccattcaatagtccctccaatactccaattctaggagtacagaaacccaatggacagtggaggttagtgcaagatctcaggattatcagtgaggccgttgtccctctatacccagctgtacctaacccttatactctgctttcccaaatacca

SEQ ID NO: 31431 - DNA, 86 bp, Homo sapiens
  MAP TO AB016897.1; EXPRESSED IN ADULT LIVER, SIGNAL = 2.6; NT HIT: AB011399.1, EVALUE 2.00e-41; EST_HUMAN HIT: BE048228.1, EVALUE 2.60e-01
tgaacatgtgttattcagaatcagaaagaaatacagcaaagctcatttcattgggatgggagaagagagataagcatgggtatttg

SEQ ID NO: 31432 - DNA, 204 bp, Homo sapiens
  MAP TO AC007463.3; EXPRESSED IN LUNG, SIGNAL = 1.2; EXPRESSED IN FETAL LIVER, SIGNAL = 1.8; EXPRESSED IN ADULT LIVER, SIGNAL = 2.7; EXPRESSED IN PLACENTA, SIGNAL = 3.3; EST_HUMAN HIT: BE082801.1, EVALUE 3.00e-28; NT HIT: U82828.1, EVALUE 6.00e-22; SWISSPROT HIT: P87314, EVALUE 2.20e+00
gctattgttagtgttagtgtattttatgtgtggcccaagacaatcgttctcccagtgtggccctgggaagccaaaagattggacacccctgttgtagggactcaaaaactgcttatttaactctttttcatttatctctgttttctttacttcttttgcctttacttctataatcccataccttgtaaggtgccagaagtactg

SEQ ID NO: 31433 - DNA, 169 bp, Homo sapiens
  MAP TO AC006548.19; EXPRESSED IN ADULT LIVER, SIGNAL = 1.5; EXPRESSED IN PLACENTA, SIGNAL = 2.3; NT HIT: U78308.1, EVALUE 6.00e-37; EST_HUMAN HIT: AA714294.1, EVALUE 1.00e-32
attccacgcacaacgtcattgcagtcctccagctaaagtaggggcttatggaggtcaggtaattaatggagttttagctgaggtccaacatagtgggtgcagtgggtctctggactcatcctgtggtcatttccccagttcgagaatgcatatttggcatagacatact

SEQ ID NO: 31434 - DNA, 106 bp, Homo sapiens
  MAP TO AC004832.3; EXPRESSED IN ADULT LIVER, SIGNAL = 4.1; NT HIT: gi11417966, EVALUE 3.00e-53; EST_HUMAN HIT: BE548918.1, EVALUE 4.00e-53; SWISSPROT HIT: P33324, EVALUE 2.40e+00
aaattggaaggaggttttactgaaacatatcagccctgaccaggtgcctgtggagtatgggggcaccatgactgaccctgatggaaaccccaagtgcaaatccaag

SEQ ID NO: 31435 - DNA, 138 bp, Homo sapiens
  MAP TO AL022318.2; EXPRESSED IN PLACENTA, SIGNAL = 1.3; EXPRESSED IN LUNG, SIGNAL = 1.3; EXPRESSED IN ADULT LIVER, SIGNAL = 1.9; EXPRESSED IN FETAL LIVER, SIGNAL =   2; EST_HUMAN HIT: T78326.1, EVALUE 4.60e-01; SWISSPROT HIT: P51857, EVALUE 1.40e+00; NT HIT: U72847.1, EVALUE 7.80e-02
gttcccagttttggtcccagcgctggtctctcctccgatggtaccaattccaggtctccttccacctcccggggcaggtgcacagggagcctgaaaatcccaatagataatggtgctgtgccccagccagtgaagacg

SEQ ID NO: 31436 - DNA, 134 bp, Homo sapiens
  MAP TO AC007106.6; EXPRESSED IN ADULT LIVER, SIGNAL = 1.5; EXPRESSED IN FETAL LIVER, SIGNAL =   2; EXPRESSED IN PLACENTA, SIGNAL = 2.8; EXPRESSED IN LUNG, SIGNAL = 1.7; NT HIT: AF224669.1, EVALUE 1.00e-12; EST_HUMAN HIT: BE147237.1, EVALUE 1.00e-10
ccttcaatccaatccaattgacactcagtattaaccatcacaatgtttatcaccattactggtcggaggaggtcatccttcctcccataggtcttgagtttggcctggcagcacatgggctgatgaccaactag

SEQ ID NO: 31437 - DNA, 117 bp, Homo sapiens
  MAP TO AC007313.3; EXPRESSED IN LUNG, SIGNAL = 1.2; EXPRESSED IN ADULT LIVER, SIGNAL = 1.9; EXPRESSED IN FETAL LIVER, SIGNAL =   2; EXPRESSED IN PLACENTA, SIGNAL = 1.8; SWISSPROT HIT: P50936, EVALUE 1.40e+00; NT HIT: AE001713.1, EVALUE 2.60e-01; EST_HUMAN HIT: AA417601.1, EVALUE 1.50e+00
gtcttttccattggtaaatggctgctgcctcatgtcttttgtatatgtcttgtccacccactcccttcctcccagctcgaaagagagggcctgttctgttggatctgtgcccataac

SEQ ID NO: 31438 - DNA, 340 bp, Homo sapiens
  MAP TO AC007092.4; EXPRESSED IN ADULT LIVER, SIGNAL = 1.5; EXPRESSED IN FETAL LIVER, SIGNAL = 1.4; EXPRESSED IN PLACENTA, SIGNAL = 1.3; SWISSPROT HIT: P00421, EVALUE 5.10e+00; NT HIT: gi11434910, EVALUE 2.10e-01; EST_HUMAN HIT: AI761639.1, EVALUE 7.90e-02
gagttctccactgtttacataattagcattacatatttgtgagattaaggtaccactaccaccgttattaccatatttccttccttcctgggtgctgatacatgtgcatgttcacttttgagaatgatcagagaaagcacctccatctccaaaggctgtgtccctgcagtccccatagaagggattcgaacccctactttatcttgtggccttgccaaaaataaaataaccagagccagcttgaggaatgagagaagagaacaagagggaaccggcctgaaagacctggctggctctgagtgtagtttattgctctactgctggtttgaaaggattatgt

SEQ ID NO: 31439 - DNA, 107 bp, Homo sapiens
  MAP TO AP000111.1; EXPRESSED IN PLACENTA, SIGNAL = 1.7; EXPRESSED IN HELA, SIGNAL = 1.3; EXPRESSED IN BONE MARROW, SIGNAL = 1.3; EXPRESSED IN LUNG, SIGNAL = 1.6; EXPRESSED IN ADULT LIVER, SIGNAL = 1.5; EXPRESSED IN FETAL LIVER, SIGNAL = 2.5; EST_HUMAN HIT: AV689374.1, EVALUE 1.00e-19; NT HIT: AF046133.1, EVALUE 1.00e-21
tatcagcagggtctttgtgacctcctgttttatcacataactaagaatgcctaaccccctgggaatgcagcccagcaggtctcagcctcattttacccagctgctac

SEQ ID NO: 31440 - DNA, 124 bp, Homo sapiens
  MAP TO AP000041.1; EXPRESSED IN BONE MARROW, SIGNAL = 1.7; EXPRESSED IN ADULT LIVER, SIGNAL = 1.7; EXPRESSED IN PLACENTA, SIGNAL = 1.2; NT HIT: gi11421638, EVALUE 7.00e-02; EST_HUMAN HIT: BF360971.1, EVALUE 1.00e-01; SWISSPROT HIT: O14647, EVALUE 2.40e+00
catcatctctaaaaggagcccaaagctacagggcagaaaatgggtctgcccttctctacctgtaaatgggaacaagccgcccatgccttataggaaaagtaacactatatgtgtatgatttttt

SEQ ID NO: 31441 - DNA, 109 bp, Homo sapiens
  MAP TO AP000359.1; EXPRESSED IN FETAL LIVER, SIGNAL = 1.9; EXPRESSED IN ADULT LIVER, SIGNAL = 1.6; EXPRESSED IN HELA, SIGNAL = 1.6; EXPRESSED IN PLACENTA, SIGNAL = 2.1; EXPRESSED IN LUNG, SIGNAL = 1.3; EXPRESSED IN BONE MARROW, SIGNAL = 1.3; EST_HUMAN HIT: BE745875.1, EVALUE 1.40e+00; SWISSPROT HIT: Q92574, EVALUE 9.40e+00; NT HIT: gi11440298, EVALUE 9.30e-01
cagagaaaacagtgccaatatctggcagaaggaaatcaggaatatgaccctggtatttgggactgcttctcatgccacagattctggaaggagccattgagtgagaagt

SEQ ID NO: 31442 - DNA, 206 bp, Homo sapiens
  MAP TO AC008283.3; EXPRESSED IN LUNG, SIGNAL = 1.3; EXPRESSED IN FETAL LIVER, SIGNAL = 1.7; EXPRESSED IN ADULT LIVER, SIGNAL = 1.6; EXPRESSED IN PLACENTA, SIGNAL = 1.7; NT HIT: AL163301.2, EVALUE 4.90e-01; EST_HUMAN HIT: AI935056.1, EVALUE 7.20e-01; SWISSPROT HIT: P47035, EVALUE 4.90e+00
aaaattggcaaatgctacacatcaattttctcctccacccccctggctttgcccctaaaaggcagaatgtatcaatatgaaaaccaagggggtaaagtaggaaagtcccctcttactataattaaaagtgacccacttgggaaaggtgtacttcttgtcattgagacttcaggctccactgaaataaatgttctgctttccaagtg

SEQ ID NO: 31443 - DNA, 163 bp, Homo sapiens
  MAP TO AL078474.2; EXPRESSED IN PLACENTA, SIGNAL = 2.8; EXPRESSED IN FETAL LIVER, SIGNAL = 2.4; EXPRESSED IN ADULT LIVER, SIGNAL = 1.8; EST_HUMAN HIT: BF356871.1, EVALUE 5.60e-01; NT HIT: AF272732.1, EVALUE 9.50e-02
aaaaggaagaaaaattaaacatattcttgttgcctaccctccttttataataaaactaccttttgcacctgttaacttttctcttttgagtttcattgcagacacatggcctttcataaacaactcttttcttttaactgtggtaatgataatgatcattata

SEQ ID NO: 31444 - DNA, 188 bp, Homo sapiens
  MAP TO AP000356.1; EXPRESSED IN ADULT LIVER, SIGNAL = 2.1; EXPRESSED IN BONE MARROW, SIGNAL = 1.6; EXPRESSED IN LUNG, SIGNAL = 3.4; EXPRESSED IN FETAL LIVER, SIGNAL = 1.8; NT HIT: J05235.1, EVALUE 1.00e-102; EST_HUMAN HIT: AW351549.1, EVALUE 3.00e-95; SWISSPROT HIT: P19440, EVALUE 3.00e-28
ggggtctcggcaggtggtccgcaacatgacctccgagttcttcgctgcccagctccgggcccagatctctgacgacaccactcacccgatctcctactacaagcccgagttctacacgccggatgacgggggcactgctcacctgtctgtcgtcgcagaggacggcagtgctgtgtccgccaccagca

SEQ ID NO: 31445 - DNA, 1117 bp, Homo sapiens
  MAP TO AC007567.1; EXPRESSED IN PLACENTA, SIGNAL =   6; EXPRESSED IN HELA, SIGNAL = 1.3; EXPRESSED IN LUNG, SIGNAL = 1.4; EXPRESSED IN ADULT LIVER, SIGNAL =   2; EXPRESSED IN FETAL LIVER, SIGNAL = 2.3; NT HIT: AB026898.1, EVALUE 0.00e+00; EST_HUMAN HIT: AU134310.1, EVALUE 0.00e+00; SWISSPROT HIT: P26808, EVALUE 4.00e-64
ggaaactcagaaagccaatacccatttagtaagatggacacctgaagcagaagcggctttccaggccctgaagaaggccctaacccaagccccagtgttaataagcttgccaacggggcaagactttcctttatatgtcacagaaaaaacagaaatagctctaggagtccttacacaggtccaagggacaagcctgcaacccatggcatacctgagtaaggaaactgatgtagtggcaaagggttggcctcattgtttacaggtagtggcggcagtagcagtcttagtatctgaagcagttaaagtaatacaggaaagagatcttactgtgtggacatctcatgatgtgaatggcatactcactgctaaaggagacttgtggctgtcagacaaccgtttacttaaatatcaggctctactgcttgaaggaccagtgctgcgactgtgcacttgtgcaactcttaacccagccacatttcttccaggcaatgaagaaaagatataacataactgtcaacaagtaattgttcaaacctacgccactcaaggggaccttttagaggttcccctgactgatcccgacctcaacttgtatactgatggaagttccttcgtagaaaaagggcttcaaaaagtggggtatgcagttgtcagtgataatggaatacttgaaagtaatcccctcactccaggaactagtgctcagctggcagaactaatagccctcattcaggcagtagaattagaaggaaaaagggtaaatatatatacagactctaagtatgcttacctagtcctccatgcccatgcagcaatatggagagaaaggggattcctaacttccgagggaacacctatcaaacatcaggaagccattaggagattattattggcggtacagaaacctaaagaggtggcagtcttacactgctggggtcatcagaaaggaaaggaaagggaaatagaagggaactgccaagcggacattgaagcaaaaagagctgcaaggcaggaccctccattagaaatgcttatagaaggacccctagtatgtggtaatcccctctgggaaaccaagccccagtactcaaaagaagaaatagaatggggaacctca

SEQ ID NO: 31446 - DNA, 120 bp, Homo sapiens
  MAP TO AL035682.16; EXPRESSED IN PLACENTA, SIGNAL = 1.5; EXPRESSED IN BONE MARROW, SIGNAL = 1.4; EXPRESSED IN ADULT LIVER, SIGNAL =   2; NT HIT: AF210835.1, EVALUE 1.00e+00; EST_HUMAN HIT: AW995326.1, EVALUE 2.00e-61; SWISSPROT HIT: P13202, EVALUE 9.30e+00
agaatggagagtgataagacagaaaaagcctgggttcctggtatgatggggccagcataccagccatggactgcttatccctgtgctgttacaagaggaagaaatcatctatcttgttaa

SEQ ID NO: 31447 - DNA, 75 bp, Homo sapiens
  MAP TO AP000356.1; EXPRESSED IN ADULT LIVER, SIGNAL = 7.6; NT HIT: gi11417871, EVALUE 6.00e-35; EST_HUMAN HIT: AV718545.1, EVALUE 8.00e-35; SWISSPROT HIT: Q03248, EVALUE 4.00e-05
aggtatgagatgtacgcacgggagctcgccgaagctgtcaagtccaactacagccccaccatcgtgaaagagtag

SEQ ID NO: 31448 - DNA, 100 bp, Homo sapiens
  MAP TO AP000356.1; EXPRESSED IN ADULT LIVER, SIGNAL = 2.4; NT HIT: AF060568.1, EVALUE 6.00e-05; EST_HUMAN HIT: AW996865.1, EVALUE 8.00e-05
atgagtgtgcaaatatctgttcaagtccctgctgcaattgtttttaagactttgggaaagacatttggcccagccccttgttttgccatgaagcccagag

SEQ ID NO: 31449 - DNA, 132 bp, Homo sapiens
  MAP TO AL049758.11; EXPRESSED IN PLACENTA, SIGNAL = 1.9; EXPRESSED IN LUNG, SIGNAL = 1.5; EXPRESSED IN BONE MARROW, SIGNAL = 1.6; EXPRESSED IN FETAL LIVER, SIGNAL = 1.6; EXPRESSED IN ADULT LIVER, SIGNAL = 1.7; NT HIT: gi11418213, EVALUE 1.00e-68; EST_HUMAN HIT: Z42665.1, EVALUE 2.00e-68; SWISSPROT HIT: P48918, EVALUE 3.10e+00
ctgtctgaatagcctgtggttttcagaactgtttcagtatctttgctggtctcttttttccaataggaatctgaactgtcatcccagctagagaaagaactgctccttaactccactggctcgtcaaagtaa

SEQ ID NO: 31450 - DNA, 88 bp, Homo sapiens
  MAP TO AP000233.1; EXPRESSED IN PLACENTA, SIGNAL = 1.5; EXPRESSED IN BONE MARROW, SIGNAL = 1.3; EXPRESSED IN ADULT LIVER, SIGNAL = 1.6; NT HIT: U91328.1, EVALUE 1.80e-01; EST_HUMAN HIT: AA846926.1, EVALUE 1.70e-02; SWISSPROT HIT: P49523, EVALUE 5.60e+00
gagaccatataaaaaggaaaaaagaatgatccatgtgcaggcagcccaggtttgggaaggaggtgttggtgaagagtatgaaaagaga

SEQ ID NO: 31451 - DNA, 123 bp, Homo sapiens
  MAP TO AB016897.1; EXPRESSED IN PLACENTA, SIGNAL = 1.4; EXPRESSED IN FETAL LIVER, SIGNAL = 1.4; EXPRESSED IN ADULT LIVER, SIGNAL = 2.1; EST_HUMAN HIT: BE770074.1, EVALUE 8.00e-18; SWISSPROT HIT: P55196, EVALUE 3.20e-02; NT HIT: AB011399.1, EVALUE 2.00e-63
aactaggaatctatgtgaagtcggttgtgaaaggaggtgctgcagatgtggtcagtatcattttgaaagaagtacattttcagtgtgtcatatattcagcaaatgatgtgagagattctgctg

SEQ ID NO: 31452 - DNA, 134 bp, Homo sapiens
  MAP TO AC006548.19; EXPRESSED IN LUNG, SIGNAL = 9.1; EXPRESSED IN ADULT LIVER, SIGNAL = 2.2; EXPRESSED IN BONE MARROW, SIGNAL =  35; NT HIT: Z00040.1, EVALUE 7.00e-70; EST_HUMAN HIT: BF681319.1, EVALUE 1.00e-16; SWISSPROT HIT: O05407, EVALUE 2.40e+00
agcacagccccctgccctgaagacttcttaataggctggtcacaccctgtgcaggagtcagccccagtcaggacacagcacggacgcgagggcccccactcagctcctggggctcctggggctctggctgccag

SEQ ID NO: 31453 - DNA, 132 bp, Homo sapiens
  MAP TO AC004832.3; EXPRESSED IN FETAL LIVER, SIGNAL = 1.8; EXPRESSED IN ADULT LIVER, SIGNAL = 1.5; EXPRESSED IN PLACENTA, SIGNAL = 1.3; EST_HUMAN HIT: AW016803.1, EVALUE 2.00e-68; SWISSPROT HIT: P08318, EVALUE 1.40e+00; NT HIT: AF260895.1, EVALUE 1.20e+00
tagcctgagtcagacctcatagcctgcccacggatgagctcagccctccgtttgtttgtttccaaggagcctctcatggcaccagcctttggttcccattcatccccattcccgggtgtgatccggctcccc

SEQ ID NO: 31454 - DNA, 255 bp, Homo sapiens
  MAP TO AC004832.3; EXPRESSED IN PLACENTA, SIGNAL = 1.3; EXPRESSED IN LUNG, SIGNAL = 1.4; EXPRESSED IN FETAL LIVER, SIGNAL = 1.9; EXPRESSED IN ADULT LIVER, SIGNAL = 1.6; NT HIT: gi6755441, EVALUE 9.00e-31; EST_HUMAN HIT: BE069933.1, EVALUE 5.00e-27; SWISSPROT HIT: P34901, EVALUE 6.00e-22
agtgctcatagaagaagcgtaataactccttgctaggggcttttttgtagatgggcttcctgctcaggtcgtttctgccttcatccttcttcatatggttcaccagaagcaggatcaggaaaacagcagagaggatgcccgcgatgctgtccacaatcaggactgccacgacctccattctctcaaagatgttgctgccctgggcagtgttggacatgggtgccttattggacacatcctggtcccccgcagaga

SEQ ID NO: 31455 - DNA, 142 bp, Homo sapiens
  MAP TO AC004624.6; EXPRESSED IN PLACENTA, SIGNAL = 1.3; EXPRESSED IN ADULT LIVER, SIGNAL = 1.5; NT HIT: U38978.1, EVALUE 1.30e+00; EST_HUMAN HIT: BE874062.1, EVALUE 1.90e+00
aagattcattagagccatttcactttcgctgtccttaacattccggtccaattgatggattcgttcaggagtcagggtccctttgaatctcattacactagggctcctgggtgtattgatcctatttagaaataaggcagta

SEQ ID NO: 31456 - DNA, 151 bp, Homo sapiens
  MAP TO AC007106.6; EXPRESSED IN FETAL LIVER, SIGNAL = 2.7; EXPRESSED IN ADULT LIVER, SIGNAL = 1.6; NT HIT: gi11466174, EVALUE 3.40e-01; EST_HUMAN HIT: BF694508.1, EVALUE 2.00e+00; SWISSPROT HIT: Q99680, EVALUE 9.00e+00
gaaacaaaatgcaactcatattatggtgctggtgataaacaagtcatggccattatgtgctggaaacatagtaattgaaaatcagatttccttgccagcaaaagcaacctctgaactactgttgcacaagtgatacataggatggggtctt

SEQ ID NO: 31457 - DNA, 598 bp, Homo sapiens; identical to SEQ ID NO: 14959
  MAP TO AC007281.3; EXPRESSED IN ADULT LIVER, SIGNAL = 3.6; NT HIT: AJ300197.1, EVALUE 9.60e-02; EST_HUMAN HIT: BE070424.1, EVALUE 1.40e-01; SWISSPROT HIT: P10280, EVALUE 5.20e+00

SEQ ID NO: 31458 - DNA, 84 bp, Homo sapiens
  MAP TO AC007313.3; EXPRESSED IN LUNG, SIGNAL = 1.2; EXPRESSED IN FETAL LIVER, SIGNAL = 2.3; EXPRESSED IN ADULT LIVER, SIGNAL = 2.1; EXPRESSED IN PLACENTA, SIGNAL = 1.6; EST_HUMAN HIT: AI200970.1, EVALUE 2.00e-05; NT HIT: AL163284.2, EVALUE 4.30e-02; SWISSPROT HIT: P07439, EVALUE 4.90e-01
atacagggatggtccagtggcagtgggctggataggagaactgtacagaccagtcgcagcagcctgggcaggagcaccacaccg

SEQ ID NO: 31459 - DNA, 233 bp, Homo sapiens
  MAP TO AC007539.8; EXPRESSED IN ADULT LIVER, SIGNAL = 3.4; NT HIT: U01337.1, EVALUE 1.40e-01; EST_HUMAN HIT: AI872754.1, EVALUE 2.10e-01; SWISSPROT HIT: P23090, EVALUE 2.50e+00
ctgaagtgtgttgggagtggctggaactgacacctgaggagctctgtgacccagcagaattctgtgcttttcctggggagagcttcttctaagaagaggtggccacgacagccgatagaaggctgtgacctgagtgcaagccacgtgccagccactttctgtatgtgagaccgtgctgcttgccaaaagctgttagttccttccattctggctggctgggagagatttctcat

SEQ ID NO: 31460 - DNA, 164 bp, Homo sapiens
  MAP TO AP000356.1; EXPRESSED IN ADULT LIVER, SIGNAL = 5.5; EXPRESSED IN PLACENTA, SIGNAL = 1.2; NT HIT: AF169558.1, EVALUE 1.00e-87; EST_HUMAN HIT: AV718545.1, EVALUE 4.00e-82; SWISSPROT HIT: Q03248, EVALUE 6.00e-20
ctcaccaggactttggctacttttatggctcgagctatgtggcagcccctgacagcagccggactcctgggctgtcccgtagccgggatggactgctagttgctaagctcgacctaaacctctgccagcaggtgaatgatgtctggaacttcaaggtaggtccc

SEQ ID NO: 31461 - DNA, 572 bp, Homo sapiens; identical to SEQ ID NO: 14964
  MAP TO AB016897.1; EXPRESSED IN ADULT LIVER, SIGNAL = 2.8; SWISSPROT HIT: P04016, EVALUE 1.70e+00; NT HIT: AB012722.2, EVALUE 2.00e-89; EST_HUMAN HIT: BE892266.1, EVALUE 6.00e-10

SEQ ID NO: 31462 - DNA, 102 bp, Homo sapiens
  MAP TO AC005969.4; EXPRESSED IN BONE MARROW, SIGNAL = 0.54; EXPRESSED IN ADULT LIVER, SIGNAL = 0.51; EXPRESSED IN LUNG, SIGNAL = 0.63; EXPRESSED IN PLACENTA, SIGNAL = 0.7; NT HIT: S76772.1, EVALUE 8.60e-01
agggatcatacttgtgtccatcctgaggtagtcggtaacttcaacagaaatgagaagtgcatggaattgctagatgggaaaaacgtgagtaaagttattttg

SEQ ID NO: 31463 - DNA, 76 bp, Homo sapiens
  MAP TO AC006484.2; EXPRESSED IN BONE MARROW, SIGNAL = 0.69; EXPRESSED IN ADULT LIVER, SIGNAL = 0.57; EXPRESSED IN PLACENTA, SIGNAL = 0.82; EXPRESSED IN LUNG, SIGNAL = 0.6; NT HIT: AL163278.2, EVALUE 9.30e+00; EST_HUMAN HIT: BF217939.1, EVALUE 8.90e-01
ttggaacttgtaatctatatttttaaacatgattttctggagattctgatgaacatccaggcttgggaagtagttc

SEQ ID NO: 31464 - DNA, 140 bp, Homo sapiens
  MAP TO AC003657.1; EXPRESSED IN LUNG, SIGNAL = 0.64; EXPRESSED IN BONE MARROW, SIGNAL = 0.52; EXPRESSED IN ADULT LIVER, SIGNAL = 0.42; NT HIT: AL139074.2, EVALUE 4.20e+00; EST_HUMAN HIT: AW821580.1, EVALUE 1.30e+00
gcttcactttcctctggcatcttttgaatcctttgagcttccatccacccccatctttgtgatgcatttacagttgcctcatagtcacatagccgtgggtcgaagttcccatgcagaagatgcaaaagcaaatcttaaat

SEQ ID NO: 31465 - DNA, 108 bp, Homo sapiens
  MAP TO AC005165.1; EXPRESSED IN LUNG, SIGNAL = 0.61; EXPRESSED IN FETAL LIVER, SIGNAL = 0.67; EXPRESSED IN BONE MARROW, SIGNAL = 0.62; EXPRESSED IN ADULT LIVER, SIGNAL = 0.6; NT HIT: AF145680.1, EVALUE 5.90e-02; SWISSPROT HIT: O00555, EVALUE 1.40e+00
atggagagaaaaggggaagaccaggaggccaggcccacctttccaccatatttgagcatcaccaccaccactgtcaatcactactaccaaagtttctttctctacacc

SEQ ID NO: 31466 - DNA, 181 bp, Homo sapiens
  MAP TO AC004227.1; EXPRESSED IN LUNG, SIGNAL = 0.47; EXPRESSED IN ADULT LIVER, SIGNAL = 0.47; SWISSPROT HIT: P27843, EVALUE 3.00e+00; NT HIT: gi7706512, EVALUE 4.00e-97
caatgtcatcatcagttttgtctgcaggttctttttcaagacattctcgaacaagatctcgcccctgcaatggatctgttcgatcaatctcttcatcttcctcttcgtcatcctcagaatcaacaggtccttctggaagacgtgtcaaatctacatctcctacctcactctccgtagccta

SEQ ID NO: 31467 - DNA, 92 bp, Homo sapiens
  MAP TO AC006548.19; EXPRESSED IN BONE MARROW, SIGNAL = 9.6; EXPRESSED IN LUNG, SIGNAL = 4.9; EXPRESSED IN ADULT LIVER, SIGNAL = 1.6; NT HIT: M20707.1, EVALUE 4.00e-24; EST_HUMAN HIT: BF663230.1, EVALUE 1.00e-15; SWISSPROT HIT: P06310, EVALUE 1.00e-03
atgaggctccctgctcagctcctggggctgctaatgctatgggtccctggtaaggatagaaataagatgaggtgggaaaatggggtgggagg

SEQ ID NO: 31468 - DNA, 403 bp, Homo sapiens
  MAP TO AC007253.2; EXPRESSED IN ADULT LIVER, SIGNAL = 1.5; EXPRESSED IN PLACENTA, SIGNAL =   3; EST_HUMAN HIT: BE064410.1, EVALUE 4.00e-75; SWISSPROT HIT: P21414, EVALUE 9.00e-13; NT HIT: X89211.1, EVALUE 1.00e-119
agccctcagatatggcaccattcctcagggtgatcagccagctacttggtggcaggttgattatattggatctcttccatcaaggaaagggcagcagcttgccctcactggaatagacacttactccagatataggtttacctatcctgtacgcaatgcttttataaagactaccatccgtggactcacagaatgctttatccaccatcatggtattccacatagcattgcctctgaccaaggcactcactttatggctaaagtagtgtggcagtgggctcacactcatggaattcactggtcttaccatgttccccatcatcctgaagccgctagattgatagaacagtggaatggtctcctgaagtcacaattacaatgccatctaggcgacaatactttg

SEQ ID NO: 31469 - DNA, 142 bp, Homo sapiens
  MAP TO AC007841.1; EXPRESSED IN FETAL LIVER, SIGNAL = 3.4; EXPRESSED IN PLACENTA, SIGNAL = 2.2; EXPRESSED IN BONE MARROW, SIGNAL = 1.5; EXPRESSED IN LUNG, SIGNAL = 1.5; EXPRESSED IN ADULT LIVER, SIGNAL = 1.7; NT HIT: AF157625.1, EVALUE 3.20e-01; EST_HUMAN HIT: BF035013.1, EVALUE 4.80e-01; SWISSPROT HIT: Q12866, EVALUE 9.10e+00
ccttgcaaacttttctctcattcaatcttctctgtgaacctatgcgaaaggtaatgtcttcccagcattcacagatgaagacctggaccagctgaggccatgacgcattcattctcttcaatcttgcagtggttgttgagtg

SEQ ID NO: 31470 - DNA, 125 bp, Homo sapiens
  MAP TO AC008022.1; EXPRESSED IN LUNG, SIGNAL = 1.2; EXPRESSED IN ADULT LIVER, SIGNAL = 1.9; EXPRESSED IN PLACENTA, SIGNAL = 1.8; NT HIT: AF202180.1, EVALUE 1.80e-02; EST_HUMAN HIT: T30128.1, EVALUE 4.10e-01; SWISSPROT HIT: Q46378, EVALUE 9.20e+00
ctataaaacaactatgcttatcatgttactatgttcaaatatataaagtataagcctatctgcacagaacaaggatctgaaaatgacatcaaagatttgaaaaataacccgagaggctccagaaa

SEQ ID NO: 31471 - DNA, 109 bp, Homo sapiens
  MAP TO AL022238.1; EXPRESSED IN ADULT LIVER, SIGNAL = 1.5; EXPRESSED IN PLACENTA, SIGNAL = 1.2; NT HIT: AP000001.1, EVALUE 9.30e-01; EST_HUMAN HIT: BE670608.1, EVALUE 7.00e-55; SWISSPROT HIT: P29180, EVALUE 3.20e+00
gctgtatgaagccaatgagctgcgaggtgttttgacaggggaggtctgcatgcagcctcttctttgtcctaacaattcctttgttgatcttgcctgtgatgaatcatag

SEQ ID NO: 31472 - DNA, 93 bp, Homo sapiens
  MAP TO AP000129.1; EXPRESSED IN ADULT LIVER, SIGNAL = 4.3; EST_HUMAN HIT: BE069317.1, EVALUE 4.50e+00
attggcacaggcagcgtgaatgctggaatcccaagagaccatgaggtttagtcgctcacccccagcggtcacacgctaaactgtctccgacag

SEQ ID NO: 31473 - DNA, 1450 bp, Homo sapiens
  MAP TO AP000356.1; EXPRESSED IN PLACENTA, SIGNAL = 1.3; EXPRESSED IN LUNG, SIGNAL = 1.4; EXPRESSED IN BONE MARROW, SIGNAL = 1.4; EXPRESSED IN ADULT LIVER, SIGNAL = 1.5; EXPRESSED IN HELA, SIGNAL = 1.2; NT HIT: L20493.1, EVALUE 0.00e+00; EST_HUMAN HIT: AI690779.1, EVALUE 0.00e+00; SWISSPROT HIT: P19440, EVALUE 2.00e-46
gtggatagggaccaggctgggccaggcaaggtcgggcactgtctgacctggctgggcggtagctttggctccaaggtccgctccccggtcagcgggatcctgttcaataatgaaatggacgacttcagctctcccagcatcaccaacgagtttggggtacccccctcacctgccaatttcatccagccaggtatggggtggaggtccgggggtgggggactggggtggagaggggcgggtgtcctgggcaggcagctgacgggcatccctgtcttctcccatcggccgcagggaagcagccgctctcgtccatgtgcccgacgatcatggtgggccaggacggccaggtccggatggtggtgggagctgctgggggcacacagatcaccacggccactgcactggtatgtgtcacaccttttctccctggccgtgcccaccctgcacagcccccaagccatgctgatcacactcccatgccccaggccatcatctacaacctctggttcggctatgacgtgaagcgggccgtggaggagccccggctgcacaaccagcttctgcccaacgtcacgacagtggagagaaacattgaccaggtgggccgggggttggagaaactgagtcaaggtgtggggccccagggcatcctgggctggaggcctggatcatcacagagtggacaatggttggtgtcctctctctagtgcctgggccatctggagcccctgtgccatgagggccaagccccctgctccagtgagacccagcaggccccaacctgctcttcctgatgacctggcccgaaatggcaccacctgggctgaggcctgtgaccacacagatgtggttcaggtggcatctggagccctgctcaggcttcccctctcctcccacccccaggcagtgactgcagccctggagacccggcaccatcacacccagatcgcgtccaccttcatcgctgtggtgcaagccatcgtccgcacggctggtggctgggcagctgcctcggactccaggaaaggcggggagcctgccggctactgagtgctccaggaggacaaggctgacaagcaatccagggacaagatactcaccaggaccaggaaggggactctgggggaccggcttcccctgtgagcagcagagcagcacaataaatgaggccactgtgccaggctccaggtggcctccctggcctgtctccccactctctgggcctcagtgtattgtgtgtgaaatggagccatctggctggggaggaacagagaggtgggattcggagatcttcacaatgcgggcactggaactagcctcagcatcttcagcatggggagagccaggcacatggctgggggccaggggaaggttcacaccaagctctgccccttcccaccctgatccctcggactttggggccaggccctcccttactggggctgggcag

SEQ ID NO: 31474 - DNA, 86 bp, Homo sapiens
  MAP TO Z95114.19; EXPRESSED IN PLACENTA, SIGNAL = 1.5; EXPRESSED IN BONE MARROW, SIGNAL = 1.3; EXPRESSED IN LUNG, SIGNAL = 1.7; EXPRESSED IN FETAL LIVER, SIGNAL = 1.3; EXPRESSED IN ADULT LIVER, SIGNAL = 2.4; NT HIT: gi9630464, EVALUE 7.00e-01; EST_HUMAN HIT: AA220943.1, EVALUE 1.00e+00
gtggggctgccaaacctatcctggctgattctgcttcgtttgaacctctggattttgtaggacatagacttcatgtccagaatcat

SEQ ID NO: 31475 - DNA, 146 bp, Homo sapiens
  MAP TO Z97055.1; EXPRESSED IN ADULT LIVER, SIGNAL = 1.8; NT HIT: Y10776.1, EVALUE 2.00e-49; EST_HUMAN HIT: AI804632.1, EVALUE 3.10e-02
ttgaagaagatctgaacttatttggggaaccattccttgaatatactctacacggtgaagaatggggtcttgaatgtgtaaattttcgtgtgtgaggatgcgacctaagccagtctggtataatcgccattttgcacattaaatcc

SEQ ID NO: 31476 - DNA, 114 bp, Homo sapiens
  MAP TO AC007363.3; EXPRESSED IN PLACENTA, SIGNAL = 1.7; EXPRESSED IN ADULT LIVER, SIGNAL = 2.2; EXPRESSED IN FETAL LIVER, SIGNAL = 1.8; NT HIT: AF260225.1, EVALUE 1.00e-09; EST_HUMAN HIT: T63290.1, EVALUE 3.00e-08
ctggtactctattccactgtgggtgagctggcatccaacctgcaaaacaaagtccttcccactcttccctcccctttcctcaagcagagaaaaggttgtgtgtctggccaccat

SEQ ID NO: 31477 - DNA, 231 bp, Homo sapiens
  MAP TO AB016897.1; EXPRESSED IN FETAL LIVER, SIGNAL = 2.2; EXPRESSED IN PLACENTA, SIGNAL = 1.6; EXPRESSED IN BONE MARROW, SIGNAL = 1.5; EXPRESSED IN ADULT LIVER, SIGNAL =   2; NT HIT: AB011399.1, EVALUE 1.00e-127; EST_HUMAN HIT: BF528927.1, EVALUE 2.10e-01; SWISSPROT HIT: Q59146, EVALUE 3.60e-01
cagcccaggacggcagttccttgccgagggcccgtgtgtttgtgtctggtgtgcgctgtgttccgaggatgaaagtgatggccgatgaacagaactctcgtgttgtcggtgcgaccaggtgcgtgctctgttgttcgctgtcctttttgcatccttggttgtaggccaaagaagacaagatagcagaactggaaacggaaaacgctgtccttcttctgaaattggcacagg

SEQ ID NO: 31478 - DNA, 273 bp, Homo sapiens
  MAP TO AC004032.7; EXPRESSED IN ADULT LIVER, SIGNAL = 1.5; NT HIT: AJ011763.1, EVALUE 1.70e-01; EST_HUMAN HIT: BF034156.1, EVALUE 2.50e-01; SWISSPROT HIT: O00570, EVALUE 4.50e+00
acagtttgagcaaaaggagttgtttttgaacttcaggaggggaaaaacacgcgctcacgcacacgccccaaacagcatcattttgcaggacaaaatgtcccctgtgctccagagcaggcagccccagccccacttcagcaggcctcacaaacacttagtgtcactgcgggttatgtaagcgtggtttgggcctgtgaggttggacgtggccttgggttttgaaaggaggcaggggagtttgggtgaggagccgttcggctcaaaataaatcca

SEQ ID NO: 31479 - DNA, 134 bp, Homo sapiens
  MAP TO AC004624.6; EXPRESSED IN BONE MARROW, SIGNAL = 1.5; EXPRESSED IN LUNG, SIGNAL = 1.4; EXPRESSED IN FETAL LIVER, SIGNAL = 1.9; EXPRESSED IN ADULT LIVER, SIGNAL = 1.7; EXPRESSED IN PLACENTA, SIGNAL = 1.4; EST_HUMAN HIT: AU135817.1, EVALUE 2.90e-02; SWISSPROT HIT: P98109, EVALUE 7.00e+00
acaacacagaagacacggcttctgctcttaagagtctaaactcaggcccagcacacgctaaacagtccaaacacattctctcctattttcctcactgcagccttgtccccattgtacggaggaggctgagggga

SEQ ID NO: 31480 - DNA, 148 bp, Homo sapiens
  MAP TO AC007313.3; EXPRESSED IN ADULT LIVER, SIGNAL = 2.6; EST_HUMAN HIT: BF369433.1, EVALUE 5.00e-01; NT HIT: AF110403.1, EVALUE 8.50e-02; SWISSPROT HIT: Q37600, EVALUE 6.90e+00
ccagggccgccttaagtctctgtgccccacattctgccaatgcagtcttcaacaacccaggctcaggtgggcccaggttcaactcagaccgccactccagagaacataagggatgagccttggtaggatccacgtggagctgtccctg

SEQ ID NO: 31481 - DNA, 112 bp, Homo sapiens
  MAP TO AC007539.8; EXPRESSED IN FETAL LIVER, SIGNAL =   3; EXPRESSED IN ADULT LIVER, SIGNAL = 2.8; EXPRESSED IN HELA, SIGNAL = 1.4; EXPRESSED IN PLACENTA, SIGNAL = 2.3; EXPRESSED IN LUNG, SIGNAL = 1.2; NT HIT: gi11435947, EVALUE 2.00e-26; EST_HUMAN HIT: AU142869.1, EVALUE 3.00e-26
ttgctcaagtttgtcaatgcctactcccccatcttctatgtggcctttttcaaagggaggtgagtataatggtgtcatgtgtagaaaggcaatttgccactaagactgggtt

SEQ ID NO: 31482 - DNA, 87 bp, Homo sapiens
  MAP TO AC007567.1; EXPRESSED IN FETAL LIVER, SIGNAL = 1.7; EXPRESSED IN ADULT LIVER, SIGNAL = 2.3; EXPRESSED IN PLACENTA, SIGNAL = 1.4; EXPRESSED IN BONE MARROW, SIGNAL = 1.4; EXPRESSED IN LUNG, SIGNAL = 1.2; NT HIT: AL163303.2, EVALUE 1.00e-05; EST_HUMAN HIT: BE221737.1, EVALUE 1.00e-03; SWISSPROT HIT: P13186, EVALUE 1.10e+00
agtggtctacacttacgtccatagcaacgacattattcacaagaaccgcaaggtagaaacaatccaagtgtccatcaaagaatgaat

SEQ ID NO: 31483 - DNA, 451 bp, Homo sapiens
  MAP TO AC009290.1; EXPRESSED IN ADULT LIVER, SIGNAL = 2.1; EXPRESSED IN FETAL LIVER, SIGNAL = 1.7; EXPRESSED IN HELA, SIGNAL =   2; EXPRESSED IN PLACENTA, SIGNAL = 2.9; EXPRESSED IN LUNG, SIGNAL = 1.7; EXPRESSED IN BONE MARROW, SIGNAL = 1.4; NT HIT: AF224669.1, EVALUE 1.00e-117; EST_HUMAN HIT: BE064410.1, EVALUE 1.00e-59; SWISSPROT HIT: P21414, EVALUE 7.00e-10
attcagaacatgcatggccttctggagaactttgcctcatccaagcgaagtattatcacctagttggcattgtaattgtgacttcaaaaggccattgcacagtttttatcagtccagctgcttcaggatgatggggaacatgataagaccagtgaattccataagcatgatcccactgccccacttttttagctgtaaagtgagtgccttggtcagaggcaatgctgtgtggaataacatgatgatggataaggcattctgtgagtccatggatggtagtcttggcaggagcattgtgggcaggatacacaaacccatatccggagtaagtgtgtattccactgggcacaaatctctgccccttccttgatggaagaggttcagtataatcaacctgctaccaggtagctggttgatcaccctgaggaatggtgccatattgtgggctcag

SEQ ID NO: 31484 - DNA, 147 bp, Homo sapiens; identical to SEQ ID NO: 25813
  MAP TO AL022320.23; EXPRESSED IN FETAL LIVER, SIGNAL = 1.9; EXPRESSED IN ADULT LIVER, SIGNAL = 1.7; EXPRESSED IN PLACENTA, SIGNAL = 1.6; NT HIT: D63882.1, EVALUE 3.00e-29; SWISSPROT HIT: Q14565, EVALUE 6.00e-06

SEQ ID NO: 31485 - DNA, 154 bp, Homo sapiens
  MAP TO AL022327.17; EXPRESSED IN ADULT LIVER, SIGNAL = 1.6; EXPRESSED IN PLACENTA, SIGNAL = 1.5; NT HIT: AE001514.1, EVALUE 8.90e-02; EST_HUMAN HIT: BF360262.1, EVALUE 5.20e-01; SWISSPROT HIT: Q04857, EVALUE 1.40e+00
aaaaccactggctgtgcaagcgatgatgataatcatgcccagtagactgttaaaaacattattaaacaggctgacagcaatagcaggaagtcagaagggagcacgggacttcacattttccaggcttcaaagtcgatatattgccaggtgggta

SEQ ID NO: 31486 - DNA, 151 bp, Homo sapiens
  MAP TO AL079300.11; EXPRESSED IN ADULT LIVER, SIGNAL = 1.8; EXPRESSED IN PLACENTA, SIGNAL = 1.8; EXPRESSED IN BONE MARROW, SIGNAL = 1.4; NT HIT: gi11431676, EVALUE 2.00e-08; EST_HUMAN HIT: AW070975.1, EVALUE 4.00e-08; SWISSPROT HIT: P25367, EVALUE 3.50e-01
tagctggcatctgggaacttggcttttaaaatgtctcctccattccctaactgataaggttgattctttgtgccttgactgtttatagaaacaatgtaatttatggtgaacacctgctttctttctgagagtctggaattttggttgttgc

SEQ ID NO: 31487 - DNA, 151 bp, Homo sapiens
  MAP TO AL079300.11; EXPRESSED IN PLACENTA, SIGNAL =   2; EXPRESSED IN ADULT LIVER, SIGNAL = 1.5; EXPRESSED IN FETAL LIVER, SIGNAL = 1.3; SWISSPROT HIT: P47074, EVALUE 6.90e+00; NT HIT: AJ288948.1, EVALUE 3.40e-01; EST_HUMAN HIT: AW087775.1, EVALUE 5.10e-01
ctctcaacctctcaaaactctgttctgtctatgaaggaaaatgtgctacccactccacagggatagtcaaaagatgcaatatcattaaatatatttcaaagcctggttttgtgccctaaaaatgtgatgatgatgatgatgatgatgatga

SEQ ID NO: 31488 - DNA, 79 bp, Homo sapiens
  MAP TO AP000233.1; EXPRESSED IN FETAL LIVER, SIGNAL = 9.3; EXPRESSED IN PLACENTA, SIGNAL = 3.6; EXPRESSED IN BONE MARROW, SIGNAL = 1.4; EXPRESSED IN ADULT LIVER, SIGNAL = 2.1; EST_HUMAN HIT: AL043268.2, EVALUE 3.00e-16; NT HIT: Z79445.1, EVALUE 2.00e-13
cctaatttgtatttcagtgaaccctctttactacctgattggtcggatgcgagctgagttacacgctccgtgtttaaag

SEQ ID NO: 31489 - DNA, 154 bp, Homo sapiens
  MAP TO AP000354.1; EXPRESSED IN PLACENTA, SIGNAL = 1.2; EXPRESSED IN ADULT LIVER, SIGNAL = 1.5; NT HIT: X98317.1, EVALUE 3.50e-01; EST_HUMAN HIT: BF002855.1, EVALUE 2.00e-74
taacgtgagtgtcaagtacagtatctagtgagtggagaataactgtaataattacaattacagttgtagttaaagtgaagtttgtatcaaaatttctgtttcaaaggtgaacttttaggaggtgtatctgcggtgtttcttcctcagatgtgat

SEQ ID NO: 31490 - DNA, 101 bp, Homo sapiens
  MAP TO AP000356.1; EXPRESSED IN ADULT LIVER, SIGNAL = 1.5; EST_HUMAN HIT: AA769866.1, EVALUE 4.00e-50; NT HIT: AE001299.1, EVALUE 8.50e-01
gtcccctccatcccctgcataggagactgctctgaacttggtgtgcatggagatgaccagcatctttgaactgttaatctgtgtgtatgtacctactgttt

SEQ ID NO: 31491 - DNA, 91 bp, Homo sapiens
  MAP TO AP000359.1; EXPRESSED IN PLACENTA, SIGNAL = 1.3; EXPRESSED IN ADULT LIVER, SIGNAL = 1.3e+02; NT HIT: D87675.1, EVALUE 2.00e-04; EST_HUMAN HIT: BE620521.1, EVALUE 1.00e-03
tcttttccatgcggatatcctgtttacccagcaccgtttgctgaaaaagactattctttctgtcttgaatggccttggcatcctgtggaaa

SEQ ID NO: 31492 - DNA, 196 bp, Homo sapiens
  MAP TO Z82201.1; EXPRESSED IN PLACENTA, SIGNAL = 2.5; EXPRESSED IN LUNG, SIGNAL = 1.4; EXPRESSED IN ADULT LIVER, SIGNAL = 2.1; EXPRESSED IN FETAL LIVER, SIGNAL = 1.5; NT HIT: U78308.1, EVALUE 1.00e-29; EST_HUMAN HIT: AA864653.1, EVALUE 6.00e-32; SWISSPROT HIT: O53175, EVALUE 5.80e-01
gcaagctaacacaggaacagaaaaccaaataccacaggttctcactcataagtgggagctaaatgatgagaactcatggacacatagaggagaacaatgcacactggggcctatcggagaacaagagaattttcaccctcaggagaatgaggatggaggttgggaggagagagaggatcaggaaaaatataataac

SEQ ID NO: 31493 - DNA, 553 bp, Homo sapiens; identical to SEQ ID NO: 14912
  MAP TO AL021707.2; EXPRESSED IN FETAL LIVER, SIGNAL = 2.4; EXPRESSED IN ADULT LIVER, SIGNAL = 1.9; EXPRESSED IN HELA, SIGNAL = 1.3; EXPRESSED IN PLACENTA, SIGNAL =   3; NT HIT: gi11545836, EVALUE 1.40e+00; EST_HUMAN HIT: BE540741.1, EVALUE 2.10e+00; SWISSPROT HIT: P27854, EVALUE 2.80e+00

SEQ ID NO: 31494 - DNA, 556 bp, Homo sapiens; identical to SEQ ID NO: 14888
  MAP TO AP000359.1; EXPRESSED IN PLACENTA, SIGNAL = 1.5; EXPRESSED IN BONE MARROW, SIGNAL = 1.8; EXPRESSED IN FETAL LIVER, SIGNAL = 1.5; EXPRESSED IN ADULT LIVER, SIGNAL = 2.7; NT HIT: AF297468.1, EVALUE 3.50e-01; SWISSPROT HIT: P12092, EVALUE 4.80e+00

SEQ ID NO: 31495 - DNA, 105 bp, Homo sapiens
  MAP TO AC004137.1; EXPRESSED IN PLACENTA, SIGNAL = 0.74; EXPRESSED IN LUNG, SIGNAL = 0.71; EXPRESSED IN ADULT LIVER, SIGNAL = 0.53; EXPRESSED IN BONE MARROW, SIGNAL = 0.95; NT HIT: X91338.1, EVALUE 1.40e-02; EST_HUMAN HIT: BE706428.1, EVALUE 1.30e+00
tcgttgatagactatcagggaggtcagacaagccagtatgggttgtttctctctgagttcatgatctggatcattttgatgacagattttggaaattaccagagg

SEQ ID NO: 31496 - DNA, 157 bp, Homo sapiens
  MAP TO AC002461.1; EXPRESSED IN BONE MARROW, SIGNAL = 0.52; EXPRESSED IN PLACENTA, SIGNAL = 0.61; EXPRESSED IN LUNG, SIGNAL = 0.55; EXPRESSED IN ADULT LIVER, SIGNAL = 0.45; NT HIT: AF029308.1, EVALUE 9.10e-02; SWISSPROT HIT: O60563, EVALUE 8.90e+00; EST_HUMAN HIT: AW579634.1, EVALUE 1.40e-01
accttgttgttgggttagttcgtccacttccgtagtttcaactacaacctttctgctgatgactgtaactaccattttcatgctgatgattgaaactaccacttttatggtgttgcaagtcaaactgtcttcagtttctgtctttctccctcagctc

SEQ ID NO: 31497 - DNA, 138 bp, Homo sapiens
  MAP TO AC002529.1; EXPRESSED IN BONE MARROW, SIGNAL = 0.61; EXPRESSED IN ADULT LIVER, SIGNAL = 0.58; EXPRESSED IN LUNG, SIGNAL = 0.62; EXPRESSED IN PLACENTA, SIGNAL = 0.63; SWISSPROT HIT: P11369, EVALUE 1.00e-08; NT HIT: AL163209.2, EVALUE 2.00e-24; EST_HUMAN HIT: AW900535.1, EVALUE 1.00e-13
ataaagggtaacaatgatgtgatcatttcaattgatattgaaaaagcatttgataaaattcaacattccttcaggatgaaaaccctcaaaaacctgggtataaaaggaacatacatcaacacagttaagagccatatg

SEQ ID NO: 31498 - DNA, 173 bp, Homo sapiens
  MAP TO AC005040.2; EXPRESSED IN LUNG, SIGNAL = 0.6; EXPRESSED IN ADULT LIVER, SIGNAL = 0.53; EST_HUMAN HIT: AA169149.1, EVALUE 3.00e-12; NT HIT: AL163209.2, EVALUE 5.00e-19; SWISSPROT HIT: P07344, EVALUE 1.00e+00
attgtaagcttaaccaggtggtgactccaattgcagctgctacgccagatgtggttacattgtttgagcaaattaacacatttcctggtgccggatatgtagctattgatctggcaaatccctttttcttcatccctgtccataagatccaccataagcagttagccttaggg

SEQ ID NO: 31499 - DNA, 224 bp, Homo sapiens
  MAP TO AC015570.5; EXPRESSED IN ADULT LIVER, SIGNAL = 0.57; EXPRESSED IN PLACENTA, SIGNAL = 0.55; SWISSPROT HIT: P51825, EVALUE 6.60e+00; NT HIT: AJ226069.1, EVALUE 8.30e+00
ctaggtgctatggcctacttcaggaaagaaaaagaagaggggaatttcaatttcaatggcctgttctaggagagagggaggtggaagacggtcctcaattaatttcagcttaagatactcagaacgccaaagggccatgttttggggtatcatttcgtacaggaatgctagcatttcctgccgcatttctatggcctgtttcaggagagagggaggtggaagaa

SEQ ID NO: 31500 - DNA, 243 bp, Homo sapiens
  MAP TO AC007193.1; EXPRESSED IN FETAL LIVER, SIGNAL = 2.3; EST_HUMAN HIT: AI904463.1, EVALUE 1.00e-106; NT HIT: X89416.1, EVALUE 2.00e-96; SWISSPROT HIT: P53041, EVALUE 7.00e-30
aacgggcgctcgatcagcaagcggggcgtgagctgtcagtttgggcctgacgtcaccaaggccttcttggaagagaacaacctggactatatcatccgcagccacgaagtcaaggccgagggctacgaggtggctcacggaggccgctgtgtcaccgtcttctctgcccccaactactggtatgtctttgcctttccagcccagggcctctaccaagccacgggtttttgtcttggtttttgt

SEQ ID NO: 31501 - DNA, 579 bp, Homo sapiens
  MAP TO AL078476.2; EXPRESSED IN PLACENTA, SIGNAL = 1.4; EXPRESSED IN HBL100, SIGNAL = 0.76; EXPRESSED IN HELA, SIGNAL = 0.92; EXPRESSED IN BT474, SIGNAL = 1.6; EXPRESSED IN BONE MARROW, SIGNAL = 1.3; EXPRESSED IN FETAL LIVER, SIGNAL = 0.81; EXPRESSED IN LUNG, SIGNAL = 0.79; NT HIT: AL163201.2, EVALUE 0.00e+00; SWISSPROT HIT: Q02952, EVALUE 2.80e+00; EST_HUMAN HIT: AV750850.1, EVALUE 0.00e+00
attacgcagcatgtcatgcgaaggcaagtctgaagaaggtgttggggaggaagacacatctgccttgcttatgtctgctgataatgaaaatgatgactctgtctcagatgataactttatagatttgcctccttggtatgaaacatctttcacacaaccctcaattgtaggagtcatttcagagtccatcaatccagtagaaagttcagaatcttctttctgttccttttctccttgtagcctttctataaccaactgttcctcaggacataatgaagtgctttcctcatgtggggacactaaggtttctagtggaagagtgacagattcaatgacaaattttggaggccttgattcttctttggataccactgttttaggttcctctaacaactgcagttgctcttgctgcacagtgatctggtgtgtaacgacttcaatgttttctgtcacttccattttatcttcaatttgatcttcgccacaaatatgcttcacttcagaagacattttcatttcttcactatcagcctcattagaaatctgtttttccaattcggtattcactgtatgttggga

SEQ ID NO: 31502 - DNA, 315 bp, Homo sapiens
  MAP TO AC008266.1; EXPRESSED IN PLACENTA, SIGNAL = 0.73; EXPRESSED IN FETAL LIVER, SIGNAL = 1.4; EXPRESSED IN BT474, SIGNAL = 5.1; EXPRESSED IN BONE MARROW, SIGNAL = 0.99; EXPRESSED IN HBL100, SIGNAL = 3.4; EXPRESSED IN HELA, SIGNAL = 1.8; NT HIT: gi11420914, EVALUE 0.00e+00; EST_HUMAN HIT: R25699.1, EVALUE 5.00e-02; SWISSPROT HIT: P45386, EVALUE 2.00e+00
ggcgccgttgctctgcaagtttttgcatacgtgttttaactgaggaggctgcagttgcttccaatcttgagttcagccctctcctcatgcccagcagtgatgccgggacagcaacagaatcactgatggtatctgctgcttgtggctgcacctgaggagacacaggacttggagaacaagattttgcagatgtcgactcaactggttgtttattttccaagttagaaacttctacttcagtgttgtcagaacagcgtttttttgatggcgatggttttgtacaagatttctctacattaaaaacgatgaaaaaag

SEQ ID NO: 31503 - DNA, 150 bp, Homo sapiens
  MAP TO AL031729.16; EXPRESSED IN LUNG, SIGNAL = 1.2; EXPRESSED IN PLACENTA, SIGNAL =   5; EXPRESSED IN BONE MARROW, SIGNAL = 4.8; EXPRESSED IN FETAL LIVER, SIGNAL = 0.91; SWISSPROT HIT: P09769, EVALUE 1.00e-23; EST_HUMAN HIT: AV690852.1, EVALUE 3.00e-79; NT HIT: gi4885234, EVALUE 2.00e-79
ctgagggcatggcctacatggaacgcatgaactacattcaccgcgacctgagggcagccaacatcctggttggggagcggctggcgtgcaagatcgcagactttggcttggcgcgtctcatcaaggacgatgagtacaacccctgccaag

SEQ ID NO: 31504 - DNA, 200 bp, Homo sapiens
  MAP TO AF124731.2; EXPRESSED IN FETAL LIVER, SIGNAL = 0.72; EXPRESSED IN PLACENTA, SIGNAL = 1.6; EXPRESSED IN BT474, SIGNAL = 0.61; EXPRESSED IN BONE MARROW, SIGNAL = 0.98; NT HIT: AL163249.2, EVALUE 1.00e-109; SWISSPROT HIT: O14867, EVALUE 2.00e-32; EST_HUMAN HIT: BF512320.1, EVALUE 1.00e-109
aatcttctgtgcatagcaccaatgttttactcagccttaatgaccagcggaagaaagatgtgctgtgcgatgtcaccatctttgtggagggacagcggttccgcgctcaccggtccgtgctggcggcatgcagcagttacttccactcaagaatcgtaggccaggctgatggagagctgaacattactcttccagaagag

SEQ ID NO: 31505 - DNA, 366 bp, Homo sapiens
  MAP TO AC006028.2; EXPRESSED IN HELA, SIGNAL = 1.1; EXPRESSED IN PLACENTA, SIGNAL = 0.69; EXPRESSED IN BT474, SIGNAL =  10; EXPRESSED IN HBL100, SIGNAL = 4.3; EXPRESSED IN LUNG, SIGNAL = 0.64; EXPRESSED IN BONE MARROW, SIGNAL = 0.73; EXPRESSED IN FETAL LIVER, SIGNAL = 0.83; NT HIT: gi4505740, EVALUE 0.00e+00; EST_HUMAN HIT: AI718295.1, EVALUE 0.00e+00; SWISSPROT HIT: P53900, EVALUE 3.00e-06
tcccgagatggtggccaccatgaagaagacggctgcagaagatgtcaatgttactttcgaagagcaacaaaagataaacaaatttgcatggaatacaagtagaatcacagagctgaaggaagaaatagaagtaaaacagaaacaactccaaaacgtagaagatgctcgtgacggtaccatgcttgcagatgctgactgcttaatgatgccttatcaaatcggtgatgtcttcattagccattctcaagaagaaacacaggaaatgttagaagcagcaaataaaaatttgcaagaagcaactgacgccttagaatccaaagtcgaagcaattcagtgggtgtgagcagatttgaaagttcagttgta

SEQ ID NO: 31506 - DNA, 373 bp, Homo sapiens; identical to SEQ ID NO: 30443
  MAP TO AB023054.1; EXPRESSED IN PLACENTA, SIGNAL = 1.7; EXPRESSED IN HELA, SIGNAL = 0.63; EXPRESSED IN FETAL LIVER, SIGNAL = 0.97; NT HIT: Y07829.2, EVALUE 0.00e+00; SWISSPROT HIT: Q02084, EVALUE 3.00e-12

SEQ ID NO: 31507 - DNA, 199 bp, Homo sapiens
  MAP TO AL121654.1; EXPRESSED IN BONE MARROW, SIGNAL = 0.92; EXPRESSED IN FETAL LIVER, SIGNAL = 6.7; EXPRESSED IN PLACENTA, SIGNAL = 0.94; NT HIT: AL445066.1, EVALUE 1.20e-01; SWISSPROT HIT: Q03103, EVALUE 2.80e+00; EST_HUMAN HIT: BF359824.1, EVALUE 2.80e+00
atcttttgcagacaagaaagagcagacaagatctgcagatttcacagataatcacagttgcattttggataggaacacccatccttcaaagtctgggaggtttgtcttagatttccttctcaaaaacaggaagtctaagaaatgccctgggcttcatgtcagggatgtgagtcaccattttttttacctggatcatatg

SEQ ID NO: 31508 - DNA, 458 bp, Homo sapiens
  MAP TO AL033528.6; EXPRESSED IN PLACENTA, SIGNAL =   1; EXPRESSED IN HBL100, SIGNAL = 1.6; EXPRESSED IN HELA, SIGNAL = 1.8; EXPRESSED IN FETAL LIVER, SIGNAL = 0.96; EST_HUMAN HIT: BE257955.1, EVALUE 0.00e+00; SWISSPROT HIT: Q28814, EVALUE 2.70e+00; NT HIT: AB023134.1, EVALUE 2.50e-01
catctcatacagaaagtcagatcaacaaagagtccaagaaaaatgcgacccagctagaccatttgatcccaggcttagcacacgattgcatggcatcccctttagccacttcaaccactgcagacatccaggaagctggactctctcctcagtccctccagacttctggccaccacagaatgaaaaccccattttcaactgagctatctttgctccagcctgatactccagactgtgctggagatagtcataccccactggctttttccttcaccgaggacttggaaagttcttgtttgctagaccgaaaggaagaaaaaggggattctgccaggaaatgggaatggcttcatgagtctaagaagaactatcagagtatggagaaacacaccaaactcctggggacaaatgctgtcagcccttaggcaagactaaattggaaagaaaggtgtctgcca

SEQ ID NO: 31509 - DNA, 209 bp, Homo sapiens
  MAP TO AL096771.8; EXPRESSED IN FETAL LIVER, SIGNAL = 1.2; EXPRESSED IN BT474, SIGNAL = 1.1; EXPRESSED IN HBL100, SIGNAL =   4; EXPRESSED IN HELA, SIGNAL = 2.4; EST_HUMAN HIT: BF109901.1, EVALUE 1.00e-76; SWISSPROT HIT: Q60847, EVALUE 2.00e-06; NT HIT: gi11418424, EVALUE 2.00e-92
gtccacaaggagaatccagaacaggtccaccagggtccacaggttcaagaggtccccctggcccccctggccgtcctggaaactcaggtatccgaggacccccaggtcctcctggatactgtgattcttctcagtgtgccagcatcccatacaacgggcaaggctatccaggtacgttgttgccattgtaggaaccccaactcacctga

SEQ ID NO: 31510 - DNA, 149 bp, Homo sapiens
  MAP TO AC009437.1; EXPRESSED IN FETAL LIVER, SIGNAL = 1.3; EXPRESSED IN HELA, SIGNAL = 1.3; EST_HUMAN HIT: BE561442.1, EVALUE 2.00e+00; SWISSPROT HIT: Q08420, EVALUE 3.90e+00
agaaatggcagcggtgggctgtctgcaggcttttaatccggcctgcaccggaggtctccgacctatccgtgatgtggcagaaacgcttggctctgccgaagacaaatgcaaggccgcactctgtgttaggaaacgctctgggctcggtg

SEQ ID NO: 31511 - DNA, 186 bp, Homo sapiens
  MAP TO AC011331.1; EXPRESSED IN LUNG, SIGNAL = 1.1; EXPRESSED IN BT474, SIGNAL = 1.8; EXPRESSED IN FETAL LIVER, SIGNAL = 2.6; EXPRESSED IN HBL100, SIGNAL = 1.2; SWISSPROT HIT: P46934, EVALUE 1.70e+00; NT HIT: AB007899.1, EVALUE 2.00e-52; EST_HUMAN HIT: BE275776.1, EVALUE 2.00e-52
ggcatgcagggcatgctgtgatgacctcttactcacagccgaagaaccaacctcataatcgtccctttaactttattccgcagcatggatgggaagttgttgactcaaatgactcggcttctcagcaccaagaggaacttcctcctcctcctctgcctcccgggtgggaagaaaaagtggacaatt

SEQ ID NO: 31512 - DNA, 184 bp, Homo sapiens
  MAP TO AL109799.4; EXPRESSED IN FETAL LIVER, SIGNAL = 1.7; EST_HUMAN HIT: AA412270.1, EVALUE 2.00e-89; NT HIT: AJ238277.1, EVALUE 2.00e-89
acctgctcctaaaaaaatgaaaacatctgagtcctcgaccatactagtggttcgctacaggaggaacgtgaaaagaacatctccagaggaactgctgaatgaccacgcccgagagaacagaatcaaccccctccaaatggaggaggaggaattcatggaaataatggttgaaatacctgcaaag

SEQ ID NO: 31513 - DNA, 172 bp, Homo sapiens
  MAP TO AC010732.1; EXPRESSED IN BONE MARROW, SIGNAL = 0.92; EXPRESSED IN LUNG, SIGNAL =   1; EXPRESSED IN BT474, SIGNAL =   2; EXPRESSED IN FETAL LIVER, SIGNAL =   1; NT HIT: gi11430533, EVALUE 3.00e-79; EST_HUMAN HIT: BE869579.1, EVALUE 1.00e-69; SWISSPROT HIT: P98194, EVALUE 2.00e-14
ctccttccagaagataaagagggtcccgctgatgatgatggccgcggacatgaggatcttcaggatgagggctctgctgaggatggtgtcccgcacactccgtggtggctgcctgaaggcgtctttgtcaacgggctctacccccaagctgctccgaacaagacacagacac

SEQ ID NO: 31514 - DNA, 151 bp, Homo sapiens
  MAP TO AC009953.2; EXPRESSED IN FETAL LIVER, SIGNAL = 2.3; EXPRESSED IN PLACENTA, SIGNAL = 0.94; EST_HUMAN HIT: AL079443.1, EVALUE 8.00e+00; SWISSPROT HIT: P46468, EVALUE 1.70e+00
aaccaaccaaaaagcaaacgaatgcattataattatagtaaagaaggcaacaagtttacctcctttaaaccagagaagaatttacagatggagaagaaaaagggtaacaggactaaaattaattttaagactgttgtgccccagaagttat

SEQ ID NO: 31515 - DNA, 109 bp, Homo sapiens
  MAP TO AL035250.17; EXPRESSED IN PLACENTA, SIGNAL = 1.5; EXPRESSED IN HBL100, SIGNAL = 0.93; EXPRESSED IN FETAL LIVER, SIGNAL =   1; SWISSPROT HIT: O52200, EVALUE 7.20e+00; NT HIT: gi11426002, EVALUE 2.40e-01
cagccagcatcctccaatcacaggattggatatggcaggaggactggttttggcccaggaagggcttctgcagggctggaggttgtgttgttatcattgtggccaccat

SEQ ID NO: 31516 - DNA, 192 bp, Homo sapiens
  MAP TO AL121789.1; EXPRESSED IN HELA, SIGNAL = 3.7; EXPRESSED IN FETAL LIVER, SIGNAL = 2.6; NT HIT: AF275265.3, EVALUE 1.80e+00; SWISSPROT HIT: P50476, EVALUE 1.70e+00
ggtgtggattcatgcattcccctgcaatgctgcaaacccaatcagaacatgaggttagatcataggaaccagaaaatgaaagtgaccacaggcagggctgacatggtgcagactcacagtggatgctgtgtgacggctgagagaagcagcgggagtgtgaaaagacatgcgaatttcagtaaaataaactag

SEQ ID NO: 31517 - DNA, 153 bp, Homo sapiens
  MAP TO AC005948.6; EXPRESSED IN FETAL LIVER, SIGNAL = 0.96; EXPRESSED IN HELA, SIGNAL =   1; EXPRESSED IN PLACENTA, SIGNAL = 0.99; NT HIT: AF037338.1, EVALUE 3.00e-01; EST_HUMAN HIT: AW797355.1, EVALUE 2.30e-02; SWISSPROT HIT: Q09244, EVALUE 1.70e+00
aaggcctctctgaggagatgatgtttgatcagagacctggatcaagtgaagaaatgaccaactcatggggagatcagaggggagcaacaccaatagccataaaccaggattgtcccaggaaaactaacacctgtggttaccctatagaccaag

SEQ ID NO: 31518 - DNA, 210 bp, Homo sapiens
  MAP TO AC010082.2; EXPRESSED IN FETAL LIVER, SIGNAL = 1.4; EST_HUMAN HIT: R91122.1, EVALUE 7.40e-01
atacatctcagatgcaaactggcattttacaactatttctatatctacttggatgaaattgtctgcgataataattttgttaatgataattttgcatttttctgaaattttaaaatctacttggacacaatcctgcaagctgtctgcaaattctgtccaattaacttcagaaaaagccaaggttcaacttgctgcatgctattttatgac

SEQ ID NO: 31519 - DNA, 108 bp, Homo sapiens
  MAP TO AC011364.1; EXPRESSED IN FETAL LIVER, SIGNAL = 1.5; EXPRESSED IN PLACENTA, SIGNAL = 1.6; EST_HUMAN HIT: AI040939.1, EVALUE 5.40e+00
gctggctctgggaatgtgcacttcgttcaccctcctctaaggggtgtcttctccccagagaagcagagacaagtgactgcttagggggtggggattctccccagctgc

SEQ ID NO: 31520 - DNA, 308 bp, Homo sapiens
  MAP TO AC006323.3; EXPRESSED IN BT474, SIGNAL = 2.9; EXPRESSED IN FETAL LIVER, SIGNAL = 0.95; EXPRESSED IN PLACENTA, SIGNAL =   1; EXPRESSED IN HBL100, SIGNAL = 1.7; EXPRESSED IN HELA, SIGNAL = 2.5; EXPRESSED IN LUNG, SIGNAL = 1.2; EXPRESSED IN BONE MARROW, SIGNAL = 1.2; NT HIT: U52965.1, EVALUE 1.00e-108; EST_HUMAN HIT: BF026728.1, EVALUE 1.00e-108; SWISSPROT HIT: Q15910, EVALUE 6.00e-13
gagggagcaaaggagtttgctgctgctctcaccgctgagcggataaagaccccaccaaaacgtccaggaggccgcagaagaggacggcttcccaataacagtagcaggcccagcacccccaccattaatgtgctggaatcaaaggatacagacagtgatagggaagcagggactgaaacggggggagagaacaatgataaagaagaagaagagaagaaagatgaaacttcgagctcctctggtaagacacgtctaataactgggttttactgttctgtgaaagttcgtgttgtgaggattaaggatgt

SEQ ID NO: 31521 - DNA, 235 bp, Homo sapiens
  MAP TO AC004838.2; EXPRESSED IN FETAL LIVER, SIGNAL = 1.7; NT HIT: gi11420683, EVALUE 1.00e-130; SWISSPROT HIT: P22174, EVALUE 2.50e+00; EST_HUMAN HIT: AI018111.1, EVALUE 5.70e-01
atatccttacattctggttaaacagcttgcttaccgtgttctactgcatcaaggtctcttctttcacccatcacatctttctctggctgaggtggagaattttgaggttgtttccctggatattactgggttctctgatgattacttgtgtaacaatcatcccttcagctattgggaattacattcaaattcagttactcaccatggagcatctaccaagaaacagcactgtaac

SEQ ID NO: 31522 - DNA, 124 bp, Homo sapiens
  MAP TO AC005158.2; EXPRESSED IN FETAL LIVER, SIGNAL = 1.3; EXPRESSED IN PLACENTA, SIGNAL = 1.1; NT HIT: gi4504014, EVALUE 9.00e-63; EST_HUMAN HIT: AI863961.1, EVALUE 2.00e-63; SWISSPROT HIT: P10071, EVALUE 8.00e-16
ggaggcccagtcccacagctccacgaccactgaaaagaaaaaagttgagaattccatagtgaagtgctccactcgaacagatgtgagcgagaaagccgttgcctccagcaccacttctaatggt

SEQ ID NO: 31523 - DNA, 324 bp, Homo sapiens
  MAP TO AC006023.2; EXPRESSED IN PLACENTA, SIGNAL = 1.1; EXPRESSED IN BT474, SIGNAL =   1; EXPRESSED IN FETAL LIVER, SIGNAL = 1.6; EST_HUMAN HIT: AW799294.1, EVALUE 0.00e+00; SWISSPROT HIT: P23201, EVALUE 1.20e+00; NT HIT: AJ297709.1, EVALUE 0.00e+00
taaaaacaggccctggacagcacttaaaccacagtgaattggcaattctactaaacctactacaatctaaaacaagtgttaatatggctgattttgtccaagtgttgaacattaaggtaaactctgagactcaacagcagctaaataaaataaaccttcctgctggaattttggcaacaggtgaaaaacagacagatccatcaacaccacaacaggagtcttcgaaaccgttgggaggaattcagccttcttctcagaccatccagcctaaagtggagactgatgctgcccaggcggctgtgcagagtgcatttgcagttctgt

SEQ ID NO: 31524 - DNA, 372 bp, Homo sapiens
  MAP TO AC011406.1; EXPRESSED IN HELA, SIGNAL = 1.3; EXPRESSED IN PLACENTA, SIGNAL = 1.9; EXPRESSED IN FETAL LIVER, SIGNAL =  35; SWISSPROT HIT: P50443, EVALUE 1.00e-66; EST_HUMAN HIT: BE500995.1, EVALUE 0.00e+00; NT HIT: gi11416769, EVALUE 0.00e+00
ggggatgtgatgtcaggcttgattgtgggcatattattggtgccccagtccattgcttattccctgctggctggccaagaacctgtctatggtctgtacacatctttttttgccagcatcatttattttctcttgggtacctcccgtcacatctctgtgggcatttttggagtactgtgccttatgattggtgagacagttgaccgagaactacagaaagctggctatgacaatgcccatagtgctccttccttaggaatggtttcaaatgggagcacattattaaatcatacatcagacaggatatgtgacaaaagttgctatgcaattatggttggcagcactgtaacctttatagctggagtttatcag

SEQ ID NO: 31525 - DNA, 89 bp, Homo sapiens
  MAP TO AC008134.3; EXPRESSED IN FETAL LIVER, SIGNAL = 1.1; NT HIT: gi11434690, EVALUE 3.00e-43; EST_HUMAN HIT: Z45777.1, EVALUE 5.00e-43; SWISSPROT HIT: Q13393, EVALUE 1.00e-10
ctgtgagctttcaggatcctctgggcaatggcatcgcctatcttgttgaacacaactttgtcatcagcacagcttatgaaaaactggtt

SEQ ID NO: 31526 - DNA, 187 bp, Homo sapiens
  MAP TO AC009491.2; EXPRESSED IN FETAL LIVER, SIGNAL = 1.6; SWISSPROT HIT: P80370, EVALUE 2.90e+00; NT HIT: AF000991.1, EVALUE 2.00e-05; EST_HUMAN HIT: AW593215.1, EVALUE 7.00e-06
gaatctactgtgcccctcaactgcactactggaaacattttcagcctggccgtcaacacagacaatctctgagacaggtctcaacctcacctgcatgcctaagaggccagtccaagttgtgagaataccgcttcaccttggacttgccattgtcctggttcctgcctttcttagaaagcctctgtga

SEQ ID NO: 31527 - DNA, 88 bp, Homo sapiens
  MAP TO AC009891.1; EXPRESSED IN FETAL LIVER, SIGNAL = 1.3; NT HIT: D86388.1, EVALUE 2.80e+00; EST_HUMAN HIT: AA916492.1, EVALUE 1.90e-01
actacatgacctcaaagttcacattcactatcattctgtgattcaaaatcgctatgctaaaaagtatgtatatagtgattatagtata

SEQ ID NO: 31528 - DNA, 255 bp, Homo sapiens
  MAP TO AC005682.2; EXPRESSED IN HBL100, SIGNAL = 1.4; EXPRESSED IN HELA, SIGNAL = 1.9; EXPRESSED IN LUNG, SIGNAL = 6.2; EXPRESSED IN FETAL LIVER, SIGNAL = 0.91; EXPRESSED IN PLACENTA, SIGNAL =   1; EST_HUMAN HIT: AA282281.1, EVALUE 0.00e+00; NT HIT: AF217490.1, EVALUE 3.30e-02
gaaatacagaattaacaggtcaagaagaactgatggagatatctgaagttgacgagggattttattccagggctgcgtctagtaccagccagtcgggtttatcaaacagtagtcacaattgtagtaacaagccaagtataggaaagaaccacagacggtcaggaggaagcaaaactggaggaaaagaaaaagaaactacaggggaatcttgcaaagatcactttgctcgaaaacaaactcagagagcccaaagtg

SEQ ID NO: 31529 - DNA, 364 bp, Homo sapiens
  MAP TO AC009487.1; EXPRESSED IN BT474, SIGNAL = 6.2; EXPRESSED IN FETAL LIVER, SIGNAL = 0.92; EXPRESSED IN HBL100, SIGNAL = 2.2; EXPRESSED IN HELA, SIGNAL = 3.5; EXPRESSED IN LUNG, SIGNAL = 1.5; EST_HUMAN HIT: BE897487.1, EVALUE 0.00e+00; SWISSPROT HIT: P14196, EVALUE 2.60e-01
actgctcaggaaacaagcacaatgactatgaatgtcagccaggttgatgacgtggtttcctccaaaactcgtacgagaggtcaacgtatccaaaacgtgaatgtcaaatcagcacaacaggaagcatcagcagatgttgctactcctaagatgccagggcagtcagtcaagaagaaaactaggaaggcaaaagaaatttctgaagcttctgaaaacatctattctgatgtcagaggactatctcagaaccagcaaatacctcaaaattctgttacgcctaggagaggaaggagaaagaaagaagttaatcaggacatactagaaaacaccagttctgtggaacaagaattacagatcactacag

SEQ ID NO: 31530 - DNA, 455 bp, Homo sapiens
  MAP TO AC011406.1; EXPRESSED IN HBL100, SIGNAL = 1.4; EXPRESSED IN HELA, SIGNAL = 2.3; EXPRESSED IN BONE MARROW, SIGNAL = 0.97; EXPRESSED IN LUNG, SIGNAL = 5.2; EXPRESSED IN BT474, SIGNAL = 1.3; EXPRESSED IN FETAL LIVER, SIGNAL = 0.99; NT HIT: D83778.1, EVALUE 0.00e+00; EST_HUMAN HIT: AW732349.1, EVALUE 5.00e-52; SWISSPROT HIT: Q12766, EVALUE 6.00e-49
gaaaagccagccaaagtaaaagtggaattggcttctggcgtctcttccaaaggctctgtggtgaaaagaaatcagcaacctgtcaccactgagcaaaattcctctaaggaaaatgcctccaaactgactctggagaattcggaagctgtaagccagctcctgaacgtagctcctcccagagaagtaggtgaggagagtgagtgggaggaagtgatcatctccgatgcccatgttttggttaaggaagctcccgggaattgtggtacagcagtcactaagacgccagtcgtcaaaagtggtgtgcagcctgaggtcactctggggacaactgacaatgacagtcctggagcagacgtaccaacaccatccgaggggacaagtacctccagtccactccctgctcctaaaaaacctacagggtaagtcagtgtgtttgtataatatagggctttgga

SEQ ID NO: 31531 - DNA, 115 bp, Homo sapiens
  MAP TO AL050317.9; EXPRESSED IN LUNG, SIGNAL =   5; EXPRESSED IN FETAL LIVER, SIGNAL =   2; EST_HUMAN HIT: BF244453.1, EVALUE 1.50e+00; NT HIT: gi6753235, EVALUE 2.10e-01
ttcttgggtctgggctgtttcctggctcgctgatctctttggatcccagaggctcctggtgcagacttgctgcctgacctttctcagatttgctgagggccagaagatgaggccc

SEQ ID NO: 31532 - DNA, 142 bp, Homo sapiens
  MAP TO AC009486.2; EXPRESSED IN BT474, SIGNAL =   1; EXPRESSED IN FETAL LIVER, SIGNAL = 1.4; EXPRESSED IN HBL100, SIGNAL = 1.1; EXPRESSED IN BONE MARROW, SIGNAL =   1; NT HIT: U93163.1, EVALUE 2.00e-14; SWISSPROT HIT: P26010, EVALUE 8.80e+00; EST_HUMAN HIT: N76646.1, EVALUE 2.00e-12
ccagggtcatgatcatcaatatcactgtcttcaacctccacatcttgtccacctgggaggtcttccagggaaaacacaccacacatggagctgtcatctcctatgtgaacaatgccttcttccagatactgcctctaggacc

SEQ ID NO: 31533 - DNA, 205 bp, Homo sapiens
  MAP TO AC009811.2; EXPRESSED IN PLACENTA, SIGNAL = 0.99; EXPRESSED IN FETAL LIVER, SIGNAL = 1.1; SWISSPROT HIT: Q61554, EVALUE 5.50e-01
attcaaagtaaaagaaaaaatgacaactctattagtgatgctttcacaggattcctccagggctactttgccagttggaaatctgcagtcgctgctgcctaagcctgggccttgcttggggcctactggtcttcttctgcctgcttggcccagtaggctgcgcttggctgatgtcctggcttccttcccgcacctgccacagctc

SEQ ID NO: 31534 - DNA, 265 bp, Homo sapiens
  MAP TO AC009961.2; EXPRESSED IN LUNG, SIGNAL = 4.8; EXPRESSED IN FETAL LIVER, SIGNAL = 1.8; NT HIT: gi4505052, EVALUE 2.00e-90; EST_HUMAN HIT: BE177713.1, EVALUE 1.00e-85; SWISSPROT HIT: P49259, EVALUE 2.00e-07
aagtatgtatgttgttctttgtattctttttgaagtcaaacatctggattcaggttatctctattgttcttacaacagggaagtgaatcaagttttgaatggtctgatggtagtacatttgactatatcccatggaaaggccaaacatctcctggaaattgtgttctcttggatccaaaaggaacttggaaacatgaaaaatgcaactctgttaaggatggtgctatttgttataaacctacaaaatgtaagacttcaatttcag

SEQ ID NO: 31535 - DNA, 88 bp, Homo sapiens
  MAP TO AL034397.1; EXPRESSED IN HELA, SIGNAL = 1.8; EXPRESSED IN PLACENTA, SIGNAL = 1.6; EXPRESSED IN BONE MARROW, SIGNAL = 0.93; EXPRESSED IN LUNG, SIGNAL = 3.3; EXPRESSED IN FETAL LIVER, SIGNAL = 0.92; EST_HUMAN HIT: AV690218.1, EVALUE 2.00e-42
gggtgtggcacagacccaatcctaaggccggaggccttcagggtcaggacatagctgccttccctctctcaggcaccttctgaggttg

SEQ ID NO: 31536 - DNA, 113 bp, Homo sapiens
  MAP TO AL031669.12; EXPRESSED IN LUNG, SIGNAL = 1.7; EXPRESSED IN BT474, SIGNAL = 0.97; EXPRESSED IN FETAL LIVER, SIGNAL = 1.2; EXPRESSED IN HBL100, SIGNAL =   1; EXPRESSED IN HELA, SIGNAL = 0.96; EST_HUMAN HIT: BE172202.1, EVALUE 3.00e-57; SWISSPROT HIT: P51160, EVALUE 9.00e+00; NT HIT: L44140.1, EVALUE 9.80e-01
gatgttcgaccagctccaagaacagcaattgtttccccatcatcatccaccactttgaagtccaggtcctcattgtattttctgcgctttacttgccttcccgagcgtcgttt

SEQ ID NO: 31537 - DNA, 146 bp, Homo sapiens
  MAP TO AC009408.2; EXPRESSED IN LUNG, SIGNAL =  12; EXPRESSED IN FETAL LIVER, SIGNAL =   1; NT HIT: X54915.1, EVALUE 1.30e+00; EST_HUMAN HIT: AU131423.1, EVALUE 2.00e-59
cacagtaccttggaagcagccatcacagccgctgtggcggccacgttcaagccccgcttcccgaagtgcacaagggcatcgtaacttcggtcttttgcttggaccagacaatcatcgatttcctgtcaaaggaaaaacagaggcac

SEQ ID NO: 31538 - DNA, 151 bp, Homo sapiens
  MAP TO AC011289.1; EXPRESSED IN LUNG, SIGNAL = 2.1; EXPRESSED IN FETAL LIVER, SIGNAL = 1.2; EST_HUMAN HIT: AU117290.1, EVALUE 5.10e-01; SWISSPROT HIT: Q95840, EVALUE 1.00e+00
aattatttccgtagaggacgtttttgtatcctgctttgtttttggtgttgattttcacggaattatgacagttgaggtcacccatcatatcataattaccctgattttccactacctgctgagcagcacctggagctccagtgaccctcta

SEQ ID NO: 31539 - DNA, 473 bp, Homo sapiens; identical to SEQ ID NO: 15005
  MAP TO AF186996.1; EXPRESSED IN LUNG, SIGNAL = 8.1; EXPRESSED IN FETAL LIVER, SIGNAL = 1.4; EXPRESSED IN HELA, SIGNAL = 1.2; NT HIT: AF029062.1, EVALUE 1.00e-03; SWISSPROT HIT: Q95911, EVALUE 9.90e-01; EST_HUMAN HIT: AI287878.1, EVALUE 0.00e+00

SEQ ID NO: 31540 - DNA, 129 bp, Homo sapiens
  MAP TO AF191252.1; EXPRESSED IN FETAL LIVER, SIGNAL = 0.93; EXPRESSED IN PLACENTA, SIGNAL = 1.2; EXPRESSED IN LUNG, SIGNAL = 4.2; NT HIT: AF027153.1, EVALUE 2.90e-01
accaagttttactcttctgctctttccacctccagtgctaaggcctagaggggcgcaccttaaatctgaatcaatccacaaagcccgacggacgccagtggcagggtttggtgggattttaatagtaac

SEQ ID NO: 31541 - DNA, 96 bp, Homo sapiens
  MAP TO AP000568.1; EXPRESSED IN LUNG, SIGNAL = 1.5; EXPRESSED IN FETAL LIVER, SIGNAL = 1.7; EST_HUMAN HIT: AW801105.1, EVALUE 7.00e-36; SWISSPROT HIT: P27972, EVALUE 9.20e+00
gaaaagactgtaaaaaatgtggctacccttgtcaccttacttttgaatgccgcaattttctctgagtagaccctaaaagggacatagttttggatg

SEQ ID NO: 31542 - DNA, 139 bp, Homo sapiens
  MAP TO AL078624.19; EXPRESSED IN LUNG, SIGNAL = 6.8; EXPRESSED IN FETAL LIVER, SIGNAL = 1.1; EST_HUMAN HIT: BE859087.1, EVALUE 7.30e+00; SWISSPROT HIT: P26212, EVALUE 5.10e+00
taggtgctaagaagtgcagagataccgtcaagtgtaatgaagttgaagatgatggttttgttgataatgacggcagtaagtttaaagagttgagtaaactcctaaggcagtaccacttagatggactactggctcatgt

SEQ ID NO: 31543 - DNA, 116 bp, Homo sapiens
  MAP TO AC009640.2; EXPRESSED IN LUNG, SIGNAL = 1.9; EXPRESSED IN FETAL LIVER, SIGNAL = 1.2; SWISSPROT HIT: P18162, EVALUE 4.10e+00; NT HIT: AL163218.2, EVALUE 2.20e-01; EST_HUMAN HIT: BF571592.1, EVALUE 5.90e+00
gcctctggttatttatgttcacacgaaaccaggatagacacaagtggtctcctgacaagtcagatgacaacctccagtggtatgcgttcccgccctacttctttctaatttatatg

SEQ ID NO: 31544 - DNA, 173 bp, Homo sapiens
  MAP TO AC006023.2; EXPRESSED IN PLACENTA, SIGNAL =   1; EXPRESSED IN LUNG, SIGNAL = 0.99; EXPRESSED IN BT474, SIGNAL =   1; EXPRESSED IN FETAL LIVER, SIGNAL = 0.9; EST_HUMAN HIT: AU132638.1, EVALUE 1.00e-32; NT HIT: AJ297710.1, EVALUE 5.00e-93; SWISSPROT HIT: Q14004, EVALUE 6.00e-29
tttgaatatatggaccatgatctgatgggactactggaatcaggcttggttcattttaatgaaaatcacataaagtcatttatgagacagctcatggagggtctggattattgtcataagaagaactttttgcatagagatattaaatgttccaatatccttctaaataatag

SEQ ID NO: 31545 - DNA, 116 bp, Homo sapiens
  MAP TO AC009477.2; EXPRESSED IN BT474, SIGNAL =   1; EXPRESSED IN FETAL LIVER, SIGNAL = 1.3; EXPRESSED IN HBL100, SIGNAL = 0.98; EST_HUMAN HIT: BF089281.1, EVALUE 3.00e-57; NT HIT: AF232299.1, EVALUE 3.00e-59; SWISSPROT HIT: Q04690, EVALUE 9.00e-13
caatttgtagagcaaaccctagatataatgaagaacttgctagataatcatactgaaggcagccctgaacatctagagcaagctagcattgaaacaatgatgttaaatctggtcag

SEQ ID NO: 31546 - DNA, 233 bp, Homo sapiens
  MAP TO AL049652.16; EXPRESSED IN BONE MARROW, SIGNAL = 0.99; EXPRESSED IN HELA, SIGNAL = 2.2; EXPRESSED IN PLACENTA, SIGNAL = 1.2; EXPRESSED IN HBL100, SIGNAL = 1.8; EXPRESSED IN BT474, SIGNAL = 1.5; EXPRESSED IN FETAL LIVER, SIGNAL = 0.98; EXPRESSED IN LUNG, SIGNAL = 1.3; EST_HUMAN HIT: AA313212.1, EVALUE 1.00e-106; SWISSPROT HIT: Q60865, EVALUE 1.00e-23; NT HIT: gi11436490, EVALUE 1.00e-106
tggttggcacttaccatggttccccagaccagtcccatcaagtgactggtaaccaccagcagcctcctcagcagaacactggatttccacgtagcaatcagccctattacaatagtcgtggtgtgtctcgtggaggctcccgtggtgctagaggcttgatgaatggataccggggccctgccaatggattcagaggtaaaaaaataaaaaaggaggttctaatgaccttttac

SEQ ID NO: 31547 - DNA, 465 bp, Homo sapiens
  MAP TO AL109946.9; EXPRESSED IN FETAL LIVER, SIGNAL = 0.92; EXPRESSED IN BONE MARROW, SIGNAL = 1.3; EXPRESSED IN LUNG, SIGNAL = 1.1; EST_HUMAN HIT: AI209084.1, EVALUE 0.00e+00; SWISSPROT HIT: P52298, EVALUE 3.00e-50; NT HIT: X84157.1, EVALUE 3.00e-07
aaaacggccatcggcatgctgcccaaccagcaccatgtccaaagacctgaaaattctatgtaaagaccctgctttggagctgagctgctaccgggaccatcagttcagtggccgtaaatttcagcaggaaaaattactgaaggaaagctccacattgaatatggggaatctttccttttatacaaccgaagagaaaatacatgaactctttagtagatctgatatcaggaatatctttatgggcctggataaaataaagaaaacagcatgtggtttttgctttgtagaatgccataacagagctgatgctgaaaatgccatgcggtttctaactgggacctgcctagatgaatggattatctgcactgattgggatgtcggttttagagagggtcaacagtatggtcgcggtaaatctgggggtcaggtaagggatgagtttcgtgaagattttcattctggtag

SEQ ID NO: 31548 - DNA, 477 bp, Homo sapiens; identical to SEQ ID NO: 15016
  MAP TO Z99716.4; EXPRESSED IN FETAL LIVER, SIGNAL = 0.99; EXPRESSED IN BT474, SIGNAL =   1; EXPRESSED IN HELA, SIGNAL = 1.4; EXPRESSED IN HBL100, SIGNAL = 1.9; EXPRESSED IN BONE MARROW, SIGNAL = 0.96; SWISSPROT HIT: P55204, EVALUE 5.60e-01; EST_HUMAN HIT: BE270484.1, EVALUE 1.00e-44; NT HIT: AL160131.1, EVALUE 7.00e-45

SEQ ID NO: 31549 - DNA, 220 bp, Homo sapiens
  MAP TO AF111168.2; EXPRESSED IN BT474, SIGNAL = 1.1; EXPRESSED IN BONE MARROW, SIGNAL = 1.7; EXPRESSED IN FETAL LIVER, SIGNAL =   1; EXPRESSED IN LUNG, SIGNAL = 0.64; EXPRESSED IN HBL100, SIGNAL = 0.88; NT HIT: U15555.1, EVALUE 1.00e-121; EST_HUMAN HIT: AA043498.1, EVALUE 1.00e-109; SWISSPROT HIT: O15270, EVALUE 4.00e-29
cttcttgcctccaatatatcctccagaagcaccaaaactctttgtgaacgttcccatcataacatccacatcctcgggatccaggccaaagtactccaccacaccccggcctgtggggcccagggcgccaatgctgtgagcctcatccagatacaagtatgccttgtatttcttcttgagggcaatcacttcaggaagacgaacaatagatccctccatg

SEQ ID NO: 31550 - DNA, 126 bp, Homo sapiens
  MAP TO AC007041.3; EXPRESSED IN HELA, SIGNAL = 0.99; EXPRESSED IN BT474, SIGNAL = 1.5; EXPRESSED IN HBL100, SIGNAL = 0.89; EXPRESSED IN LUNG, SIGNAL = 0.83; EXPRESSED IN BONE MARROW, SIGNAL = 0.74; EXPRESSED IN FETAL LIVER, SIGNAL = 0.8; NT HIT: D87078.2, EVALUE 3.00e-65; EST_HUMAN HIT: AW405529.1, EVALUE 9.00e-60; SWISSPROT HIT: P57328, EVALUE 2.40e+00
gagcttgtgatgctgcttgctgactggctgtgttatttgccgcagctgcagcttgctgctgaaataagttggctggatacaccccccatggaacgccgtaatactgaggtggaaccactgctggac

SEQ ID NO: 31551 - DNA, 151 bp, Homo sapiens
  MAP TO AP000100.1; EXPRESSED IN FETAL LIVER, SIGNAL = 0.57; EXPRESSED IN LUNG, SIGNAL = 0.61; EXPRESSED IN HELA, SIGNAL = 0.76; NT HIT: AL161517.2, EVALUE 1.40e+00; EST_HUMAN HIT: BF666249.1, EVALUE 2.00e+00; SWISSPROT HIT: P39864, EVALUE 8.70e+00
ggtgatgatgtatgcaaggtccctggcagtgagccagcactcaacaggtggaagatatagtagcaataatagtaggttctttattgaatggctgctagcaatctcttctacaaccagaagtggatctgagctgagaatgatctggagcacc

SEQ ID NO: 31552 - DNA, 89 bp, Homo sapiens
  MAP TO AC011201.1; EXPRESSED IN FETAL LIVER, SIGNAL = 1.2; EXPRESSED IN HELA, SIGNAL = 1.8; NT HIT: AE001862.1, EVALUE 1.60e-01; EST_HUMAN HIT: AW179346.1, EVALUE 1.10e+00
taaaagctattgtcataggaaaagccaaatggaggctcctgaaactgccttcccatatcagggtagttaatcaaaagcagcatggtatc

SEQ ID NO: 31553 - DNA, 333 bp, Homo sapiens
  MAP TO AC004895.2; EXPRESSED IN LUNG, SIGNAL = 0.72; EXPRESSED IN HELA, SIGNAL = 1.1; EXPRESSED IN BT474, SIGNAL = 1.1; EXPRESSED IN BONE MARROW, SIGNAL = 0.76; EXPRESSED IN HBL100, SIGNAL = 0.84; EXPRESSED IN FETAL LIVER, SIGNAL = 0.66; SWISSPROT HIT: P51612, EVALUE 4.90e+00; NT HIT: gi7305322, EVALUE 2.10e-01; EST_HUMAN HIT: AW298129.1, EVALUE 0.00e+00
tccaggaagaccgtttgccttagcaaagggattttctgagtgcagggcaggctggccttggcagctggcaccatcaggcgctaggccgttttctttcgggtcactgtcgctgtctgcactattagcaccgtttagggtcatgggttcttgaagctcgtgcggagtggcctcctcatcttcggcatcttggccgggagagtgggagctcacaatcgtaccaatcccattctccttgcccagcccctttgactcctcgtcagagtcctcagaggactcggcgccatagggcaccagcacgctggagttcagcttggatttgccattcatcacggg

SEQ ID NO: 31554 - DNA, 372 bp, Homo sapiens
  MAP TO AC007543.4; EXPRESSED IN BT474, SIGNAL = 1.4; EXPRESSED IN FETAL LIVER, SIGNAL = 0.63; EXPRESSED IN PLACENTA, SIGNAL =   1; EXPRESSED IN LUNG, SIGNAL = 0.85; NT HIT: Y15249.1, EVALUE 3.60e+00; SWISSPROT HIT: P03967, EVALUE 4.00e-18; EST_HUMAN HIT: AI685950.1, EVALUE 0.00e+00
ggggaaggctttgtgctggtctacgacattactgaccgaggaagttttgaggaagtgctgccacttaagaacatcctagatgagatcaaaaagcccaagaatgtgactctcatcttggttggaaacaaagctgacttggaccactccaggcaggttagcacagaagaaggagagaagctggccacagaattggcttgtgctttttacgagtgctctgcctgcactggagaagggaacatcacagagatattctatgaattgtgtcgagaggtgcgtcgccggaggatggtgcagggcaagacgaggcgacgcagctccaccacgcatgtcaagcaagccattaacaagatgctcaccaaaatcagtagttag

SEQ ID NO: 31555 - DNA, 148 bp, Homo sapiens
  MAP TO AP000238.1; EXPRESSED IN FETAL LIVER, SIGNAL = 0.57; EXPRESSED IN LUNG, SIGNAL = 0.59; EXPRESSED IN HELA, SIGNAL = 0.62; EXPRESSED IN PLACENTA, SIGNAL = 0.61; EST_HUMAN HIT: H54926.1, EVALUE 3.20e-02; NT HIT: gi4504116, EVALUE 9.00e-54; SWISSPROT HIT: Q60934, EVALUE 1.00e-15
gccattgcctcgcaccgggcatcccagctgaccgtcagctccctgcagtgccatagacataagccatggcgcctcggacccagatttatgaacctgatcaaagaggcaagtgatgctccctcacagcccaggggcccttctgagcact

SEQ ID NO: 31556 - DNA, 101 bp, Homo sapiens
  MAP TO AF111168.2; EXPRESSED IN FETAL LIVER, SIGNAL = 0.61; EXPRESSED IN HBL100, SIGNAL = 0.78; EXPRESSED IN HELA, SIGNAL = 0.7; EXPRESSED IN BT474, SIGNAL = 1.1; EXPRESSED IN BONE MARROW, SIGNAL = 0.83; SWISSPROT HIT: P19711, EVALUE 3.20e+00; NT HIT: AF111168.2, EVALUE 2.00e-50
tgatatctttaaccttgttatttttcagctttctttgtagaatgttttcatttaactgcatctggaatagtttaattttaatgtgtacccaaatttctgag

SEQ ID NO: 31557 - DNA, 189 bp, Homo sapiens
  MAP TO AL049778.2; EXPRESSED IN FETAL LIVER, SIGNAL = 0.64; EXPRESSED IN LUNG, SIGNAL = 0.66; EXPRESSED IN PLACENTA, SIGNAL = 0.66; SWISSPROT HIT: P47990, EVALUE 7.40e-01; EST_HUMAN HIT: AI087960.1, EVALUE 6.60e-01
gcacagcatccccaaggaggctcactcacacggttacctgcacagcatccccaaggaggctcactctcaccgttacctgcacagcatccccagcgaggctcactctcacggttacctggggtacatttttaaactctgttttcactgcttatcattatgaccacaagttccagtgtttcagggtaggaa

SEQ ID NO: 31558 - DNA, 175 bp, Homo sapiens
  MAP TO AL049694.9; EXPRESSED IN FETAL LIVER, SIGNAL = 0.72; EXPRESSED IN LUNG, SIGNAL = 0.85; EXPRESSED IN HELA, SIGNAL = 1.5; EXPRESSED IN PLACENTA, SIGNAL = 0.9; EXPRESSED IN BONE MARROW, SIGNAL = 8.6; EXPRESSED IN HBL100, SIGNAL = 0.88; EST_HUMAN HIT: BF344101.1, EVALUE 6.00e-78; NT HIT: AE001151.1, EVALUE 3.40e-01; SWISSPROT HIT: P11586, EVALUE 6.00e-14
ccagcaactaagacgtattttccatctgcttgatcctttaacctttctagcacggacaaacgtactttggctttgcttttgccatagatttcaatttcatctgcaagcaatccaatctccttggcaaggacatccacagcttttggagtttgtcctcttgaaatctcaatgtcac

SEQ ID NO: 31559 - DNA, 106 bp, Homo sapiens
  MAP TO AC006975.2; EXPRESSED IN FETAL LIVER, SIGNAL = 0.64; EXPRESSED IN LUNG, SIGNAL = 0.59; EXPRESSED IN PLACENTA, SIGNAL = 0.73; EST_HUMAN HIT: H04028.1, EVALUE 5.30e+00; NT HIT: AL161515.2, EVALUE 9.00e-01
aagccctgcataccaattccctagctgctcacagtgccaaagtaatttcaacaccaaaagcccactcagccctggagaataagaaacagcgcatgcactcatggtt

SEQ ID NO: 31560 - DNA, 467 bp, Homo sapiens; identical to SEQ ID NO: 19175
  MAP TO AL035705.16; EXPRESSED IN BONE MARROW, SIGNAL = 1.1; EXPRESSED IN LUNG, SIGNAL = 1.2; EXPRESSED IN HBL100, SIGNAL = 1.4; EXPRESSED IN FETAL LIVER, SIGNAL = 0.97; EST_HUMAN HIT: AI732856.1, EVALUE 1.00e-111; SWISSPROT HIT: Q09137, EVALUE 5.00e-89; NT HIT: gi11427345, EVALUE 0.00e+00

SEQ ID NO: 31561 - DNA, 436 bp, Homo sapiens
  MAP TO Z99716.4; EXPRESSED IN FETAL LIVER, SIGNAL =   1; EXPRESSED IN PLACENTA, SIGNAL = 9.7; EXPRESSED IN BONE MARROW, SIGNAL = 0.9; EXPRESSED IN LUNG, SIGNAL = 3.2; EST_HUMAN HIT: AW169980.1, EVALUE 8.00e-11; SWISSPROT HIT: P18616, EVALUE 3.00e-13
ttattgtctatggagccccacctgcaggatatggagccccacctcccggatacggagccccacctgcaggatatggagcccaacccgtaggaaatgaaggcccgcctgtgggatacagagcctcacctgtgcgatatggagccccacctcttggatacggagccccacctgcaggatatggagccccacctctaggatatggagccccacctcttggatatggaaccccacctctcggatatggagccccacctctcggatatggagccccacctgcaggaaatgaaggcccgcctgcgggatacagagcctcacctgctggatcaggagccaggcctcaggaatctacagcagcccaggctcctgaaaacgaggcttctcttccctctgcctcctcttctcaggtccattcttaaccttctaagatgtaaacctt

SEQ ID NO: 31562 - DNA, 644 bp, Homo sapiens
  MAP TO AC007655.1; EXPRESSED IN LUNG, SIGNAL = 0.67; EXPRESSED IN PLACENTA, SIGNAL = 0.68; EXPRESSED IN FETAL LIVER, SIGNAL = 0.74; SWISSPROT HIT: P34670, EVALUE 3.80e-01; NT HIT: L39014.1, EVALUE 3.50e-01; EST_HUMAN HIT: AA456282.1, EVALUE 0.00e+00
tatatttttctgaggctgatttgaactccaccagatgcttctcataacttttgatggctgcttgaagctgtgttttttccactgctcccaggatggcacggacaatcatatctatgccaaggccaagaacagcaactccaatactaccaaggagagaagcaccaatttgagctaacacagtgaccaacttgttaattatgccagttgtgacatttgagcccacaagtttaacagcgactgcactggctgcagatgtagcttctcccaggatgaccgaaataaccttttgcactattgcaattttgtctgtttccttttccttaatatcctgaagttttctatagagggttggctctagcttatcttttagtgcttcatcaaccttctgcaattccttttggattttcataatggcttggatgatgaggtcacagttttctttgatggtcccatctcttttcatctcaatggaggccagcctgcaccccaagtgcatatttagaacctcagtcagcttattggtgacatcgaagctgtcagataagcaatcaagaagctgctggtgaagacgatttacttcttcccgcctttttgggttctctgggtaaaggaagtcactttgggccatatttccaatatgatcg

SEQ ID NO: 31563 - DNA, 202 bp, Homo sapiens
  MAP TO AC006441.13; EXPRESSED IN FETAL LIVER, SIGNAL =   1; EXPRESSED IN BT474, SIGNAL = 1.1; EXPRESSED IN HBL100, SIGNAL = 1.1; EXPRESSED IN HELA, SIGNAL = 0.98; SWISSPROT HIT: Q06572, EVALUE 2.10e+00
gatgctaatgaattcctgtgatctcactgtctcctattccagcacatgctcctctgcagaaagtgatggggctgccttgccagctggagcctgaaactgtgcccaggtagacagaactgcgagtcccaggacagcctgggaagtgttggctgcctggtaatggaagaatgtccaggatggaaaacaagaggctggatctgca

SEQ ID NO: 31564 - DNA, 450 bp, Homo sapiens
  MAP TO AL009179.1; EXPRESSED IN LUNG, SIGNAL = 1.1; EXPRESSED IN HELA, SIGNAL =   1; EXPRESSED IN HBL100, SIGNAL = 1.4; EXPRESSED IN FETAL LIVER, SIGNAL = 1.1; EST_HUMAN HIT: BE336654.1, EVALUE 0.00e+00; NT HIT: Z83735.1, EVALUE 0.00e+00; SWISSPROT HIT: P16106, EVALUE 3.00e-72
atggcgcgtacgaagcagactgctcgcaagtccaccggcggcaaggctccgcgcaagcagctggccaccaaggcggctcggaagagcgctccggccaccggcggtgtcaagaagccccatcgctatcggcctggtacagtggctctccgcgagattcgccgctaccagaagtccaccgagctgctgatcagaaagctgccttttcagcgtctggtgcgtgagatcgcgcaggacttcaagaccgacttgcgcttccagagctccgcggtgatggcgctgcaagaggcatgcgaggcctacctggtggggctctttgaggacaccaacctgtgcgccatccacgccaagcgggtgactatcatgcccaaggacatccagctcgcacgtcgtatccgcggcgagagggcttgagtctcaaggactcactgattacatacccaaaggctcttt

SEQ ID NO: 31565 - DNA, 453 bp, Homo sapiens; identical to SEQ ID NO: 15034
  MAP TO AL022145.1; EXPRESSED IN HELA, SIGNAL = 1.1; EXPRESSED IN FETAL LIVER, SIGNAL = 0.98; EXPRESSED IN LUNG, SIGNAL = 1.1; EXPRESSED IN HBL100, SIGNAL =   1; SWISSPROT HIT: P49175, EVALUE 1.50e+00; NT HIT: M66390.1, EVALUE 5.00e-09; EST_HUMAN HIT: AA988715.1, EVALUE 0.00e+00

SEQ ID NO: 31566 - DNA, 128 bp, Homo sapiens
  MAP TO AL121675.8; EXPRESSED IN HELA, SIGNAL =   1; EXPRESSED IN FETAL LIVER, SIGNAL = 1.3; EXPRESSED IN BONE MARROW, SIGNAL =   1; NT HIT: AF169793.1, EVALUE 2.40e-01; SWISSPROT HIT: Q49157, EVALUE 1.80e+00
acagaagacaaaatggagttctccaaacttgccgaaggcttcacagctggccattagatacccgcacccgacctccttcccctcgttgtcctgtgaggaaacgatgaggagacttctcagctccactc

SEQ ID NO: 31567 - DNA, 160 bp, Homo sapiens
  MAP TO AC005227.2; EXPRESSED IN FETAL LIVER, SIGNAL =   5; EXPRESSED IN BONE MARROW, SIGNAL = 0.97; EXPRESSED IN LUNG, SIGNAL = 3.5; SWISSPROT HIT: P21101, EVALUE 1.70e+00; EST_HUMAN HIT: AA508021.1, EVALUE 8.50e+00; NT HIT: AL163285.2, EVALUE 5.00e-03
tgtttctctggagaaccctaacacacatgttaaatggcacatgcctgcctccatttttgtgcccaaggacctaattaataactatatttctgtacataaaacaaaggaaaatggaaatgtttctgtagaatttaccaggagcctcaacattgttgaagtg

SEQ ID NO: 31568 - DNA, 1098 bp, Homo sapiens
  MAP TO AL109823.11; EXPRESSED IN FETAL LIVER, SIGNAL = 0.93; EXPRESSED IN BT474, SIGNAL = 1.1; EXPRESSED IN HELA, SIGNAL = 2.5; EXPRESSED IN PLACENTA, SIGNAL = 1.1; EXPRESSED IN HBL100, SIGNAL = 1.9; NT HIT: AB007866.2, EVALUE 0.00e+00; SWISSPROT HIT: Q9ZDE6, EVALUE 1.60e+00; EST_HUMAN HIT: AU125474.1, EVALUE 0.00e+00
aaacgaggctaagcaaactaggagactgagtcctgtcccccacacatcagcattaaaaagggctctcaatgtacctaatgctgccatcagagcatgcagaacgctgacaaaggaagcagctctcttatcgtaaaattggtccagggtggccaagacatcttgaaccacatctgccaccaaaggaagcaggttagcatctgagttccgcagcatgacttccaggacctttggggtatgaggatgcagagccagatgacgcagatttaaagagatcccattcactaaatagtctgaattttgattgatcaggtgctgcagggagtcgtagccacaagcacggcaaacgtccatcatggtgctggtagccacctgactaatgagtagggtttggtctccagccttctccagtactggataaagggctgacatcaagagcaaacagaagtcttttcctagtgcatatgcaaactggccaattccttccaactgaatgcatatttgccagatgttactgttcatggagcaaatagtgggacttggctttgagaaggctagaaaagatgtaacttggcaggtgtgttcaccagacgtgatggcttggaggcctgggtgctccatcatcagctcctctcccatttcctcagtttcaagacaggtaaccaaataccaattttcttgacttgtgtattcttcaagtatagatgtcacaatctctctcagttcttctgggtttgttttaatatgtttttcgtgaagatcctcaacctccagcccagcagcccctgtaaccagttcattaaggatcatggcagcttgcttccggtaaaccacagattgatggtaaagttccataaagtgatccacaagcaaataaagattcccataataaccaagtagctgacaaacctgcctcaagagcatgaagattctctcatcagtgaagaagcggaaatatctcctctggatgcggttccaaggctgtgtggctgaggtctttggagaagcattcagatcatcagagttccaacgccgttcctcaacaatcttgatgtcagccacgtctagctctagaacttggatgagtgctttggaaagccg

SEQ ID NO: 31569 - DNA, 75 bp, Homo sapiens
  MAP TO AP000402.1; EXPRESSED IN FETAL LIVER, SIGNAL = 5.6; EXPRESSED IN BT474, SIGNAL = 1.2; NT HIT: AE001785.1, EVALUE 5.00e-01; EST_HUMAN HIT: BE967983.1, EVALUE 8.70e-01
tttgaaacccttcccacttactctgtactacagttaaagagttgggcacagtctattctgtatcttgagaggagg

SEQ ID NO: 31570 - DNA, 1336 bp, Homo sapiens
  MAP TO AF124731.2; EXPRESSED IN BT474, SIGNAL = 1.6; EXPRESSED IN HBL100, SIGNAL =   1; EXPRESSED IN FETAL LIVER, SIGNAL = 1.6; EXPRESSED IN LUNG, SIGNAL = 1.3; EXPRESSED IN HELA, SIGNAL = 1.7; EXPRESSED IN PLACENTA, SIGNAL = 0.74; EXPRESSED IN BONE MARROW, SIGNAL = 0.72; EST_HUMAN HIT: AU135531.1, EVALUE 0.00e+00; NT HIT: gi6680763, EVALUE 2.00e-93; SWISSPROT HIT: O14867, EVALUE 0.00e+00
gtgacagttaaaggatttgaacctttaattcagtttgcctacactgctaaactgattttaagtaaagagaatgtggatgaagtgtgcaaatgtgtggagtttttaagtgtacataatattgaggaatcctgctttcagtttctgaaatttaagtttttggactccactgcagaccagcaagaatgcccaagaaaaaaatgcttttcatcacactgtcagaaaacagaccttaaactttcacttttggaccagagggatctagaaactgatgaagtggaggaatttctggaaaataaaaatgttcagactcctcagtgtaaactccgcaggtatcaaggaaatgcaaaagcctcacctcctctacaagacagtgccagtcagacatatgagtccatgtgcttagagaaggatgctgctctggccttgccttctttatgccccaaatacagaaaattccaaaaagcatttggaactgacagagtccgtactggggaatctagtgtcaaagacattcatgcttctgttcagccaaatgaaaggtctgaaaatgaatgcctgggaggagtcccggagtgtagagatttgcaggtgatgttaaaatgtgacgaaagtaaattagcaatggaacctgaagaaacgaagaaagatcctgcttctcagtgcccaactgaaaaatcagaagtgactcctttcccccacaattcttccatagaccctcatggactttattctttgtctcttttacacacatatgaccaatatggtgacttgaattttgctggtatgcaaaacacaacagtgttaacagaaaagcctttgtcaggtacagacgtccaagaaaaaacatttggtgaaagtcaggatttacctttgaaatccgacttgggcaccagggaagatagtagtgttgcatctagtgataggagtagtgtggagcgagaagtggcagaacacctagcaaaaggcttctggagtgacatttgcagcacggacactccttgccaaatgcagttatcacctgctgtggccaaagatggctcagaacagatctcacagaaacggtctgagtgtccgtggttaggtatcaggattagtgagagcccagaaccaggtcaaaggactttcacaacattaagttctgtcaactgcccttttataagtactctgagtactgaaggctgttcaagcaatttggaaattggaaacgatgattatgtttcagaaccccagcaagaaccttgcccatatgcttgtgtcattagcttgggagacgactctgagacggacaccgaaggagacagtgaatcctgttcagccagagaacaagaatgtgagg

SEQ ID NO: 31571 - DNA, 145 bp, Homo sapiens
  MAP TO AC005534.2; EXPRESSED IN FETAL LIVER, SIGNAL = 0.7; EXPRESSED IN HBL100, SIGNAL = 7.3; EXPRESSED IN BT474, SIGNAL = 0.6; EST_HUMAN HIT: AA400700.1, EVALUE 2.00e-76; SWISSPROT HIT: P34535, EVALUE 1.00e-04; NT HIT: gi11967996, EVALUE 2.00e-76
ctacttggcgactttggaaggtttaattggctgggaaatttctatattgtattatcctacaatttgctttttgctattgtgacaacattgtgtctggtccgaaaattcacctctgcagttcgagaagaacttttcaaggccctag

SEQ ID NO: 31572 - DNA, 149 bp, Homo sapiens
  MAP TO AC007277.2; EXPRESSED IN FETAL LIVER, SIGNAL = 0.59; EXPRESSED IN BONE MARROW, SIGNAL = 0.72; EXPRESSED IN LUNG, SIGNAL = 0.63; NT HIT: gi11466252, EVALUE 5.30e+00
tgctgaagaacagggagaaggatttgggtcaaactaaagagataaataagattatcaaaccactgaattcaaggcagcatccgaaattgtcaaacagttttcagtatgagctggtgacagttggaatcacctggcttctctctggcaaa

SEQ ID NO: 31573 - DNA, 84 bp, Homo sapiens
  MAP TO AC007860.6; EXPRESSED IN HELA, SIGNAL = 0.63; EXPRESSED IN BONE MARROW, SIGNAL = 0.66; EXPRESSED IN FETAL LIVER, SIGNAL = 0.58; EXPRESSED IN LUNG, SIGNAL = 0.8; EXPRESSED IN PLACENTA, SIGNAL = 0.77; NT HIT: M97882.1, EVALUE 1.50e-01; EST_HUMAN HIT: AW207652.1, EVALUE 6.90e-01
ggaactcacagccagtacgagataagtgtgtgatgaaagccgccagccattttgactgttggtataacgtgtgtgtattgaaag

SEQ ID NO: 31574 - DNA, 328 bp, Homo sapiens
  MAP TO AC005883.6; EXPRESSED IN PLACENTA, SIGNAL = 0.59; EXPRESSED IN BT474, SIGNAL = 0.6; EXPRESSED IN HBL100, SIGNAL =   1; EXPRESSED IN LUNG, SIGNAL = 0.65; EXPRESSED IN HELA, SIGNAL = 0.91; EXPRESSED IN FETAL LIVER, SIGNAL = 0.65; NT HIT: AL163247.2, EVALUE 2.00e-28; EST_HUMAN HIT: W01596.1, EVALUE 9.00e-41; SWISSPROT HIT: O84666, EVALUE 9.40e-01
ggatgccatatatgctgttgccaatacttggaatacttggaacacagtgactaaagacacagttgagcacgcctggcacaagctctggcctgcaactacattcagtgatgatgatgaacaaggtggtgactttgaaggattctgtatgtcaagtgaggaaaacatgatgtctaacctccttacatatgcaaaaaacataccttcggagtccatcagtaagccggaagaaatggatatcaaagaagtttttaacattaataataaggttacagttgttcattcattgaccgatggtgaaatagcaaaagtgattgtaaatcaaggtgat

SEQ ID NO: 31575 - DNA, 108 bp, Homo sapiens
  MAP TO AC007684.2; EXPRESSED IN LUNG, SIGNAL = 0.65; EXPRESSED IN BT474, SIGNAL = 0.72; EXPRESSED IN FETAL LIVER, SIGNAL = 0.62; EST_HUMAN HIT: W27394.1, EVALUE 3.00e-54; SWISSPROT HIT: P46549, EVALUE 4.00e-04; NT HIT: gi11430481, EVALUE 2.00e-54
ggaggctgaagctctgcaagttctatggcagtgattcccactgcccagagatcacagagttgattgtaaccccccttcctctcaacagctgcaacttctggagccatc

SEQ ID NO: 31576 - DNA, 112 bp, Homo sapiens
  MAP TO AC007006.3; EXPRESSED IN BONE MARROW, SIGNAL = 0.75; EXPRESSED IN HELA, SIGNAL = 0.61; EXPRESSED IN PLACENTA, SIGNAL = 0.68; EXPRESSED IN FETAL LIVER, SIGNAL = 1.1; EXPRESSED IN LUNG, SIGNAL = 0.6; NT HIT: AB014574.1, EVALUE 8.20e-01; SWISSPROT HIT: P29572, EVALUE 2.30e+00
ctcagtgaaaggatttcagcaaatggatggccttgggactcaattcctacctcacagtacaatttctggcattatcagcctaagaaaggccagtccgtctttgcagaagctg

SEQ ID NO: 31577 - DNA, 80 bp, Homo sapiens
  MAP TO AC007402.3; EXPRESSED IN FETAL LIVER, SIGNAL = 0.62; EXPRESSED IN LUNG, SIGNAL = 0.59; EST_HUMAN HIT: AW277245.1, EVALUE 9.50e-01
cagctgcacaatctctgaacgccttctatttgggaaaatttcaaggaagacagacagggttttaccttccacagtgaaaa

SEQ ID NO: 31578 - DNA, 348 bp, Homo sapiens
  MAP TO AC004916.2; EXPRESSED IN FETAL LIVER, SIGNAL = 0.75; EXPRESSED IN PLACENTA, SIGNAL = 0.98; EXPRESSED IN BT474, SIGNAL = 1.1; EXPRESSED IN BONE MARROW, SIGNAL = 0.64; EST_HUMAN HIT: AW170552.1, EVALUE 1.00e-03; NT HIT: gi9629818, EVALUE 8.50e-01; SWISSPROT HIT: P10569, EVALUE 1.90e+00
gccgggcagggcgcgcccgagacccgcgccgggagcggcggccggggccccgagtggccgggaggggctggcgggctggcgcgcgcggctcgggtttcggcccgcccccggcgccggcgtgatcccctcccgggcgcggggcggggccgggcccagctggccgcgctccgggcgctataagagggcggcggccgcggcgcgccctgcgcggagctgggagcgcgatggtcggccgccgaggcgcggcaagatgctggatgggtccccgctggcgcgctggctggccgcggccttcgggctgacgctgctgctcgccgcgctgcgcccttcggccgcctacttcgggta

SEQ ID NO: 31579 - DNA, 211 bp, Homo sapiens
  MAP TO AC009958.1; EXPRESSED IN BONE MARROW, SIGNAL = 0.9; EXPRESSED IN FETAL LIVER, SIGNAL = 0.89; NT HIT: AJ223464.1, EVALUE 5.00e-07; EST_HUMAN HIT: BF128587.1, EVALUE 3.00e-03; SWISSPROT HIT: P01606, EVALUE 7.00e-08
agagaagttgaaaggccaccatcagctgagaagctgtgacgatatttgtagctgcctgaattggagccaacaaaaaccaggtcaggttctgaatcttattatttatagtaattatgacctgcaccttgctgtccttgccaggattagtgacagtgggtggactgatttcatcccctccatcagcagcctggaggctgaagatgcagcgtat

SEQ ID NO: 31580 - DNA, 155 bp, Homo sapiens
  MAP TO AL008633.1; EXPRESSED IN HBL100, SIGNAL = 0.98; EXPRESSED IN HELA, SIGNAL = 1.1; EXPRESSED IN BT474, SIGNAL = 0.92; EXPRESSED IN FETAL LIVER, SIGNAL =   1; EXPRESSED IN BONE MARROW, SIGNAL =   1; EXPRESSED IN PLACENTA, SIGNAL = 1.2; SWISSPROT HIT: O17580, EVALUE 2.90e+00; EST_HUMAN HIT: T87578.1, EVALUE 1.40e+00; NT HIT: AJ004799.1, EVALUE 3.50e-01
tttccttgacaacaggaatgcaggtgtcaaagcaagccagctttgaagagccacaacagtagcagggatgctgcccttgtctctacattgcttttggcttcttgtgtttgttcccactagttgttcaaacgcacagtgtgtatgtgaccgatcaa

SEQ ID NO: 31581 - DNA, 195 bp, Homo sapiens
  MAP TO AL031599.1; EXPRESSED IN FETAL LIVER, SIGNAL = 0.94; EXPRESSED IN BONE MARROW, SIGNAL = 1.6; EXPRESSED IN PLACENTA, SIGNAL = 0.9; SWISSPROT HIT: P52115, EVALUE 1.60e+00; NT HIT: AL163213.2, EVALUE 4.00e-07; EST_HUMAN HIT: AI263479.1, EVALUE 2.00e-09
ctgtgtaccttataaagaacggaaatttatttctcatagtcttgggatctggaaaacccaagattaaggtgctggcatctgttgtgggtcttcttgctacatcctcacttgcagaagagagtacactcacccctgtaagtcctttttttttttttctttttagaaaatagagatggggctagctgtgttgaccag

SEQ ID NO: 31582 - DNA, 146 bp, Homo sapiens
  MAP TO AL023656.8; EXPRESSED IN BONE MARROW, SIGNAL =   1; EXPRESSED IN HBL100, SIGNAL = 0.88; EXPRESSED IN FETAL LIVER, SIGNAL = 0.65; EXPRESSED IN BT474, SIGNAL = 0.79; EXPRESSED IN PLACENTA, SIGNAL = 0.72; EXPRESSED IN HELA, SIGNAL = 0.89; NT HIT: Y08501.1, EVALUE 5.20e+00; SWISSPROT HIT: P18563, EVALUE 5.10e+00
ctgcagctgcatccgcaagttgtgagaaaggcactacctgtgacattctctgactcttcaaaaatgaaaagaaatgtctccacagtgcactggcaactgcagcaaggtggcgctctttagccgataatgaagactgtacaaatagg

SEQ ID NO: 31583 - DNA, 172 bp, Homo sapiens
  MAP TO AP000067.1; EXPRESSED IN BT474, SIGNAL = 0.92; EXPRESSED IN FETAL LIVER, SIGNAL = 1.2; EST_HUMAN HIT: AA012815.1, EVALUE 4.00e-01; NT HIT: U57833.1, EVALUE 4.00e-01
gcttaagcatctataagtcttctccagatgctagcacaatgtagatgcctcatgaaacatttgctgatgatgatgatgatgatgatgacgatgaaggctgtggtctggaaggggactctgtttttgataagtttaattcaatccagcaaatattgaacaaatgctcattttt

SEQ ID NO: 31584 - DNA, 198 bp, Homo sapiens
  MAP TO AL117340.3; EXPRESSED IN FETAL LIVER, SIGNAL = 2.2; SWISSPROT HIT: P08548, EVALUE 3.00e-11; NT HIT: AF240786.1, EVALUE 1.00e-10; EST_HUMAN HIT: AA324394.1, EVALUE 1.00e-13
ataaataatccttttaatatgctgccaaattcaatttgctaatatcttgttgaggatttttgcatcaatgttcataaggggtattgttctgtggttttgttttcttgtagtgcctttttctgtcattggtgtcagggtaatgctggtgccagaatgagttatgaagtgttttctcctcttcaattttctggaagagtt

SEQ ID NO: 31585 - DNA, 391 bp, Homo sapiens
  MAP TO AC005037.2; EXPRESSED IN BT474, SIGNAL = 0.86; EXPRESSED IN HELA, SIGNAL = 0.68; EXPRESSED IN PLACENTA, SIGNAL = 0.66; EXPRESSED IN BONE MARROW, SIGNAL = 1.3; EXPRESSED IN HBL100, SIGNAL = 1.9; EXPRESSED IN FETAL LIVER, SIGNAL = 0.8; EXPRESSED IN LUNG, SIGNAL = 0.78; NT HIT: AB014599.1, EVALUE 5.00e-33; SWISSPROT HIT: Q05319, EVALUE 2.10e+00; EST_HUMAN HIT: BE563150.1, EVALUE 2.00e-15
tttcagcaacttctccagctgggccagtgctggcagctggccttctccagcagggagacctccgcggtgagcgcctggactttggccttgtataggccctctcctcagcgtgctgggtctcgcgggcctcatgcctgctgcgcagtgccctgagctgctcttggagctcgccagcctcggcaatgccacagccacatggtacctgcaggccaggatcttgcctgttgatgtccacctcgtagtagtcaccatccgtgatgttgcagtccctctcgttgtcctgggctgtctgccacaccttgcaggttcaaaatgggttatagcagtggagacaacttgtaatgttgacaacgcatttggcccaggaactgctaacaaacatacagtgcag

SEQ ID NO: 31586 - DNA, 146 bp, Homo sapiens
  MAP TO AL096827.3; EXPRESSED IN PLACENTA, SIGNAL = 0.65; EXPRESSED IN FETAL LIVER, SIGNAL = 0.57; EXPRESSED IN LUNG, SIGNAL = 0.66; NT HIT: AJ002125.1, EVALUE 5.00e-03; EST_HUMAN HIT: AA928109.1, EVALUE 7.70e+00; SWISSPROT HIT: P24177, EVALUE 2.30e+00
aaggtgagaaaatctgtagaaggaacaggtttgtaaataaataccaggagctcagatttgggcatgttagaatttagtgcatactggacatccaagtggaaaacctgagaaaataattgaatgtgagaggaattcacaataggggt

SEQ ID NO: 31587 - DNA, 112 bp, Homo sapiens
  MAP TO AL050327.6; EXPRESSED IN HELA, SIGNAL = 0.99; EXPRESSED IN PLACENTA, SIGNAL = 0.7; EXPRESSED IN FETAL LIVER, SIGNAL = 0.61; EXPRESSED IN LUNG, SIGNAL = 0.69; NT HIT: Z72584.1, EVALUE 8.20e-01; SWISSPROT HIT: P41357, EVALUE 9.10e+00
ttgaagaatccaaattttatttcttgccatcgatccatgtggttaatgggcctgaggaggaatgatgtcatctgtccttctaacttagcacaagaggcaggaggagaaattg

SEQ ID NO: 31588 - DNA, 128 bp, Homo sapiens
  MAP TO AL050337.6; EXPRESSED IN FETAL LIVER, SIGNAL = 0.67; EXPRESSED IN LUNG, SIGNAL = 0.77; EST_HUMAN HIT: AV714177.1, EVALUE 1.00e-53; SWISSPROT HIT: O28438, EVALUE 1.80e+00
ttcatagtaatcttctatagatacatttttttccttttggtatctatatggtaaatttggagcatggagaattaccaacaaagagccattgacttgggttatattcatgactggaggatctatttttg

SEQ ID NO: 31589 - DNA, 209 bp, Homo sapiens
  MAP TO AC011236.2; EXPRESSED IN BONE MARROW, SIGNAL = 0.93; EXPRESSED IN HBL100, SIGNAL = 2.5; EXPRESSED IN HELA, SIGNAL = 2.2; EXPRESSED IN PLACENTA, SIGNAL = 1.1; EXPRESSED IN BT474, SIGNAL = 2.3; EXPRESSED IN FETAL LIVER, SIGNAL = 1.1; NT HIT: M15918.1, EVALUE 1.00e-110; SWISSPROT HIT: P08578, EVALUE 2.00e-14; EST_HUMAN HIT: AV743769.1, EVALUE 5.00e-82
atacagccttctgtccgcatattcacttgctcatagagccacacctgaatctgcgatctattttgtaagtatctgaagatgaggttgatgggcgcatcttcaccttctgcactttctggccctggccatggtatgccatggtggaatttcacaaagagcacacccgcacgctgcctctgagagcaacttccagaatcaagacaccgtct

SEQ ID NO: 31590 - DNA, 949 bp, Homo sapiens
  MAP TO AC009974.3; EXPRESSED IN LUNG, SIGNAL = 1.2; EXPRESSED IN BT474, SIGNAL = 1.2; EXPRESSED IN FETAL LIVER, SIGNAL = 1.1; EST_HUMAN HIT: BF306690.1, EVALUE 0.00e+00; SWISSPROT HIT: Q11053, EVALUE 3.10e+00; NT HIT: gi11430157, EVALUE 0.00e+00
aaccatacctctgcttggcagcggctggggaaaacccttcagggaagagcctggcctctgccatctcagggaagatcccatctccactctcttcctcctataagcccatgctgaataataattccttcatgtggccaaatagcacgccagtgcctttattgcagaccacacagggcctgaagccagtatcgccacccaagatccagcctgtctcctggcatcattcagggggtactggagactgtgcaccgcagcctgttgaccataaggtgcccaaaagcattggcactgtcccagctgatgccagtgcccatatcgccttgtctaccgctagctcccacgacacatccaccaccagtgttgcctcttcctggtataaccggaataacttagccatgagggcagagccactttcctgtgctctggatgacagctctgattcccaggatccaactaaggagattcggttcactgaggccgtgaggaaattgaccgcaagaggctttgagaagatgccgaggcaaggctgccagcttgaacagtctagtttcctgaaccccagcttccagtggaatgtcctcaacaggagcaggcggtggaaacctcctgcggtaaatcagcagtttcctcaggaggatgctggatcggtcaggcgggtcctccctggtgcctcagataccttggggttggacaatacagtcttctgtaccaagcgtatcagcattcacctccttgcctcacatgccagtgggctcaatcacaaccctgcctgtgaatctgtaattgactcctcagcatttggagaaggcaaagctccaggtcccccttttcctcaaactcttggcatagccaacgtggccacccgcctctcttccatccagctgggccagtctgagaaggagagacctgaggaggccagggagctggactcatctgatagggatattag

SEQ ID NO: 31591 - DNA, 171 bp, Homo sapiens
  MAP TO AC011502.1; EXPRESSED IN HELA, SIGNAL = 0.94; EXPRESSED IN FETAL LIVER, SIGNAL = 0.96; NT HIT: AL163248.2, EVALUE 1.00e-04; EST_HUMAN HIT: AA909157.1, EVALUE 8.00e-92; SWISSPROT HIT: Q04574, EVALUE 5.70e-01
attgcccaagtagtatacatcatacctaaccagattttcaatgcttgtctcccttccttcctccttctctttagaattcccagtgtttcttgttttcatctttgtttccatgtgcacccaatttttagcgtccatgtatgagtgagaacatgtggcatttgtttttctgat

SEQ ID NO: 31592 - DNA, 109 bp, Homo sapiens
  MAP TO AL022100.13; EXPRESSED IN FETAL LIVER, SIGNAL = 1.9; EXPRESSED IN HELA, SIGNAL = 5.3; EST_HUMAN HIT: AI766727.1, EVALUE 4.00e-03; NT HIT: U95991.1, EVALUE 3.70e+00; SWISSPROT HIT: P47104, EVALUE 6.90e+00
gcatctttctccttcactggctgaagctccccaaggacaggccctgtgtctccttcatctttgtatttctggcaacttacacaaatgcccattacattgtagaggctca

SEQ ID NO: 31593 - DNA, 79 bp, Homo sapiens
  MAP TO AC008278.1; EXPRESSED IN PLACENTA, SIGNAL = 0.6; EXPRESSED IN BT474, SIGNAL = 0.68; EXPRESSED IN HBL100, SIGNAL = 0.78; EXPRESSED IN FETAL LIVER, SIGNAL = 0.59; EXPRESSED IN HELA, SIGNAL =   1; SWISSPROT HIT: Q92499, EVALUE 4.00e-08; NT HIT: gi11430378, EVALUE 2.00e-37; EST_HUMAN HIT: AW247473.1, EVALUE 4.00e-37
atctaacttgagataagttcagctttccagttgacaccaagtcatctagtcttcccggagtacctacaactatatctac

SEQ ID NO: 31594 - DNA, 151 bp, Homo sapiens
  MAP TO AL022725.8; EXPRESSED IN BONE MARROW, SIGNAL = 0.9; EXPRESSED IN PLACENTA, SIGNAL = 0.63; EXPRESSED IN HBL100, SIGNAL = 0.99; EXPRESSED IN FETAL LIVER, SIGNAL = 0.67; EXPRESSED IN LUNG, SIGNAL = 0.68; EXPRESSED IN HELA, SIGNAL = 0.69; NT HIT: AF158635.1, EVALUE 2.90e-01; EST_HUMAN HIT: AA009541.1, EVALUE 3.00e-48; SWISSPROT HIT: P53950, EVALUE 6.70e+00
atggaagggccaggggagaatttcccagagcagtggagtggacggcaagaatgtacgtcaacttgtttgggttaaatttctcactctccagtgggtcatcatcattagcattggaaacctcatctggggcagtaagagctggaatactagt

SEQ ID NO: 31595 - DNA, 261 bp, Homo sapiens
  MAP TO AJ010770.1; EXPRESSED IN BT474, SIGNAL = 1.1; EXPRESSED IN FETAL LIVER, SIGNAL = 0.96; EXPRESSED IN LUNG, SIGNAL =   1; EXPRESSED IN HELA, SIGNAL = 0.96; NT HIT: AJ010770.1, EVALUE 0.00e+00; EST_HUMAN HIT: AW293361.1, EVALUE 7.00e-07; SWISSPROT HIT: P48535, EVALUE 2.20e-01
gatgacatggagaaactgggacttgccataaaggaatctgatgccatgtctactcaagaccaacatgtgctatttgggaaatttgctcaaataatacaggaaaaagaggtagaaattgaccaattaaatgaacaagttacgaaactccagcagcaacttaaaattacaacagataacaaggtatactcatttaaaattgattatgaaattaatatgaaccagagttttaaagggcaaaatggttataatgttgctccccat

SEQ ID NO: 31596 - DNA, 169 bp, Homo sapiens
  MAP TO AC005064.2; EXPRESSED IN FETAL LIVER, SIGNAL = 0.67; NT HIT: AF230376.1, EVALUE 3.00e-20; EST_HUMAN HIT: AW179252.1, EVALUE 4.00e-01; SWISSPROT HIT: O43511, EVALUE 5.00e-06
gtccttttgctgttattagcctgatgattggtggtgtagctgttcgattagtaccagatgatatagtcattccaggaggagtaaatgcaaccaatggcacagaggccagagatgccttgagagtgaaagtcgccatgtctgtgaccttactttcaggaatcattcaggt

SEQ ID NO: 31597 - DNA, 244 bp, Homo sapiens
  MAP TO Z94801.1; EXPRESSED IN BT474, SIGNAL = 1.3; EXPRESSED IN FETAL LIVER, SIGNAL = 1.1; EXPRESSED IN HELA, SIGNAL =   1; EXPRESSED IN LUNG, SIGNAL =   5; EXPRESSED IN BONE MARROW, SIGNAL = 1.2; EST_HUMAN HIT: BF507510.1, EVALUE 8.70e-01; NT HIT: X82338.1, EVALUE 0.00e+00; SWISSPROT HIT: Q04656, EVALUE 1.00e-30
attgctatttgcaagggagactcgtatggattttacacctggcttttttgatatgacaccctcaatagactgcacacaggaattacaagtcatgccatcaatgtttatcacagtttcttgtgtcagaggctggctaactacattcaaaggaatcttctgaagagatgagctggagggagagtttgaggtactctcaacttcacttgtgatactaactctatatagccccggtgatacagcctct

SEQ ID NO: 31598 - DNA, 174 bp, Homo sapiens
  MAP TO AC007052.4; EXPRESSED IN LUNG, SIGNAL = 0.94; EXPRESSED IN BT474, SIGNAL = 1.1; EXPRESSED IN FETAL LIVER, SIGNAL = 0.94; NT HIT: gi4759273, EVALUE 4.00e-72; EST_HUMAN HIT: BF668347.1, EVALUE 5.00e-63; SWISSPROT HIT: P08629, EVALUE 1.90e-01
atagccttttggaatatctgtgtcctcattgcttccagggtcattttctaagtgctgcttgattttttcttctaatcccacagcatctgctccttgatattgatcaattctcactttgtttcgaaaaaacaaaaatgtaggtgttgctgatatattgttggtggcagctgttcc

SEQ ID NO: 31599 - DNA, 156 bp, Homo sapiens
  MAP TO AJ010598.1; EXPRESSED IN HELA, SIGNAL = 0.69; EXPRESSED IN FETAL LIVER, SIGNAL = 0.6; EXPRESSED IN PLACENTA, SIGNAL = 0.61; NT HIT: AL163210.2, EVALUE 5.00e-83; SWISSPROT HIT: Q9UHP3, EVALUE 2.00e-24; EST_HUMAN HIT: AA526219.1, EVALUE 9.00e-83
aggatcgagaagtaaacaatggtttgattatcatgaatgagtttattgtcccatttttgccattattactggtggatgaaatggaagaaaaggatatactagctgtagaagatatgagaaatcgatggtgttcctaccttggtcaagaaatggaac

SEQ ID NO: 31600 - DNA, 333 bp, Homo sapiens
  MAP TO AL009031.1; EXPRESSED IN FETAL LIVER, SIGNAL = 6.1; EST_HUMAN HIT: AW612517.1, EVALUE 0.00e+00; NT HIT: gi4506792, EVALUE 0.00e+00; SWISSPROT HIT: P54253, EVALUE 7.00e-61
gtcagcgttgaagttttggtagagtatcctttttttgtgtttggacagggctggtcatcctgctgtccggagagaaccagccagctctttgatttgccgtgttccaaactctcagttggggatgtctgcatctcgcttaccctcaagaacctgaagaacggctctgttaaaaagggccagcccgtggatcccgccagcgtcctgctgaagcactcaaaggccgacggcctggcgggcagcagacacaggtatgccgagcaggaaaacggaatcaaccaggggagtgcccagatgctctctgagaatggcgaactgaagtttccagagaaaatg

SEQ ID NO: 31601 - DNA, 540 bp, Homo sapiens
  MAP TO AC007382.2; EXPRESSED IN FETAL LIVER, SIGNAL = 1.5; EXPRESSED IN HELA, SIGNAL = 0.72; NT HIT: AF069553.1, EVALUE 2.90e-01; SWISSPROT HIT: O43405, EVALUE 8.00e-50; EST_HUMAN HIT: BF037138.1, EVALUE 0.00e+00
acccttcagatgggcagccatggctgggatccggacgtcgtcgtaggacctcccgtcggtgatgaggatcattaacttcctcttgttgggcttggacttcttgaagagctgctccagggcgaagttgatggcagcccccgtgctggtgccaccactccagtagcccaccctcttgatggcgttgaggatgtcaggcttgctgctgtacttgtcgaacccaaactccagccgctgttcgtaggtgtactgcacggccccgatgcgcgtgtccgtgtcggaaatctcaaactctttggtgaggttggtcacaaactggaggacggtgcggaagttgcccgtccccacactgctggagccgtcgatgacgaagccaatgtcagccgagttcaagcaggtcttgctgcaggccaggcggtcagtgtcgcagacccgcttcaccagaggctgcagggtcttgtggaggccaaaccagctctgcacgtggagcgagtagaagccgtttgttctgcacacggcctagaagacagaggggagggaccc

SEQ ID NO: 31602 - DNA, 201 bp, Homo sapiens
  MAP TO AC006474.3; EXPRESSED IN FETAL LIVER, SIGNAL = 0.64; EXPRESSED IN LUNG, SIGNAL = 0.68; EXPRESSED IN PLACENTA, SIGNAL = 0.78; EXPRESSED IN BONE MARROW, SIGNAL = 0.7; NT HIT: AL163201.2, EVALUE 5.00e-90; EST_HUMAN HIT: AI432126.1, EVALUE 8.00e-03; SWISSPROT HIT: P38717, EVALUE 6.30e+00
cttaggcctgtcactgtgaatgctatcagcaagcctttgcatgatttttctctttcccactcctacattcttggtgacgacaacaactatagcctgatccagatatttcgaagtgcaacaaattgtattcaatatagagtaagtataaggaagaactctctcattaactggtctcgcggtgattacaataatagctaacat

SEQ ID NO: 31603 - DNA, 178 bp, Homo sapiens
  MAP TO AL031119.1; EXPRESSED IN PLACENTA, SIGNAL = 0.95; EXPRESSED IN BT474, SIGNAL = 0.98; EXPRESSED IN FETAL LIVER, SIGNAL = 0.96; EXPRESSED IN HELA, SIGNAL = 2.3; EXPRESSED IN HBL100, SIGNAL = 2.2; EST_HUMAN HIT: AU119466.1, EVALUE 2.00e-28; NT HIT: U09410.1, EVALUE 1.00e-28; SWISSPROT HIT: P52739, EVALUE 7.00e-12
gataacttatttggacctgctctggaagcacactcgtgtgaacaaagtacctggctgtcctggagcagatctggatggacgtgttccacagtcacttgtgctgaatccacagtcacttgtgctgaatccacctggacctgaagcaatggtagcacacgcaccttcccaatttgttata

SEQ ID NO: 31604 - DNA, 164 bp, Homo sapiens
  MAP TO AC004885.2; EXPRESSED IN FETAL LIVER, SIGNAL = 0.68; EXPRESSED IN BONE MARROW, SIGNAL =   1; EST_HUMAN HIT: BF509142.1, EVALUE 9.00e-03; NT HIT: gi11321572, EVALUE 6.00e-03; SWISSPROT HIT: P19319, EVALUE 1.30e+00
ctgggaatttgttgaaacacaaattgctgggtctcagccccatagtttctgatttcgtaggtgtggggcaagaggacacagtgttgagaatctgcacatctaatacaataatccagaaaatactgctgctgcttgtccagagaccactcttggagaccactgct

SEQ ID NO: 31605 - DNA, 141 bp, Homo sapiens
  MAP TO AC007963.1; EXPRESSED IN BONE MARROW, SIGNAL = 0.93; EXPRESSED IN FETAL LIVER, SIGNAL = 0.77; NT HIT: gi6715585, EVALUE 1.10e+00; EST_HUMAN HIT: T96234.1, EVALUE 3.00e-69; SWISSPROT HIT: O42632, EVALUE 1.70e+00
  unsure 23
gtttttcactaaaggcagtgaangagtctttggggatgagggttctggccccgtcactgatgctttcattggccatgaaggctttgctggttgttggtgccatccatttctctgtgttcccttttctctttatgttagtcc

SEQ ID NO: 31606 - DNA, 105 bp, Homo sapiens
  MAP TO AC007253.2; EXPRESSED IN FETAL LIVER, SIGNAL = 0.97; EXPRESSED IN PLACENTA, SIGNAL = 0.59; SWISSPROT HIT: Q59998, EVALUE 3.10e+00; NT HIT: AL163301.2, EVALUE 8.90e-01; EST_HUMAN HIT: AI879156.1, EVALUE 4.00e-16
gtctgtttcttcagaaattccctgtgttgatgtggactcgttgtcattgttggtctcagcatctttacaggcatccctggtcccctctgcagggggatcatcctg

SEQ ID NO: 31607 - DNA, 119 bp, Homo sapiens
  MAP TO AL049911.1; EXPRESSED IN FETAL LIVER, SIGNAL =  23; NT HIT: AL163203.2, EVALUE 7.00e-54
ccatttgtccattttagtatatcatttaaacagtacagccagtgctcaatagtggcatcagctgaagtcaccatcatggctacacaaattgattccttatgtgggggaaaaaaatcctc

SEQ ID NO: 31608 - DNA, 92 bp, Homo sapiens
  MAP TO AC011415.1; EXPRESSED IN LUNG, SIGNAL = 1.3; EXPRESSED IN FETAL LIVER, SIGNAL = 1.3; NT HIT: D00584.1, EVALUE 6.50e-01
ctgtcccagtctgcattgagtggaaaagaattcccatgagcaacagtcttaaagagatttactggatgttgtttgtaaagctttttgaattc

SEQ ID NO: 31609 - DNA, 409 bp, Homo sapiens
  MAP TO AC005902.7; EXPRESSED IN BONE MARROW, SIGNAL = 1.2; EXPRESSED IN HBL100, SIGNAL = 0.8; EXPRESSED IN HELA, SIGNAL = 0.73; EXPRESSED IN FETAL LIVER, SIGNAL = 0.64; NT HIT: AB018338.1, EVALUE 0.00e+00; EST_HUMAN HIT: H10248.1, EVALUE 0.00e+00; SWISSPROT HIT: Q04652, EVALUE 5.00e-26
gtggaacactacaaccaccacacagccacctggcaccctgcagctggcatgctcaacaagcgctgccggcacggagccgcctccctggggagcaagatgtttgtctgcgggggctacgatggctctggcttcctcagcattgccgagatgtacagctctgtggcagaccagtggtgcctgattgtccccatgcacacgcgcaggagccgggtctccctggtggccagctgtgggcgcctctacgctgttgggggctacgacggacagtcaaacctaagctcagtggagatgtatgacccagagacagactgctggacattcatggcccccatggcgtgccatgagggaggggtcggtgtgggctgcatccctctcctcaccatctaaggcagaggatgggatgtggtgg

SEQ ID NO: 31610 - DNA, 123 bp, Homo sapiens
  MAP TO AC012078.1; EXPRESSED IN FETAL LIVER, SIGNAL = 0.97; NT HIT: AL161535.2, EVALUE 5.90e-02; EST_HUMAN HIT: AW362848.1, EVALUE 1.10e+00
acctagtaagaagtcaaaatataggaatgtcctttcatatgaggcctcaaaggggcttaattgcaagggagccttaggggcaacacagatctgaggagggctaaggataagaggtactgccat

SEQ ID NO: 31611 - DNA, 80 bp, Homo sapiens
  MAP TO AC007024.4; EXPRESSED IN BT474, SIGNAL = 0.76; EXPRESSED IN HELA, SIGNAL = 0.61; EXPRESSED IN BONE MARROW, SIGNAL = 0.69; EXPRESSED IN FETAL LIVER, SIGNAL = 0.59; EXPRESSED IN PLACENTA, SIGNAL = 0.79; EST_HUMAN HIT: BF034160.1, EVALUE 2.40e-01; NT HIT: AF069491.1, EVALUE 1.60e-01
ctgtgcagaatagtatccaacttggtttcctgctctttcatgaaggacgaggtcagaagaaaagcccagaacttcatagg

SEQ ID NO: 31612 - DNA, 214 bp, Homo sapiens
  MAP TO AC006432.15; EXPRESSED IN BONE MARROW, SIGNAL = 0.74; EXPRESSED IN FETAL LIVER, SIGNAL = 0.58; EXPRESSED IN PLACENTA, SIGNAL = 0.64; EXPRESSED IN LUNG, SIGNAL = 0.81; NT HIT: X72002.1, EVALUE 4.30e-01; SWISSPROT HIT: P20740, EVALUE 3.00e-07; EST_HUMAN HIT: BF669756.1, EVALUE 4.80e-02
agaatgcagtgcactagcaccctcttctgctggttgcatctcagttcttccatctcttggacaatctttaggaagctattcgtcttggagtaaaatcgatatgcaaagtactcgggctgagggtattgaggcaacacccagccatgagcctggcaattttcattggccttgtaggctgcctagacaaaaaatcaaaattacgggtattttagga

SEQ ID NO: 31613 - DNA, 105 bp, Homo sapiens
  MAP TO AC007092.3; EXPRESSED IN FETAL LIVER, SIGNAL =  20; SWISSPROT HIT: P27940, EVALUE 7.00e+00; NT HIT: M12180.1, EVALUE 8.90e-01
agctgcataatcttgaaaaccccaggtaagttttgggtacttggagacattgatcttttgcaaatctgagaagccagcacagcccgtgtctcctttaagtgaatc

SEQ ID NO: 31614 - DNA, 151 bp, Homo sapiens
  MAP TO AP000038.1; EXPRESSED IN PLACENTA, SIGNAL = 0.73; EXPRESSED IN BT474, SIGNAL = 0.73; EXPRESSED IN BONE MARROW, SIGNAL = 1.5; EXPRESSED IN FETAL LIVER, SIGNAL = 0.63; EXPRESSED IN LUNG, SIGNAL = 0.6; EXPRESSED IN HBL100, SIGNAL = 0.85; EST_HUMAN HIT: AU131352.1, EVALUE 5.10e-01; SWISSPROT HIT: P57550, EVALUE 5.20e+00; NT HIT: AL163207.2, EVALUE 2.90e-01
acatagactgggaggtggccaggggcttgtggtgaccttgactacaaaagagaatggggaatttctcaggacaataaaagttgtacatatcttgattttggtagtgataacatggctgtatctgctcatcagaatttacagaactatacac

SEQ ID NO: 31615 - DNA, 127 bp, Homo sapiens
  MAP TO Z83826.12; EXPRESSED IN BONE MARROW, SIGNAL = 0.73; EXPRESSED IN HBL100, SIGNAL = 0.96; EXPRESSED IN FETAL LIVER, SIGNAL = 0.57; EXPRESSED IN HELA, SIGNAL = 0.62; EST_HUMAN HIT: AI222072.1, EVALUE 1.00e-65; NT HIT: gi11422454, EVALUE 1.00e-65; SWISSPROT HIT: Q27355, EVALUE 4.10e+00
cttaagtggaggtagagaggcaccagcgattccacatcccccagtgtaggcagcatcagggctgcaatgcacaccactcccaggaagacagttagtaaactaggtcctgaggatacagctctgtttt

SEQ ID NO: 31616 - DNA, 1041 bp, Homo sapiens
  MAP TO AC004526.1; EXPRESSED IN HBL100, SIGNAL = 1.1; EXPRESSED IN PLACENTA, SIGNAL = 0.95; EXPRESSED IN FETAL LIVER, SIGNAL = 0.93; EXPRESSED IN LUNG, SIGNAL = 2.6; EXPRESSED IN BONE MARROW, SIGNAL = 4.9; SWISSPROT HIT: P34910, EVALUE 0.00e+00; NT HIT: gi11426548, EVALUE 0.00e+00; EST_HUMAN HIT: AA805896.1, EVALUE 0.00e+00
tcatttggaagaggagatacaattgtcattgtgggtttgatcagattggttactttcctgtccttccaaatccagaaggggaggtggtggaggcagatctgcatcatctgaagaagaaacagcagttccaactgttgaaccatcagcactatcttctgatgtaccatttacttgatcttttattttctctgttttggggttgttggagtcttcaatgttttcacttgattcaaacaacttaatttctaagtcatctgctaaaagtgtgcttttgcttggtttccagggtgtaagtgaaatgattgatgtacgttttgtggatatttcattttctctgatgttatccatacaaatgtcaggggtttctccatcagcaaatggagatctacctgcccaattttgatcatttaaaactggtttccttaagcatttccaaagtacaatgatgattatagctaccaacatagaagtcagaagtacaccaattagtatggcagctattgaattataattgtttttttgtggggtttgtttgttactggtagtatctaagataaatcctggtgtactcctaggtgaatttttgacagttgatgttggttgtgtggatggattatgaacagttatttgttttctagaagggatctggacagatgatgattgttgagtaaaagtatagacaaatgactttggtggttgtgtggtagaagtacgggcagatggtagttgtctggcagaggtgaacacggcttgctgggaggaggtgttggctattggtgttggttgtttggtgttgtaggcaagtggttgtccagcagaagtatgtgcttctggtttttcagaagaggtatagacagctggtgttggttgtccagcagtgactttggcaggtgatattgattgtccagaaaaagtgtcgctgaattgtgttggttgacccaaaggattccctgttgtgttttgagaattagccaatacctgtgacattgatgatgtgaataaggtaggctgtgactgcttctctgttgtaattgtctctgt

SEQ ID NO: 31617 - DNA, 141 bp, Homo sapiens
  MAP TO AC007021.2; EXPRESSED IN HBL100, SIGNAL = 0.76; EXPRESSED IN FETAL LIVER, SIGNAL = 0.57; EXPRESSED IN LUNG, SIGNAL = 0.82; EXPRESSED IN PLACENTA, SIGNAL = 0.75; EXPRESSED IN BT474, SIGNAL = 0.72; EXPRESSED IN BONE MARROW, SIGNAL = 1.5; EXPRESSED IN HELA, SIGNAL = 0.63; EST_HUMAN HIT: AA665737.1, EVALUE 2.10e-02; SWISSPROT HIT: Q26601, EVALUE 2.30e+00
atttgtgggtggtccttttgcattgtctccaatttggcccaagatattgaaagttaaatcatggcaattcaccaggaaacgtttattgcatttttcttcaaatggctttatatcaggttcaattcctgaaaagtccaacct

SEQ ID NO: 31618 - DNA, 120 bp, Homo sapiens
  MAP TO AC009226.2; EXPRESSED IN FETAL LIVER, SIGNAL = 3.5; NT HIT: AP001514.1, EVALUE 6.70e-02; SWISSPROT HIT: Q01617, EVALUE 9.00e+00
tctaaagaggtatacacactccaggtgagatgcataggcatggtaggcaacttttgcatccagccatatgtcctcagctgcctcaagttccagcatgggttaacaattcctatgcaagtc

SEQ ID NO: 31619 - DNA, 118 bp, Homo sapiens
  MAP TO AC007001.2; EXPRESSED IN FETAL LIVER, SIGNAL = 0.61; NT HIT: AF156539.1, EVALUE 8.70e-01; EST_HUMAN HIT: BE894324.1, EVALUE 1.50e+00; SWISSPROT HIT: P40615, EVALUE 5.30e+00
ggaaagtggagactatgctctccaactccagctccctctctggaaagcataatgacgagctgggttctttgcacccagcagtcaaaggtactgagaagctgtcaagagctattttctg

SEQ ID NO: 31620 - DNA, 228 bp, Homo sapiens
  MAP TO AC010153.2; EXPRESSED IN HELA, SIGNAL = 1.3; EXPRESSED IN FETAL LIVER, SIGNAL = 5.2; EST_HUMAN HIT: AA909466.1, EVALUE 2.00e-03; SWISSPROT HIT: P34545, EVALUE 6.60e+00; NT HIT: gi6681202, EVALUE 4.60e-01
gccctgttcatgtgggagaatgtcaatcgtgtcagctaggtgtacatacaagtgttctcacctcattgctgctctctgttattacactctctgtatcattaaggctttatgtgatatacctgagtgttataatccttcgtgaaatttatacaagtgaaaagcccaggactttaccaatggctgtgagactggctgtgagagtcagttatctctactggatgggtccag

SEQ ID NO: 31621 - DNA, 123 bp, Homo sapiens
  MAP TO AP000156.1; EXPRESSED IN PLACENTA, SIGNAL = 0.77; EXPRESSED IN FETAL LIVER, SIGNAL = 0.6; NT HIT: U22967.1, EVALUE 6.90e-02; SWISSPROT HIT: P00538, EVALUE 9.00e+00; EST_HUMAN HIT: BE395946.1, EVALUE 1.10e+00
ctcagttggttgctgaatgggatgaacaccagctgccctatttcttcattaaggggaaagaagtctgtcttgtgcatacactggggactggccttggcccatcacattactgtcctgttgctt

SEQ ID NO: 31622 - DNA, 183 bp, Homo sapiens
  MAP TO AC007877.3; EXPRESSED IN BONE MARROW, SIGNAL = 0.72; EXPRESSED IN HBL100, SIGNAL = 1.5; EXPRESSED IN FETAL LIVER, SIGNAL = 0.65; EXPRESSED IN LUNG, SIGNAL = 0.68; EXPRESSED IN BT474, SIGNAL = 0.65; EXPRESSED IN HELA, SIGNAL = 0.71; EST_HUMAN HIT: BE293106.1, EVALUE 4.30e-01; SWISSPROT HIT: P97386, EVALUE 9.70e-01; NT HIT: Y11526.1, EVALUE 3.60e-01
tttatatgcagtcttatgatcatgcatgatacaattctttactccaactttgttgtcaaaaatcactttgtgaagattgcaaaggtggtaaccataaaatttaatatcattaatgtaatagataaggatggtgaacatactagtgaatgcaaaagtgttacagaaaaccaccattgttttctt

SEQ ID NO: 31623 - DNA, 97 bp, Homo sapiens
  MAP TO AC006560.8; EXPRESSED IN FETAL LIVER, SIGNAL = 0.84; EXPRESSED IN HELA, SIGNAL = 0.73; EXPRESSED IN PLACENTA, SIGNAL = 0.59; SWISSPROT HIT: P38840, EVALUE 2.40e+00; NT HIT: M81846.1, EVALUE 2.10e-01; EST_HUMAN HIT: BF369849.1, EVALUE 3.00e-01
ctgagccaaggtgggcataggatgttgctgggtcacatgagtctctgctgtgtctggaacaaaaagaactctgacttcttgagaacctactatgtgc

SEQ ID NO: 31624 - DNA, 110 bp, Homo sapiens
  MAP TO AC011376.1; EXPRESSED IN FETAL LIVER, SIGNAL =   4; NT HIT: X99711.1, EVALUE 5.10e-02; EST_HUMAN HIT: AI769132.1, EVALUE 1.60e-02; SWISSPROT HIT: P34356, EVALUE 3.10e+00
cagtggtattcagaaagccacggaaggggactctgccagaacaccatcgtccgcaggctgatgtcaacacataataaaacaatagagtgaacattgggggagggaggaat

SEQ ID NO: 31625 - DNA, 277 bp, Homo sapiens
  MAP TO AL008728.1; EXPRESSED IN FETAL LIVER, SIGNAL = 0.97; NT HIT: AL163285.2, EVALUE 1.00e-11; EST_HUMAN HIT: AI934492.1, EVALUE 3.00e-10
gattaagctccattttgaatacagcctgggtgagcggggacttacagctgcagctcagggtgggggtccacagatggaaaattactacaagaaaatacaagggctcagcggattctggctaaaccgacctaacaggattcttactgaagacaggccgggtgaccagttatcattgggggaggtggaggaggaggaaatggatggatgtgagggtgatcagatgcctgatctgtgcataggtggggttcttgttaaacttaccgagagggctcttggt

SEQ ID NO: 31626 - DNA, 174 bp, Homo sapiens
  MAP TO AC010727.1; EXPRESSED IN FETAL LIVER, SIGNAL = 0.96; SWISSPROT HIT: Q01930, EVALUE 1.70e+00; NT HIT: gi8922753, EVALUE 6.30e+00; EST_HUMAN HIT: AA765434.1, EVALUE 1.00e-01
actgttgctactgttaacaatgattatatcaataccagcagcatccaagtccactgctccatcacaatacatcagctgcagggatccccagagaggccagggagggcgcaggggcagaacagcctttctgccatgaagatgaaggactgtacgaggaggagcctcccaccgggg

SEQ ID NO: 31627 - DNA, 244 bp, Homo sapiens
  MAP TO AL031431.8; EXPRESSED IN PLACENTA, SIGNAL = 0.64; EXPRESSED IN FETAL LIVER, SIGNAL = 0.59; EXPRESSED IN LUNG, SIGNAL = 0.62; EST_HUMAN HIT: AW134996.1, EVALUE 0.00e+00; SWISSPROT HIT: P16758, EVALUE 1.40e-01; NT HIT: gi9629214, EVALUE 5.80e-01
aatatcagttgggattgtgtttggctgcaacagacacctaacaagatccaagaatatttctttaccatatgaaggcagtatagatggaggaacccagggctggtatggcagttctggtgtcacaggggatacaggctcctcatcttttggattcaccatcccaacatgtggcttccatcttcaaggctacctcctggtccagaatggctgccggagctccagccatcgtgttcacattgcaggc

SEQ ID NO: 31628 - DNA, 265 bp, Homo sapiens
  MAP TO AL109624.1; EXPRESSED IN FETAL LIVER, SIGNAL = 1.1; EXPRESSED IN HELA, SIGNAL = 1.8; EXPRESSED IN BONE MARROW, SIGNAL = 1.8; EST_HUMAN HIT: BE893572.1, EVALUE 3.00e-56; NT HIT: X63419.1, EVALUE 1.40e-01; SWISSPROT HIT: P22211, EVALUE 2.10e-01
atttctcacagagatactggacagtcaaaacatgtccatcacagcttcttctttctttctctatggaccagttttctgtgttttcagtcagtatggtagaagaaatattgctatgcccagctcaagttttactttctctctattcaagaacactagaagtccctgggagactctgactagtgaagctcatacaattaactgtgatggtggagatgaggatagtcttaaaggtaacacggttgcaacagactcatctatgcgaata

SEQ ID NO: 31629 - DNA, 124 bp, Homo sapiens
  MAP TO AC011395.1; EXPRESSED IN FETAL LIVER, SIGNAL =   1; NT HIT: L03412.1, EVALUE 9.30e-01; SWISSPROT HIT: O13666, EVALUE 9.00e+00; EST_HUMAN HIT: AW594438.1, EVALUE 4.10e-01
tttcaccaagatacgcatgtcccagaatcccagcgacttctctaagaggcaaaaattgttctttccaattttgaaagtcagaaaccagaggtgccatggaaaggacttgctgatgaaggtcaca

SEQ ID NO: 31630 - DNA, 100 bp, Homo sapiens
  MAP TO AP000237.1; EXPRESSED IN FETAL LIVER, SIGNAL = 0.61; NT HIT: AL161593.2, EVALUE 1.20e-02; EST_HUMAN HIT: R98747.1, EVALUE 2.20e-01
atggtgctcacatccatgccagtgattgacttttcccctaaatacctgcagcctgaacgtcctaaagatgccttggtctccccaaggatgctgattctga

SEQ ID NO: 31631 - DNA, 353 bp, Homo sapiens
  MAP TO AC005484.2; EXPRESSED IN BONE MARROW, SIGNAL = 0.78; EXPRESSED IN LUNG, SIGNAL = 0.7; EXPRESSED IN HELA, SIGNAL = 0.6; EXPRESSED IN HBL100, SIGNAL = 0.85; EXPRESSED IN FETAL LIVER, SIGNAL = 0.71; SWISSPROT HIT: P29476, EVALUE 2.70e-01; EST_HUMAN HIT: N99520.1, EVALUE 1.00e-80
catttttcggcctccagaagatcctgattcacactattggtgctgtgctctctgccatcaaatgttctgattttgggatattctgttcttcctgtacatgctgctctcatttttaaattgaaagcagcttgtgctatctgcttataatgcttcctgctaattaggatctgttgcttcacttggtgcagagcatctaaaaagaatctttccacttctgttctctcatccagtatgttcttggccagcttcttcacacgattcatttccctgtccttcatctgaagaaggtgctgcagcttgtcaatttctacctgacctgcttggttctctatcattgcgtgttgctgcagttt

SEQ ID NO: 31632 - DNA, 190 bp, Homo sapiens
  MAP TO AC007390.2; EXPRESSED IN BONE MARROW, SIGNAL = 0.83; EXPRESSED IN FETAL LIVER, SIGNAL = 0.68; EXPRESSED IN HELA, SIGNAL = 0.63; SWISSPROT HIT: P15151, EVALUE 1.70e+00; EST_HUMAN HIT: BE900203.1, EVALUE 1.00e-103; NT HIT: gi10800406, EVALUE 8.00e-12
ctgaaaaattgtgacatttcagtacatctggtagaggtaagccaaaaattaagtgagattcaagcattgacactgactaaagagaaggtcccgttagagcgaaatgctggatccccagtgtatatgaaaggtgtcactaagtctgggattccaatttcctggtaccgagatctgcacgatgttccaaaag

SEQ ID NO: 31633 - DNA, 75 bp, Homo sapiens
  MAP TO AL021706.1; EXPRESSED IN FETAL LIVER, SIGNAL = 0.99; EXPRESSED IN BONE MARROW, SIGNAL = 0.92; NT HIT: U50871.1, EVALUE 2.30e+00; EST_HUMAN HIT: AA481230.1, EVALUE 5.60e-02
aggattaccacacttcctggtcacatactgtggtgctgtggctcagacggcctttcctgtgaacttttctctgag

SEQ ID NO: 31634 - DNA, 175 bp, Homo sapiens
  MAP TO AC007376.7; EXPRESSED IN FETAL LIVER, SIGNAL = 1.1; NT HIT: AL163300.2, EVALUE 4.00e-04; EST_HUMAN HIT: AW028877.1, EVALUE 5.00e-10
agcctggtactggatgtagctgtcatcatcatcacagccatcgtcatcatcattctcatcatcattacaccatcctcatcaccatcatcatcaccaccaccactgatatagtttggaatatgtatctgtgtctcttcccaaatctcatgttgaattgtaacccctcgtattgcag

SEQ ID NO: 31635 - DNA, 128 bp, Homo sapiens
  MAP TO AF130418.2; EXPRESSED IN FETAL LIVER, SIGNAL = 1.1; EST_HUMAN HIT: BF217493.1, EVALUE 4.20e-01; NT HIT: Z73013.1, EVALUE 2.80e-01; SWISSPROT HIT: O84042, EVALUE 4.00e+00
gtggtgttaagaaatttcgccataaaagtcatagggctgatattgtggatggcatcctagatagatttgctgactcaaaatcccatgctcatttcccttctccaaagcatctaatttcctatggaatg

SEQ ID NO: 31636 - DNA, 498 bp, Homo sapiens
  MAP TO AJ239323.2; EXPRESSED IN HELA, SIGNAL = 8.9; EXPRESSED IN FETAL LIVER, SIGNAL = 3.9; NT HIT: gi4557472, EVALUE 0.00e+00; EST_HUMAN HIT: AL134983.1, EVALUE 3.00e-60; SWISSPROT HIT: P51795, EVALUE 6.00e-82
gctgccttggtggcagcattcactctacgctccatcaatccatttgggaacagccgcctggtactattttatgtggagtttcacaccccatggcatctctttgagctcgtgccattcattctgctgggcatatttggtggtctgtggggagcactgtttatccgcacaaacattgcctggtgtcggaagcgaaagaccacccagttgggcaagtatcctgttatagaggtactcgtcgtgacagccatcactgccatcctggctttccccaatgaatacactcggatgagcacaagtgagctcatttctgagctgtttaatgactgtggccttctggactcctccaagctctgtgattatgagaaccgtttcaacacaagcaaagggggtgaactgcctgacagaccggctggcgtgggagtctacagtgcaatgtggcagctggctttaacactcatactgaaaattgtcattactatattcacctttggcatgaag

SEQ ID NO: 31637 - DNA, 108 bp, Homo sapiens
  MAP TO AL031283.15; EXPRESSED IN HBL100, SIGNAL = 0.95; EXPRESSED IN FETAL LIVER, SIGNAL = 0.94; EST_HUMAN HIT: R95675.1, EVALUE 2.00e-04; SWISSPROT HIT: P23785, EVALUE 3.60e-01; NT HIT: J04038.1, EVALUE 3.00e-06
cagtgcccagtgcccagtgcccagtgcccagcacatttaataagtctgtccggattgcctggctgttgctgcacaccgctttcacagagtagctgttgcaagttataa

SEQ ID NO: 31638 - DNA, 179 bp, Homo sapiens
  MAP TO AL080249.12; EXPRESSED IN FETAL LIVER, SIGNAL = 3.2; SWISSPROT HIT: P18428, EVALUE 1.00e-29; NT HIT: gi11345447, EVALUE 2.00e-95; EST_HUMAN HIT: AV658726.1, EVALUE 3.00e-95
ggtgaaatctttcatcgtaaccaccgttctccagttaccctccttgctgcagtcatgagccttcctgaggaacacaacaaaatggtctactttgccatctcggattatgtcttcaacacggccagcctggtttatcatgaggaaggatatctgaacttctccatcacagatgacatggt

SEQ ID NO: 31639 - DNA, 154 bp, Homo sapiens
  MAP TO AL080250.11; EXPRESSED IN FETAL LIVER, SIGNAL = 1.1; NT HIT: L09603.1, EVALUE 8.00e-08; EST_HUMAN HIT: AW182429.1, EVALUE 1.00e-81; SWISSPROT HIT: P17276, EVALUE 3.90e+00
cggcacattactgttccttgtgttgagaatatgctgtaagagctgtgtcgagataccagtttttatattcttgtaccttcgactgctgcagaactccccaagcaagaagttcttccacagtgtccccaaattgtggaagaggctcgctcgcttc

SEQ ID NO: 31640 - DNA, 151 bp, Homo sapiens
  MAP TO AC010165.1; EXPRESSED IN FETAL LIVER, SIGNAL = 1.6; EST_HUMAN HIT: AL157610.1, EVALUE 3.50e-01; NT HIT: AE000886.1, EVALUE 7.40e-02; SWISSPROT HIT: P13678, EVALUE 1.70e+00
agtctttactgccagcattgttagagttggctatatggtatcctatgaaggtaagtcttttgttccatgtgtggtaactgttcagagtctgatttttctctttcataccatagctgaatatgatggaatatctgtttctatgaatagaatg

SEQ ID NO: 31641 - DNA, 95 bp, Homo sapiens
  MAP TO AC006296.8; EXPRESSED IN LUNG, SIGNAL = 0.6; EXPRESSED IN BONE MARROW, SIGNAL = 0.74; EXPRESSED IN FETAL LIVER, SIGNAL = 0.61
ctattcaacatgccaacaacaagcatgtcaacaacaagccaaacaacaagccaaacaacaagccaaacaacaagccaaaccctgaatttgtgtgc

SEQ ID NO: 31642 - DNA, 215 bp, Homo sapiens
  MAP TO AF165144.1; EXPRESSED IN FETAL LIVER, SIGNAL =   1; NT HIT: gi6679242, EVALUE 2.00e+00; EST_HUMAN HIT: D78842.1, EVALUE 1.30e-01; SWISSPROT HIT: P56764, EVALUE 1.20e+00
aacaagtggagcacaaagcatcagaccaatgtctgcagttccaaagtggggagtcagtgtgcaaatgctggcgcctgcgtgtctccacggttactgacccagataccatgctttccctggggcagtcacctggacttgacctagtcaggtacagcatccacaaggaacagcatgagcagcatgtacctatgagtcaagtgctaggtgtgtatggc

SEQ ID NO: 31643 - DNA, 343 bp, Homo sapiens
  MAP TO AL031594.9; EXPRESSED IN HBL100, SIGNAL = 1.1; EXPRESSED IN FETAL LIVER, SIGNAL = 0.59; EXPRESSED IN HELA, SIGNAL = 0.62; EXPRESSED IN BONE MARROW, SIGNAL = 0.96; NT HIT: AL163280.2, EVALUE 1.00e-05; EST_HUMAN HIT: AI291129.1, EVALUE 0.00e+00; SWISSPROT HIT: Q51130, EVALUE 3.40e-01
cattcttccgctcactaagtggaggcaaattgggattcctgccagggtggaggcctagggtcagctcgggctgcaaggagagctcctgcagttcattggcaacagcttcactctggggactgggtgccgcagataaggacacgagcactggttcatcatcattttcgccggcccctcctccgtccagcccattcacagcaatgacggaagggggcaggcacaccacactggagaaatccactttggctttcgtgatggcaatctggaaatggaagaaaaaatggaaagtttagatggtaccatgataatatggtttggtggtgtcctcacccaaatctcatct

SEQ ID NO: 31644 - DNA, 107 bp, Homo sapiens
  MAP TO AC010719.1; EXPRESSED IN FETAL LIVER, SIGNAL =   1; NT HIT: AJ007044.1, EVALUE 3.00e-03; EST_HUMAN HIT: AV722345.1, EVALUE 2.20e-02
ccatttcagtgtgatacacatagcatgctgctaaatcaacctgaaatatccaggaagtcttcccagaggaggtgccagctggatattggaggatgagtaggtggtac

SEQ ID NO: 31645 - DNA, 111 bp, Homo sapiens
  MAP TO AL049812.3; EXPRESSED IN FETAL LIVER, SIGNAL = 1.6; EST_HUMAN HIT: BE865993.1, EVALUE 5.60e+00; SWISSPROT HIT: Q22703, EVALUE 5.40e+00
tcaggttggtctagggaagatctggtgtcctgaggtcactccaagtccgtagatgtttatctgcttcagttggttagtattgccagtgtggtaaaactcagcattcagtgc

SEQ ID NO: 31646 - DNA, 267 bp, Homo sapiens
  MAP TO AC006286.12; EXPRESSED IN PLACENTA, SIGNAL = 0.71; EXPRESSED IN BT474, SIGNAL = 0.81; EXPRESSED IN HBL100, SIGNAL =   1; EXPRESSED IN FETAL LIVER, SIGNAL = 0.57; EXPRESSED IN BONE MARROW, SIGNAL = 1.2; EST_HUMAN HIT: R59271.1, EVALUE 1.00e-104; SWISSPROT HIT: Q14289, EVALUE 3.20e+00; NT HIT: gi11526083, EVALUE 0.00e+00
gtttcttctcacttatcctctcatggttggtgggaaaggcagatggctctctgttggctgacggtatcaggctctctagggcagtagtatcctggggaggatgtactaaatatgtctctttaggcatttggaccatgaggctggacagtgtctgatcaagaacgtcctcctcagcaatataggtgtatggacagtattctcgggtcctggagtagatgttggcattgtcataacaatctgagcaaatcacccgggtaccagtgccac

SEQ ID NO: 31647 - DNA, 126 bp, Homo sapiens
  MAP TO AL050403.12; EXPRESSED IN FETAL LIVER, SIGNAL = 1.8; EXPRESSED IN HBL100, SIGNAL = 1.1; NT HIT: AF023811.1, EVALUE 2.40e-01; EST_HUMAN HIT: T03176.1, EVALUE 2.00e-48; SWISSPROT HIT: Q91187, EVALUE 4.00e+00
caatggaatatgcaatattttattatgcatataattgaaatactttctgttctttctaagttcgaatattgtttgtgtcacatattgttctgagcatgccttggtcacagtcaggtctcgagggac

SEQ ID NO: 31648 - DNA, 400 bp, Homo sapiens
  MAP TO AL049871.2; EXPRESSED IN FETAL LIVER, SIGNAL = 0.7; EXPRESSED IN LUNG, SIGNAL = 0.64; NT HIT: AJ276567.1, EVALUE 3.00e-90; EST_HUMAN HIT: AI370786.1, EVALUE 3.00e-90; SWISSPROT HIT: P17081, EVALUE 1.00e-21
actgatggctcctttagttctagtagagaaagaactaccagattccagggttgaggaagaaacgggatcccagtgcgctgtagtggactcttacctgaaatctgaccttggaactacatgggacacaccttacacaggctgtacaaacccttgtctgctcttcccacaggaggactacaaccagctgaggccactctcctaccccaacacggatgtgtttttgatctgcttctctgtcgtaaaccctgcctcttaccacaatgtccaggaggaatgggtccccgagctcaaggactgcatgcctcacgtgccttatgtcctcatagggacccaggttaaaatgtgggcgatggcagggtggagcgggctgcaaaaatgggaagaccctttaggtacctcg

SEQ ID NO: 31649 - DNA, 188 bp, Homo sapiens
  MAP TO AC007432.7; EXPRESSED IN HBL100, SIGNAL = 0.76; EXPRESSED IN FETAL LIVER, SIGNAL = 0.79; SWISSPROT HIT: P12957, EVALUE 5.60e-01; EST_HUMAN HIT: BF035327.1, EVALUE 3.00e-37; NT HIT: AJ271735.1, EVALUE 6.00e-25
aactctcttcaattctatgaaagctgagagacacgaggaagctgcagaagacaagtgtgaagctagcagaggttggttcatcaggtttaaggaaacaggacatctccataacattaaagtgcaaggtgaagcagcatgtgctgacaaagaagttgcagaagttgtccagaaaatctagttatgatcat

SEQ ID NO: 31650 - DNA, 157 bp, Homo sapiens
  MAP TO AC009453.1; EXPRESSED IN FETAL LIVER, SIGNAL = 0.92; EXPRESSED IN HELA, SIGNAL =  10; EXPRESSED IN LUNG, SIGNAL =   1; NT HIT: AL139077.2, EVALUE 1.40e+00
  unsure 49
  unsure 82
taacagcagcatttctaacccagtaaaaagtatccccaaagcacaaaanggtatcaaattaaagttcttctccaacaacttncatgttgtggctaattcacaaaggcataaagtgaagaaatgtgttgttttgtttttggcttttgcaaacaagtga

SEQ ID NO: 31651 - DNA, 150 bp, Homo sapiens
  MAP TO AL049593.4; EXPRESSED IN FETAL LIVER, SIGNAL =   1; EST_HUMAN HIT: BE004615.1, EVALUE 3.50e-01
aatctctctggctatccttctcactataatttttttccagaatcttcatgtttcccttgatctccaaattccagcacatctcagaattctctatttggttcttattctcattctatatattttcattgggaccttcatccaaactgaact

SEQ ID NO: 31652 - DNA, 436 bp, Homo sapiens
  MAP TO AL035694.8; EXPRESSED IN FETAL LIVER, SIGNAL = 0.78; NT HIT: AF293962.1, EVALUE 1.80e-02
attgcttctaccaatcaatgctttcactgacaggaacttcacccctaagatggcacccactagctgctgggtcaacagccatccacatggtttttttcagagcaaagcagagtttccccaaagtgtcttggatctccaacaagacaggaaaagtcagcaaggagaaagaaccttcattctctttcctcttcccttcccttctcttctccctccttctctctcagtaagaattatttccctaataattattattgcccaatctccttccttccatgtttacagatgccatttaggcatcagaagacctatgctgagtcctaacttttcccttgatggccaagtgattgtgggtaagtctttaacttctgtgagcctcagttttcttacatacaaagttaggataaaaacatctcacaggattgttggaaagacaaaa

SEQ ID NO: 31653 - DNA, 244 bp, Homo sapiens
  MAP TO AC009305.1; EXPRESSED IN FETAL LIVER, SIGNAL = 0.57; EST_HUMAN HIT: H55808.1, EVALUE 1.50e-01; SWISSPROT HIT: Q09472, EVALUE 3.00e-04; NT HIT: gi4502474, EVALUE 3.20e-02
gaccctctcccgaccttcagagccacctgcagttaaaccttcaccagcatctcaaggcctccaccctcgtgttagctcttcagcaccctgcccccacattcccttgcaggagccttctggccctgctaaaccagcccagtcactgcccttgactgtacctgtgtcacaacctccacaaacctccctagattctgttaccttccctcctccagctgcccaaactgtcactgttgtgcagtttcgc

SEQ ID NO: 31654 - DNA, 138 bp, Homo sapiens
  MAP TO AF165124.1; EXPRESSED IN HBL100, SIGNAL = 9.5; EXPRESSED IN FETAL LIVER, SIGNAL = 1.1; NT HIT: M27968.1, EVALUE 3.10e-01; SWISSPROT HIT: Q08678, EVALUE 3.00e+00; EST_HUMAN HIT: BF577357.1, EVALUE 1.20e-01
tagggtggcaggggcatcaacagtgtccactgcaagggcaaatatcagattaactgggttcaaaattcgaatcctgtcactaactgattgtgtgatttcaggcaacttttctatgtctctgagtctcaacttctttat

SEQ ID NO: 31655 - DNA, 117 bp, Homo sapiens
  MAP TO AP000096.1; EXPRESSED IN PLACENTA, SIGNAL = 0.64; EXPRESSED IN FETAL LIVER, SIGNAL = 0.57; EXPRESSED IN LUNG, SIGNAL = 0.64; NT HIT: L11275.1, EVALUE 2.60e-01; EST_HUMAN HIT: AA393244.1, EVALUE 6.60e-02
accaacagcgccacctcgatcaaaacaccaagtttgtcaaagcatctcgaatactattttattgcatgtgttacattataagttaaataggaaacataaaacaagagttccaacact

SEQ ID NO: 31656 - DNA, 141 bp, Homo sapiens
  MAP TO AC008277.1; EXPRESSED IN PLACENTA, SIGNAL =   1; EXPRESSED IN FETAL LIVER, SIGNAL = 0.61; EXPRESSED IN LUNG, SIGNAL = 0.79; EXPRESSED IN BONE MARROW, SIGNAL = 0.74; NT HIT: AB040909.1, EVALUE 4.00e-74; EST_HUMAN HIT: AW957787.1, EVALUE 7.00e-74; SWISSPROT HIT: P45604, EVALUE 6.70e+00
cttttggtctgctaagcacatgtcttcattaggcttctttagttcctttgccatttctaattctaatcttcgctgctctagtttacgctctttatttaatcttttctcatcacgtttttcttgtttcaaccgctctttttc

SEQ ID NO: 31657 - DNA, 126 bp, Homo sapiens
  MAP TO AC012553.2; EXPRESSED IN BT474, SIGNAL = 1.1; EXPRESSED IN FETAL LIVER, SIGNAL = 2.4; NT HIT: AL163302.2, EVALUE 7.00e-05; EST_HUMAN HIT: AI110607.1, EVALUE 1.00e-01; SWISSPROT HIT: P01180, EVALUE 6.80e+00
atccgtgaacatagtatgtctccccattgctttaggtctttgatttctttcatcagtgtttgtagttttcagcatacagatcttataggcatatattgtcatttttataaatacatgtataataca

SEQ ID NO: 31658 - DNA, 198 bp, Homo sapiens
  MAP TO AC006432.15; EXPRESSED IN BT474, SIGNAL =   1; EXPRESSED IN BONE MARROW, SIGNAL = 4.2; EXPRESSED IN HBL100, SIGNAL = 1.6; EXPRESSED IN FETAL LIVER, SIGNAL = 0.85; EXPRESSED IN HELA, SIGNAL = 0.98; NT HIT: U33833.1, EVALUE 7.00e-74; EST_HUMAN HIT: AW176401.1, EVALUE 1.00e-44; SWISSPROT HIT: P22516, EVALUE 2.00e-08
ctggtggtgctgccctatcagatgctgctgcatgcggccactcggcaggctgcgggcatccggctgcaggaccaggtggtgatcatcgacgaggcgcacaacctgatcgacaccaccacgagcatgcacagcgtggaggtcagcggctcccaggtgcgtgggcctcccctccccgggccagggcctgccgtgaggtaa

SEQ ID NO: 31659 - DNA, 112 bp, Homo sapiens
  MAP TO AL035086.12; EXPRESSED IN BONE MARROW, SIGNAL = 1.3; EXPRESSED IN FETAL LIVER, SIGNAL = 0.6; EXPRESSED IN LUNG, SIGNAL = 0.59; EXPRESSED IN HELA, SIGNAL = 0.9; EXPRESSED IN HBL100, SIGNAL = 0.81; NT HIT: AF022382.1, EVALUE 3.20e+00; EST_HUMAN HIT: BE299916.1, EVALUE 8.00e-57; SWISSPROT HIT: P27653, EVALUE 9.20e-02
ctgacaggaagtcatgggagcagttgagaacagtagttcctggttgtatccaagtaaggggaatctcttctggcttaggtgagcctaggaccacaatgtcagcctcgtgaag

SEQ ID NO: 31660 - DNA, 92 bp, Homo sapiens
  MAP TO AC006229.14; EXPRESSED IN PLACENTA, SIGNAL = 0.89; EXPRESSED IN BT474, SIGNAL = 0.75; EXPRESSED IN HBL100, SIGNAL = 1.5; EXPRESSED IN FETAL LIVER, SIGNAL = 0.81; EXPRESSED IN BONE MARROW, SIGNAL = 0.8; EXPRESSED IN HELA, SIGNAL = 1.1; SWISSPROT HIT: P07822, EVALUE 1.80e+00
tgagagctattgactcttcaagttttccctggctttttatattctgaagggaagcaacctcttgttctccctaggaagtcaataaagccata

SEQ ID NO: 31661 - DNA, 116 bp, Homo sapiens
  MAP TO AC007297.22; EXPRESSED IN HELA, SIGNAL = 0.59; EXPRESSED IN PLACENTA, SIGNAL = 0.61; EXPRESSED IN BONE MARROW, SIGNAL = 0.76; EXPRESSED IN FETAL LIVER, SIGNAL = 0.58; EXPRESSED IN LUNG, SIGNAL = 0.84; EXPRESSED IN HBL100, SIGNAL = 1.5; NT HIT: AF020503.1, EVALUE 8.60e-01; SWISSPROT HIT: Q25490, EVALUE 6.90e+00; EST_HUMAN HIT: AA884625.1, EVALUE 2.60e-01
aacagggaaatcagactgaaaatgaatctgcaagcaagcctttggttcgtcaaggagataatatgagtcagaaaatgtctcatctaattctctggattctgccttataattggcct

SEQ ID NO: 31662 - DNA, 613 bp, Homo sapiens
  MAP TO AC007867.1; EXPRESSED IN LUNG, SIGNAL = 2.6; EXPRESSED IN FETAL LIVER, SIGNAL =   1; NT HIT: X01472.1, EVALUE 8.40e-02; EST_HUMAN HIT: BE158693.1, EVALUE 1.60e+00
  unsure 52
  unsure 58
  unsure 72
  unsure 74
  unsure 246
  unsure 392
aacaccaaaagccacatattttaagatatcaaaatcttcaatatttttagcntctttnagaaatagaaaacntnagcaaaagatagcaccatcagcaaataatatctcagccccttccttactactcccccaccatccttcctcaggattcagttccagtgaatgatcatcagaagcaaaacctgaagcaaaaatctttcaaaaattacaacaaataaggtacattcttggcaagtctcaattttngtgataactttctcctcaagtttattattataaaactatcttgtaataaggttatttggggacccccttagatggtctgagactaaatgatttctacttcagaaaaaaatactctataacagggttttggttatttaacacagcangcattcaaatagcaggaattcaatttttgttcaagtaaatactatctgctcattaatttgtttaatcacaaaatgatttcacaaaacaatacagtttgtgacttcttaaagaacttctggtgttcagattgacttttaatacattatgtctcacactaatagtcactctatttttagaaaagttaaaatcaaaataatacctattacacctccattctaag

SEQ ID NO: 31663 - DNA, 145 bp, Homo sapiens
  MAP TO AC008024.1; EXPRESSED IN BONE MARROW, SIGNAL = 3.9; EXPRESSED IN LUNG, SIGNAL = 7.1; EXPRESSED IN FETAL LIVER, SIGNAL =   1; NT HIT: D11101.1, EVALUE 1.30e+00
  unsure 65
gtcaagaggatccacagttaatgttgtcaccatggttgtaaaagccactattctgactaaaaagntcaaccaactcccctacaatattgcatatcagctcttatttcaaattaaaaaaaaacaaaactgtgtttttccaatttaa

SEQ ID NO: 31664 - DNA, 116 bp, Homo sapiens
  MAP TO AC007385.2; EXPRESSED IN FETAL LIVER, SIGNAL = 1.8; NT HIT: AE001137.1, EVALUE 2.20e-01; SWISSPROT HIT: Q9WW00, EVALUE 5.30e+00; EST_HUMAN HIT: AV721296.1, EVALUE 1.50e+00
ggttaacttcccccaaaccacagccgtttgtgttggatcatggttaaaaccccaaattccaacttctacaataataacattcttttcttctactgcaatgggagaaatgaccattt

SEQ ID NO: 31665 - DNA, 205 bp, Homo sapiens
  MAP TO AB020868.1; EXPRESSED IN LUNG, SIGNAL =   2; EXPRESSED IN FETAL LIVER, SIGNAL = 0.87; EST_HUMAN HIT: BE091869.1, EVALUE 3.10e-02; NT HIT: U82671.2, EVALUE 4.10e-01; SWISSPROT HIT: P56448, EVALUE 3.20e-01
cagaaaggtgaggagtatgacagtcaccctgaaatgacaacagaagccaacaataacaattatagtaataatgtgtgtatagaaagtactaaatgaccattaaatgaagagcagattactaggtgctatggaagatacacatgcagtgaaatacaaattccagatctcagggagtttgcaaccgaaaaagaatataacactaata

SEQ ID NO: 31666 - DNA, 80 bp, Homo sapiens
  MAP TO AC009598.2; EXPRESSED IN LUNG, SIGNAL = 1.8; EXPRESSED IN FETAL LIVER, SIGNAL = 0.93; EST_HUMAN HIT: BE737592.1, EVALUE 2.40e-01
  unsure 14
cccagaacttggcnagtgctgacagaaacacacagcaaggataagctgatgggcaaaagtagcatctgcccttgtcacag

SEQ ID NO: 31667 - DNA, 81 bp, Homo sapiens
  MAP TO AC005193.2; EXPRESSED IN FETAL LIVER, SIGNAL = 0.97; NT HIT: X78486.1, EVALUE 2.60e+00; EST_HUMAN HIT: AI218230.1, EVALUE 6.60e-01
aggactggttagaggagtggactactttagatgaagtggtctgggaagaccttctggcggaggtgacagtgggacagaggc

SEQ ID NO: 31668 - DNA, 211 bp, Homo sapiens
  MAP TO AP000119.1; EXPRESSED IN FETAL LIVER, SIGNAL = 0.71; EXPRESSED IN PLACENTA, SIGNAL = 0.6; EXPRESSED IN LUNG, SIGNAL = 0.59; EST_HUMAN HIT: BE091796.1, EVALUE 5.10e-01; SWISSPROT HIT: P53870, EVALUE 7.20e-01
agttgcagacaccatgatccttcattctctaaacattaagatgaagaacactcattttcataatcacaacacagttattacattcagaaatttcaacactaacacagtactaatctgtaatatgcagtctaagttcatatttaaccaatgtcccaaaaatgtcctttacagtaattttcttttctgttcccaagtaaagaccttttatcct

SEQ ID NO: 31669 - DNA, 211 bp, Homo sapiens; identical to SEQ ID NO: 15141
  MAP TO AL078621.19; EXPRESSED IN LUNG, SIGNAL = 5.7; EXPRESSED IN FETAL LIVER, SIGNAL = 3.8; SWISSPROT HIT: P24499, EVALUE 3.60e+00

SEQ ID NO: 31670 - DNA, 150 bp, Homo sapiens; identical to SEQ ID NO: 20691
  MAP TO AL033532.12; EXPRESSED IN LUNG, SIGNAL =   2; EXPRESSED IN FETAL LIVER, SIGNAL = 0.88; EXPRESSED IN BT474, SIGNAL = 1.4; EXPRESSED IN HBL100, SIGNAL = 1.2; EST_HUMAN HIT: BF574321.1, EVALUE 2.00e-68; SWISSPROT HIT: P34274, EVALUE 3.40e-01

SEQ ID NO: 31671 - DNA, 191 bp, Homo sapiens
  MAP TO AC011347.1; EXPRESSED IN LUNG, SIGNAL = 0.96; EXPRESSED IN FETAL LIVER, SIGNAL =   1; NT HIT: X74297.1, EVALUE 3.80e-01; SWISSPROT HIT: Q03372, EVALUE 3.70e+00; EST_HUMAN HIT: BF689719.1, EVALUE 1.70e-01
gtgggtcaaagtgcgtatcttctatttccagtattctcaaggcactaagacgagacagagagtgacacttcacagtaaaagaaatgatgccaagtgtggctggtgcacactgagtaggtgagagggtgtggtacaagatgccactggtgatgtagctaggggccaggtctcagatgacctcctaagcaatg

SEQ ID NO: 31672 - DNA, 140 bp, Homo sapiens
  MAP TO AC010083.1; EXPRESSED IN LUNG, SIGNAL = 3.5; EXPRESSED IN FETAL LIVER, SIGNAL =   1; NT HIT: gi11421057, EVALUE 2.00e-05; EST_HUMAN HIT: AW197294.1, EVALUE 8.00e-09
tcataaacaaatggatgtggctgtgttccgatacaactttacttacaaaaacaggccatgggctgatttagctggtgggccatattttgtgacctttgctgtcggtgatcaaagaaagaggacacaacaggagaagtcag

SEQ ID NO: 31673 - DNA, 99 bp, Homo sapiens
  MAP TO AC004032.7; EXPRESSED IN LUNG, SIGNAL = 0.63; EXPRESSED IN FETAL LIVER, SIGNAL = 0.75; NT HIT: AB051897.1, EVALUE 5.30e-02; EST_HUMAN HIT: R20874.1, EVALUE 2.10e-01
actcgagatgaccacatggaaaccactagcaggccctggacattccttgggtttgtttcacccatggggccttactgccaactgaagacaagcatggcc

SEQ ID NO: 31674 - DNA, 225 bp, Homo sapiens
  MAP TO AC005973.2; EXPRESSED IN PLACENTA, SIGNAL = 0.74; EXPRESSED IN FETAL LIVER, SIGNAL = 0.87; EXPRESSED IN LUNG, SIGNAL = 0.8; NT HIT: AJ010100.1, EVALUE 1.20e-01; EST_HUMAN HIT: AI693899.1, EVALUE 1.00e-124; SWISSPROT HIT: P41366, EVALUE 3.00e-21
gcacccacgaccctcggtgacaacacagcagcgaacaacgtgcgcttccgctgttcagacggcgaggaactgcaggggcctgggctgagctggggagactttggagactggagtgaccattgccccaagggcgcgtgcggcctgcagaccaagatccagggacctagaggcctcggcgatgacactgcgctgaacgacgcgcgcttattctgctgccgcagttga

SEQ ID NO: 31675 - DNA, 223 bp, Homo sapiens
  MAP TO AL118523.3; EXPRESSED IN LUNG, SIGNAL = 6.7; EXPRESSED IN FETAL LIVER, SIGNAL =   1; EST_HUMAN HIT: AW747972.1, EVALUE 5.40e-01; NT HIT: J00630.1, EVALUE 8.30e+00; SWISSPROT HIT: P07992, EVALUE 2.70e+00
agtcaagtacctgcccatgaactcttcaggtaggaccaaggagcagtcacccagtatacacatggctccttagcttccttctttaggaatggactggaagaatcatgaccaaatgaagggttatagatctggccagcacttcaaacattgccatgtgtagtacatgtagccccaactaagaacttcccagaaaacctgctgcaagatcaagatcaaacactct

SEQ ID NO: 31676 - DNA, 160 bp, Homo sapiens
  MAP TO AC007749.2; EXPRESSED IN LUNG, SIGNAL =  11; EXPRESSED IN FETAL LIVER, SIGNAL = 1.1; NT HIT: AF189368.1, EVALUE 2.00e-02; EST_HUMAN HIT: AI076841.1, EVALUE 2.40e-02; SWISSPROT HIT: P35056, EVALUE 1.70e+00
aataaaggcattaagcaaaaatgtactgggtactgggctctgtgcaaggaataccaagatgagaatggaccctccctaccctcaaggggcccaggctctagtctctctttttggcttcgacttgcatccccgatttctatttgtactacacatgccatga

SEQ ID NO: 31677 - DNA, 218 bp, Homo sapiens
  MAP TO AC004900.2; EXPRESSED IN FETAL LIVER, SIGNAL = 0.94; EXPRESSED IN HBL100, SIGNAL = 6.7; SWISSPROT HIT: P14688, EVALUE 2.10e+00; EST_HUMAN HIT: BF036274.1, EVALUE 7.70e-01; NT HIT: U61154.1, EVALUE 4.40e-01
ccctcttccataacttcaaaggagactttgcatgtgttattagggaaatcacgaaagtggttttgaacacagaataaaatatgatgacaacgtttaaacttgtacccgttaactctgctgtctggcttctttaggacaccagcatgatgtgctggtagagaaactcgtatgatattgtaagggcttttttcctttttcatttcatgttccttcttctg

SEQ ID NO: 31678 - DNA, 455 bp, Homo sapiens; identical to SEQ ID NO: 15151
  MAP TO AL034418.2; EXPRESSED IN BT474, SIGNAL =   1; EXPRESSED IN FETAL LIVER, SIGNAL = 1.7; EXPRESSED IN BONE MARROW, SIGNAL = 1.3; EXPRESSED IN LUNG, SIGNAL = 1.1; EXPRESSED IN HBL100, SIGNAL = 1.3; EXPRESSED IN PLACENTA, SIGNAL = 0.99; EXPRESSED IN HELA, SIGNAL = 1.2; EST_HUMAN HIT: W69670.1, EVALUE 6.60e+00

SEQ ID NO: 31679 - DNA, 100 bp, Homo sapiens
  MAP TO AL096792.5; EXPRESSED IN FETAL LIVER, SIGNAL = 0.59; NT HIT: D90116.1, EVALUE 2.10e-01; EST_HUMAN HIT: AI479593.1, EVALUE 1.20e+00
agaaactcttgtgaatgcctataaggaaagatttgtaagcactgtttgtaacaatagaattcaaaataatatagctgcttctccatcggttaatagacaa

SEQ ID NO: 31680 - DNA, 181 bp, Homo sapiens
  MAP TO AL034452.8; EXPRESSED IN FETAL LIVER, SIGNAL =  29; EST_HUMAN HIT: N46880.1, EVALUE 1.00e-38; NT HIT: AF121217.1, EVALUE 1.70e+00
tttcaatttatttcacatagatctatgatgacttttcttaaagcaaaatgagcagtaacacttatgagcaggtagcaattctcacctgggggaccaggaggaccttgttctccaggatacccaaacccttggctccctttttccccatttcttcctggtaggcctgcagggtgtcaaacat

SEQ ID NO: 31681 - DNA, 101 bp, Homo sapiens
  MAP TO AL078590.12; EXPRESSED IN PLACENTA, SIGNAL = 1.3; EXPRESSED IN FETAL LIVER, SIGNAL = 1.2; EXPRESSED IN BT474, SIGNAL = 1.1; EXPRESSED IN BONE MARROW, SIGNAL = 1.2; EXPRESSED IN LUNG, SIGNAL = 1.2; EST_HUMAN HIT: BE141035.1, EVALUE 2.20e-01; SWISSPROT HIT: Q37374, EVALUE 9.10e+00; NT HIT: U31034.1, EVALUE 7.20e-01
agtggcaaaggggatgagattgcccaggaagatgttatgcatgtgggtcaaatactgaatcctgaagaacatcaaatatgagtggcagatgaaagtagagg

SEQ ID NO: 31682 - DNA, 312 bp, Homo sapiens
  MAP TO AC004964.2; EXPRESSED IN HELA, SIGNAL = 0.59; EXPRESSED IN PLACENTA, SIGNAL = 0.61; EXPRESSED IN FETAL LIVER, SIGNAL = 0.69; EXPRESSED IN HBL100, SIGNAL = 0.67; NT HIT: X85880.1, EVALUE 4.10e-02; SWISSPROT HIT: P34545, EVALUE 1.50e+00; EST_HUMAN HIT: AI804746.1, EVALUE 5.00e-02
acataacccatctggagtaactagtggcatggtgcagggtgcagagctgtgcttgaggtgctccctaaaccctatcagtcctgatactgcttctggggcctggaggggagtaagggaggccagtgtttgggggacagaaggcggcagccctgtgataaacaaaatcatgtttctggcaccaggagcagaattcatgtgtgcttttactgcttcctgtgctcttcctcattttaccccagggccattggtcatggtgtcctgggaccctctgggggcttggagcatcgataccacaaccatagtcccacctgt

SEQ ID NO: 31683 - DNA, 459 bp, Homo sapiens
  MAP TO AB023055.1; EXPRESSED IN PLACENTA, SIGNAL = 0.82; EXPRESSED IN BT474, SIGNAL = 0.76; EXPRESSED IN FETAL LIVER, SIGNAL = 0.77; SWISSPROT HIT: P19474, EVALUE 2.00e-27; NT HIT: gi11419092, EVALUE 0.00e+00; EST_HUMAN HIT: BE867264.1, EVALUE 0.00e+00
gcacagcttcctacagtcttgaaacagccctgttgttctgtcatggccagtgggcagtttgtgaacaaactgcaagaggaagtgatctgccccatctgcctggacattctgcagaaacctgtcaccattgactgtgggcacaatttctgcctcaaatgcatcactcagattggggaaacatcatgtggatttttcaaatgtcccctctgcaaaacttccgtaaggaagaacgcaatcaggttcaactcgctgttgcggaatctggtggagaaaatccaagctctacaagcctctgaggtgcagtccaaaaggaaagaggctacatgcccgaggcaccaggagatgttccattatttctgcgaggatgatgggaagttcctctgttttgtgtgtcgtgaatccaaggaccacaaatcccataatgtcagcttgatcgaagaagctgcccagaattatcag

SEQ ID NO: 31684 - DNA, 219 bp, Homo sapiens
  MAP TO AC011278.3; EXPRESSED IN FETAL LIVER, SIGNAL = 1.3; EXPRESSED IN PLACENTA, SIGNAL = 0.91; EST_HUMAN HIT: AA459017.1, EVALUE 8.00e-04; SWISSPROT HIT: P11369, EVALUE 5.00e-15; NT HIT: U29185.1, EVALUE 5.00e-04
taaaaaatcatgatattatcttagttgatatagaaaaagaattggacaaaattcaacatcatttcatgataaaaattcttgacatactgggaaaggaagctaagtgcctcaacataataaacaccatgtatgaaaagcccaatgctaccgtaatacccaatggtgaagaattgacagcttttcctctaagatcaggagtaagacaaggaggcttaccct

SEQ ID NO: 31685 - DNA, 127 bp, Homo sapiens
  MAP TO AC012593.1; EXPRESSED IN FETAL LIVER, SIGNAL = 1.6; NT HIT: K02402.1, EVALUE 2.40e-01; SWISSPROT HIT: P36110, EVALUE 1.30e+00
acgtacatccacggcatgtactacatttccagacacttgaaatgagttagagtagggttttgcataggatcctaagctttctaggacccaggcctcccaagatctagaaaaagagggaaatgtgagt

SEQ ID NO: 31686 - DNA, 142 bp, Homo sapiens
  MAP TO AC010899.1; EXPRESSED IN LUNG, SIGNAL = 5.5; EXPRESSED IN FETAL LIVER, SIGNAL = 1.1; EST_HUMAN HIT: BE968917.1, EVALUE 3.00e-02; NT HIT: AF184074.1, EVALUE 2.70e-01; SWISSPROT HIT: P55016, EVALUE 3.00e+00
aacattagcccagacatcaagtacctcatccattttgacactggtcattaactctgagaaccgaaaggtatctgtttgtgttgtgaactgctgtgttttgaaaaacatctgtgtgtccctggtaaaaattagagatataagg

SEQ ID NO: 31687 - DNA, 145 bp, Homo sapiens
  MAP TO AC007969.2; EXPRESSED IN BONE MARROW, SIGNAL = 0.88; EXPRESSED IN HBL100, SIGNAL = 0.98; EXPRESSED IN FETAL LIVER, SIGNAL = 0.74; EXPRESSED IN LUNG, SIGNAL = 1.4; NT HIT: X94607.1, EVALUE 1.30e+00; EST_HUMAN HIT: AA044324.1, EVALUE 2.00e-62; SWISSPROT HIT: P10897, EVALUE 7.00e-06
gtttttcagtctttctgcttccatgggctccgctttctctccgagcatttctcatgcccatacatgtttattctggaattgtcatctttggaacagtgattgcaacagcacttatgggattgacagagaaactgattttttccct

SEQ ID NO: 31688 - DNA, 111 bp, Homo sapiens
  MAP TO AC007877.3; EXPRESSED IN FETAL LIVER, SIGNAL = 0.61; EXPRESSED IN BONE MARROW, SIGNAL = 0.76; EXPRESSED IN LUNG, SIGNAL = 0.77; EXPRESSED IN HELA, SIGNAL = 0.68; NT HIT: AL021127.2, EVALUE 3.80e+00; SWISSPROT HIT: P39651, EVALUE 4.00e+00; EST_HUMAN HIT: N80156.1, EVALUE 1.60e-02
aaacaggacacaaaatgatgactctaaattcttcccaaaggatctgactttattttcaacgaaacatgaagaagctgaagccaaaggacaatctcaagaacagggaaggtt

SEQ ID NO: 31689 - DNA, 220 bp, Homo sapiens
  MAP TO AL132708.1; EXPRESSED IN LUNG, SIGNAL = 0.98; EXPRESSED IN BONE MARROW, SIGNAL =   1; EXPRESSED IN HBL100, SIGNAL =   1; EXPRESSED IN BT474, SIGNAL = 1.1; EXPRESSED IN FETAL LIVER, SIGNAL = 0.99; SWISSPROT HIT: Q10549, EVALUE 1.60e+00; NT HIT: AL163281.2, EVALUE 5.20e-01
gatccttttgaacattttctttttttcctggcccagtactgagcccagcaggtatgaagttatgtccagcatgcagaagagggggacgaagttcaataatgggacttgggccggttttagcatcacccaggaaatctgtgtggttcaaaccatagagaagccaggtgtcagactcatctctatccagtaatctggggttattttgtgcagaatagaggtc

SEQ ID NO: 31690 - DNA, 919 bp, Homo sapiens
  MAP TO AC004827.1; EXPRESSED IN PLACENTA, SIGNAL =   2; EXPRESSED IN FETAL LIVER, SIGNAL = 0.98; SWISSPROT HIT: P06599, EVALUE 1.00e-02; EST_HUMAN HIT: AA173713.1, EVALUE 8.80e-01
ggtgcccaatttctctctctcttcacaaggcaccaccagcaatagagatgagaaattctgaagaacagccaagtggagggaccacggtattgcagcgtttgctacaagagcagcttcgctatggcaatcctagtgagaatcgcagcctgcttgccatacaccagcaagccacagggaatggccctcctttccccagtggcagtgggaacccgggccctcagagtgatgtgttgagtccccaagaccaccaccaacagcttgtggctcatgctgctcgacaagaaccccaggggcaggaaatccagtcagaaaacctcatcatggagaagcagctgtctcctcgaatgcaaaataatgaagaactcccgacctatgaagaagccaaggtccagtcccagtactttcggggccaacagcatgccagtgttggagctgccttctatgtcactggagtcaccaaccagaagatgaggactgagggacgcccatcagttcagcggctcaatcctggaaagatgcaccaagatgagggactcagagaccttaagcaagggcatgtccgttccttgagtgaacgactaatgcagatgtcactggccaccagtggagttaaggcccatccacctgttaccagtgctcccctctccccaccacaacccaatgacctctacaagaatcccacaagttccagtgaattctacaaggcccaagggccacttcctaaccagcatagcctgaagggcatggaacaccgaggccccccaccagaatatcccttcaagggcatgccaccccaatctgtagtgtgcaagccccaagagccagggcacttctatagtgagcatcgcctgaaccagccagggagaacagaggggcaactgatgaggtatcagcatccccctgagtatggagcagccag

SEQ ID NO: 31691 - DNA, 221 bp, Homo sapiens
  MAP TO AC007390.2; EXPRESSED IN LUNG, SIGNAL = 0.62; EXPRESSED IN BT474, SIGNAL = 0.67; EXPRESSED IN HBL100, SIGNAL = 0.95; EXPRESSED IN FETAL LIVER, SIGNAL = 0.81; EXPRESSED IN HELA, SIGNAL = 0.99; EXPRESSED IN BONE MARROW, SIGNAL = 0.71; NT HIT: gi5031624, EVALUE 1.00e-108; SWISSPROT HIT: Q03701, EVALUE 7.00e-24; EST_HUMAN HIT: AU153947.1, EVALUE 1.00e-107
ctggaacgctctcactttcatcatctaacacatccatgaatgttcctccatcttcatcaacttcagcaaattcttcatcatccatacttcctaaagaaacttcatcgtcatccaggttaccaagttcatcatcactaccttctgaatcttcatctaatgtgttatccttagctccttttgttctctttttcacgtttctggaaaaaaacacaacttgtaat

SEQ ID NO: 31692 - DNA, 142 bp, Homo sapiens
  MAP TO AL117326.5; EXPRESSED IN LUNG, SIGNAL = 1.7; EXPRESSED IN FETAL LIVER, SIGNAL = 1.7; EST_HUMAN HIT: AA081942.1, EVALUE 1.00e-22; SWISSPROT HIT: O75914, EVALUE 1.00e-13; NT HIT: gi11422528, EVALUE 9.00e-51
ccaataagaagaaggagaaagagcgcccagagatctctcttccttcagactttgagcatacgattcatgtggggtttgatgcagtcaccggggaattcactgtaagtaagctccttgttttgttttgtaagccacgaaagaa

SEQ ID NO: 31693 - DNA, 166 bp, Homo sapiens
  MAP TO AC007056.4; EXPRESSED IN FETAL LIVER, SIGNAL = 1.5; SWISSPROT HIT: P19429, EVALUE 1.30e+00; EST_HUMAN HIT: BE898908.1, EVALUE 3.60e-02; NT HIT: S82470.1, EVALUE 2.10e-02
actctaggttattgccaagctctcctctcacctcttccctctttctttcaagtatctcaggtggtattgatagtaaaacagtcttggcattaatgagtgtctgactggagagtgaaatgtaaataagagttgaatagagcacagccaaagcctacaaattaccgct

SEQ ID NO: 31694 - DNA, 134 bp, Homo sapiens
  MAP TO AC006314.2; EXPRESSED IN FETAL LIVER, SIGNAL = 2.5; EXPRESSED IN BONE MARROW, SIGNAL = 0.9; NT HIT: AJ400877.1, EVALUE 8.00e-17; EST_HUMAN HIT: AW117377.1, EVALUE 1.00e-19; SWISSPROT HIT: P08547, EVALUE 1.00e-09
ggaatctttagggtttactaggtgtaagactatatcactggcaaacaaagatagtttgacttcctcttttccaatttggatgccctttacttctctttcttgcctggttactttgagtgggacttccagtacta

SEQ ID NO: 31695 - DNA, 250 bp, Homo sapiens
  MAP TO AC007597.2; EXPRESSED IN BT474, SIGNAL = 0.61; EXPRESSED IN FETAL LIVER, SIGNAL = 0.6; EXPRESSED IN HELA, SIGNAL =   1; EXPRESSED IN BONE MARROW, SIGNAL = 0.65; EXPRESSED IN LUNG, SIGNAL = 0.66; EXPRESSED IN PLACENTA, SIGNAL = 0.67; NT HIT: X15332.1, EVALUE 6.00e-01; EST_HUMAN HIT: AW392417.1, EVALUE 3.90e-02; SWISSPROT HIT: Q62799, EVALUE 3.20e-01
tcagctggactggggaaggattttccgagcacccagggacctggccctgcagttgcagtatggagtcccagcctcttgcttccagcaggtcttctggctggagaacctggacccagccagccagtatttgataaggagaccacagtcctgccttagttgcagggaagggataagggagtgtgtgtggggttgctcagcaggcttcctggaggaggaggccctcctggagttcgctggcctgaacttgctc

SEQ ID NO: 31696 - DNA, 157 bp, Homo sapiens
  MAP TO AF152364.1; EXPRESSED IN FETAL LIVER, SIGNAL = 1.7; SWISSPROT HIT: P49759, EVALUE 1.70e+00; EST_HUMAN HIT: BE910013.1, EVALUE 1.40e-01; NT HIT: Y12391.2, EVALUE 3.00e-01
gtaagccagcactttctgctttcacttctatcactttggaaacatttagtccagaatgatctgggggttcttacttatggttctaagacagcctccacattcctcagcatgtccagtcacaatcaccatctccccaagaaggcacaaagtaagcatc

SEQ ID NO: 31697 - DNA, 241 bp, Homo sapiens
  MAP TO AC010903.1; EXPRESSED IN FETAL LIVER, SIGNAL = 3.1; SWISSPROT HIT: P40351, EVALUE 4.40e+00; NT HIT: U82668.1, EVALUE 2.30e+00; EST_HUMAN HIT: R93277.1, EVALUE 3.40e+00
ataacagtctttgatctaatgcaattctgtttgtcccaagtacagatttctctattgcttagcccggaactaataaataaatgaataattaatgtcatcacaattctcatcatgcttcctttctggctgttggtagctataaaaattacactacccagattttgatacatccacagtcctagatggacctgtgtacatcctttcctacaagttttcagacatagctctctttcactgggat

SEQ ID NO: 31698 - DNA, 104 bp, Homo sapiens
  MAP TO AL079337.3; EXPRESSED IN BONE MARROW, SIGNAL = 0.91; EXPRESSED IN FETAL LIVER, SIGNAL = 0.89; NT HIT: AJ251973.1, EVALUE 5.70e-02
gacttatttggctgtgacaaattcccagactgtccttccttgacagttttggagagtacagttcaggtaattttgtagactatctcctattggcatttgtgtgg

SEQ ID NO: 31699 - DNA, 114 bp, Homo sapiens
  MAP TO AL035670.16; EXPRESSED IN FETAL LIVER, SIGNAL =  12; SWISSPROT HIT: O94679, EVALUE 3.20e+00; NT HIT: gi7706128, EVALUE 1.00e-45; EST_HUMAN HIT: AW902710.1, EVALUE 6.00e-03
aaatcttcatcataaacttgaaaatactgatggaactccttgatttttttcttgtttgtggaaaacaaacttttattaaagagcatattcactgtgactggataaaggagatgt

SEQ ID NO: 31700 - DNA, 93 bp, Homo sapiens
  MAP TO AC011309.1; EXPRESSED IN BONE MARROW, SIGNAL = 1.1; EXPRESSED IN FETAL LIVER, SIGNAL =   1; EST_HUMAN HIT: BE155017.1, EVALUE 7.90e-01; SWISSPROT HIT: Q22516, EVALUE 9.20e+00; NT HIT: AF285233.1, EVALUE 7.70e-01
ctcttattgaccccacttccatttccacaggcactggtgttccaatctttgggcagcatcagggagaagtgcctgcttccatgcactgacaca

SEQ ID NO: 31701 - DNA, 182 bp, Homo sapiens
  MAP TO AC010905.1; EXPRESSED IN BONE MARROW, SIGNAL = 3.2; EXPRESSED IN FETAL LIVER, SIGNAL = 0.92; SWISSPROT HIT: P43542, EVALUE 6.60e+00; NT HIT: M75144.1, EVALUE 1.10e-01; EST_HUMAN HIT: N87073.1, EVALUE 2.80e-02
accaaagtcattacttcagaaataatgaaccatcaatattccaccaaacagcttctagcagatataaaaggagatgtaattggaaggaaatcaacttcagctactccagtgaaaactttgcataaatatgttgttaaaaatggtcttggtggttatggacctgtagtttatgttgctttcat

SEQ ID NO: 31702 - DNA, 100 bp, Homo sapiens
  MAP TO AC006230.11; EXPRESSED IN FETAL LIVER, SIGNAL = 0.78; EXPRESSED IN BT474, SIGNAL =  12; NT HIT: AF012102.1, EVALUE 2.10e-01; EST_HUMAN HIT: BE551665.1, EVALUE 1.20e+00; SWISSPROT HIT: Q09275, EVALUE 3.10e+00
aagagaactccaaaaccgtagagtttatcacctcagagtcctgcctggaacaaaaatcactgatgaactttgagttctattacagaccctgtgtagtgag

SEQ ID NO: 31703 - DNA, 137 bp, Homo sapiens
  MAP TO AC008274.1; EXPRESSED IN HELA, SIGNAL = 0.87; EXPRESSED IN BT474, SIGNAL = 0.63; EXPRESSED IN HBL100, SIGNAL = 1.1; EXPRESSED IN FETAL LIVER, SIGNAL = 0.6; NT HIT: AF200817.1, EVALUE 1.00e+00
ctttaggttctgactctggtcctgaagcaaatggatgtgactacagttatgtactttcctcataccttcactttttaaattctcgacctcggtcagtttcaccttctcgccaggatgatgaggctgatttctctggt

SEQ ID NO: 31704 - DNA, 101 bp, Homo sapiens
  MAP TO AC004838.2; EXPRESSED IN LUNG, SIGNAL = 2.2; EXPRESSED IN FETAL LIVER, SIGNAL = 0.9; SWISSPROT HIT: Q24322, EVALUE 7.00e+00; EST_HUMAN HIT: AL039203.1, EVALUE 5.00e+00
gtatagacattatggccctgcatttcttgctgacaatattaattgcctacttgacggtcattttccttatttctttcttgctgtaatagttccagccctag

SEQ ID NO: 31705 - DNA, 135 bp, Homo sapiens
  MAP TO AC005232.1; EXPRESSED IN FETAL LIVER, SIGNAL = 0.88; EXPRESSED IN LUNG, SIGNAL = 2.5; NT HIT: D45899.1, EVALUE 6.50e-02; SWISSPROT HIT: Q12824, EVALUE 1.00e+00; EST_HUMAN HIT: BF103376.1, EVALUE 4.50e-01
atgtcatccaagtagtggataccggaaccaggaattgcacagaattgtccagctccaaaacccaagcaccttgcttgggacccactggggttgcagtgaaggtggggggctcagaggtgactgcacacgggtcat

SEQ ID NO: 31706 - DNA, 110 bp, Homo sapiens
  MAP TO AC009558.2; EXPRESSED IN FETAL LIVER, SIGNAL = 1.3; NT HIT: gi5032230, EVALUE 3.70e+00; EST_HUMAN HIT: AI014658.1, EVALUE 9.00e-05; SWISSPROT HIT: P14929, EVALUE 5.30e+00
ggataggcagaatagcaaaatgatcaagagtatgaattatggagtgaggctgacctggaatcagtcttggataaattactttgtttctcttagcttcagtttcctcacct

SEQ ID NO: 31707 - DNA, 87 bp, Homo sapiens
  MAP TO AL031432.1; EXPRESSED IN FETAL LIVER, SIGNAL = 0.94; EXPRESSED IN LUNG, SIGNAL = 1.3; EXPRESSED IN HELA, SIGNAL =   1; EXPRESSED IN PLACENTA, SIGNAL = 0.93; NT HIT: gi11423277, EVALUE 5.00e-42; EST_HUMAN HIT: AI922971.1, EVALUE 7.00e-42; SWISSPROT HIT: Q09385, EVALUE 6.00e-04
aatttggcattcctttcattaatgtagtcgatatctgcatcatcattataaggacgtctccggctatatttgtctcgtttttcaatc

SEQ ID NO: 31708 - DNA, 906 bp, Homo sapiens
  MAP TO AL022393.1; EXPRESSED IN BT474, SIGNAL = 0.91; EXPRESSED IN HELA, SIGNAL = 0.94; EXPRESSED IN FETAL LIVER, SIGNAL = 0.98; NT HIT: gi10092660, EVALUE 0.00e+00; SWISSPROT HIT: Q15776, EVALUE 2.00e-79; EST_HUMAN HIT: AL040316.1, EVALUE 0.00e+00
tactcatcacagagctttcctcccatggcagggcataacccacagttgccggccatttgttgtttcaggtggtgaaatacagactaagagcagggacttgcctccagtcaagaagcttccagaaaaggagcatgggaagatatgccacctgagggaagacattgcccagattcctacacatgcagaagctggtgaacaggagggcaggttacaaagaaagcagaaaaatgccatagggagtaggcgacattattgccatgaatgtggaaagagttttgctcaaagttcaggcctgactaaacacaggagaatccacactggtgagaaaccctatgaatgtgaagactgtggaaagaccttcattgggagctctgcccttgtcattcatcagagagtccacactggtgagaagccatatgagtgtgaagaatgtggtaaggtcttcagtcacagctcaaaccttatcaaacaccagagaacccacactggggagaagccctatgagtgtgatgactgtgggaagaccttcagccagagctgcagcctccttgaacatcacaaaattcatactggggagaagccataccagtgcaatatgtgtggcaaagcctttaggcggaattcacatctcctgagacatcagaggattcatggtgataaaaatgttcagaatcctgagcacggggagtcctgggaaagtcagggtaggacggaaagccagtgggaaaatactgaggctcccgtgtcttataaatgtaatgagtgtgagagaagtttcacacggaatagaagtcttattgaacatcagaaaatccacactggtgagaaaccctatcagtgtgacacatgtggaaaaggtttcactcgaacttcataccttgttcaacatcagagaagccatgtagg

SEQ ID NO: 31709 - DNA, 1725 bp, Homo sapiens
  MAP TO AC011451.2; EXPRESSED IN FETAL LIVER, SIGNAL = 1.1; NT HIT: M99593.1, EVALUE 1.00e-18; EST_HUMAN HIT: AI989529.1, EVALUE 1.00e-68; SWISSPROT HIT: P51523, EVALUE 0.00e+00
aagcaatgtgaagatgtcttctgtaaacatccatgccttaagaccaacatgagtactcaaaatagaggcaacacgtctgaatgtattcagtatgcaaaagacctcctttctctatacaataaaacctctaccataaggaaagtttctgtgttcagtaagcatggaaaatctttccgcctgattttaaatgttcaggtccagagaaagtgtacacaagataaatcctttgaaggcactgactatgggaaagccttcatttatcagtcataccttgaagcacacaggaaaactcagagtggagaaaaactcaatgaatggaagcaatgtggggaagcatttactcactccacaagccatgctgtaaatgttgaaacacacattattaaaaacccctatgaatgtaaggaatgtggaaaagattttagataccctacccaccttaataatcacatgcaaacccacattgggataaaaccttataaatgtaagcactgtggcaaaaccttcactgtgccgtcaggctttcttgaacatgtacgaactcacactggagagaagccctatgggtgtaaggaatgtggtaaagcctttggtacatctgcaggccttattgaacatataagatgtcacgccagagagaaaacctttaaatgtgaccactgtgggaaagcctttatttcttacccatctctttttggacatttgagagttcataatggagagaagccatatgagcataaggaatatgggaaggcctttggtacatcctcaggtgttattgaagatagaagaagtaacacaggacagaaacgctttgattgtgaccagtgtgggaaagtctttgtttctttctcatctctttttgctcatttgagaactcacactggtgagaagccctttaagtgttacaaatgtgggaaaccatttacctcttctgcctgtcttcgtattcacatgcgaactcacacagaagagagactctatcaatgtaagaaatgtggtaaagctttcactaagtgctcatatcttaccaaacatttacgaacacacgctggagagaaaccctatgaatgtatgaaatgtgggaaagccttcactgagcgctcataccttactaaacatttacgaagacacagtggagagaagccatatgaatgtaagaaatgtggaaaagccttcacagaacgctcagatcttactaaacatttacgaagacacactggagataagccctatgaatataaggactgtgggaaagcctttgttgtctcctccagtctagttgatcatttaagaactcacactggatataaaccctataaatgtaatgcatgtgaaaaagcttacagtaggtcttgtgtactaactcaacacttaaaaactcatgcagcagagaagacctctgaatgtaacgcatgtggaaattcctttcgaaattccatgtgctttcatgatcgcttaaaaactctcaccaaaataaaaccctataaatgtaaggactgtgggaaagccttcacttgtcattcagatcttactaatcatgtgcgaattcacactggagagaagccctataaatgtaaggaatgtgggaaggccttccgtacatcctcaggacgtattcaacatttaagaactcatatgggagagaaaccctttgaatgtgaccagtgtgggaaagcctttgcttctttctcagctcgtattgcacatttgaaaacacactag

SEQ ID NO: 31710 - DNA, 181 bp, Homo sapiens
  MAP TO AC005158.2; EXPRESSED IN FETAL LIVER, SIGNAL = 1.8; EST_HUMAN HIT: BF209302.1, EVALUE 1.60e-01; SWISSPROT HIT: Q21534, EVALUE 2.20e+00
aagtcgtaggctccagaggctgagttgtaggaccattttgagcatggctattaataggaacttgagtagtgttcagctgcaagcgatgactgtgaaaactcctagtgaaccatacagaatatatttaagtgtggaattcgctctacctgccctgaaacttaagtctcctgaagtaaagcta

SEQ ID NO: 31711 - DNA, 254 bp, Homo sapiens
  MAP TO AL033520.9; EXPRESSED IN LUNG, SIGNAL = 1.7; EXPRESSED IN FETAL LIVER, SIGNAL = 1.2; EST_HUMAN HIT: AI874074.1, EVALUE 1.60e-01; NT HIT: L41142.1, EVALUE 6.10e-01; SWISSPROT HIT: P10628, EVALUE 2.30e+00
ctttagggtgatgctggagttcagaagctcaatctgcatggggactaccaccgggatctcctcatcctccaagaagggccccaggccactgagcactgaagtgagcagctcgaggtcacagccatgaagcaataaatgtaggaagccattttgtgaggccaggggggaatgaacagctgctccaggccccacctcaaagcgaaggcccacagctggcctgatgtggccagtcttcaaagttgaggattcctgaa

SEQ ID NO: 31712 - DNA, 161 bp, Homo sapiens
  MAP TO AC004975.2; EXPRESSED IN FETAL LIVER, SIGNAL =   1; NT HIT: AL163268.2, EVALUE 5.00e-06; EST_HUMAN HIT: BE156197.1, EVALUE 6.00e-06; SWISSPROT HIT: P18419, EVALUE 1.30e+00
gagctggggctcaggagccatggtgcacggacatgctggccctgactctgcactactggggggtgataaagacctttgtatctgacccaggagtctcgtgtcctctgcctgcattcatgaaactgtgggtggctacctcgttcattcgcaaggacctgtga

SEQ ID NO: 31713 - DNA, 98 bp, Homo sapiens
  MAP TO AP000096.1; EXPRESSED IN FETAL LIVER, SIGNAL =   3; EXPRESSED IN LUNG, SIGNAL = 0.63; EXPRESSED IN HELA, SIGNAL = 0.61; SWISSPROT HIT: P07082, EVALUE 9.20e+00; NT HIT: AL161594.2, EVALUE 8.20e-01
agagagggaatggtcaagggtgacaacccagatgattgacaagtgggaggatggtgattaccaatccctgaaacaagagtaactggaaaaagagcagt

SEQ ID NO: 31714 - DNA, 208 bp, Homo sapiens
  MAP TO AC010808.2; EXPRESSED IN PLACENTA, SIGNAL = 0.92; EXPRESSED IN FETAL LIVER, SIGNAL =   1; NT HIT: AL163282.2, EVALUE 5.00e-53; SWISSPROT HIT: P23743, EVALUE 5.50e-01; EST_HUMAN HIT: AU121795.1, EVALUE 1.00e-36
aaaggcaaggaggggcaagttccatcttacatggatggcagcaagcagagagaataaggaagatgcaaaagcagaaacccctgataaaaccatcagatctcatgagacatattcactaccaggagaacagtgtgaggaaaaccgcccccatgattcagttatctcccaccagttccttcccacaatatgtgagaattatgggagtaca

SEQ ID NO: 31715 - DNA, 143 bp, Homo sapiens
  MAP TO AL034449.1; EXPRESSED IN FETAL LIVER, SIGNAL = 0.61; EXPRESSED IN HELA, SIGNAL = 0.96; EXPRESSED IN HBL100, SIGNAL = 0.82; NT HIT: AL163209.2, EVALUE 3.00e-75; EST_HUMAN HIT: AA905851.1, EVALUE 8.30e-02; SWISSPROT HIT: Q06639, EVALUE 1.00e+00
attacaatgtgcagttcatagtttttcactgttttaatatttaaatacaagtaaaactgtaagttgtcacaaagaatgatagaattgaagtaagtcaagttctgtttcttcgtgtttacaatgtgctgccattatttattttg

SEQ ID NO: 31716 - DNA, 567 bp, Homo sapiens
  MAP TO AC004835.2; EXPRESSED IN FETAL LIVER, SIGNAL = 2.7; EST_HUMAN HIT: AI038076.1, EVALUE 2.30e-02; NT HIT: AJ288981.1, EVALUE 2.30e-02; SWISSPROT HIT: P29374, EVALUE 6.30e-02
attgttgttttcatgtctaatgaaatgactttcacccctaggccatgaacatatccatctcggttcatactcagacttcctacctggtgtcctaaacttgtaattagagtatttttcctcaccatcacgcttccactttgaaaaaaaggtctgctgactcgaccttgtattttgtttgcgagtgatcattttgtcagtgtcaagaggttctttttctgagaaactattaaatgtggccacagatttctctttctcctctttgtttatactaagggtttcactgaagcattcagaatcactactaatttcctctaagaaatctgtcaactgtaaacctaagcctattgactcatggggtggggacacttggcttttccttgtggatttggaatcttcaatatgataactatgagtcttttccaacagacagctgtttccatcagttggggacagctgaccaccagctttatgggctgtctcctggcaatgagtttcaaacccattagtacattctttggcataatctacttttcctcgtttacgctcaggatcctgagtacaaatctt

SEQ ID NO: 31717 - DNA, 169 bp, Homo sapiens
  MAP TO AC009336.2; EXPRESSED IN BONE MARROW, SIGNAL = 0.98; EXPRESSED IN FETAL LIVER, SIGNAL = 0.88; EXPRESSED IN HELA, SIGNAL = 1.4; SWISSPROT HIT: P05710, EVALUE 9.90e-01
cttgtggtagagagagagctgctgctggctcctggactacatgtctttgttcacattcaagaaggggaggcaacttttcccccatcttcagacgaaagtcctgagtttcattttgattatccaaatttgggtcacactcccctccttcccccccaagagccaattactg

SEQ ID NO: 31718 - DNA, 597 bp, Homo sapiens
  MAP TO AL021938.1; EXPRESSED IN FETAL LIVER, SIGNAL = 1.1; EXPRESSED IN BT474, SIGNAL = 0.95; EXPRESSED IN BONE MARROW, SIGNAL = 1.1; EXPRESSED IN HELA, SIGNAL = 1.2; SWISSPROT HIT: Q62315, EVALUE 1.00e-86; NT HIT: gi11419154, EVALUE 0.00e+00; EST_HUMAN HIT: BF311359.1, EVALUE 1.00e-127
cttatagatgcacttgtggaagtcattgaggacgcctttgtcctcctcctcttccttgaccacttctttttcctgagcgaagagtcgccgccggccagtcttcaactgggcctggcccacctccttgagcttgctgcggaagccgttcctgggggccacgccgtggatgagcccattcttgggctcgaagcggggcagagggtggaacttgtggtggtcgttctctgtgtggccttccagcggccccttgcgcttctccaggatctccttctccatcagcacctccttctccagccgccggtgctcctctggggacagggagtcgtaggagagtaggtactggcagtaggcctcctgcagcttggccagccggtcctgggcagttctggggatgcgcagcatgtctgctagtttgttccattttttgaggtcagtcacttgctgcatgccgcccatctcattaatcagccggaaaaagcaggccaggtcgagctcacagccccctgggacagcgaaggggaaaaaaacgggacagttagtgaaagagacacgaacaagatgttcctcattcaacctgtacttcttgaactcctacta

SEQ ID NO: 31719 - DNA, 174 bp, Homo sapiens
  MAP TO AC009485.2; EXPRESSED IN FETAL LIVER, SIGNAL = 0.92; NT HIT: D85863.1, EVALUE 8.70e-02; EST_HUMAN HIT: AW846839.1, EVALUE 3.00e-23; SWISSPROT HIT: O43426, EVALUE 7.50e-01
atggctatgtatgatgcagacacagaggaggttatttccgaggaaacagccaacctggtggattggaaaaaagccactgtaaggtctgtttaccctgagaagggaaactgtccctctccccctgtaaatgccaagtggagcaacccagatgaagcaattgatatgcttcatatg

SEQ ID NO: 31720 - DNA, 356 bp, Homo sapiens
  MAP TO AC008039.1; EXPRESSED IN FETAL LIVER, SIGNAL = 4.1; SWISSPROT HIT: O13360, EVALUE 7.10e+00; NT HIT: gi11024644, EVALUE 5.60e-02; EST_HUMAN HIT: AW935684.1, EVALUE 8.30e-02
tggtgctgcactgcctgtgatgagccacaccctccagtatcatggaggggtccttagagacaagtctggtacagagacagcagtgggggacctgttactcaaagctgggcatggcaataaggataaaaaagaggggaagaatccaagagccatttctgaggtagaatcagtgtgtattggtgcggacctacctgtggagcccaggggtgattcctgtgctactcatgctgcggcctgggatgagaaatggaggtggaagaacaggtttcatagtgaaggtgagagattcagaatgggactcattacattggagattcacctggtggagctgaattctgaagtgagcgctgcactag

SEQ ID NO: 31721 - DNA, 205 bp, Homo sapiens
  MAP TO AL121656.1; EXPRESSED IN FETAL LIVER, SIGNAL =   1; EXPRESSED IN HELA, SIGNAL = 0.95; EST_HUMAN HIT: BE885781.1, EVALUE 1.00e-98; NT HIT: gi8923244, EVALUE 6.00e-99; SWISSPROT HIT: P28572, EVALUE 3.20e-01
cagtttgttctgtgcatttttaaggtccttaaaattctagtcagggcagtgattgatgggatgactgatcgaagtggagatgttgcaactggcctcaaaggaaagctgcaggagttatttggcagagtgacttcaagagtgacaaatgatggagaaatctggaggctgtatgcccacgtatatggaaatgggcagagtgaaaagc

SEQ ID NO: 31722 - DNA, 187 bp, Homo sapiens
  MAP TO AL022170.1; EXPRESSED IN BONE MARROW, SIGNAL = 0.96; EXPRESSED IN FETAL LIVER, SIGNAL = 0.93; SWISSPROT HIT: Q61224, EVALUE 6.60e+00; NT HIT: X98106.1, EVALUE 9.40e-02; EST_HUMAN HIT: BF314346.1, EVALUE 2.60e+00
atcatccaacagtcacaagtcaccctggggcagctcagaattcttggttgcgctctgggactccgtcgtgctcctgttctctgagggctccgtgtcatatataaccacctttcagttttatggcgggcacctcgggtgcagtgtcatcatctcttcccttcacttgtgctgcattgcaggcgttgct

SEQ ID NO: 31723 - DNA, 132 bp, Homo sapiens
  MAP TO AF159056.1; EXPRESSED IN BONE MARROW, SIGNAL = 0.93; EXPRESSED IN LUNG, SIGNAL = 0.9; EXPRESSED IN FETAL LIVER, SIGNAL = 0.9; NT HIT: AF057177.1, EVALUE 9.00e-69; EST_HUMAN HIT: AV733743.1, EVALUE 9.00e-24; SWISSPROT HIT: P03979, EVALUE 2.00e-09
atccactggtacctacgccaggaggggaaggccccacagcatcttctgtactatgatgtctgcaactccagggatatgttggaatcaggagtcagtcaggaaagcatgatacttatggaagtagaaggataa

SEQ ID NO: 31724 - DNA, 100 bp, Homo sapiens
  MAP TO AC007316.2; EXPRESSED IN FETAL LIVER, SIGNAL = 0.59; EXPRESSED IN PLACENTA, SIGNAL = 0.65; EST_HUMAN HIT: BF107569.1, EVALUE 1.20e+00; SWISSPROT HIT: Q63572, EVALUE 1.40e+00; NT HIT: AF020503.1, EVALUE 3.30e+00
gtagagcctcttgcaacccccagaagcaccaagagaccaagaaaaatacctaccaggcccattgtgttcattgctctcttgcagaaactggtgattgtgg

SEQ ID NO: 31725 - DNA, 151 bp, Homo sapiens
  MAP TO AF131217.2; EXPRESSED IN FETAL LIVER, SIGNAL = 4.1; EXPRESSED IN BONE MARROW, SIGNAL = 1.1; NT HIT: AL163247.2, EVALUE 1.00e-77; EST_HUMAN HIT: BF061862.1, EVALUE 4.00e-57; SWISSPROT HIT: P40351, EVALUE 8.70e+00
gttatgaggcatcttccccaagtgacggcatagttgcttcagataatgctcagatgagttctgacggcgtggaacagtggtcttaacactctcattttctgtaagaatacaaatttctacttttctagaaagatatttagcaccattgtca

SEQ ID NO: 31726 - DNA, 160 bp, Homo sapiens
  MAP TO AC006296.8; EXPRESSED IN FETAL LIVER, SIGNAL = 0.58; EST_HUMAN HIT: BF337958.1, EVALUE 1.40e-01; SWISSPROT HIT: P50000, EVALUE 1.70e+00; NT HIT: AF035672.1, EVALUE 7.90e-02
atggagttgggagaagttggcctcatcagagaggcccagaaaaatttcccagaagtgatgtctgagatgaaatctgaaacagaagcagttttatgtagaaaaacaaggaaggaagagagaacaaagaacacacatgatttatatcaagggcagcaggcag

SEQ ID NO: 31727 - DNA, 156 bp, Homo sapiens
  MAP TO AC008013.8; EXPRESSED IN LUNG, SIGNAL = 1.2; EXPRESSED IN FETAL LIVER, SIGNAL = 0.95; SWISSPROT HIT: Q06903, EVALUE 1.70e+00; EST_HUMAN HIT: BF376849.1, EVALUE 8.30e+00; NT HIT: AF171666.1, EVALUE 5.00e-03
ggttgttgtctattttcagtgcctggattctcctctaaagatgaggataatggtccctccctcccacaccttcacaaggatgattccaaggacaagcaagattgttcttcagagcacgcctcagaggaagggcatggtgtgagtgctgggcattgt

SEQ ID NO: 31728 - DNA, 175 bp, Homo sapiens
  MAP TO AL096699.11; EXPRESSED IN FETAL LIVER, SIGNAL =  17; EST_HUMAN HIT: AV723678.1, EVALUE 1.00e-02; SWISSPROT HIT: Q10263, EVALUE 7.50e-01
atcaatatgctttatgtacctagtatatattctagtccttttcctcttggagtttttactcattagggaaaaacgacctgcaaatatcgtaatgtcagtagtgataactacaatgaggaaaaaaattaaagctttgaaagaagacagaacaatggtagtggcatatcaaataggg

SEQ ID NO: 31729 - DNA, 88 bp, Homo sapiens
  MAP TO AP000494.1; EXPRESSED IN LUNG, SIGNAL =   1; EXPRESSED IN FETAL LIVER, SIGNAL = 0.94; NT HIT: AL163283.2, EVALUE 2.00e-04; EST_HUMAN HIT: AI733566.1, EVALUE 1.00e-05; SWISSPROT HIT: P50901, EVALUE 4.10e+00
tcgggacagggcacattggggatggctggtctctgctccatgatgcctaggacctcagctgggagagacttgaacagttgggggctgg

SEQ ID NO: 31730 - DNA, 76 bp, Homo sapiens
  MAP TO AC007563.1; EXPRESSED IN PLACENTA, SIGNAL = 0.78; EXPRESSED IN FETAL LIVER, SIGNAL = 0.65; NT HIT: AP000005.1, EVALUE 1.30e-01
cgagaaaaagagcggcaggggaggagctcaagaagagacgagagataggaaagaagcattataatttggcaaaaat

SEQ ID NO: 31731 - DNA, 382 bp, Homo sapiens
  MAP TO AC012267.1; EXPRESSED IN FETAL LIVER, SIGNAL =  14; EST_HUMAN HIT: BE153788.1, EVALUE 2.00e-12; NT HIT: U76377.1, EVALUE 4.00e-12; SWISSPROT HIT: P08548, EVALUE 1.00e-21
caataagaaagcagtaaacatgagcagcactatagaggaaatggacccaaagaacatacacagaacagtccatccaacagaagagtacacattcttctcaagaacacatggaatattctctggaatagatcatacggcaggccacaaaatcagtcctaacaaatttaaggtcaaaattataccaagtatcttttctgaccacagtgttatgaaactagaaatcaataacaggagacaaactggaaaatttcacaaatatgtagaaattaagcaacactctactaaacaaacagtgaaagaaaaaatcaaaaaatatcttgagacaaataaaaatggcaacacatataccaaaacttatgggatacagcaaaagcagttctaa

SEQ ID NO: 31732 - DNA, 85 bp, Homo sapiens
  MAP TO AC006042.2; EXPRESSED IN HELA, SIGNAL =  12; EXPRESSED IN FETAL LIVER, SIGNAL =   2; NT HIT: AJ243438.1, EVALUE 5.90e-01; EST_HUMAN HIT: AW809402.1, EVALUE 1.80e-01
gtttcttaataatttgcttcatttctttgttactgacactgctcaggaaaatcttctttgtctccgtcgctgcaaaacaagaaga

SEQ ID NO: 31733 - DNA, 103 bp, Homo sapiens
  MAP TO AC007128.2; EXPRESSED IN FETAL LIVER, SIGNAL = 0.9; EXPRESSED IN HBL100, SIGNAL = 1.3; SWISSPROT HIT: Q09566, EVALUE 9.10e+00; NT HIT: AJ400877.1, EVALUE 8.70e-01; EST_HUMAN HIT: AU119830.1, EVALUE 8.20e-02
ttctttcctcaacgtaacctcttccatctattgtcttttctccctgttgtgttggtttgtgatccactcttgaagaaacacccatgtagatcagatttagaca

SEQ ID NO: 31734 - DNA, 91 bp, Homo sapiens
  MAP TO AC010881.1; EXPRESSED IN LUNG, SIGNAL =   3; EXPRESSED IN FETAL LIVER, SIGNAL = 0.97; NT HIT: AL162753.2, EVALUE 7.50e-01; EST_HUMAN HIT: BF215307.1, EVALUE 4.40e+00
ttctcagtggtaatgagagttacataggagcaccaggacacaagtgacttcaaagggatttcttcacctgagggagatgcaagccagagta

SEQ ID NO: 31735 - DNA, 102 bp, Homo sapiens
  MAP TO AC009640.2; EXPRESSED IN FETAL LIVER, SIGNAL = 2.6; EST_HUMAN HIT: BF691060.1, EVALUE 3.00e-44; NT HIT: AF237387.1, EVALUE 7.30e-01
gaaatcccaggctgaaagaaaaattttaaaacttctgggcaaggcgaactacaatggaatggcaggtatggtccttgtcggggtggcaaaatgccatctgag

SEQ ID NO: 31736 - DNA, 108 bp, Homo sapiens
  MAP TO AC009951.3; EXPRESSED IN FETAL LIVER, SIGNAL = 1.1; EST_HUMAN HIT: BE870988.1, EVALUE 2.20e-02; NT HIT: gi11420729, EVALUE 1.50e-02; SWISSPROT HIT: P56289, EVALUE 9.10e+00
agaggcaaattatttgtatttttaagtatgtgtttgtacctgttttcctggagctgagcagattcacaagacatgggattcctggggctaaaaccggtaaagttcagg

SEQ ID NO: 31737 - DNA, 105 bp, Homo sapiens
  MAP TO AC010089.1; EXPRESSED IN FETAL LIVER, SIGNAL = 0.91; EXPRESSED IN BT474, SIGNAL = 1.3; SWISSPROT HIT: Q28559, EVALUE 9.10e+00; NT HIT: AF135416.1, EVALUE 4.90e-02
tttcagctctatcagattggtcacattttcctcctcattggcaattttttctatccattcctgcaatttttttcccttcattgcattgggttgcaactccatttg

SEQ ID NO: 31738 - DNA, 121 bp, Homo sapiens
  MAP TO AC008024.1; EXPRESSED IN BONE MARROW, SIGNAL = 0.97; EXPRESSED IN FETAL LIVER, SIGNAL = 1.1; EST_HUMAN HIT: AV721471.1, EVALUE 1.00e-01; NT HIT: AL163227.2, EVALUE 9.00e-01
  unsure 95
ttattggtcaaagcacatcacatagtcatgcctgagcctatcctcaggaagacaaggccatttgaccaggaaacacaggagatccagaaatattnggtgaacactggtaacgtccatcagg

SEQ ID NO: 31739 - DNA, 143 bp, Homo sapiens
  MAP TO AC009401.1; EXPRESSED IN FETAL LIVER, SIGNAL =   1; SWISSPROT HIT: P57272, EVALUE 3.10e+00
tggggtgaagtttaccttgcggcagatcttgaattttgttttattatggacattgcagtgacttgggagtgttccaatacagactgacacaatgcaggttctatttaggaagattaatttggcagatgtacaaagcatggagt

SEQ ID NO: 31740 - DNA, 300 bp, Homo sapiens
  MAP TO AL109809.9; EXPRESSED IN FETAL LIVER, SIGNAL = 0.88; SWISSPROT HIT: P01871, EVALUE 8.00e-03; NT HIT: X90000.1, EVALUE 6.20e-01
cagcgatctgagcctggcacaaggatccgattgacctatgcatcctctgggttctcgacacaccaggttactgtgacctggcttaaaaacaaacacgagctcccaaacccccagaccagcgtccagtacagtggacacacctacaatgtgaccagcagtgtgcttgtcccgctgatggatgatgatgtgttctcccacgtcgtttgccatgtggagcacaagttgacgtggtttttccagaaaaccactggcctggaccagtacctccagggtaagatctctctctctgctcagctgagg

SEQ ID NO: 31741 - DNA, 85 bp, Homo sapiens
  MAP TO AC009303.1; EXPRESSED IN FETAL LIVER, SIGNAL = 0.95; EXPRESSED IN HELA, SIGNAL = 7.4; EXPRESSED IN HBL100, SIGNAL = 1.2; EXPRESSED IN LUNG, SIGNAL = 4.5; NT HIT: gi11431114, EVALUE 7.00e-41; EST_HUMAN HIT: AU135587.1, EVALUE 3.00e-38
attttgcaccgcaagattgatgaagtccctagccgtgccgagctaatacagtatcagaagagatttattgaactctaccgccaga

SEQ ID NO: 31742 - DNA, 164 bp, Homo sapiens
  MAP TO AC011288.1; EXPRESSED IN FETAL LIVER, SIGNAL = 1.1; SWISSPROT HIT: Q91145, EVALUE 5.00e+00; NT HIT: AE002154.1, EVALUE 5.90e+00
tttctttcgttgtgaggtagtaattcagtttccccttggtagcccagatcatcccaaccaacatggtaactgctttcctgaccttttgattcaaaggcatgaggaggccaaggttgccaggtggaagtctcaaattccatttaatgggatcattgtcgtgtttc

SEQ ID NO: 31743 - DNA, 225 bp, Homo sapiens
  MAP TO AC011302.1; EXPRESSED IN FETAL LIVER, SIGNAL = 0.9; NT HIT: X63224.1, EVALUE 2.00e-03; EST_HUMAN HIT: AI906667.1, EVALUE 6.00e-04; SWISSPROT HIT: P31367, EVALUE 3.30e-01
atggcttctgtaacagagtagcagtgccaagagagcagcagtgtcagctttggcactgttgacatttggggctgcatgattccctggtggggcatccttgtgtgctgtatgttgttgagcagtgtccctgggcttcacccaccagatgtcaggaccaactctccacccagggaagacgtttccaggcattgccagtgtcccctgagggcaaagtgaactgcaatt

SEQ ID NO: 31744 - DNA, 169 bp, Homo sapiens
  MAP TO AL117192.1; EXPRESSED IN FETAL LIVER, SIGNAL = 1.1; SWISSPROT HIT: Q00132, EVALUE 2.90e+00; EST_HUMAN HIT: AA989045.1, EVALUE 7.00e-43; NT HIT: gi6005718, EVALUE 3.90e-01
cttccagtgcctgagattcagggctgacccggatgcagactatgatgtgcagctctacagccccaccctgatccagccaggcacagaggaggttctcaacaaatatttgctgagcccctgaagttgcttcagaagggctgccttggactgctgagtccttgacttccat

SEQ ID NO: 31745 - DNA, 124 bp, Homo sapiens
  MAP TO AL049561.16; EXPRESSED IN LUNG, SIGNAL = 5.1; EXPRESSED IN BONE MARROW, SIGNAL =   1; EXPRESSED IN FETAL LIVER, SIGNAL = 0.88; EXPRESSED IN HELA, SIGNAL = 0.93; EST_HUMAN HIT: AV763960.1, EVALUE 1.00e-01; SWISSPROT HIT: Q99871, EVALUE 1.80e+00; NT HIT: Z25464.1, EVALUE 2.80e-01
aaaataaatgaagatctagtggaagtgttgttgatgagggcttgcatgctgggtcaggaggagggcaaaatgactgagaggggtaggagaagttgggggccttgttgtcatagtgacatcaaag

SEQ ID NO: 31746 - DNA, 143 bp, Homo sapiens
  MAP TO AC006325.3; EXPRESSED IN FETAL LIVER, SIGNAL = 1.7; SWISSPROT HIT: P44843, EVALUE 5.10e+00; NT HIT: gi6755021, EVALUE 2.80e-01; EST_HUMAN HIT: AW902857.1, EVALUE 8.30e-02
aaagtgataatgctgaaagtgaaactgaagtagaaggtaatggaactgaagtagaagacatggccacctgtgggcatgttgacactgccaccataggagagaccctcgctgcagagccagaggaacttaatgaagaccaacct

SEQ ID NO: 31747 - DNA, 186 bp, Homo sapiens
  MAP TO AC006369.3; EXPRESSED IN FETAL LIVER, SIGNAL = 0.9; NT HIT: AF076840.1, EVALUE 1.50e+00; EST_HUMAN HIT: AW814885.1, EVALUE 4.40e-01; SWISSPROT HIT: Q05205, EVALUE 6.40e+00
aagatcacgcacttggtgatgtgcacagagcagctggctaatgaaagcatggtgattaagctgagccctgcatctcgctgttctctaacgggggtccagagggagccaataaagctctctgtgaaatgtactcagaaatctgaaatgtgtccaaatcaccagttgccaactaacctgcccaaaatc

SEQ ID NO: 31748 - DNA, 97 bp, Homo sapiens
  MAP TO AC009401.1; EXPRESSED IN FETAL LIVER, SIGNAL = 1.1; EST_HUMAN HIT: BF589937.1, EVALUE 9.00e-48; NT HIT: AF219936.1, EVALUE 5.00e-48
tctccccgttgccggttttagctgcgtagtgaaggagtgaacagtggtctggtccctgaattagcagactgcctccatttttatagctttctattag

SEQ ID NO: 31749 - DNA, 146 bp, Homo sapiens
  MAP TO AL109954.10; EXPRESSED IN FETAL LIVER, SIGNAL = 1.8; EST_HUMAN HIT: AA861184.1, EVALUE 5.00e-77; SWISSPROT HIT: P19313, EVALUE 3.40e-01; NT HIT: AJ004829.1, EVALUE 3.30e-01
tgacttcgaattagcctctggactcgatataagtaggtgtcgttgctggcattgttgtaggattgaatgaagaagttgagtgttgaattcatgttcttcttgctcatgagcttctgctggaagccctcccacctttggaagtgacc

SEQ ID NO: 31750 - DNA, 389 bp, Homo sapiens
  MAP TO AC009433.1; EXPRESSED IN FETAL LIVER, SIGNAL = 2.1; NT HIT: AL161577.2, EVALUE 3.80e+00; SWISSPROT HIT: Q92373, EVALUE 6.30e+00
  unsure 40
  unsure 71
  unsure 112
  unsure 169
  unsure 186
  unsure 225
  unsure 229
  unsure 245
  unsure 316
  unsure 366
aggtaaccagcatcctggatgtgatgttcatcactgccantgagtatctttctgtttttaacacacatatnatatccactatcaatatatattatagttttgcatgtttttnaagcttcacatctacgggtgaatctgtggctgatggcttgtgtcctctgagccacangcccctcagcccacctngctttcagcacagctgtggtgacagctcagagcaccccngccnagtggccccacttcangtccagtgtcctttctgctttcctgccttgggctttctcccgagttccaggaggctgatcagcctgtgcanggcacagccagaggggccaggagctggcatccctggggacaaccttcaanccaacgggaacaaggatcagtga

SEQ ID NO: 31751 - DNA, 97 bp, Homo sapiens
  MAP TO AC009756.1; EXPRESSED IN FETAL LIVER, SIGNAL = 7.8; NT HIT: AF322857.1, EVALUE 3.20e+00; EST_HUMAN HIT: BF308451.1, EVALUE 4.70e+00
  unsure 31
  unsure 92
gggtgtatgactgaatcagtaccatgagaantgtagatattctgaagattgccatgagcaacaaagcatcctttgtctcagactcagaagtnctcat

SEQ ID NO: 31752 - DNA, 202 bp, Homo sapiens
  MAP TO AC009974.2; EXPRESSED IN FETAL LIVER, SIGNAL = 1.1; EXPRESSED IN HBL100, SIGNAL = 1.1; NT HIT: AB033104.1, EVALUE 4.00e-72; SWISSPROT HIT: P23647, EVALUE 3.00e-07
gccctgaagttcatcccaaaattggggcgctcagagaaggagctgaggaatttgcaacgagagattgaaataatgcggggtctgcggcatcccaacattgtgcatatgcttgacagctttgaaactgataaagaggtgtgctttgacagttttgggccctgtctccccaagcacaagggttccaggaatttcccaacctcag

SEQ ID NO: 31753 - DNA, 229 bp, Homo sapiens
  MAP TO AF188025.1; EXPRESSED IN FETAL LIVER, SIGNAL =   2; NT HIT: AL161589.2, EVALUE 8.50e+00; SWISSPROT HIT: Q58445, EVALUE 3.90e+00
aaataggcaacaaggaagtgatggtaaaataataatcacaaaaatttatctcattgtatcagttataaaagataacatgctctgtagtctggagagatggcaacaggaatcacacctgatgattctgctagtgggtaatgtgcacaaaactagtcaggtaatacttaataatttccatattatactaaattttaagaaagatttgcttcttaaatttgaattcccatta

SEQ ID NO: 31754 - DNA, 90 bp, Homo sapiens
  MAP TO AC008279.1; EXPRESSED IN FETAL LIVER, SIGNAL = 0.69; EST_HUMAN HIT: AI381520.1, EVALUE 8.00e-44; SWISSPROT HIT: P93107, EVALUE 2.40e+00; NT HIT: D13556.1, EVALUE 7.40e-01
caaagctgtgggactttcggaagctgttaccaattgtgtccatcgatataggtccaagtcctggcaatgaggtgaattttgattcatcag

SEQ ID NO: 31755 - DNA, 368 bp, Homo sapiens; identical to SEQ ID NO: 15232
  MAP TO AL049758.11; EXPRESSED IN LUNG, SIGNAL = 6.1; EXPRESSED IN FETAL LIVER, SIGNAL = 0.98; EST_HUMAN HIT: BF343428.1, EVALUE 3.40e-01; NT HIT: AE001774.1, EVALUE 4.90e-02; SWISSPROT HIT: P53234, EVALUE 1.50e+00

SEQ ID NO: 31756 - DNA, 84 bp, Homo sapiens
  MAP TO AC008179.1; EXPRESSED IN FETAL LIVER, SIGNAL = 0.91; EST_HUMAN HIT: BE891293.1, EVALUE 4.00e-03; NT HIT: L27595.1, EVALUE 1.00e-05
tcttctctggctaacttttgccatgccgctgccatcaccaccatcagcaccatcagcaccatcacaaccaccctccccaagact

SEQ ID NO: 31757 - DNA, 222 bp, Homo sapiens
  MAP TO AL049738.4; EXPRESSED IN FETAL LIVER, SIGNAL =  27; EST_HUMAN HIT: AW893248.1, EVALUE 2.10e+00; NT HIT: AF060195.1, EVALUE 4.50e-01
tgggttaggtctcaggtttgctggatggctttggttggtataaccagattcatgaatggacaggcccagatgcctgccctgtgtgaccaggttatgatccacaagcagaaaaaacaaagatccttttagcctcctgaaatcccttgaatgtgaaaacacagtcatcactctgggcaatcagagaggccagagccctgttttttgtgtggctgctacatggga

SEQ ID NO: 31758 - DNA, 192 bp, Homo sapiens
  MAP TO AC007427.2; EXPRESSED IN LUNG, SIGNAL = 3.7; EXPRESSED IN FETAL LIVER, SIGNAL = 0.9; EST_HUMAN HIT: BF247983.1, EVALUE 6.70e-01; NT HIT: AF205067.1, EVALUE 2.00e-03; SWISSPROT HIT: P08401, EVALUE 1.70e+00
ccccatgtctacaaatcctagaatcttagaggtcattggcttcaacctcccacgatacaaggatactctcaaagaaaaccactttcagcctctgcctgacattcacaatgggaagatgatcaacatggccaccactgttgccacctgtaaactcccatcctgtggcggtaagtatgtcttctacagttgcaa

SEQ ID NO: 31759 - DNA, 227 bp, Homo sapiens
  MAP TO AL049777.2; EXPRESSED IN FETAL LIVER, SIGNAL =  22; SWISSPROT HIT: P41702, EVALUE 3.90e+00
aatatttgccaagatctacatctacagctcaaatagtgactatttgcagacttcaaatgcatcatatggtttatttaagtaggagtgtatgtgtgtgtgtttgtgtgtgtatgcacagaggcacacacgtgaacatttgccaatgctttatttttatttttgtttttaatttttatagattcaggaagggcttatgcagatttcttataaggatatattatataatg

SEQ ID NO: 31760 - DNA, 255 bp, Homo sapiens
  MAP TO AC005064.2; EXPRESSED IN FETAL LIVER, SIGNAL = 1.6; SWISSPROT HIT: Q13228, EVALUE 7.70e-01; NT HIT: gi11422054, EVALUE 0.00e+00
ttgtgaatatccttctccctcctgatgctaaagagattgccactcgcttccgctggtggcagccaagacatgacggcctggatcagaacgactgggccattgacaatgtcctcatctcaggctctgctgaccaaaggaccgttatgctggacaccttcagcagcgccccagtaccccagcatgagcgctcccctgcagatgccggccctgtcgggaggatcgcctttgacatgtttatggaagacaaaacttcag

SEQ ID NO: 31761 - DNA, 134 bp, Homo sapiens
  MAP TO AC009951.3; EXPRESSED IN FETAL LIVER, SIGNAL = 4.8; NT HIT: M26501.1, EVALUE 2.60e-01; EST_HUMAN HIT: AV730599.1, EVALUE 1.10e-01; SWISSPROT HIT: P29933, EVALUE 8.90e+00
tctaccctgtgagtttctggcctgccaatttcaacttgaagcttgactgggctgatttgatgcaaatacctccagggaaaaccctgaaactgatgaacagttatgtcaagtcgattttgcaccatcgggaaaag

SEQ ID NO: 31762 - DNA, 137 bp, Homo sapiens
  MAP TO AC009811.2; EXPRESSED IN LUNG, SIGNAL = 2.2; EXPRESSED IN FETAL LIVER, SIGNAL = 1.2; EST_HUMAN HIT: BE162177.1, EVALUE 4.90e+00; NT HIT: AL163284.2, EVALUE 4.00e-03
  unsure 136
gtgtgccgcgagcagtctccagcttgggtgctggcatctagatgaggggaactcagtggcacctgaaaacttggagatgccagcaatcatagagccccgggagatgttagaggtcttgctcagggagttacaaggnt

SEQ ID NO: 31763 - DNA, 115 bp, Homo sapiens
  MAP TO AC011619.1; EXPRESSED IN LUNG, SIGNAL =  13; EXPRESSED IN FETAL LIVER, SIGNAL = 0.98; SWISSPROT HIT: Q02761, EVALUE 3.10e+00; NT HIT: AF095703.1, EVALUE 1.00e+00
cagcatcatgcagtatttgtggctacatgcaattgcattcattagcctcccaaagtcctcttcctctaccactttcacatttggatggatctctgtcattaaggaatgttttctc

SEQ ID NO: 31764 - DNA, 145 bp, Homo sapiens
  MAP TO AC009893.1; EXPRESSED IN FETAL LIVER, SIGNAL = 0.94; NT HIT: X67778.1, EVALUE 1.30e+00; EST_HUMAN HIT: BF365702.1, EVALUE 6.00e-16; SWISSPROT HIT: P33251, EVALUE 6.70e+00
tgaagaagttccaccaaaggaagcatgaaagcccaagtcttgacttggtttttgagcagtgccacagagttctttttcagtttcagaagtggaatcagactcttcattgtctctgggaagataccaaagaaggcagttaaacctg

SEQ ID NO: 31765 - DNA, 105 bp, Homo sapiens
  MAP TO AC009811.2; EXPRESSED IN FETAL LIVER, SIGNAL =   1; EST_HUMAN HIT: BE173524.1, EVALUE 8.40e-02
tcggttctgcttttgctgctcccattgtcgttccccccatcttctattttattaatttctgttctcattactacaatttctaatgttatattgtctcttggtttt

SEQ ID NO: 31766 - DNA, 163 bp, Homo sapiens
  MAP TO AF064865.1; EXPRESSED IN FETAL LIVER, SIGNAL = 0.92; NT HIT: AL163281.2, EVALUE 4.00e-87; EST_HUMAN HIT: AJ003472.1, EVALUE 2.00e-30; SWISSPROT HIT: Q13308, EVALUE 2.00e-03
agatccccagttgttattggcaatgcagctgtaatagccggagtcttctgctttcaccgtgcgaataatgaagcttccgttgctaaagatgctcctccgcccatcaatcgttactagactgggtgtcccgttactgcctcacaggaagaaaaatgcacagatt

SEQ ID NO: 31767 - DNA, 412 bp, Homo sapiens
  MAP TO AP000020.2; EXPRESSED IN FETAL LIVER, SIGNAL = 1.4; SWISSPROT HIT: P37091, EVALUE 4.70e-01; EST_HUMAN HIT: AU120694.1, EVALUE 1.50e+00; NT HIT: M57603.1, EVALUE 1.00e+00
aggcccctcttgaatcttcacagcaatcattaacattttaaaaaccccaagaagttctgcagcaaagacgttctttaactttgaatccaagttgtacatccattttggaccgcagaactgtccaccacctcctccctgaccacaactatgattccctcctctgactaacgtttcacacaaccccacgggggatgctttggccaactgtgatgggtgtggagtggcaaggcatcgtgcgatccaaagaacatgtgtgatgtccaggctccatttaggtgtaagttgtactactggggcctgactacctctgcatgtgactggccagccttcgggattgcgaagtggctgcttacagtcagccccaaagaatttttttttactttctttctgtttctttatgtccaccttattc

SEQ ID NO: 31768 - DNA, 91 bp, Homo sapiens
  MAP TO AC007684.2; EXPRESSED IN FETAL LIVER, SIGNAL = 1.1; EST_HUMAN HIT: AI273296.1, EVALUE 3.00e-44; NT HIT: gi4506376, EVALUE 2.00e-44; SWISSPROT HIT: P41892, EVALUE 2.40e-02
ctgagatagcttccaaaataagcaacaatatttgggtgtttacagtctttcatcataataatttcttgctgcacaactgcaaagtcttctc

SEQ ID NO: 31769 - DNA, 289 bp, Homo sapiens
  MAP TO AL023877.1; EXPRESSED IN FETAL LIVER, SIGNAL = 0.95; EST_HUMAN HIT: AA179888.1, EVALUE 3.00e-89; SWISSPROT HIT: P11227, EVALUE 1.70e-02; NT HIT: AL163213.2, EVALUE 1.00e-120
agtggtgattaggcctggtggaactgccatcaataaaccaaatgtgatgagggtgagaaacagggaagaaggaaatgtggggaaatggggtgaacgtcaggtggatcagagagatgcagtcatgagggtcaggtgtggtatctggaataatgtgggagaccggattgaagtccgggccgagaacaatggtaattgtgggactcaacaaagagtgggtacaactgaaggagccgggggagcagaaagtataagtgtcaggtgtgaggaagaaaatagattttggaaatta

SEQ ID NO: 31770 - DNA, 301 bp, Homo sapiens
  MAP TO AL022324.1; EXPRESSED IN FETAL LIVER, SIGNAL = 2.1; NT HIT: gi11417883, EVALUE 1.00e-24; EST_HUMAN HIT: AA312780.1, EVALUE 1.00e-24; SWISSPROT HIT: P35626, EVALUE 4.00e-07
aagtcaagacatccgtatctctttcatcttgaggatgcttactcacgatgtaggctgtattgttaaaaatgtgtcacttttcccttccagtatccggagtgtgatgcagaaatatcttgcagagaccaatgaaataaactttgacaagattttcagtcagaaaattggtaagtcctgcttgttcatttggcatatgatacttttagtgatgaaattgagcaattctatagtaatatatgaatgcaccccccagtgctttgtgtcctctatagccacagctgggaataaaggaaatttcagg

SEQ ID NO: 31771 - DNA, 210 bp, Homo sapiens
  MAP TO AC009232.1; EXPRESSED IN FETAL LIVER, SIGNAL =  14; EST_HUMAN HIT: AW950574.1, EVALUE 7.40e-01; NT HIT: AF117707.2, EVALUE 2.00e+00
gctccactgtccagcctggtctccattccagctgcagcttttgctgcccccctcgcaggagcctcccttctctgggaacagggctcgctggcttccacacagtgacttcgccttgaaggtgctgaggagagcgttaggcgctttctctactcttccacctttggctgagtcagcatatgaaatttctggataatagtccacacagagcat

SEQ ID NO: 31772 - DNA, 90 bp, Homo sapiens
  MAP TO AB020877.1; EXPRESSED IN FETAL LIVER, SIGNAL = 3.9; NT HIT: AF062308.1, EVALUE 1.20e-02
tctgaaaagcatcaagactgaaaaaagaaaggcattcctgtctggagagaagaaaagtgagtgaggctgggataatgaaagaggatgaaa

SEQ ID NO: 31773 - DNA, 132 bp, Homo sapiens
  MAP TO AC012113.1; EXPRESSED IN FETAL LIVER, SIGNAL =   1; EST_HUMAN HIT: AA058812.1, EVALUE 6.80e+00; SWISSPROT HIT: P07702, EVALUE 5.20e+00
cagaaacactgacctatttgagcccatccatgggacagtgttcaactatggcttccacagagaggtttcctacacctgtaaaaggctggcttagaagacctccaagataatcttaactctgagctctatgag

SEQ ID NO: 31774 - DNA, 165 bp, Homo sapiens
  MAP TO AC005014.1; EXPRESSED IN BONE MARROW, SIGNAL = 0.58; EXPRESSED IN LUNG, SIGNAL = 0.48; EXPRESSED IN FETAL LIVER, SIGNAL = 0.81; SWISSPROT HIT: P53297, EVALUE 2.60e-01; NT HIT: gi6005698, EVALUE 5.00e-59; EST_HUMAN HIT: BE273553.1, EVALUE 7.00e-59
cgacctcgagtccaacatgtccaatggatgggaccccaatgaaatgttcaagttcaatgaagagaactacggtgtgaagaccacctatgacagcagtctttctccttatacggtgcccttagaaaaggacaactcgaaagagtttcagctgtgagagctgcgtgc

SEQ ID NO: 31775 - DNA, 223 bp, Homo sapiens
  MAP TO AC001228.1; EXPRESSED IN LUNG, SIGNAL = 0.43; EXPRESSED IN FETAL LIVER, SIGNAL = 1.6; SWISSPROT HIT: P20393, EVALUE 1.70e+00
aggaagcagcccaggtgcaaatactcgattcagttttcttaaaacagaactgcaagtttttgcctgggctacagccaagcagagtaaagctcttccctttcctgcagaagatgacaatcctactcttactgtcctagctacctctgccccccgcgataaacttgccagcgcaccaacagaacagcctgggacacagcaatgtgcccctactgaccacacttgc

SEQ ID NO: 31776 - DNA, 89 bp, Homo sapiens
  MAP TO AC002460.1; EXPRESSED IN LUNG, SIGNAL = 0.44; EXPRESSED IN FETAL LIVER, SIGNAL = 0.69; NT HIT: AB025110.1, EVALUE 7.30e-01; EST_HUMAN HIT: BE537151.1, EVALUE 2.80e-01
ttggaagagatataactataatcagagaagatagcttggcaatggcaatgcgtttcctttcctggaaattcaagaaaccagatctcaaa

SEQ ID NO: 31777 - DNA, 328 bp, Homo sapiens
  MAP TO AC006357.2; EXPRESSED IN FETAL LIVER, SIGNAL = 1.3; SWISSPROT HIT: P72336, EVALUE 2.80e+00; NT HIT: AF181897.1, EVALUE 1.00e-24; EST_HUMAN HIT: BF035327.1, EVALUE 7.00e-30
gaagattaaaccagccacaatattccctaaaccacagcctaatccagggccaggccctaactccaagggccttctgggagggctgagaggtgaggaagctgcagaagagctggaagctggcagaggttggttcataaggttgaaggaaagaagccgtctccataacataaaagtgcaaggtgaagcagcaagtgccaatggagaagctgctgcaagttctccaaaagatccagctaaggtatttgatgacggtgacttcatacacaggttttcagtgtcgacaaaacagccttctattggaagaagatgccatctaagaccttcatag

SEQ ID NO: 31778 - DNA, 104 bp, Homo sapiens
  MAP TO AL139805.2; EXPRESSED IN FETAL LIVER, SIGNAL = 0.6; SWISSPROT HIT: Q37376, EVALUE 1.40e+00; NT HIT: D13987.1, EVALUE 8.80e-01; EST_HUMAN HIT: AV693827.1, EVALUE 2.00e-12
ttactttgacttcaatttcacttccagcattattacctcctttcttttctttactttactttcattcttcatcagttcattcactttttcaattatccactttt

SEQ ID NO: 31779 - DNA, 162 bp, Homo sapiens
  MAP TO AL135933.5; EXPRESSED IN PLACENTA, SIGNAL = 0.48; EXPRESSED IN FETAL LIVER, SIGNAL = 0.83; EXPRESSED IN BONE MARROW, SIGNAL = 0.61; EST_HUMAN HIT: AA095652.1, EVALUE 2.00e-53; NT HIT: gi4506660, EVALUE 3.00e-51; SWISSPROT HIT: O57592, EVALUE 2.00e-03
atgctgaaaggaaagaagaccaaggggaagaaggtggctctggtccctgctgctgtgaagaagcaggaggccaagaaagtggtgaatctcttgtttgagaaaaggcctaagaatgttggcattggacagacatccagcccaaaagagacctcacctgctttg

SEQ ID NO: 31780 - DNA, 255 bp, Homo sapiens
  MAP TO AC025119.2; EXPRESSED IN BONE MARROW, SIGNAL = 0.44; EXPRESSED IN PLACENTA, SIGNAL = 0.46; EXPRESSED IN FETAL LIVER, SIGNAL = 6.5; SWISSPROT HIT: P00450, EVALUE 4.00e-47; EST_HUMAN HIT: AV652035.1, EVALUE 1.00e-73; NT HIT: D45032.1, EVALUE 0.00e+00
ctttcagatggtttagattctgacagctgagcatccattctccagggttctgggccaccatataagcatcaaacagggtagcaggaaagaggttgattgtgtcaatacggtagttcttgttagtcagtgcttgcccgtgaaagaaagctgcgtgcacatcaacttcattacccataccaaaaaggtaccattttactctgtcttcagcacacatggagagtcctgggagacttccaaaagtgtatccattcacag

SEQ ID NO: 31781 - DNA, 232 bp, Homo sapiens
  MAP TO AC011472.3; EXPRESSED IN FETAL LIVER, SIGNAL = 0.75; NT HIT: AB037816.1, EVALUE 1.00e-128; SWISSPROT HIT: Q13164, EVALUE 4.80e-01; EST_HUMAN HIT: BE871338.1, EVALUE 2.00e-07
gacccctacctggacaaattcttcaccctggtgcacgtcctggaggagggagccttcccattccggctcaaggacactgtgctgagcgagggcaacgtggagcaggagctgcgggccagtcttgcagcactgcgcctggccagccccgaaccccttgtggccttctcccaccacgtgctggacaagctcgtgcgtctggtcatcaggcccccgatcatcagtggccagattg

SEQ ID NO: 31782 - DNA, 78 bp, Homo sapiens
  MAP TO AC018993.3; EXPRESSED IN FETAL LIVER, SIGNAL = 0.46; NT HIT: Z28107.1, EVALUE 1.00e-02; EST_HUMAN HIT: AW813048.1, EVALUE 2.30e-01
atgttgatgaatccgaatcaccttttcattcacttgaaatgtaatgacgtttttgatgtctacgttacagagattgaa

SEQ ID NO: 31783 - DNA, 166 bp, Homo sapiens
  MAP TO AL137141.7; EXPRESSED IN LUNG, SIGNAL = 1.7; EXPRESSED IN BONE MARROW, SIGNAL = 3.9; EXPRESSED IN PLACENTA, SIGNAL = 0.53; EXPRESSED IN FETAL LIVER, SIGNAL = 0.83; SWISSPROT HIT: Q61233, EVALUE 8.00e-26; NT HIT: J02923.1, EVALUE 7.00e-89; EST_HUMAN HIT: AW503346.1, EVALUE 1.00e-88
gaaaatctgaacttggctctgaactctgcctcagccatcgggtgccatgtggtcaacataggggctgaggacctgaaggaggggaagccttatctggtcctgggacttctgtggcaagtcatcaagattgggttgtttgctgacattgaactcagcagaaatgaag

SEQ ID NO: 31784 - DNA, 198 bp, Homo sapiens
  MAP TO AP001415.1; EXPRESSED IN PLACENTA, SIGNAL = 0.58; EXPRESSED IN FETAL LIVER, SIGNAL = 0.47; EXPRESSED IN BONE MARROW, SIGNAL = 0.49; SWISSPROT HIT: P15215, EVALUE 9.90e-01; EST_HUMAN HIT: AW966118.1, EVALUE 1.80e-01
cacacactttgtttccatagcagttctcattttccacgtgacaaaggccatggagctggccgtgtgtgtacaacacaggtcagagagctcccgttttgcttctgtgagtgtagatgggatggcccacttcatcctgaggcctttctccagtgttgtgctgtgagacccagtgggtcctcttgccttcaatgtctttgt

SEQ ID NO: 31785 - DNA, 221 bp, Homo sapiens
  MAP TO AC010290.4; EXPRESSED IN BONE MARROW, SIGNAL = 0.51; EXPRESSED IN PLACENTA, SIGNAL = 0.5; EXPRESSED IN FETAL LIVER, SIGNAL = 0.64; EST_HUMAN HIT: BE244981.1, EVALUE 9.00e-50; NT HIT: gi11417222, EVALUE 1.00e-54
gagatacatttctgtgactggtgttactttgcctttctagccttatatgacttggctgtccttaaaaaaaaggttaaggaaaaagaggaaaagaagaagaagaaaataaaaacgatcaaatcagaggcagaggacctggccgagccgctaagcagtactgaaggggtcgcacctctctcacaggccccctctccgctggcaattcctgctatcaaggaaga

SEQ ID NO: 31786 - DNA, 94 bp, Homo sapiens
  MAP TO AC015529.3; EXPRESSED IN BONE MARROW, SIGNAL = 0.59; EXPRESSED IN PLACENTA, SIGNAL = 0.61; EXPRESSED IN FETAL LIVER, SIGNAL = 0.56; EST_HUMAN HIT: BF689702.1, EVALUE 5.00e-46; NT HIT: L08850.1, EVALUE 3.00e-46; SWISSPROT HIT: Q91448, EVALUE 6.00e-03
ctacatagagaacaccctcttttgtctttcctgctgcttctgccacaccctgtttggttttctcagcagcagccacaactccctccttggcctt

SEQ ID NO: 31787 - DNA, 111 bp, Homo sapiens
  MAP TO AL132981.5; EXPRESSED IN FETAL LIVER, SIGNAL = 0.62; EXPRESSED IN BONE MARROW, SIGNAL = 0.44; SWISSPROT HIT: P14553, EVALUE 7.10e+00; NT HIT: AF229843.1, EVALUE 9.60e-01
gagagtatgtttctgaaacaaacaatgagtgaaacagacaatttcccaaaagtccaacactgcaaggaatttggtgaactaaagcatgccctctgtgccgtgggtatgcaa

SEQ ID NO: 31788 - DNA, 157 bp, Homo sapiens
  MAP TO AC025746.2; EXPRESSED IN BONE MARROW, SIGNAL = 0.69; EXPRESSED IN FETAL LIVER, SIGNAL = 0.73; EST_HUMAN HIT: BE168410.1, EVALUE 1.00e-48; NT HIT: X57147.1, EVALUE 9.00e-42; SWISSPROT HIT: P26808, EVALUE 7.00e-10
ctaaaccccttggggcaagaccatccacgtaagttgggacatgtggtctgtgggatcctcaaagacaaagagaagctgggagtcagagtgcagggtgatacagaagaagacatctttgagttccagaactgtgaaccattctgcttcctctggtatt

SEQ ID NO: 31789 - DNA, 154 bp, Homo sapiens
  MAP TO AC021383.3; EXPRESSED IN FETAL LIVER, SIGNAL = 0.57; EXPRESSED IN PLACENTA, SIGNAL = 0.46; SWISSPROT HIT: P43670, EVALUE 9.00e+00; NT HIT: AJ243025.1, EVALUE 2.20e-02
aaatatcagcctcaattttctaatgttcatgtacacaccagtgacttcaaactcagccagaaagaaccaatctcaggctactatatctctgagtgcctgtgttctgcaactacttctagcatcaaatattacaccagttatgattccattctat

SEQ ID NO: 31790 - DNA, 196 bp, Homo sapiens
  MAP TO AL118505.13; EXPRESSED IN PLACENTA, SIGNAL = 0.52; EXPRESSED IN BONE MARROW, SIGNAL = 0.89; EXPRESSED IN FETAL LIVER, SIGNAL = 0.55; EST_HUMAN HIT: BE907873.1, EVALUE 6.90e-01; SWISSPROT HIT: P32849, EVALUE 6.60e+00; NT HIT: AF162283.1, EVALUE 4.60e-01
ttgacaatgagtttaaacaggttttcttcagcttgaatctcttggatggcataaaggtctttaagtgagaactccatcaacattccatgcttacacccatcctcagaactctttgttttctgtcctttgctattactaatagaatttgcttcaatatacaaaaggaacatacacttgtcattcttatttcgagaac

SEQ ID NO: 31791 - DNA, 217 bp, Homo sapiens
  MAP TO AC010876.2; EXPRESSED IN PLACENTA, SIGNAL = 0.46; EXPRESSED IN FETAL LIVER, SIGNAL = 0.55; EXPRESSED IN BONE MARROW, SIGNAL = 0.5; EST_HUMAN HIT: BF337464.1, EVALUE 1.00e-115; SWISSPROT HIT: P21507, EVALUE 2.00e-03; NT HIT: gi11545921, EVALUE 1.00e-119
ttgacaagaactataacttttccaggctcagatgcttttttcttcttgtctaagtgatccttggcaatgtaaacagccactctggtttttccactccctgtagggaggcagatgatgatattcttcccttccaaggctggctgggcaacttccatttggtaaggcctgagctggagttctggctccggggatgctcttgctgccacattctcttcat

SEQ ID NO: 31792 - DNA, 329 bp, Homo sapiens
  MAP TO AC025129.2; EXPRESSED IN PLACENTA, SIGNAL = 0.47; EXPRESSED IN FETAL LIVER, SIGNAL = 1.3; EXPRESSED IN BONE MARROW, SIGNAL = 0.59; EST_HUMAN HIT: BE177470.1, EVALUE 3.20e+00; NT HIT: Z34508.1, EVALUE 1.70e-01
gtagtgatgctaatgctaatagtaacactaatgctggtgctaatgctaataccgacagtaatgctaatagtaacactagtaataatgctaatgctaatatcactagtaatactcatgctaataggaacattgatactaatgctaataccaagagtaaagtaatgctaacgctagtaataatcttaatgcgaatgccaatggtaatgctgatgctaatactaacagtgctaacgctcatggtaccactaacacgaacgcctgtgctaacgctcccatggcagatgtgctgggcactgttttgtgtgctttacaagtacgaaaccctttaa

SEQ ID NO: 31793 - DNA, 157 bp, Homo sapiens
  MAP TO AC021037.4; EXPRESSED IN FETAL LIVER, SIGNAL = 0.65; EXPRESSED IN BONE MARROW, SIGNAL = 0.43; EST_HUMAN HIT: BF128748.1, EVALUE 2.00e-83; NT HIT: gi11429808, EVALUE 2.00e-83; SWISSPROT HIT: Q13094, EVALUE 1.80e-02
ctatatactcgcctctggcgaagggcagggctgggtgaaccggcctggtttcctgctctactggaggcggctcgtagctgtcatcagcgttctcctcggcgggcatcacgtacatctctgagtccgagtgctcatctggattttcatagtcgctgtc

SEQ ID NO: 31794 - DNA, 189 bp, Homo sapiens
  MAP TO AC018469.3; EXPRESSED IN FETAL LIVER, SIGNAL = 0.66; EXPRESSED IN PLACENTA, SIGNAL = 0.51; EST_HUMAN HIT: AU118198.1, EVALUE 6.60e-01; SWISSPROT HIT: P42112, EVALUE 3.80e+00
gattcttatgacacttcattgaaattatttgtgttcaagtctgtttgggttttgattctcttggacaaggaccatgtgtttattcagagcactaaatttgaggttgaaatttttatgttcgaccaatatgttttttcactagtcaagatggaaatgataatatttctcaaggtggctatgaagattcaa

SEQ ID NO: 31795 - DNA, 159 bp, Homo sapiens
  MAP TO AL121883.13; EXPRESSED IN PLACENTA, SIGNAL = 0.53; EXPRESSED IN FETAL LIVER, SIGNAL = 0.77; SWISSPROT HIT: P49519, EVALUE 4.60e-01; NT HIT: AJ277662.1, EVALUE 6.00e-03; EST_HUMAN HIT: AI858286.1, EVALUE 6.00e-04
gttcagttactagtgctttttcttggtggcaagattgttcttgatccctatgaccatgtgttggtgtctgtgcatttaaagaaacagggagtcattccagtctttggagacttgctttgtctggtagagctcttcactagtctgcctgttcagagattc

SEQ ID NO: 31796 - DNA, 138 bp, Homo sapiens
  MAP TO AL118505.13; EXPRESSED IN FETAL LIVER, SIGNAL = 2.1; EXPRESSED IN BONE MARROW, SIGNAL = 0.45; EST_HUMAN HIT: T90603.1, EVALUE 1.00e-35; NT HIT: gi7706259, EVALUE 8.00e-36
gccatcattactgttgtgaagccatccacccgtattctttcaattatgtattatgcaagagaacctggaaaaattaagtacgctttgtttcctttcaaaagtataattgggggaaatatgtctttaagaaagtcatga

SEQ ID NO: 31797 - DNA, 114 bp, Homo sapiens
  MAP TO AL117381.9; EXPRESSED IN FETAL LIVER, SIGNAL = 0.47; EXPRESSED IN BONE MARROW, SIGNAL = 0.43; EST_HUMAN HIT: AI439401.1, EVALUE 2.00e-55; NT HIT: AF232009.1, EVALUE 6.30e-02; SWISSPROT HIT: P53773, EVALUE 2.10e-01
atggcgactcccttgtctgatgcagatcagtgctggatgctgtggggaagagagtactgggctgacagtcagtggatgtggattttgtttcccagttccatcgctgatttgcag

SEQ ID NO: 31798 - DNA, 140 bp, Homo sapiens
  MAP TO AL121777.16; EXPRESSED IN FETAL LIVER, SIGNAL = 0.48; SWISSPROT HIT: P48626, EVALUE 3.10e+00; NT HIT: AJ237587.1, EVALUE 1.20e+00; EST_HUMAN HIT: AI718395.1, EVALUE 1.20e-01
atcgtgtgaaagtttttcgtcatgtccaggcaccacctcttcccggtcaggcccacgttacatacgaggacaatggaacaagtcaaaggcaaagcaacacgtccccctgtaaaaactgtcagtgtaaccgtccacttccg

SEQ ID NO: 31799 - DNA, 147 bp, Homo sapiens
  MAP TO AC015496.3; EXPRESSED IN PLACENTA, SIGNAL = 0.45; EXPRESSED IN FETAL LIVER, SIGNAL = 0.49; EXPRESSED IN BONE MARROW, SIGNAL = 0.49; SWISSPROT HIT: Q00511, EVALUE 4.00e+00
gaatactcggtgcaggctgatacagtggttcagcaatataaaggatttgggctccttttatcttcctgctctgatattttactgtgggactgtggttcctttggcaacaaagttctagtccacctccacacgtctttcttattccag

SEQ ID NO: 31800 - DNA, 76 bp, Homo sapiens
  MAP TO AC025129.2; EXPRESSED IN PLACENTA, SIGNAL = 0.51; EXPRESSED IN FETAL LIVER, SIGNAL = 3.3; EXPRESSED IN BONE MARROW, SIGNAL = 0.52; NT HIT: AB027759.1, EVALUE 1.50e-01
ctattcctgatggctctcctgttccacagggagcactgtcatgcctgatgcagggggaccacgctggttggagacg

SEQ ID NO: 31801 - DNA, 195 bp, Homo sapiens
  MAP TO AC015529.3; EXPRESSED IN PLACENTA, SIGNAL = 0.66; EXPRESSED IN FETAL LIVER, SIGNAL = 0.77; EXPRESSED IN BONE MARROW, SIGNAL = 0.5; SWISSPROT HIT: Q13201, EVALUE 1.00e-18; NT HIT: gi11436432, EVALUE 1.00e-106; EST_HUMAN HIT: AA777407.1, EVALUE 2.00e-53
tttcctctagttgtttcgaaatttgatttttggtagtcagttctttggctggaactgctgtcaccccggctgaggtatgtttcccgtggggctcgatttcccacgcctccagtgcctccaacgcctccaatgcctccagtgcctccaactgtgtttagagaagttgcttgttcatttgactttctggcaaagctc

SEQ ID NO: 31802 - DNA, 229 bp, Homo sapiens
  MAP TO AC009943.4; EXPRESSED IN FETAL LIVER, SIGNAL = 0.48; EST_HUMAN HIT: AW183064.1, EVALUE 9.00e-47; NT HIT: AF005273.1, EVALUE 3.00e-55; SWISSPROT HIT: Q02817, EVALUE 2.00e-04
gtgaaatatctacctggagcaaaggagcatataaatctttcaacggccgcatctttttctttgaatcttcatgcccatacactttctgccgtcactgcattgaatctggaggggatttcaatattgagatcaaacgaaacaatgatagtgagattgaaaaaataacagttctaattgacaataacgacgtctctatttttggtgacaccattttagttaatggagaaag

SEQ ID NO: 31803 - DNA, 215 bp, Homo sapiens
  MAP TO AC024196.2; EXPRESSED IN LUNG, SIGNAL = 0.98; EXPRESSED IN PLACENTA, SIGNAL = 1.2; EXPRESSED IN FETAL LIVER, SIGNAL = 0.98; EXPRESSED IN BONE MARROW, SIGNAL = 0.46; EST_HUMAN HIT: BE736213.1, EVALUE 1.00e-118; SWISSPROT HIT: P13647, EVALUE 1.00e-35; NT HIT: AF274874.1, EVALUE 1.00e-118
gtgcggttcctggagcagcagaacaaggttctggacaccaagtggaccctgctgcaggagcagggcaccaagactgtgaggcagaacctggagccgttgttcgagcagtacatcaacaacctcaggaggcagctggacagcatcgtgggggaacggggccgcctggactcagagctgagaaacatgcaggacctggtggaagacttcaagaacaa

SEQ ID NO: 31804 - DNA, 194 bp, Homo sapiens
  MAP TO AC021239.3; EXPRESSED IN PLACENTA, SIGNAL = 5.7; EXPRESSED IN FETAL LIVER, SIGNAL = 0.48; EST_HUMAN HIT: AA687936.1, EVALUE 6.80e-01; SWISSPROT HIT: P41116, EVALUE 6.60e+00
tgagtcactcaggcacagaggagcccaggtacgtgggtgtaataacacacgcagagcagcaggcacgcacacacgtgcgcatccctaccgggagtgaaatgaaaatagaaacggaaagcaagaccccttcccttggtgcctatctctccctgtcacctgtcatcaatcttagagaccacatttctgtgggcaaa

SEQ ID NO: 31805 - DNA, 198 bp, Homo sapiens
  MAP TO AC022994.2; EXPRESSED IN PLACENTA, SIGNAL = 0.78; EXPRESSED IN FETAL LIVER, SIGNAL = 0.66; SWISSPROT HIT: Q01722, EVALUE 9.90e-01; EST_HUMAN HIT: BF242367.1, EVALUE 6.90e-01; NT HIT: D88688.1, EVALUE 1.80e+00
tcaggtgatcgacttgcttgtgttcaggccacaaattccaaccagcattttgtggttgccgatacaaatagtgccattggaatttgtcttccatgtgtgccagtcttgagcctgaactgtggtataacccatggttctgttctttatgttatattttaaagggttagactcacagatgcacagcttagaggtgagcat

SEQ ID NO: 31806 - DNA, 180 bp, Homo sapiens; identical to SEQ ID NO: 19548
  MAP TO AC009311.2; EXPRESSED IN BONE MARROW, SIGNAL = 0.79; EXPRESSED IN PLACENTA, SIGNAL = 0.55; EXPRESSED IN FETAL LIVER, SIGNAL = 0.75; NT HIT: gi11431060, EVALUE 4.00e-97; EST_HUMAN HIT: AW473941.1, EVALUE 5.00e-97; SWISSPROT HIT: P80217, EVALUE 8.00e-03

SEQ ID NO: 31807 - DNA, 190 bp, Homo sapiens
  MAP TO AC010397.3; EXPRESSED IN PLACENTA, SIGNAL = 0.48; EXPRESSED IN FETAL LIVER, SIGNAL = 1.8; EST_HUMAN HIT: H23481.1, EVALUE 3.00e-86; NT HIT: gi11417120, EVALUE 2.00e-86; SWISSPROT HIT: P10394, EVALUE 1.00e-03
tgtttgacatcattggtcacagatgtccaataataattggattctaccagagtgagggtcctggatataccatgatgagctccactgtcattttcatggcattctcttaagactttctttttttcctcttctgaaacaattaccaaacgattttgttttctgtcttttccaacataaaacagcttttttt

SEQ ID NO: 31808 - DNA, 135 bp, Homo sapiens
  MAP TO AL135998.2; EXPRESSED IN PLACENTA, SIGNAL = 0.46; EXPRESSED IN FETAL LIVER, SIGNAL = 0.65; EXPRESSED IN BONE MARROW, SIGNAL = 0.43; NT HIT: AF084464.1, EVALUE 4.00e-31; SWISSPROT HIT: Q03001, EVALUE 2.40e+00; EST_HUMAN HIT: BE741721.1, EVALUE 7.00e+00
ctcccccactagcatgaccttgaagatgccatccttttgagcaggggctgcctcccctgagcccaaggagtcagacgagccagaggatgaggcctgaggtggccagtcaagttcatctacagcctgggcccgccg

SEQ ID NO: 31809 - DNA, 215 bp, Homo sapiens
  MAP TO AC018780.3; EXPRESSED IN FETAL LIVER, SIGNAL = 0.79; EXPRESSED IN BONE MARROW, SIGNAL = 0.73; SWISSPROT HIT: P42695, EVALUE 5.00e-31; NT HIT: D29954.1, EVALUE 1.00e-115; EST_HUMAN HIT: BE886295.1, EVALUE 1.00e-115
ctacctcagttcctggctttcggtggtgaggagagtaagaagcgcccaggcgaggacctggctgtcgtccccagagtgaaaatgactgtgatgccggatgttctgcagcagcagctggtccaggaactccagggccttctcctgcacagtgctctcgcagtccatcaccaccgggaccaccccccgcaaccaggctttctggatctgcacgcatc

SEQ ID NO: 31810 - DNA, 224 bp, Homo sapiens
  MAP TO AC022658.3; EXPRESSED IN FETAL LIVER, SIGNAL = 0.58; NT HIT: Y10284.1, EVALUE 2.10e+00; SWISSPROT HIT: P45081, EVALUE 3.90e+00
atgtgcagcagagtttaaggccattgcaacaggtgttgaagaaccatggaacaggtttgagcaggtagctgatgtaatcaagcttgtgtataataccatcattgtcaactacacagaagacagagctgagttgaagactggatctaggaaaatcaactaggaagctgctgcagaaatctaggtgggaaacgacaggggcttgaactaggacagtggtagcaggg

SEQ ID NO: 31811 - DNA, 239 bp, Homo sapiens
  MAP TO AC018780.3; EXPRESSED IN FETAL LIVER, SIGNAL = 0.49; SWISSPROT HIT: P42695, EVALUE 2.00e-40; EST_HUMAN HIT: AU124782.1, EVALUE 1.00e-129; NT HIT: D29954.1, EVALUE 0.00e+00
gtaagctgtgcttacagcacgaggatctggcaaagaagagcatcccagccctggtgcgagagctcgaggtgtgtgaggacgtggctgtccgcaacaacgtcatcattgtaatgtgcgatctctgcattcgctacaccatcatggtggacaagtatattcccaacatctccatgtgtctgaaggattccgacccattcatccggaagcagacactcatcttgcttaccaatctcttgcag

SEQ ID NO: 31812 - DNA, 116 bp, Homo sapiens
  MAP TO AC022268.3; EXPRESSED IN FETAL LIVER, SIGNAL =   2; SWISSPROT HIT: Q63415, EVALUE 4.10e+00; EST_HUMAN HIT: BF035450.1, EVALUE 3.80e-01; NT HIT: AL161505.2, EVALUE 2.50e-01
cagatatctcctccaggcactgcttagcagtcttactatatgataagtccatctttgtaggactggtacaggagtcagccgatggtaaagcggtaccttcattttctgaatgtgcc

SEQ ID NO: 31813 - DNA, 141 bp, Homo sapiens
  MAP TO AL049838.3; EXPRESSED IN FETAL LIVER, SIGNAL = 0.79; SWISSPROT HIT: P47285, EVALUE 6.90e+00; EST_HUMAN HIT: AW087791.1, EVALUE 4.70e-01
cgttcaccttggcagtcagcactttatgcttgtctgcttctggagagaacttggtactttttctaatagaagagcaattttctttgaagggaacaacaaccaagaaaaatagcatgagaaaaatgttgaaaacaggaagga

SEQ ID NO: 31814 - DNA, 425 bp, Homo sapiens
  MAP TO AL157911.2; EXPRESSED IN FETAL LIVER, SIGNAL = 0.46; EXPRESSED IN BONE MARROW, SIGNAL = 0.48; SWISSPROT HIT: P73087, EVALUE 1.40e+00; EST_HUMAN HIT: AW748117.1, EVALUE 0.00e+00; NT HIT: U88822.1, EVALUE 6.70e-02
ttcacaagtttatacgccaaaaacaaatcaacaacagtagaaagaatactaaccacggatatcttagcagaggaggatgagcatgaatttaccagttgtactggtgctgagactgtcaaatttctcattcctggcaagaaatatgtagccaatacagtttttcattctattcttgctggattagcgtgtggtcttggaacatggtatctgctcccaaatagaataaccttgctgtatggcagtacaggaggcactgctctactattcttctttggatggatgacactatgtatagcagaatattctttaattgtaaacacagctacagagactgcgactttccaaacacaggatacttatgaaattattcctcttatgagacctctttatatttttttctttgtttctgtggatctggcacacag

SEQ ID NO: 31815 - DNA, 199 bp, Homo sapiens
  MAP TO AC006038.2; EXPRESSED IN BONE MARROW, SIGNAL = 0.66; EXPRESSED IN FETAL LIVER, SIGNAL = 0.51; SWISSPROT HIT: Q05344, EVALUE 2.20e+00; NT HIT: AF177377.1, EVALUE 2.00e-62; EST_HUMAN HIT: AI017333.1, EVALUE 3.00e-77
ctctgtacttggggacagttaaaaccttttggtgggagtagcattcttgctttctggagtttgtctgtgtatttggagaggttgtgaagagggctggggagaaggtgatgctcgaatttgtggactttgatcattagaatgagattcctcttttttttctctctgtccttgtggtttttctttctttttttctgtacca

SEQ ID NO: 31816 - DNA, 130 bp, Homo sapiens
  MAP TO AC024196.2; EXPRESSED IN FETAL LIVER, SIGNAL = 1.8; EXPRESSED IN BONE MARROW, SIGNAL = 0.42; EST_HUMAN HIT: BF527244.1, EVALUE 2.80e-02; SWISSPROT HIT: P35637, EVALUE 4.10e+00
tccgtgtgctcctggctcttggctgctcttggctcttggctgcaagtgtggggcactgcatctgtctgctccctctctgcttcccttcagacagcctctctgcccatttctccctttcctacccatctcc

SEQ ID NO: 31817 - DNA, 134 bp, Homo sapiens
  MAP TO AC016546.2; EXPRESSED IN BONE MARROW, SIGNAL = 0.47; EXPRESSED IN FETAL LIVER, SIGNAL = 0.62; SWISSPROT HIT: O84242, EVALUE 4.10e+00
tgatatagttaaatcctttaatcctaggatctttaaacatgtaaaacatataaaagtcattcttcttgctgcagatttgattaaccattttataaaccttgaagtaagcctttggtgccttacatctgaatctc

SEQ ID NO: 31818 - DNA, 85 bp, Homo sapiens
  MAP TO AC010971.3; EXPRESSED IN FETAL LIVER, SIGNAL = 0.51; EST_HUMAN HIT: AI978681.1, EVALUE 2.60e-01; NT HIT: X87157.1, EVALUE 6.90e-01
gctcactcattctcttctcttgctgctgtacggagacttgaattttcaggccttttggtaagtcatcagcaatcacttttctaca

SEQ ID NO: 31819 - DNA, 311 bp, Homo sapiens
  MAP TO AL137124.6; EXPRESSED IN PLACENTA, SIGNAL = 1.1; EXPRESSED IN BONE MARROW, SIGNAL = 2.7; EXPRESSED IN FETAL LIVER, SIGNAL = 0.49; EST_HUMAN HIT: AU138248.1, EVALUE 1.00e-105; NT HIT: gi11428155, EVALUE 1.00e-108; SWISSPROT HIT: P40618, EVALUE 8.00e-42
ggaacaatacagtcaggatggctgaaggtgaccacaagaaaccaaagggcaagatgtctgcttatgccttctttgcgcagacatgcagagaagaacataagaagaaaaacccagaggtccctgtcaattttgtagaattttccaagaagtgctctgagaagcggaagaccatgtctgggaaagagaagaccaaatttgatgaaatggcaaaggtggataaagtacactatgatcaggaaatgaaggataatggaccagttgagggaggcaagaagaaggaccctaatgccctcaaaaggccactgtctgga

SEQ ID NO: 31820 - DNA, 164 bp, Homo sapiens
  MAP TO AC022542.3; EXPRESSED IN PLACENTA, SIGNAL = 0.53; EXPRESSED IN BONE MARROW, SIGNAL = 0.43; EXPRESSED IN FETAL LIVER, SIGNAL = 0.52; NT HIT: gi8923637, EVALUE 1.30e+00
tcttgatgattatgatgtatgctggaactattgactcctcactgttggaattgttaacatcttgtgaaaatatgcacaaaatcattctttccaagctgacttttgctgttaaaattagaaagactaatatgagtttgaacagcatgaataggaaaagtagatga

SEQ ID NO: 31821 - DNA, 97 bp, Homo sapiens
  MAP TO AC021186.2; EXPRESSED IN FETAL LIVER, SIGNAL = 0.5; EST_HUMAN HIT: BE151679.1, EVALUE 3.00e-01; SWISSPROT HIT: O63848, EVALUE 7.20e+00; NT HIT: AF294296.1, EVALUE 2.10e-01
ggaaaaaccaagggaacttactgaagcagaagtgatactggatgaatattccagttattaccataacaagctaaataagagagaggaaagaaaccac

SEQ ID NO: 31822 - DNA, 248 bp, Homo sapiens
  MAP TO AC009466.2; EXPRESSED IN FETAL LIVER, SIGNAL = 0.47; NT HIT: AE001329.1, EVALUE 3.80e-02
tcctcttcctcaacatcccagagccagacattcttaaactcgagttagggaaattagagctgatgaggactctgctgagcctctccctcttgcaaatgacagggcatcaagtccacctcacacaggtcctgctgacatattctgaccatggggtaatcatgtccatgaatctgccaatttttcaggcctgtccagcagagaactctaccacacaaaaactaaactacttttcaaagataaggtcacag

SEQ ID NO: 31823 - DNA, 105 bp, Homo sapiens; identical to SEQ ID NO: 31292
  MAP TO AL161744.1; EXPRESSED IN PLACENTA, SIGNAL = 0.45; EXPRESSED IN FETAL LIVER, SIGNAL = 0.48; SWISSPROT HIT: Q04605, EVALUE 7.20e+00; EST_HUMAN HIT: H42881.1, EVALUE 1.30e+00

SEQ ID NO: 31824 - DNA, 360 bp, Homo sapiens
  MAP TO AC018780.3; EXPRESSED IN FETAL LIVER, SIGNAL = 0.8; SWISSPROT HIT: P42695, EVALUE 2.00e-42; EST_HUMAN HIT: BE245345.1, EVALUE 1.00e-110; NT HIT: D29954.1, EVALUE 0.00e+00
atgatcttgctttaccagatcccacaccgggtttttactcttgatgttgtcttagctctgttagaactgcctgaaagagaggtggataacaccctctccttggagcatcagaagttcttaaagcataagttcctggtgcaggaaattatgtttgatcgttgcttagacaaggcgcctactgtccgcagcaaggcactgtccagctttgcacactgtctggagttgactgttaccagtgcgtcggagagtatcctggagctcctgattaacagtgagtatggcgactattgggacagtaaaccggtcttgtgctcattgagaaatagactgcaagggaatcgttcttttctgtggcaaaag

SEQ ID NO: 31825 - DNA, 132 bp, Homo sapiens
  MAP TO AL161752.1; EXPRESSED IN FETAL LIVER, SIGNAL = 0.51; EXPRESSED IN BONE MARROW, SIGNAL = 0.44; EST_HUMAN HIT: BE044595.1, EVALUE 1.00e-66; SWISSPROT HIT: P38362, EVALUE 5.30e+00; NT HIT: D64002.1, EVALUE 2.90e-01
gaaggcctagacaatatagtctggattgattggataaacacagaggaacaagagagcggcagaattgtaccatgcatgcagcaggccatgctctacacgggcctctcaggatgcagcagagaggtaccctgg

SEQ ID NO: 31826 - DNA, 191 bp, Homo sapiens
  MAP TO AL133163.2; EXPRESSED IN FETAL LIVER, SIGNAL = 2.8; EXPRESSED IN PLACENTA, SIGNAL = 1.5; EXPRESSED IN BONE MARROW, SIGNAL = 1.6; EXPRESSED IN LUNG, SIGNAL =  21; NT HIT: gi10092618, EVALUE 1.00e-103; SWISSPROT HIT: P25963, EVALUE 2.00e-32; EST_HUMAN HIT: BE549706.1, EVALUE 1.00e-103
ttttctagtgtcagctggcccagctgctgctgtatccgggtgcttgggcggccccaggtgagctggtagggagaatagccctggtaggtaactctgttgacatcagccccacacttcaacaggagtgacaccaggtcaggattttgcaggtccactgcgaggtgaagggcagtccggccattacagggctc

SEQ ID NO: 31827 - DNA, 223 bp, Homo sapiens
  MAP TO AC010311.5; EXPRESSED IN FETAL LIVER, SIGNAL =   2; EXPRESSED IN LUNG, SIGNAL = 2.6; EXPRESSED IN PLACENTA, SIGNAL = 1.9; NT HIT: gi11424726, EVALUE 1.00e-107; SWISSPROT HIT: P06213, EVALUE 1.00e-25; EST_HUMAN HIT: BE168726.1, EVALUE 1.00e-107
ccaggacgtgtccttctgccccgcagcactgacctcatgcgcatgtgctggcaattcaaccccaagatgaggccaaccttcctggagattgtcaacctgctcaaggacgacctgcaccccagctttccagaggtgtcgttcttccacagcgaggagaacaaggctcccgagagtgaggagctggagatggagtttgaggacatggagaatgtgcccctggacc

SEQ ID NO: 31828 - DNA, 181 bp, Homo sapiens
  MAP TO AC019248.3; EXPRESSED IN PLACENTA, SIGNAL = 1.4; EXPRESSED IN FETAL LIVER, SIGNAL = 1.6; SWISSPROT HIT: P28616, EVALUE 4.50e-01; EST_HUMAN HIT: AI766808.1, EVALUE 6.30e-01; NT HIT: AF245277.1, EVALUE 1.10e-01
aactgcagtatttaaaagttcaggaatttctgctcccagattcttgaggaatttcagaatcacagatcccactttcagcttccttgtcgcctcacttttactgccctgggtagacatgtcaaggccaaaaccactggcaagaaaaggcaagtcaaccacgtgccacactgtttcaataacc

SEQ ID NO: 31829 - DNA, 141 bp, Homo sapiens
  MAP TO AC017111.2; EXPRESSED IN FETAL LIVER, SIGNAL = 2.3; NT HIT: D26273.1, EVALUE 5.00e-03; SWISSPROT HIT: P10184, EVALUE 6.90e+00
ctagagtttaagcatatttccttcatcaaacctgatttaattgggtaacactgtactttcctaattgggagcttacacttagtggaatgaatgtctgtactgctggtatgcatgcctaggataaggaattcaggtgtacac

SEQ ID NO: 31830 - DNA, 148 bp, Homo sapiens
  MAP TO AC002126.1; EXPRESSED IN HELA, SIGNAL = 1.9; EXPRESSED IN LUNG, SIGNAL = 2.5; EXPRESSED IN FETAL LIVER, SIGNAL = 1.7; NT HIT: gi11426610, EVALUE 4.00e-78; SWISSPROT HIT: O14593, EVALUE 2.00e-23; EST_HUMAN HIT: BE548865.1, EVALUE 5.00e-78
atggagcttacccagcctgcagaagacctcatccagacccagcagacccctgcctcagaacttggggaccctgaagaccccggagaggaggctgcagatggctcagacactgtggtcctcagtctctttccctgcacccctgagcctg

SEQ ID NO: 31831 - DNA, 175 bp, Homo sapiens
  MAP TO AC018739.2; EXPRESSED IN FETAL LIVER, SIGNAL = 1.6; EST_HUMAN HIT: BE676648.1, EVALUE 7.00e-07
ctgaccgcctcctcctccctcagccccactgttactaggtaaaggtgccacagaggagacagagtttccctgagccccctcctccaataaattggaaaaaaagacaagggatacactacagttacgggaccctgtcttaggcaagtggcattagaaggggagctcttggcctgcc

SEQ ID NO: 31832 - DNA, 274 bp, Homo sapiens
  MAP TO AC011469.3; EXPRESSED IN FETAL LIVER, SIGNAL =  33; NT HIT: gi11425570, EVALUE 0.00e+00; SWISSPROT HIT: P21817, EVALUE 2.00e-45
ggtccctgcaggagctggtgtcccacatggtggtgcgctgggcccaagaggacttcgtgcagagccccgagctggtgcgggccatgttcagcctcctgcaccggcagtacgacgggctgggtgagctgctgcgtgccctgccgcgggcgtacaccatctcaccgtcctccgtggaagacaccatgagcctgctcgagtgcctcggccagatccgctcgctgctcatcgtgcagatgggcccccaggaggagaacctcatgatccagagcatcgg

SEQ ID NO: 31833 - DNA, 108 bp, Homo sapiens; identical to SEQ ID NO: 30744
  MAP TO AL049837.4; EXPRESSED IN PLACENTA, SIGNAL = 1.8; EXPRESSED IN FETAL LIVER, SIGNAL = 1.7; SWISSPROT HIT: Q01222, EVALUE 8.30e-01; EST_HUMAN HIT: AW847154.1, EVALUE 8.70e-02; NT HIT: D26547.1, EVALUE 1.50e-02

SEQ ID NO: 31834 - DNA, 135 bp, Homo sapiens
  MAP TO AC010487.4; EXPRESSED IN PLACENTA, SIGNAL = 3.6; EXPRESSED IN BONE MARROW, SIGNAL = 2.3; EXPRESSED IN FETAL LIVER, SIGNAL = 1.6; EXPRESSED IN HELA, SIGNAL = 1.7; EXPRESSED IN LUNG, SIGNAL = 1.9; NT HIT: U67778.1, EVALUE 5.00e-03; SWISSPROT HIT: P37709, EVALUE 9.30e-02; EST_HUMAN HIT: AI623722.1, EVALUE 8.00e-49
ttctcttccacctcttctgctccatcgtcgcaaattctttaacctcttgttgctccttctccccaatctttcgatcatcctcaatctccatatatttctgcctcttctcccatctctgcgcctcctctgctctcc

SEQ ID NO: 31835 - DNA, 225 bp, Homo sapiens
  MAP TO AC023404.2; EXPRESSED IN PLACENTA, SIGNAL = 1.3; EXPRESSED IN FETAL LIVER, SIGNAL = 1.9; SWISSPROT HIT: Q03571, EVALUE 2.00e-15; NT HIT: gi7662391, EVALUE 2.00e-25; EST_HUMAN HIT: T93967.1, EVALUE 1.00e-112
gtggaagttaagccatatgtcttggatgatcagctgtgtgatgaatgtcagggggcccgttgtggggggaaatttgctccatttttctgtgctaatgttacctgtctgcagtattactgtgaatattgctgggctgctatccattctcgtgctggcagggaattccacaagcccctggtgaaggaaggcggtgaccgccctcggcatatttcattccgctggaac

SEQ ID NO: 31836 - DNA, 130 bp, Homo sapiens
  MAP TO AL138717.2; EXPRESSED IN PLACENTA, SIGNAL = 1.8; EXPRESSED IN HELA, SIGNAL = 1.8; EXPRESSED IN BONE MARROW, SIGNAL = 1.5; EXPRESSED IN FETAL LIVER, SIGNAL = 1.6; EXPRESSED IN LUNG, SIGNAL =   3; NT HIT: U93243.1, EVALUE 2.00e-67; EST_HUMAN HIT: BF685788.1, EVALUE 2.00e-67
cttaaagcttatttgcctagccagttctttggcttcttggtcagcttggcttgaatcgcttccagattttaaaggcaacaggacatccttcatggcagagccacatccttcacaacagaaatcttgtgat

SEQ ID NO: 31837 - DNA, 94 bp, Homo sapiens
  MAP TO AL121852.2; EXPRESSED IN BONE MARROW, SIGNAL = 1.6; EXPRESSED IN HELA, SIGNAL = 3.4; EXPRESSED IN FETAL LIVER, SIGNAL = 2.7; EST_HUMAN HIT: BE797203.1, EVALUE 4.00e-16; SWISSPROT HIT: P56616, EVALUE 6.00e-04; NT HIT: gi5902145, EVALUE 2.00e-16
gaaggacaagtggtctgccctgtatgacatcaggaccattctgctctccatccagaacactctccatctccagcctactaggagaacccaacat

SEQ ID NO: 31838 - DNA, 291 bp, Homo sapiens
  MAP TO AC008655.3; EXPRESSED IN FETAL LIVER, SIGNAL = 1.9; EXPRESSED IN PLACENTA, SIGNAL = 1.7; EXPRESSED IN BONE MARROW, SIGNAL = 1.8; EXPRESSED IN LUNG, SIGNAL = 4.3; EST_HUMAN HIT: BE266478.1, EVALUE 0.00e+00; NT HIT: gi11321629, EVALUE 0.00e+00; SWISSPROT HIT: Q60644, EVALUE 7.00e-23
actgctccctcatccctgcctccttgcacttgcgcagccggcactgctggcacttgcgccgcatgaaagcgtccatctggcaggttccgccaccccggcaggcatagcgcctggccccaccacggaccacactgcgccggaagaagcccttgcagccttcgcagctgagcacgttgtagtggaagccggaggccttgtccccacagacacggcaaagctcgtggcccagcatcttcggggctgggcccttctttcgcttgcgctctggttcctcttcgggatctgggatga

SEQ ID NO: 31839 - DNA, 255 bp, Homo sapiens
  MAP TO AC007263.4; EXPRESSED IN BONE MARROW, SIGNAL = 1.9; EXPRESSED IN FETAL LIVER, SIGNAL = 8.5; SWISSPROT HIT: P48651, EVALUE 6.80e+00; NT HIT: X74507.1, EVALUE 6.10e-01
ttaaattctgtaagcaccatcctcagcattccagggctggtaaccccaaagatggcagcagccaagctcctagcaaggggcacccagtcagggataagatctgtagtcgttaagcacatcatataataatggtagataaatatttggagcattcttctctccttagtgtacttcttcatatttcagttgctttgtatataaatctcaccttttctaaggaaacattatatgatctctcactgcatgtcataataa

SEQ ID NO: 31840 - DNA, 105 bp, Homo sapiens
  MAP TO AC004662.1; EXPRESSED IN HELA, SIGNAL = 1.8; EXPRESSED IN FETAL LIVER, SIGNAL = 1.7; NT HIT: AL163204.2, EVALUE 4.00e-37; EST_HUMAN HIT: AA707012.1, EVALUE 5.00e-37; SWISSPROT HIT: Q91660, EVALUE 1.90e+00
gcgggaagtcagggaccctgaacggagggaccggctggagccaaggcagaagaagataaattgtgaagatttcatggacatttatcagttcccaaaattaatact

SEQ ID NO: 31841 - DNA, 154 bp, Homo sapiens
  MAP TO AC011462.3; EXPRESSED IN PLACENTA, SIGNAL = 2.9; EXPRESSED IN FETAL LIVER, SIGNAL = 1.6; EXPRESSED IN BONE MARROW, SIGNAL = 6.5; EXPRESSED IN LUNG, SIGNAL = 7.8; SWISSPROT HIT: O19011, EVALUE 3.00e-29; EST_HUMAN HIT: AW798167.1, EVALUE 1.00e-81; NT HIT: gi11424057, EVALUE 1.00e-81
cttgctgtactgcgtgtccaggctccaaatgtaggggcagggcccgaggcagaagttggcatggtagcccttgggctcgtggatccacttccagccgaggtccttgcggaagtcaatgtacagctgccgcacgcagcagttcttctccgtggag

SEQ ID NO: 31842 - DNA, 180 bp, Homo sapiens
  MAP TO AL138719.1; EXPRESSED IN PLACENTA, SIGNAL = 1.3; EXPRESSED IN FETAL LIVER, SIGNAL = 1.5; SWISSPROT HIT: P49766, EVALUE 3.00e+00; EST_HUMAN HIT: AL043810.1, EVALUE 2.00e-16; NT HIT: AF280107.1, EVALUE 3.00e-23
tcatggtgcccagggctctgcctgatgttctgagatctgagtgggctcagagagcagggagaagccaggcagcaggaggaggcacttccgagcctgccaggtcaggggggccttcctggacccccaagagtgcagggatatctgagtctgctgctgcggcttcagcagcagcagctgcac

SEQ ID NO: 31843 - DNA, 338 bp, Homo sapiens
  MAP TO AC008569.3; EXPRESSED IN BONE MARROW, SIGNAL = 2.6; EXPRESSED IN FETAL LIVER, SIGNAL =   2; EXPRESSED IN LUNG, SIGNAL = 3.6; NT HIT: gi11424480, EVALUE 8.00e-72; SWISSPROT HIT: Q07478, EVALUE 3.00e-20; EST_HUMAN HIT: BE378337.1, EVALUE 1.00e-71
cccatggaggtgtttgtggacgacgagaccaagctcacgctgcacggcctgcagcagtactacgtcaaactcaaagacagtgagaagaaccgcaagctctttgatctcttggatgtgctggagtttaaccaggtgatacttccatcagcctgtcctggggctcaggaccttcgggaggtcactgggccacagggactgtgtggccctgactgccactccttccctcaggtgataatcttcgtcaagtcagtgcagcgctgcatggccctggcccagctcctcgtggagcagaacttcccggccatcgccatccaccggggcatggcccaggaggagcg

SEQ ID NO: 31844 - DNA, 205 bp, Homo sapiens
  MAP TO AC020748.2; EXPRESSED IN FETAL LIVER, SIGNAL = 2.1; EST_HUMAN HIT: AI904584.1, EVALUE 1.00e-112; SWISSPROT HIT: O07045, EVALUE 6.50e+00
gtgagcagaatggcaacaggaatcctggtggattgcagattggtgacctggtaaatatagatctcgacctcgaaattgtacagtctttgcagcatggtcatggaggatggactgatggaatgtttgagactttaactacaactggaactgtttgtggcattgatgaagatcatgacattgtagtacagtatccaagtggcaatag

SEQ ID NO: 31845 - DNA, 156 bp, Homo sapiens
  MAP TO AC020912.3; EXPRESSED IN FETAL LIVER, SIGNAL =   2; EXPRESSED IN LUNG, SIGNAL =   6; SWISSPROT HIT: O02833, EVALUE 4.60e-01; NT HIT: L41687.1, EVALUE 3.60e-01; EST_HUMAN HIT: AW967169.1, EVALUE 5.30e-01
ctgactgaggtccttctcagtgatgtcactctgcttgctgatgaactggacgctcgtggtggcccccgggcaactggcactcacaggctggaagagtgggtcttctaatgaatgcctcgagggtcctctgtgcgctgccacctgcatggccaccat

SEQ ID NO: 31846 - DNA, 188 bp, Homo sapiens
  MAP TO AL109938.8; EXPRESSED IN FETAL LIVER, SIGNAL =   2; NT HIT: AF170344.1, EVALUE 1.70e+00; EST_HUMAN HIT: BE501320.1, EVALUE 5.00e-51; SWISSPROT HIT: P09802, EVALUE 5.80e-01
atgagggagctccctggctggttcctgttctttggggtcttcctccccgtgactttgctgctgctcctcctcatcgcctacttcaggatcaaactgattgagggtaagtgtgaggccacacaaggaagaacttgggcatcctttcccacagcacatcttgaaatataccgatgcactgtcagtgtttt

SEQ ID NO: 31847 - DNA, 97 bp, Homo sapiens
  MAP TO AC020741.2; EXPRESSED IN FETAL LIVER, SIGNAL = 1.6; EXPRESSED IN BONE MARROW, SIGNAL = 1.5; EST_HUMAN HIT: BF035327.1, EVALUE 3.00e-32; NT HIT: AF181897.1, EVALUE 7.00e-29
gatctcctggataacttgctacagcttctacatcagcacttgctacttcaccttgtacttttatgttatggagatggcttctttccttaaaccacat

SEQ ID NO: 31848 - DNA, 233 bp, Homo sapiens
  MAP TO AC009263.6; EXPRESSED IN FETAL LIVER, SIGNAL = 1.7; EST_HUMAN HIT: AW026182.1, EVALUE 1.00e-76; SWISSPROT HIT: Q60996, EVALUE 7.00e-32; NT HIT: gi4506022, EVALUE 9.00e-77
ggcagctagccaaatgtgtctccagctcacacttccaggtggcagagcaagcgctctattaccggaataatgaatacattatgagcttaatcagtaacagcgcagcaaagattctgctgatcatgtttccatgcttgtactgcaattcaaagacccattggaacaagacaatacatggcttgatatccaacacactgaagctcttcatgcagatgaaccaaaagctatttaat

SEQ ID NO: 31849 - DNA, 127 bp, Homo sapiens
  MAP TO AC008770.3; EXPRESSED IN FETAL LIVER, SIGNAL = 1.7; EXPRESSED IN LUNG, SIGNAL = 1.8; NT HIT: U09367.1, EVALUE 2.00e-24; SWISSPROT HIT: P52737, EVALUE 6.00e-12; EST_HUMAN HIT: AW206752.1, EVALUE 6.00e-65
gacccagtggcttttaaggatgtggctgtgaacttcacccaggaggagtgggctttgctggatatttcccagaagaatctctacagggaagtgatgctggaaactttctggaacctgacctctatag

SEQ ID NO: 31850 - DNA, 351 bp, Homo sapiens
  MAP TO AC008543.4; EXPRESSED IN BONE MARROW, SIGNAL = 1.6; EXPRESSED IN FETAL LIVER, SIGNAL = 2.1; NT HIT: gi7706462, EVALUE 9.00e-41; SWISSPROT HIT: P52737, EVALUE 3.00e-44; EST_HUMAN HIT: AW023559.1, EVALUE 4.00e-62
atgaaccttataaatgtaagttttgtgggaaggcctttgataatctacatttatatcttacacatgaaagaactcacactggagagaaaccctatgaatgtaataaatgtgggaaagccttcagttgttccagttccattcgaaaacatgcaagaattcacactggagagaaaccctatatatgtaaacaatgtggcaaagcctttagatattccagttctattcgaaatcatgaaaacactcacactggtgaaaaaccctgtgaatgtaagcaatgtgggaaagcctttagttattccagttactttcgaatacatgaaagaattcacactggagagcaggtgtataaat

SEQ ID NO: 31851 - DNA, 155 bp, Homo sapiens
  MAP TO AC008897.4; EXPRESSED IN FETAL LIVER, SIGNAL = 2.3; EXPRESSED IN HELA, SIGNAL = 1.7; SWISSPROT HIT: P04035, EVALUE 6.00e-24; EST_HUMAN HIT: AU132001.1, EVALUE 4.00e-82; NT HIT: gi11417105, EVALUE 2.00e-82
ctgttgtgaatcatgtgacttttgacaagatgtcctgctgccaatgctgccataagtgacaattccccagccattacggtcccacacacaattcgggcaagctgccgggcattttccccaggattatctttgcatgctccttgaacacctagcat

SEQ ID NO: 31852 - DNA, 121 bp, Homo sapiens; identical to SEQ ID NO: 24431
  MAP TO AC019239.3; EXPRESSED IN HELA, SIGNAL = 2.1; EXPRESSED IN PLACENTA, SIGNAL = 1.9; EXPRESSED IN FETAL LIVER, SIGNAL = 1.5; NT HIT: AL163248.2, EVALUE 3.00e-38; EST_HUMAN HIT: AW893093.1, EVALUE 4.00e-35; SWISSPROT HIT: P47970, EVALUE 4.10e+00

SEQ ID NO: 31853 - DNA, 108 bp, Homo sapiens
  MAP TO AC023753.5; EXPRESSED IN BONE MARROW, SIGNAL = 3.7; EXPRESSED IN FETAL LIVER, SIGNAL = 2.2; NT HIT: U91328.1, EVALUE 1.00e-09; EST_HUMAN HIT: AW023137.1, EVALUE 1.00e-19
atgcaggttacagagaccttgctgataaaacaggatgtggtaaagaagccagccaaaacccacaaaaaccaagatggcaacacacgtgacctcagcaaaaccaagatg

SEQ ID NO: 31854 - DNA, 134 bp, Homo sapiens
  MAP TO AC022374.1; EXPRESSED IN HELA, SIGNAL = 2.2; EXPRESSED IN FETAL LIVER, SIGNAL = 1.7; SWISSPROT HIT: P28996, EVALUE 5.30e+00; EST_HUMAN HIT: BE066472.1, EVALUE 4.50e-01
ctccttcctctttccttcacagtccaactcttccttcatgttcctggcatgcaggtctttgtcttgtccctgtccattcttgccatcctttatctttactttcccttctctatcttgttccctctgccatgagc

SEQ ID NO: 31855 - DNA, 204 bp, Homo sapiens
  MAP TO AL132838.1; EXPRESSED IN HELA, SIGNAL = 3.4; EXPRESSED IN FETAL LIVER, SIGNAL = 2.7; NT HIT: gi11419729, EVALUE 8.00e-46; EST_HUMAN HIT: BE619510.1, EVALUE 3.00e-43; SWISSPROT HIT: P09896, EVALUE 6.00e-17
ggaaagcagcatgacaggaagcagagtgactatggtgggcagactaggctgattttcccgaaaaagggtaaaactacaaagactgtgctgaaggttgagtgcgctgagctcaactgcagatctaagaggatgctggctattaagagatgcaagcatgctgaacccagagaagataagaagagaaagggacaattgatccagttg

SEQ ID NO: 31856 - DNA, 433 bp, Homo sapiens
  MAP TO AC018719.2; EXPRESSED IN PLACENTA, SIGNAL =   2; EXPRESSED IN BONE MARROW, SIGNAL =   3; EXPRESSED IN HELA, SIGNAL = 2.1; EXPRESSED IN FETAL LIVER, SIGNAL =   4; EST_HUMAN HIT: BE906402.1, EVALUE 0.00e+00; NT HIT: gi4557844, EVALUE 0.00e+00; SWISSPROT HIT: P31350, EVALUE 5.00e-66
gtctttcagtgaaatattctccgtaaagtcaaatgggctctctactccgaaaaccttgctaaaacccagttccagcataagtctgtctgccacaaactcaatgtattgcttcattagagtgcaattcatcccaatgagcttcacaggcaaggcctcggtgaggaattcttgttctatctgaacagcattgataattatttctctcactttctcctccgatggtttgtgtaccaggtgtttgaacatcaagcaagcaaaatcacagtgtaaaccctcttctctgctaataagttcattggaaaacgtgaggccaggcatcggtcctcgtttcttgagccagaatatcgatgcaaaagaaccagaaaagaagatgccttctactgcagcaaaggctacaacacgttcaccataggtagcctctttgtccccaatc

SEQ ID NO: 31857 - DNA, 231 bp, Homo sapiens
  MAP TO AC007216.2; EXPRESSED IN BONE MARROW, SIGNAL = 1.9; EXPRESSED IN FETAL LIVER, SIGNAL = 1.7; NT HIT: gi11430446, EVALUE 1.00e-94; EST_HUMAN HIT: AW950634.1, EVALUE 4.00e-95; SWISSPROT HIT: P15170, EVALUE 7.00e-30
tgaatgtgtcagaaaacctccagtcttgttttcttttaaagcacaacgtggaagttcttggaatactttccgatgatgtagagactgataccgtagccccaggtgaaaacctcaaaatcagactgaaaggaattgaagaagaggagattcttccagggtttatactttgtgatcctaataatctttgtcattctggacgcacatttgatgcccaggtaaacaaattattgt

SEQ ID NO: 31858 - DNA, 104 bp, Homo sapiens
  MAP TO AL135747.2; EXPRESSED IN FETAL LIVER, SIGNAL = 1.7; SWISSPROT HIT: O18917, EVALUE 7.20e+00; NT HIT: U71187.1, EVALUE 2.20e-01; EST_HUMAN HIT: AA700756.1, EVALUE 8.30e-02
aaccagtctctctgcaggtgcccactttcttctcttttctccagaaatgtgaggctgctgttctctccaatttgatacactgatgaatgaatgcagcttgtgtt

SEQ ID NO: 31859 - DNA, 184 bp, Homo sapiens
  MAP TO AF223391.1; EXPRESSED IN FETAL LIVER, SIGNAL = 1.8; EST_HUMAN HIT: H87208.1, EVALUE 2.00e-50; NT HIT: AF223391.1, EVALUE 1.00e-99; SWISSPROT HIT: P29124, EVALUE 1.70e+00
tctgaggcaggttcctcaggaggtattccagaggaaggcattgtcatcataggagatgacagctccctgtgtgttattgctcctgaagaccttccagtgggacaagatatggaggtggaagacagtgatattgatggttctgaccctgtgcaggcctaggctagtgtgtgtgtttgtgtcttcg

SEQ ID NO: 31860 - DNA, 395 bp, Homo sapiens
  MAP TO AC016537.2; EXPRESSED IN FETAL LIVER, SIGNAL = 1.7; EXPRESSED IN PLACENTA, SIGNAL = 1.5; EXPRESSED IN HELA, SIGNAL = 2.8; EST_HUMAN HIT: AW847812.1, EVALUE 3.00e-97; SWISSPROT HIT: P07575, EVALUE 2.00e-23; NT HIT: gi9635487, EVALUE 0.00e+00
ttgcttggttggcaagtttttgggttctatccttgagtttttttatgttctcatacaccaagccagattgatttaggtaaaaacaacactcttcatttaacaatatactgagtccaaggcctcggcggttttggaggacaactgcagctaaagagtcaacttgggcctggaggactgataaagtttgtgatatgtctgtgatgctagcagagaagtcattagacgggctacggaaggtcgtgacagaggttgaaatgcctgctattccagtactgagagcaatagtggaggcagaaagtcctaaaccgaccatcaagggaattagtggaataactcttttttgtggtgtcagtgtcataaggggaacagggagctctttggtcccatttgcaaat

SEQ ID NO: 31861 - DNA, 127 bp, Homo sapiens
  MAP TO AL133313.1; EXPRESSED IN FETAL LIVER, SIGNAL = 2.2; EXPRESSED IN HELA, SIGNAL = 2.7; SWISSPROT HIT: P30050, EVALUE 4.00e-12; EST_HUMAN HIT: AA314207.1, EVALUE 5.00e-13; NT HIT: gi11429885, EVALUE 6.00e-18
ttgtcttggtgatgtcctcattggccttttttggagacagacccagggggctgatcttaggaaccagagcagatgtagtactgacttccccactcgtgcacctcaggtatacgactttgatcttgtt

SEQ ID NO: 31862 - DNA, 216 bp, Homo sapiens
  MAP TO AC022205.2; EXPRESSED IN LUNG, SIGNAL = 1.6; EXPRESSED IN PLACENTA, SIGNAL = 1.8; EXPRESSED IN FETAL LIVER, SIGNAL = 1.6; SWISSPROT HIT: P12024, EVALUE 3.00e-07; EST_HUMAN HIT: BE218235.1, EVALUE 1.00e-118; NT HIT: gi11441465, EVALUE 1.00e-118
agaactaccaggcttgaaaggttggtaaatgcaaagtcagggatgcttgagatcttgttgagagccagggtcagcgcctgtagggtgggcagattgctgagggggtgcacaggcacctccgtcaagctgttgtcatccagccacagatgccgtaactgaacaagtccttcaaaactgtcctcggggactgaggtaatatggttggcatctaaacgc

SEQ ID NO: 31863 - DNA, 135 bp, Homo sapiens
  MAP TO AC010745.2; EXPRESSED IN FETAL LIVER, SIGNAL = 1.7; EXPRESSED IN PLACENTA, SIGNAL = 1.9; EST_HUMAN HIT: AA642353.1, EVALUE 2.00e-40; NT HIT: AL163246.2, EVALUE 1.00e-40; SWISSPROT HIT: P41997, EVALUE 1.80e-02
cataaaaatctatgcttcgggattcaacaaacacttggaaagcattttctgcatcctgctggttgtggaagtgttttccctgcaaaaagttgtcaagatgcttgaagaaggggtagtcaattggctagaggtcgg

SEQ ID NO: 31864 - DNA, 187 bp, Homo sapiens
  MAP TO AF233439.1; EXPRESSED IN BONE MARROW, SIGNAL = 1.6e+02; EXPRESSED IN FETAL LIVER, SIGNAL =  18; EXPRESSED IN LUNG, SIGNAL =  24; SWISSPROT HIT: P11479, EVALUE 7.00e-17; NT HIT: X52053.1, EVALUE 1.00e-101; EST_HUMAN HIT: AA321316.1, EVALUE 1.00e-101
gtgaccccagccatgaggaccctcgccatccttgctgccattctcctggtggccctgcaggcccaggctgagccactccaggcaagagctgatgaggttgctgcagccccggagcagattgcagcggacatcccagaagtggttgtttcccttgcatgggacgaaagcttggctccaaagcatccag

SEQ ID NO: 31865 - DNA, 88 bp, Homo sapiens
  MAP TO AC010828.3; EXPRESSED IN FETAL LIVER, SIGNAL = 1.6; SWISSPROT HIT: P48994, EVALUE 5.60e+00; NT HIT: U40487.1, EVALUE 1.80e-01; EST_HUMAN HIT: AW087157.1, EVALUE 2.70e-01
ttcccctttctcacccaccagaggaatctcccatacctcgctctccttacactcttgccctgaactcttctcatgtccacctgacctt

SEQ ID NO: 31866 - DNA, 270 bp, Homo sapiens
  MAP TO AC010636.3; EXPRESSED IN FETAL LIVER, SIGNAL = 2.1; EST_HUMAN HIT: BE086814.1, EVALUE 2.00e-42; SWISSPROT HIT: P26808, EVALUE 4.00e-17; NT HIT: AJ271736.1, EVALUE 9.00e-99
tatcagagagcccagtcgagcataactgtgtagaggtgttggactcagtttattctagcagacctgaccttagggaccagccatgggcatcagtagacttggagttatatttggacgggagtagcttcatcaacccacaaggagaaagatgtgcagaatatgcggtggtaactttggatgctgtcattgaaaccaaaccattgccacagggcacttcagcccagaaggctgagctcattgctttaactcgagctctagaactcagtgaag

SEQ ID NO: 31867 - DNA, 179 bp, Homo sapiens
  MAP TO AL121819.1; EXPRESSED IN HELA, SIGNAL = 1.7; EXPRESSED IN FETAL LIVER, SIGNAL = 2.2; NT HIT: AF223391.1, EVALUE 7.00e-40; EST_HUMAN HIT: BE044076.1, EVALUE 4.00e-45
atgcggaaaaaaagggtttttgtaggacagcctcaggcaggttctttaggtggtatttcagaagaaggcattgttatcataggagatgacagctctgtgcatgttattgcccctgaagaccttccagtgggacaagatgtggaggtggaagacagtgatattgatgatcttgcccctgt

SEQ ID NO: 31868 - DNA, 117 bp, Homo sapiens
  MAP TO AC018698.3; EXPRESSED IN FETAL LIVER, SIGNAL = 1.6; EXPRESSED IN HELA, SIGNAL = 1.8; NT HIT: gi11465934, EVALUE 1.00e+00; EST_HUMAN HIT: H70296.1, EVALUE 6.00e-03
ctggatgaaggctggctggaagatgaaaggaatgaattcttagaggagttaaacttggagatgttggaagaagagcataatgaagcaatgcagcccactgccaatgaggtggagcag

SEQ ID NO: 31869 - DNA, 180 bp, Homo sapiens
  MAP TO AC010478.5; EXPRESSED IN FETAL LIVER, SIGNAL = 1.9; SWISSPROT HIT: P08548, EVALUE 4.00e-14; NT HIT: AL163247.2, EVALUE 3.00e-05; EST_HUMAN HIT: AA811158.1, EVALUE 7.00e-07
tatgatctgtatgtctcctcttccatttctgatattagtaatttgtgtcttcttgcttttttccttagttatcctggctataaacttgtcaattttattggtcttttcaaagaaccagcttttagtcttattgactttctgtatgaatttcctgttttccattttattgatttgtgctct

SEQ ID NO: 31870 - DNA, 171 bp, Homo sapiens
  MAP TO AC013562.3; EXPRESSED IN HELA, SIGNAL = 1.8; EXPRESSED IN FETAL LIVER, SIGNAL = 1.7; SWISSPROT HIT: Q09437, EVALUE 5.10e+00; NT HIT: AF111168.2, EVALUE 2.00e-09; EST_HUMAN HIT: AW812688.1, EVALUE 3.00e-09
gccaccttcaccaatgattttagctagatcttctggaaaacttgcagcttctgtatcagcccttgttgcttcaccttgcactttgatgatacgaggatggcttctttcttttaacagcatgaacagatttctgctagctttaacagtttccttacctctctcagccttcat

SEQ ID NO: 31871 - DNA, 184 bp, Homo sapiens; identical to SEQ ID NO: 31859
  MAP TO AH009158.1; EXPRESSED IN FETAL LIVER, SIGNAL = 1.6; EXPRESSED IN HELA, SIGNAL = 1.8; SWISSPROT HIT: P29124, EVALUE 1.70e+00; EST_HUMAN HIT: H87208.1, EVALUE 2.00e-50; NT HIT: AF223391.1, EVALUE 1.00e-99

SEQ ID NO: 31872 - DNA, 161 bp, Homo sapiens
  MAP TO AF223391.1; EXPRESSED IN FETAL LIVER, SIGNAL = 2.7; EST_HUMAN HIT: AA297200.1, EVALUE 9.00e-06; SWISSPROT HIT: Q61290, EVALUE 2.00e-25; NT HIT: AF223391.1, EVALUE 7.00e-86
gccgtcttcgactgcgtagtgacctccttgaagaatgtcttcaacatactcattgtgtacaagctcttcatgttcatctttgctgtcatcgcagttcagctcttcaagggaaagttcttttattgcacggacagttccaaggacacagagaaggagtgcat

SEQ ID NO: 31873 - DNA, 108 bp, Homo sapiens
  MAP TO AC008723.3; EXPRESSED IN FETAL LIVER, SIGNAL = 1.5; SWISSPROT HIT: O75330, EVALUE 2.00e-08; NT HIT: gi11526372, EVALUE 6.00e-39; EST_HUMAN HIT: AU120436.1, EVALUE 9.00e-39
atgatctgtacaattcatttttccgcagaatctaaacaaaatcttaatgttgacaaagatactaccttgcctgcttcagctagaaaagttaagtcttcggaatcaaag

SEQ ID NO: 31874 - DNA, 648 bp, Homo sapiens
  MAP TO AP000345.1; EXPRESSED IN LUNG, SIGNAL = 1.2; EXPRESSED IN FETAL LIVER, SIGNAL = 1.4; EXPRESSED IN PLACENTA, SIGNAL = 1.4; EST_HUMAN HIT: AW003247.1, EVALUE 0.00e+00; NT HIT: AB016195.1, EVALUE 0.00e+00; SWISSPROT HIT: P10266, EVALUE 1.00e-105
acaagattttaatcagtctattaacattgtatcagattctgcatatgtagtacaggctacaaaggatattgagagagccctaatcaaatacattatggatgatcagttaaacccgctgtttaatttgttacaacaaaatgtaagaaaaagaaatttcccattttatattactcatattcgagcacacactaatttaccagggcctttaactaaagcaaatgaacaagctgacttgctagtatcatctgcattcatggaagcacaagaacttcatgccttgactcatgtaaatgcaataggattaaaaaataaatttgatatcacatggaaacagacaaaaaatattgtacaacattgcacccagtgtcagattctacacctggccactcaggaggcaagagttaatcccagaggtctatgtcctaatgtgttatggcaaatggatgtcatgcacgtaccttcatttggaaaattgtcatttgtccatgtgacagttgatacttattcacatttcatatgggcaacctgccagacaggagaaagtacttcccatgttaaaagacatttattatcttgttttcctgtcatgggagttccagaaaaagttaaaacagacaatgggccaggttactgtagtaaagcagttca

SEQ ID NO: 31875 - DNA, 106 bp, Homo sapiens
  MAP TO AC007900.1; EXPRESSED IN LUNG, SIGNAL = 1.4; EXPRESSED IN FETAL LIVER, SIGNAL = 1.3; EXPRESSED IN PLACENTA, SIGNAL = 1.2; EXPRESSED IN HELA, SIGNAL = 1.4; EST_HUMAN HIT: BF589051.1, EVALUE 6.00e-46; SWISSPROT HIT: P11497, EVALUE 3.00e-14; NT HIT: gi11426423, EVALUE 3.00e-53
catcataggacaagagcagtccaccgtcactcagccgatgtacatctacttctacacatgagccattcatgatcaccacataggagttgggggactgtcgagtcac

SEQ ID NO: 31876 - DNA, 1169 bp, Homo sapiens
  MAP TO AC008174.2; EXPRESSED IN FETAL LIVER, SIGNAL = 1.9; EXPRESSED IN HELA, SIGNAL = 1.3; EXPRESSED IN PLACENTA, SIGNAL = 1.5; EXPRESSED IN BONE MARROW, SIGNAL = 1.3; EST_HUMAN HIT: AV658125.1, EVALUE 2.80e-01; SWISSPROT HIT: P06198, EVALUE 9.10e-02; NT HIT: gi9632893, EVALUE 4.80e-02
tctttgatacaacttattcaaaagttcttccactgcaatgagcagttcacctttttctttgttttttgattctccatttctcataaatatttcttccaaaacaattatctgccttttgttttccaatatcatttggttttgctctaatggatactttgtaaatagagattgtttggtacttctttccttctctttgtgacccagcaatatttcatttgataaagctaattgtgaaaagttagaattttcttttgaattaaaacaaatttcctttacagatcttttatcatctaacatctttaacatactgtcaacaatttcactcacaatgatgttttcttggaacaaaatattgttttgatatggatatatcttttgaatttctaagtctaagtcatttttaataagcttcaaaatggcactggcaatgacgtcagcatatgtcttaagcctagcttgcgataggtgaattgtggatccaagtttttctctgcgaccaacaaaagtgaaatctgtaagctcttggctgagaatggtttcagttgctgatattttcaggacatttacatctgattccacttggcttgaatcataaaagatgctgtcattttgtttacaattttccaattctgggataacaaatgacttttctttactttggaaagcaagggtaattaatgaatctattctttctgtggcaaaagattccaaacgtttaaaaatagttttagtaatgaagttagcattttcctcacatgagtcagtagcagatttctgagtgtcttctttctctactacagttatctgattatcatcagcataagctgatttctgatttcttgaatatgaaaaacgctctgtttttctttcagtttttgaccccttaagaggctgttgacagtctatttttggaaacgtatcacaaaatgtcaggggcaatcttgcagaagtaggattctttgcatttatgacaagcgtggcagcagaactgagattatgaagaacaatattcactatatcattggatatcaaaatgacatctgatttaggaactgaaagcttaggaataatcttatttgcaccctccatgaacatttcagaattttcttctgaatgtttatcagctatgctacatttcagagtgggtgtggcaaatgagagattattct

SEQ ID NO: 31877 - DNA, 178 bp, Homo sapiens
  MAP TO AC004624.6; EXPRESSED IN FETAL LIVER, SIGNAL = 1.3; EXPRESSED IN PLACENTA, SIGNAL = 1.3; NT HIT: gi11422936, EVALUE 2.60e-02; EST_HUMAN HIT: AW882920.1, EVALUE 1.60e-01; SWISSPROT HIT: Q14156, EVALUE 3.00e+00
agaagaggaggaggagagaacagaagttaagccactttttagctttctttgctctactgaatttgcacagaaagccaatgagaagccagccgaattgcaccccagaatcctggaagggctggcagtggggacggcaggcacctccagggcgagggagcagggcgaagcgcatgagcac

SEQ ID NO: 31878 - DNA, 274 bp, Homo sapiens
  MAP TO AC006427.13; EXPRESSED IN LUNG, SIGNAL = 1.5; EXPRESSED IN FETAL LIVER, SIGNAL = 1.3; EST_HUMAN HIT: AW337860.1, EVALUE 9.90e-01; SWISSPROT HIT: P37709, EVALUE 4.50e+00; NT HIT: AF110001.1, EVALUE 6.60e-01
tgggaggcaaagaaagagacaccatcgaagacagctgccaagcttccaacgaacatgtcttcttgtcaaaactgcaaagattccacctctatgtctttgttcaggctcttccctttgtttgcaacgcctttccatgcccttccatgattgttctgcaaagcctcttattaactgctcctcacctcctgcctctgcatccctatatctcattgttagttggcatacagttcctggccctcacccatcttcctccatgttttaagctcctcaaagg

SEQ ID NO: 31879 - DNA, 106 bp, Homo sapiens
  MAP TO AP000350.1; EXPRESSED IN FETAL LIVER, SIGNAL = 1.8; EXPRESSED IN HELA, SIGNAL = 1.4; EXPRESSED IN PLACENTA, SIGNAL = 1.3; EXPRESSED IN BONE MARROW, SIGNAL = 1.4; EST_HUMAN HIT: R18591.1, EVALUE 4.00e-16; NT HIT: L27056.1, EVALUE 2.30e-01; SWISSPROT HIT: P70315, EVALUE 4.80e-01
cccacaggtcgggcagggccacctggctgggaggtgccgggaaggctgggccctcactcctgaccgccagctcacaccgccgcaaagccatctccacaaggtctgg

SEQ ID NO: 31880 - DNA, 567 bp, Homo sapiens; identical to SEQ ID NO: 25808
  MAP TO AP000345.1; EXPRESSED IN PLACENTA, SIGNAL = 1.2; EXPRESSED IN LUNG, SIGNAL = 1.4; EXPRESSED IN FETAL LIVER, SIGNAL = 1.4; NT HIT: Y18890.1, EVALUE 4.00e-50; SWISSPROT HIT: P10264, EVALUE 9.00e-63; EST_HUMAN HIT: M77994.1, EVALUE 4.00e-91

SEQ ID NO: 31881 - DNA, 571 bp, Homo sapiens; identical to SEQ ID NO: 15372
  MAP TO AC007363.3; EXPRESSED IN FETAL LIVER, SIGNAL = 1.3; EXPRESSED IN PLACENTA, SIGNAL = 1.5; NT HIT: X70287.1, EVALUE 4.00e-07; EST_HUMAN HIT: BE612449.1, EVALUE 5.00e-29

SEQ ID NO: 31882 - DNA, 112 bp, Homo sapiens
  MAP TO AP000344.1; EXPRESSED IN PLACENTA, SIGNAL = 1.8; EXPRESSED IN BONE MARROW, SIGNAL = 1.5; EXPRESSED IN LUNG, SIGNAL = 1.3; EXPRESSED IN FETAL LIVER, SIGNAL = 1.6; NT HIT: L19435.1, EVALUE 6.20e-02; EST_HUMAN HIT: BF528462.1, EVALUE 2.30e-02
ccctgaagctcaaggaaatgactttggtgacaatgacccttgccagagccaatgccttgtcacctacctggtggtcatgatggcgatcaagggtgtccctgctttcatgtaa

SEQ ID NO: 31883 - DNA, 97 bp, Homo sapiens
  MAP TO AC007286.18; EXPRESSED IN FETAL LIVER, SIGNAL = 1.3; NT HIT: D63362.1, EVALUE 5.20e-02; EST_HUMAN HIT: AU127893.1, EVALUE 1.20e+00; SWISSPROT HIT: P35897, EVALUE 5.60e-02
atcacatcatgttgaggctcttcctttgtttctcctttcgtgtcagtttccctcatttcttctgcactgtagcccaaataatagacatctccatgcc

SEQ ID NO: 31884 - DNA, 190 bp, Homo sapiens
  MAP TO AC007363.3; EXPRESSED IN FETAL LIVER, SIGNAL = 1.4; EST_HUMAN HIT: N40825.1, EVALUE 1.70e-01; NT HIT: Z49386.1, EVALUE 1.80e+00; SWISSPROT HIT: Q03923, EVALUE 3.40e-01
aatctctgtatcaaaatgcttgagatttacagataaggggcaaattactcatcagttaaagatgtatgagaagaatgcactttgtcaaatgtggaggaagtgtaaaaaggcaaagaaagagaaaagtaatttaagcagggaaaataaagaccacagcaagaagaagacacttgataatgttcagcactgg

SEQ ID NO: 31885 - DNA, 122 bp, Homo sapiens
  MAP TO AC008272.1; EXPRESSED IN FETAL LIVER, SIGNAL = 2.3; EXPRESSED IN BONE MARROW, SIGNAL = 1.4; NT HIT: gi11432556, EVALUE 2.70e-01; EST_HUMAN HIT: AA737961.1, EVALUE 1.00e-01; SWISSPROT HIT: P70555, EVALUE 6.20e-01
catcacaggaaactgaagagtccaggcttctcctccctgcacaagaggtgaactttccatggctccactctcttccccagttgtgcaggtggatattactgagagaaaatcagttggaaaaa

SEQ ID NO: 31886 - DNA, 160 bp, Homo sapiens
  MAP TO AC007463.3; EXPRESSED IN FETAL LIVER, SIGNAL =   2; EXPRESSED IN LUNG, SIGNAL = 1.3; NT HIT: AF234163.1, EVALUE 1.40e+00; EST_HUMAN HIT: AA452305.1, EVALUE 1.40e-01
aatggtgactctcctgggtagactgggaaatacagtcatcctgtttatacacctaatgtctattgagcatcatgttagcaaatgccgtggctttaacatccctgaaatagaggatcagcatgttctgataatcgacactcacattttctccttttctacc

SEQ ID NO: 31887 - DNA, 229 bp, Homo sapiens
  MAP TO AC007539.8; EXPRESSED IN PLACENTA, SIGNAL = 1.3; EXPRESSED IN FETAL LIVER, SIGNAL = 1.4; NT HIT: AF009663.1, EVALUE 3.50e-02; EST_HUMAN HIT: BE868635.1, EVALUE 2.10e-01; SWISSPROT HIT: Q05620, EVALUE 1.00e+00
gtagagcacatctggcaatagctggggtctgcctggaagatgtctctctgggactttgcttatggagagaagccctccaaactgtatgcgggggtggggcaagagtgggagtgtggcgagcgcgagggttcagagtcacatgagggtgcagagtgatgagatctcgaaaccgaaagtgacctttcaatggcagacacttccactgggcctcagaattgtctcctgtagt

SEQ ID NO: 31888 - DNA, 132 bp, Homo sapiens
  MAP TO AL078474.2; EXPRESSED IN FETAL LIVER, SIGNAL = 1.4; EXPRESSED IN PLACENTA, SIGNAL = 1.4; NT HIT: AJ223459.2, EVALUE 7.40e-02; EST_HUMAN HIT: BE873342.1, EVALUE 1.10e-01; SWISSPROT HIT: Q03703, EVALUE 7.00e+00
taagagcaagaaggttgttttcgatacagtggttggagaaagtgtcacagaccaattgaaaatggaaggaaaatctaaagaaatgaaggagaatgttacacaaatttctttgaaggtaacagcaaactctga

SEQ ID NO: 31889 - DNA, 267 bp, Homo sapiens; identical to SEQ ID NO: 20791
  MAP TO AC008174.2; EXPRESSED IN FETAL LIVER, SIGNAL = 1.4; EST_HUMAN HIT: AA515512.1, EVALUE 7.00e-82; NT HIT: AF232935.1, EVALUE 6.40e-01

SEQ ID NO: 31890 - DNA, 275 bp, Homo sapiens
  MAP TO AC004832.3; EXPRESSED IN FETAL LIVER, SIGNAL = 1.5; EXPRESSED IN HELA, SIGNAL = 1.3; EXPRESSED IN LUNG, SIGNAL = 1.2; EST_HUMAN HIT: BE873983.1, EVALUE 9.90e-01; NT HIT: AJ272584.1, EVALUE 1.70e-01; SWISSPROT HIT: P55355, EVALUE 3.50e+00
attaccaacccagtgctgcgacacacagctattattgttattacaactgctactgctgctgctaattctcctccctcctttcaaagtccagttcaagctctaactcctttaaaaagcgtttcacatgatttcagtctaccaggccctcttcttccaagctggtacagacgagatggtctctgtcactcatctggcacttggcatgttctgcctatttttttctctccatgaatgtcttgtcaaccccgctagattaagtttcagaaggtcaagga

SEQ ID NO: 31891 - DNA, 94 bp, Homo sapiens
  MAP TO AL079300.11; EXPRESSED IN PLACENTA, SIGNAL = 1.2; EXPRESSED IN FETAL LIVER, SIGNAL = 1.4; EST_HUMAN HIT: BF677836.1, EVALUE 4.50e+00; NT HIT: U77666.1, EVALUE 3.10e+00
gtttattttctttgtggtctgcatcacacgttgtactgtagttattggtctgcgcgtttttttgttttgttttgtttttgtctgtttccgctac

SEQ ID NO: 31892 - DNA, 436 bp, Homo sapiens
  MAP TO AC004032.7; EXPRESSED IN LUNG, SIGNAL = 1.5; EXPRESSED IN BONE MARROW, SIGNAL = 1.3; EXPRESSED IN FETAL LIVER, SIGNAL = 1.9; NT HIT: AP001517.1, EVALUE 1.10e+00; SWISSPROT HIT: P01803, EVALUE 1.10e+00; EST_HUMAN HIT: BE158905.1, EVALUE 1.00e-01
gtttatccccagaggaagaaggactggtctcataaacctggtatgttggagaccaagaaggaaactgcccagaacaggccagaagtggcaaatctttcaccttaatcagctgcttattggatgaaaagtcaccccgataaatgttcaactgggaaggaaaagagctaacgaaatggacatgtgccaaattctggaaatagaccatcaacgaccgtgcctaaacagtttactcggagacttgatcatctagtttagccctccagggattaaatgctcacctctttataacacaggggaccaatgctcgatttccacacatttgaatttcatagcatgcatgcaaatctgtaatgcacgaaactgggtgaggcggaggagttgcagtgtcctcggcacagcgcctccttggggcttgcactggagctgcctggagccc

SEQ ID NO: 31893 - DNA, 213 bp, Homo sapiens
  MAP TO AC004832.3; EXPRESSED IN LUNG, SIGNAL = 1.4; EXPRESSED IN FETAL LIVER, SIGNAL = 1.7; NT HIT: AL163210.2, EVALUE 2.00e-03; EST_HUMAN HIT: AW579954.1, EVALUE 8.00e-04; SWISSPROT HIT: P22474, EVALUE 1.20e+00
ggcttaatattgtgtccagaatatagtaagtgctcaataaatgctttaaatcgtcattgtgtagaagcctggatctgcctggattcaagctggattcaggctgcagggtgtcttggggccagaagggttaattttgcctgccttgaaacaaaggccttggggaaggagagacccccagcctgccccctaaaccccagagcacactgtctacag

SEQ ID NO: 31894 - DNA, 310 bp, Homo sapiens
  MAP TO Z97055.1; EXPRESSED IN BONE MARROW, SIGNAL = 1.9; EXPRESSED IN FETAL LIVER, SIGNAL = 1.7; EXPRESSED IN PLACENTA, SIGNAL = 1.6; EXPRESSED IN HELA, SIGNAL = 1.4; EXPRESSED IN LUNG, SIGNAL = 1.5; SWISSPROT HIT: Q24307, EVALUE 3.00e-01; NT HIT: AF084198.1, EVALUE 7.60e-01; EST_HUMAN HIT: AA401779.1, EVALUE 7.20e-02
aggaagagaagaaacttacatttgcagagctcacactgactggatgcaggcactattctcagtgttttacatgagtagccctaaaaccaccctcagaggtggtgtcactttctacaactcacaaagcagaggtatggcctccctgcccggcaccgccatgagtgccagcgatctctgtgaatccagagtgcaagtccatcccactgcactaaccaccctacccatgaagaaaaagacagcccgtcaaattattcaagctttcattgcatttcatattgctacttatagtctaacacaaattctaatgtgg

SEQ ID NO: 31895 - DNA, 174 bp, Homo sapiens
  MAP TO AP000352.2; EXPRESSED IN FETAL LIVER, SIGNAL = 1.7; EXPRESSED IN PLACENTA, SIGNAL = 1.4; NT HIT: gi11417862, EVALUE 1.00e-93; EST_HUMAN HIT: AW501630.1, EVALUE 5.00e-91; SWISSPROT HIT: Q9Y6J0, EVALUE 6.00e-26
aggacagcacagccgtagcactctcagactctagctcaacgcaggacttctttaatgagcccaccagcttactggaaggctccaggaaatcctacacagagaagaggctgcccattctcagttcccaagcaggagcgacgggtaaagatcttcagggggccacagaagaaagag

SEQ ID NO: 31896 - DNA, 758 bp, Homo sapiens
  MAP TO AC002472.3; EXPRESSED IN PLACENTA, SIGNAL = 1.4; EXPRESSED IN LUNG, SIGNAL = 1.5; EXPRESSED IN FETAL LIVER, SIGNAL = 2.5; NT HIT: AB002059.1, EVALUE 0.00e+00; EST_HUMAN HIT: AL134889.1, EVALUE 0.00e+00; SWISSPROT HIT: P05214, EVALUE 3.00e-75
gatctgtattgtctgcttttctctgcttcaaagtgtgatgcgtgttcattatggatggtctgaatccgtatcaactctcagaggcaaagagaagtggccccggcttggtggaggttggtggtgtggctcccacgggcattggcttacgttgtctggtttctctcaggcagatctgtgcatgggactgcagggcttcctcatcttccacagctttgggggcggcactggctctgggttcgtgtctctgctcatgaagcggctctcggtggactacgggaagaagtccaagctggagtttgccatttgcccagccccccaggtctccatggccatgacggagccctacaactccatcctgaccacctacacgaccctggaacattctgactgtgccttcatagtcgacagcaaagccacctatgacatgtcagcacaacctggacatcgagtgtcccatgtacaccaacctcagtcgtctgggcagatcgtgtcctccatcacggcctccctgtgattcgatggggccctgaatgtgtacttgacagaattccaaaccaacttggtgccatacccccacatccacctccccctggccacctacgccctggtcatctcagccaagaaggcctaccatgagcagctgtccgtggccaagatcgccagtgcccgcttcgagccagccaatcagatggtcaagtgtgaccctcaccatggcaagtacatggcctgctgcatgttgtacagaggggatgtggtcc

SEQ ID NO: 31897 - DNA, 132 bp, Homo sapiens
  MAP TO AC007539.8; EXPRESSED IN BONE MARROW, SIGNAL = 1.4; EXPRESSED IN FETAL LIVER, SIGNAL = 1.7; EXPRESSED IN HELA, SIGNAL = 1.5; NT HIT: X68271.1, EVALUE 1.90e-02; EST_HUMAN HIT: AI079212.1, EVALUE 1.10e-01; SWISSPROT HIT: Q61085, EVALUE 4.10e+00
atgtcgcctacccgtgactgcttgctgagtgttgcaggctcagacacatttgcccttggcaccattttctcattctcccatcctcagtttttctcttcccctcttctcctgtacctgcaccctttcaaacat

SEQ ID NO: 31898 - DNA, 104 bp, Homo sapiens
  MAP TO AB016897.1; EXPRESSED IN FETAL LIVER, SIGNAL = 1.6; EXPRESSED IN PLACENTA, SIGNAL = 1.3; NT HIT: AB011399.1, EVALUE 4.00e-52; EST_HUMAN HIT: N58543.1, EVALUE 2.10e-02
gcttaccacaggtagctgaactgtagaaagagaaactgcagataagggggactccagtaaactggtaataggtgcacttataaaacatctttgtaaaaacagac

SEQ ID NO: 31899 - DNA, 283 bp, Homo sapiens
  MAP TO Z82188.2; EXPRESSED IN FETAL LIVER, SIGNAL = 1.3; EST_HUMAN HIT: AV689354.1, EVALUE 1.00e+00; SWISSPROT HIT: O19001, EVALUE 2.80e+00; NT HIT: AJ132510.1, EVALUE 1.70e-01
tgatgcagctgcccagtccctgcttacataccttcaatgacagggagctcattcccttaaggggcagtctctttcactcctggctagcctggcctgttagaaaacccttcctcattttcagcccaaatccttcccttggattgtcctcatagaggtgctacctcttgttctggggccactcagggtcagtcagctccctcctcctcaccacaggccttcgaatttgggaggcacagtcccacccagcagtgtgctgggaaatgttcaacttagagttccagtt

SEQ ID NO: 31900 - DNA, 100 bp, Homo sapiens
  MAP TO AL035682.16; EXPRESSED IN PLACENTA, SIGNAL = 1.2; EXPRESSED IN FETAL LIVER, SIGNAL = 1.3; NT HIT: AJ276505.1, EVALUE 2.10e-01; EST_HUMAN HIT: BE962280.2, EVALUE 3.10e-01; SWISSPROT HIT: O93383, EVALUE 5.50e+00
cttttgccttccaagtggctggcttagcccagttgaccatgaatgctttgggacccttggaaagctggtctaaggtgggcatcataaatctcttttatga

SEQ ID NO: 31901 - DNA, 289 bp, Homo sapiens
  MAP TO Z97055.1; EXPRESSED IN FETAL LIVER, SIGNAL =   3; EST_HUMAN HIT: BF129673.1, EVALUE 2.60e-01; SWISSPROT HIT: Q9Z0Y8, EVALUE 1.50e-01; NT HIT: AF305813.1, EVALUE 7.00e-01
gttgtgcttcaggcccccctcttcccaaatggcatctgagtcctgcggtgggctgtgggctctctctatactcataccaagcagctgtggctcctccatgggatgtggtcaggccctggggcacctgagaaccctgccccatgtccaacctcctgtgggggctggcccagggctccacagcaaaacccaggctgcctctgagccctgccagaaggtgggcatcagagacgcttctgcagaatgtggagaagatgcagggatggggagtccccaggtccccgtgaactga

SEQ ID NO: 31902 - DNA, 249 bp, Homo sapiens
  MAP TO AP000053.1; EXPRESSED IN LUNG, SIGNAL = 1.2; EXPRESSED IN FETAL LIVER, SIGNAL = 1.6; EXPRESSED IN PLACENTA, SIGNAL = 1.2; EST_HUMAN HIT: R48513.1, EVALUE 5.70e-02; SWISSPROT HIT: P03174, EVALUE 8.50e+00; NT HIT: gi9790625, EVALUE 6.00e-01
gatgatgacaatgatgatgacgacaatgatgatggtaatgatgtggaaaatgtgaaaagagaaagaaatacttggaaatatatctcaccctccataaacaaagctcggggtttaattctgacctgtatgagttcatggggtgaactgcagaccgctgtctgtggacaggaaaacgatatttcatctctagccccagggacatctccaaaagctgagctagatgaactttatataaattggtacaaaata

SEQ ID NO: 31903 - DNA, 583 bp, Homo sapiens; identical to SEQ ID NO: 15407
  MAP TO Z86090.10; EXPRESSED IN PLACENTA, SIGNAL = 1.2; EXPRESSED IN FETAL LIVER, SIGNAL = 1.3; NT HIT: X82087.1, EVALUE 3.70e-01; SWISSPROT HIT: O24723, EVALUE 3.80e+00; EST_HUMAN HIT: AW408742.1, EVALUE 1.00e-26

SEQ ID NO: 31904 - DNA, 207 bp, Homo sapiens
  MAP TO AC007539.8; EXPRESSED IN FETAL LIVER, SIGNAL = 1.4; EXPRESSED IN HELA, SIGNAL = 1.5; EXPRESSED IN PLACENTA, SIGNAL = 1.3; NT HIT: gi11431438, EVALUE 4.90e-01; EST_HUMAN HIT: BF339775.1, EVALUE 7.30e-01; SWISSPROT HIT: Q05249, EVALUE 4.90e+00
atcatgtgcaggagctgagtcttagttggatttgtggagttcattcagtctgctctccaatgctaagacctgcacatactgctgtattcagcagtcccctgcacacagggcctagtcctgggccctgtgggtgagagtgagaaaggaggaaagagactctacctgctcattcacccacagtgtaaccattccctgcttcatttcctc

SEQ ID NO: 31905 - DNA, 151 bp, Homo sapiens
  MAP TO AC007281.3; EXPRESSED IN FETAL LIVER, SIGNAL = 1.8; NT HIT: X71893.1, EVALUE 3.40e-01; EST_HUMAN HIT: BE958903.1, EVALUE 1.30e-01; SWISSPROT HIT: P10629, EVALUE 2.30e+00
aacgatggagaagggtggggcccccagcagcgagggctgtaggaagattgctctctttgctccatttttttctttagctgtcaagagttggctcctaaggaggctcagagacatggttatgacagcaagcacatatttgaggaacaaaatt

SEQ ID NO: 31906 - DNA, 114 bp, Homo sapiens
  MAP TO AC007556.2; EXPRESSED IN FETAL LIVER, SIGNAL = 1.4; NT HIT: gi11430460, EVALUE 5.00e-58; EST_HUMAN HIT: AA032067.1, EVALUE 3.70e-01; SWISSPROT HIT: P98164, EVALUE 1.00e-19
cccgggagtgcacagagagcgagtttcgatgtgtcaatcagcagtgcattccctcgcgatggatctgtgaccattacaacgactgtggggacaactcagatgaacgggactgtg

SEQ ID NO: 31907 - DNA, 195 bp, Homo sapiens
  MAP TO AC007567.1; EXPRESSED IN FETAL LIVER, SIGNAL = 1.3; NT HIT: M22360.1, EVALUE 4.60e-01; EST_HUMAN HIT: BE817248.1, EVALUE 2.70e+00; SWISSPROT HIT: P81237, EVALUE 6.60e+00
ttaggcattcccactccaatgggcttaagcaattgtatatttttttgaaaattgaaattaaggtcactggatgaattttttttaaataagaaaagcactgcattttattgaactttatagaagcacagcaaaaagtcaacaaagtgtgggacaaaccacatctcttcttaatgtcttcccactggcagttgcaac

SEQ ID NO: 31908 - DNA, 84 bp, Homo sapiens
  MAP TO AC004624.6; EXPRESSED IN FETAL LIVER, SIGNAL =  73; NT HIT: AJ133742.1, EVALUE 6.80e-01; EST_HUMAN HIT: AW157571.1, EVALUE 4.00e-28
gatctgctgaggtgtcaggccaaaatcgaagatttggagaagttactggttgagaagggacaggtgagcaggagtgatctgtgc

SEQ ID NO: 31909 - DNA, 243 bp, Homo sapiens
  MAP TO Z82201.1; EXPRESSED IN HELA, SIGNAL = 1.4; EXPRESSED IN FETAL LIVER, SIGNAL = 2.4; NT HIT: gi11437044, EVALUE 5.80e-01; EST_HUMAN HIT: BF243095.1, EVALUE 2.20e-01; SWISSPROT HIT: P27590, EVALUE 6.10e+00
gctggatgccaagagaatctggccgtgtcctcggtggaaggacattgctggaggatggaggaataagtaacaacttctgaaggttgtgtagggcttggactgacaaaactgaagatgtgagggacctccaatacaaagctggtcatccccttaaaatatccacagaattaggaagctgtttggaacaggaagctcaagaactaaacctattcactcctcccccaacacacaccagctgccctc

SEQ ID NO: 31910 - DNA, 157 bp, Homo sapiens
  MAP TO AL022318.2; EXPRESSED IN FETAL LIVER, SIGNAL = 1.5; EXPRESSED IN BONE MARROW, SIGNAL = 1.4; NT HIT: AF165520.1, EVALUE 3.00e-26; EST_HUMAN HIT: BF245808.1, EVALUE 5.00e-26
aaacccgatggaggcaatgtacccacacatattctacttccactttaaaaacctactgaaagcctgtggtcggaacgaaagctggctgtgcttcaccatggaagttacaaagcaccactcagctgtcttccggaagaggggcgtcttccgaaaccag

SEQ ID NO: 31911 - DNA, 137 bp, Homo sapiens
  MAP TO AC008174.2; EXPRESSED IN FETAL LIVER, SIGNAL =   3; NT HIT: gi9966772, EVALUE 1.20e+00; EST_HUMAN HIT: AI187952.1, EVALUE 4.00e-69; SWISSPROT HIT: P29815, EVALUE 6.90e+00
tcagtgttcatcctggtgagctggtgaggaagatctggaaatattggtgttacattgagaaaacacctttgacaaagttgaagacatttttgtcagcattttagatccttgtttggagacatcgggcttgggagttt

SEQ ID NO: 31912 - DNA, 140 bp, Homo sapiens
  MAP TO AL022238.1; EXPRESSED IN FETAL LIVER, SIGNAL = 1.4; EST_HUMAN HIT: AW962085.1, EVALUE 7.00e-71; SWISSPROT HIT: P11806, EVALUE 1.80e+00; NT HIT: AB029016.1, EVALUE 2.00e-73
attgatgggtcaaccttgagaacgatctgcatgcagcatggcccactgctgacattccatctgaatctaacccagggcactgccctgatccgatacagcaccaaacaggaggcggccaaggcccaaactgcactgcacat

SEQ ID NO: 31913 - DNA, 144 bp, Homo sapiens
  MAP TO AC007092.4; EXPRESSED IN FETAL LIVER, SIGNAL = 2.2; NT HIT: U12871.1, EVALUE 8.20e-02; EST_HUMAN HIT: AW468414.1, EVALUE 3.10e-02; SWISSPROT HIT: P34711, EVALUE 9.00e+00
ctctcactacttcctcccttccaaggagagatgaggtctgatacttcccattggctacttggactggactggactacactattatttccagaaacaaagatggcaaggcatttgctttgaaattcagcacacagcacacagacc

SEQ ID NO: 31914 - DNA, 165 bp, Homo sapiens
  MAP TO AL078474.2; EXPRESSED IN FETAL LIVER, SIGNAL = 1.4; EXPRESSED IN PLACENTA, SIGNAL = 1.3; NT HIT: gi11526140, EVALUE 3.00e-88; EST_HUMAN HIT: BF215992.1, EVALUE 4.00e-88; SWISSPROT HIT: P98073, EVALUE 6.00e-27
ccaagtggacagcaatcctaggcctgcatatgaaatcaaatctgacctctcctcaaacagtccctcgattaatagatgaaattgtcataaaccctcattacaataggcgaagaaaggacaacgacattgccatgatgcatctggaatttaaagtgaattacacag

SEQ ID NO: 31915 - DNA, 157 bp, Homo sapiens
  MAP TO AL022329.9; EXPRESSED IN PLACENTA, SIGNAL = 1.3; EXPRESSED IN FETAL LIVER, SIGNAL = 1.5; NT HIT: AF226688.1, EVALUE 9.10e-02; EST_HUMAN HIT: BF678204.1, EVALUE 5.30e-01; SWISSPROT HIT: Q06386, EVALUE 6.80e+00
cttatctttattaggagtctaataaataggatttgctggttttgatttcaaagctgtgaaagccgtactataaggtaaaaggtaacctttatttctatttagtttgtgaaaggaagtcatatgtactaatcagtcattatagtgaagatctttgtga

SEQ ID NO: 31916 - DNA, 139 bp, Homo sapiens
  MAP TO AC007539.8; EXPRESSED IN PLACENTA, SIGNAL = 1.4; EXPRESSED IN HELA, SIGNAL = 1.3; EXPRESSED IN LUNG, SIGNAL = 1.3; EXPRESSED IN FETAL LIVER, SIGNAL = 1.4; NT HIT: AE000797.1, EVALUE 4.90e+00; EST_HUMAN HIT: BF212412.1, EVALUE 1.80e+00
gagatggcaccagcagccacccaaatgctcacttcaaagtccaagtgctatcctggctctctctttctctctctccctggcactctcactccctggagctctctctctctctctctcacccctaggatccagtctgctg

SEQ ID NO: 31917 - DNA, 117 bp, Homo sapiens
  MAP TO AC008272.1; EXPRESSED IN PLACENTA, SIGNAL = 1.3; EXPRESSED IN LUNG, SIGNAL = 1.3; EXPRESSED IN FETAL LIVER, SIGNAL = 1.5; NT HIT: U28975.1, EVALUE 1.00e+00; SWISSPROT HIT: gi2494793, EVALUE 5.40e+00; EST_HUMAN HIT: AA179693.1, EVALUE 2.40e-02
ctagacctacggctggagtgtgtcgtgctcagggttcaagtaggcacaggtccccttcatccctgaggctaaactgccaccaaaacacccccagcctagtgactgaacatccccaag

SEQ ID NO: 31918 - DNA, 167 bp, Homo sapiens
  MAP TO AL022318.2; EXPRESSED IN FETAL LIVER, SIGNAL = 2.8; EXPRESSED IN PLACENTA, SIGNAL = 1.5; SWISSPROT HIT: P39770, EVALUE 7.80e-01; EST_HUMAN HIT: AV708431.1, EVALUE 3.00e-89; NT HIT: AL161534.2, EVALUE 9.70e-02
gagacgctggtctgaaaagaaggcaacgcaaggaagagaacagagccaaggcacctgcagcgagccagagccagagccctgacatcacaaatgctttaattggttccatttattgtttaatccacttgaaattgaatttctgtcatccccgactggaagtgtactga

SEQ ID NO: 31919 - DNA, 165 bp, Homo sapiens
  MAP TO AL035701.13; EXPRESSED IN PLACENTA, SIGNAL = 1.3; EXPRESSED IN FETAL LIVER, SIGNAL = 1.6; NT HIT: AL163209.2, EVALUE 3.00e-11; EST_HUMAN HIT: AW873637.1, EVALUE 6.00e-41; SWISSPROT HIT: Q44116, EVALUE 2.30e+00
agtgacctccagaaaatggaggtgaggtacctaaacagctggattgataacagcttgttgtttgccttatttgatcacaagtttgaagagttgcccatctttggccaaaacttgctgattgttgcaagagtaggttacagtctgtttacacaccacattaggtta

SEQ ID NO: 31920 - DNA, 250 bp, Homo sapiens
  MAP TO AL079300.11; EXPRESSED IN FETAL LIVER, SIGNAL = 1.3; EXPRESSED IN HELA, SIGNAL = 2.6; EXPRESSED IN PLACENTA, SIGNAL = 1.4; EST_HUMAN HIT: AI821571.1, EVALUE 8.90e-01; NT HIT: gi5803136, EVALUE 6.00e-01
tttcaattcttacaagcaatgccctcagaaaaacagcactatttatctctggtaggaaatcaaattataaaacaagtaaaccagggtgaacattacccatcaggctgtggcaatgggtgcgtggaaactgatgagccgtcattaatttctcccgcagaatcactacctaaatatgagttggcagtgtggggaaaaggaagccatttatctgtggccagatacagactcacagatgcactgacagtgtcat

SEQ ID NO: 31921 - DNA, 265 bp, Homo sapiens
  MAP TO AL079300.11; EXPRESSED IN FETAL LIVER, SIGNAL = 1.4; EXPRESSED IN PLACENTA, SIGNAL = 1.6; EXPRESSED IN BONE MARROW, SIGNAL = 1.4; NT HIT: AL161505.2, EVALUE 1.60e-01; EST_HUMAN HIT: AI886611.1, EVALUE 6.10e-02; SWISSPROT HIT: P03133, EVALUE 8.30e-01
tgatgctgtgctttgaatttattaccaagcctggctttctgctgttgctattggacttgtaccatattgcaatgtgagcatggagattattgtataaattattctcactcacataatcatcgtgattttaattactgtgtaatctttgctaattactgttgtatgtatcatttgctttggtgccgatttaacacaactgcttttcgtttggctaaaagatggcattacaacttttcctttttgcaggagaaaatttgctttctgt

SEQ ID NO: 31922 - DNA, 188 bp, Homo sapiens
  MAP TO AL079300.11; EXPRESSED IN FETAL LIVER, SIGNAL = 1.8; EXPRESSED IN PLACENTA, SIGNAL = 1.3; NT HIT: U63834.1, EVALUE 5.00e-04; EST_HUMAN HIT: AI718081.1, EVALUE 7.00e-04
cgtcagccttctgcccagtaggtgtgtgatgtagtggaagaagaagaatgggattcagatctggcccaccagggttcaaatgcaggccctgccacttagcagtatggccttgagcaaatgttttctcaccactgagcctcagtttcctcatttgcaagatgggatgatgcctctgattttgatgcggt

SEQ ID NO: 31923 - DNA, 252 bp, Homo sapiens
  MAP TO AP000123.1; EXPRESSED IN FETAL LIVER, SIGNAL = 1.3; NT HIT: AF041427.1, EVALUE 6.10e-01; EST_HUMAN HIT: AA094108.1, EVALUE 2.30e-01; SWISSPROT HIT: P54815, EVALUE 4.50e-01
gggtccaatccctattccaacatcccagccaaatcaagacgctgtttgtagggtccaaactgcctctgcttaggcagttctcagactgggtagagaaaggaagactacaagttaaggagtattcaaaaacaaaacaaaatgagtatctcagagagctgaaaaatgaattgctgttgcccccaaagaccctttcagtctgaggaagtattattcatgcccctctgccctcatacctgaaaagccccctcaaat

SEQ ID NO: 31924 - DNA, 263 bp, Homo sapiens
  MAP TO AP000352.2; EXPRESSED IN PLACENTA, SIGNAL = 1.4; EXPRESSED IN BONE MARROW, SIGNAL = 2.1; EXPRESSED IN FETAL LIVER, SIGNAL = 1.5; NT HIT: AJ276505.1, EVALUE 1.00e-02; EST_HUMAN HIT: BF359286.1, EVALUE 1.50e-02; SWISSPROT HIT: P15884, EVALUE 7.20e+00
tccctgggaccagggaccttttctgtcttgctgtttgaagcatccctggggcctgagcaatacctgacagactgctgcccagttgtatttcttgaatgaatgaatgaacaaacataaagacattcattaatttccccagaaatgcttgctgagcactcatgattctgggtgccatggagggttatgaaggttgaatgcttcattactacctcttcttgccccaggctcatggtctgcaggtaaaaggattccatcttgagagt

SEQ ID NO: 31925 - DNA, 143 bp, Homo sapiens
  MAP TO AP000356.1; EXPRESSED IN PLACENTA, SIGNAL = 1.6; EXPRESSED IN FETAL LIVER, SIGNAL = 1.3; SWISSPROT HIT: Q9VYT8, EVALUE 3.10e+00; EST_HUMAN HIT: AW268631.1, EVALUE 1.90e+00; NT HIT: AL163283.2, EVALUE 1.30e+00
catcccatccgtaacgtgaaggtgtctaaccagataaccttggtagccattcagagatgcagtcaacatgacacaaagtgcacagaccttggtgtccgacagacctggaatcagcttgtagcctgccccctagggtgacttgg

SEQ ID NO: 31926 - DNA, 166 bp, Homo sapiens
  MAP TO AP000356.1; EXPRESSED IN FETAL LIVER, SIGNAL = 1.9; EXPRESSED IN LUNG, SIGNAL = 1.3; NT HIT: J05235.1, EVALUE 7.00e-89; EST_HUMAN HIT: BF681150.1, EVALUE 2.20e+00; SWISSPROT HIT: P23169, EVALUE 3.00e+00
agacttcccaagggtcactgctgccactcactgcacagcctggaagggagtccacaggggacatacagtgagcaagagacctgtgccactcaggcctcctgggggtgtccccagtgcagccatgatgataatcacagctaccattcaccaagccctgcccacagtc

SEQ ID NO: 31927 - DNA, 157 bp, Homo sapiens
  MAP TO Z82201.1; EXPRESSED IN FETAL LIVER, SIGNAL = 2.7; NT HIT: AP001509.1, EVALUE 3.60e-01; EST_HUMAN HIT: AF012385.1, EVALUE 8.00e-31; SWISSPROT HIT: P17890, EVALUE 6.80e+00
aatcaagatgagttttcacagtaaagcactttcagcctgtcataccgtggacaaagccagctgggaggactcaactacttcctggatcttcctcacagcctcctgtggattcagcgttgcaaaattgattggcatgctctcttctttttccttgggc

SEQ ID NO: 31928 - DNA, 572 bp, Homo sapiens; identical to SEQ ID NO: 15413
  MAP TO AC009266.1; EXPRESSED IN FETAL LIVER, SIGNAL = 2.1; NT HIT: Z22150.1, EVALUE 9.20e-02; EST_HUMAN HIT: BF571593.1, EVALUE 2.10e+00; SWISSPROT HIT: Q37714, EVALUE 2.20e+00
  unsure 122
  unsure 209
  unsure 308
  unsure 317
  unsure 431

SEQ ID NO: 31929 - DNA, 563 bp, Homo sapiens; identical to SEQ ID NO: 15394
  MAP TO Z97055.1; EXPRESSED IN PLACENTA, SIGNAL = 1.6; EXPRESSED IN FETAL LIVER, SIGNAL = 1.6; NT HIT: X74807.1, EVALUE 6.00e-03; EST_HUMAN HIT: AA017656.1, EVALUE 1.30e-01; SWISSPROT HIT: P45439, EVALUE 6.30e+00

SEQ ID NO: 31930 - DNA, 167 bp, Homo sapiens
  MAP TO AC007556.2; EXPRESSED IN FETAL LIVER, SIGNAL = 1.3; EXPRESSED IN PLACENTA, SIGNAL = 1.6; NT HIT: gi11430460, EVALUE 3.00e-88; EST_HUMAN HIT: BE694056.1, EVALUE 4.00e-88; SWISSPROT HIT: P98164, EVALUE 1.00e-26
atcaacctttcttaataactgtaaggcaacatataatttttggaatctcccttaatcctgaggtgaagagcaatgatgctatggtccccatagcagggatacagaatggtttagatgttgaatttgatgatgctgagcaatacatctattgggttgaaaatccagta

SEQ ID NO: 31931 - DNA, 88 bp, Homo sapiens
  MAP TO AC007106.6; EXPRESSED IN PLACENTA, SIGNAL = 1.5; EXPRESSED IN FETAL LIVER, SIGNAL = 1.7; NT HIT: Y10168.1, EVALUE 7.20e-01; EST_HUMAN HIT: BE933550.1, EVALUE 4.20e+00
tttgctggacctctagactctctcaaagtaactctcattcatggtattgtcaaaattgatgcttctaaaggtaagtgattgtagaaag

SEQ ID NO: 31932 - DNA, 198 bp, Homo sapiens
  MAP TO AC007463.3; EXPRESSED IN FETAL LIVER, SIGNAL = 1.3; EST_HUMAN HIT: AI888312.1, EVALUE 6.90e-01; NT HIT: AF159297.1, EVALUE 1.80e+00; SWISSPROT HIT: P46873, EVALUE 6.50e+00
gggaacagaaagacttccgcctactccagtgtatctctgatgaaaaatgagaactttgctccgatcctttctaaaatgaaaatattccagccagtgttcacgtgcagtgacgctgttgagagatcatcccagctccctaacggtgtgaaaagcaatttcacacacgcctgtctccaagcggcctgttccacggattag

SEQ ID NO: 31933 - DNA, 218 bp, Homo sapiens
  MAP TO AC007539.8; EXPRESSED IN PLACENTA, SIGNAL = 1.4; EXPRESSED IN LUNG, SIGNAL = 1.5; EXPRESSED IN BONE MARROW, SIGNAL = 1.4; EXPRESSED IN FETAL LIVER, SIGNAL = 1.7; EXPRESSED IN HELA, SIGNAL = 2.2; NT HIT: gi11435947, EVALUE 4.00e-45; EST_HUMAN HIT: AU142869.1, EVALUE 5.00e-45; SWISSPROT HIT: P42593, EVALUE 8.20e-02
ctgactctgcccattcgaaacatccagagcagtgggacctagactacagcttggaaccatacacaggactgactccggagtacatggaaatgagtgagaacccatggtcctgccttccactgggggcaggttcagacaaggggtctgtggggttgaagggggaaggtaggggattggggaaaatgactgggacagcctctgcttcttcatgagcttca

SEQ ID NO: 31934 - DNA, 121 bp, Homo sapiens
  MAP TO AC007539.8; EXPRESSED IN FETAL LIVER, SIGNAL = 1.5; EXPRESSED IN HELA, SIGNAL = 1.7; EXPRESSED IN PLACENTA, SIGNAL = 1.2; NT HIT: gi6978885, EVALUE 6.80e-02; SWISSPROT HIT: P42388, EVALUE 4.10e+00; EST_HUMAN HIT: BE735007.1, EVALUE 3.90e-01
gtaagtacttgcattcatgacacactcgctctgtgggaagggcttccagagaagctgaggtcttcaaagtgggaagccagcccttgcacctcccagccttttccatttgtagctttattgg

SEQ ID NO: 31935 - DNA, 76 bp, Homo sapiens
  MAP TO AL008723.8; EXPRESSED IN PLACENTA, SIGNAL = 1.6; EXPRESSED IN FETAL LIVER, SIGNAL = 1.5; NT HIT: AB052890.1, EVALUE 3.80e-02; EST_HUMAN HIT: AA299211.1, EVALUE 1.00e-30
cacttctaccttagtttggctttagtgaaacaataggtcagaggaaggaaatcagacatggcatttgtctcatgtg

SEQ ID NO: 31936 - DNA, 88 bp, Homo sapiens
  MAP TO AL022328.21; EXPRESSED IN PLACENTA, SIGNAL = 1.7; EXPRESSED IN FETAL LIVER, SIGNAL = 1.6; EST_HUMAN HIT: BF511892.1, EVALUE 1.10e+00; NT HIT: gi9506952, EVALUE 1.80e-01; SWISSPROT HIT: P33487, EVALUE 9.60e+00
atctcatgtgcaccggatctttggttcatgcctcactgtcaccgtcagctaccagctccttacttttatttgttttcttgtcggatga

SEQ ID NO: 31937 - DNA, 118 bp, Homo sapiens
  MAP TO AP000053.1; EXPRESSED IN FETAL LIVER, SIGNAL = 1.4; NT HIT: AF280107.1, EVALUE 2.00e-08; EST_HUMAN HIT: AW297609.1, EVALUE 4.00e-04; SWISSPROT HIT: P39521, EVALUE 7.10e+00
attttggtagagactccaaggcaagagtgggaaagtttgacagtgatgttaaccaaaaactgacagaggcaggtgtctcaattgatagcggtttatttcgccaaggctgagaatgtgc

SEQ ID NO: 31938 - DNA, 548 bp, Homo sapiens; identical to SEQ ID NO: 15385
  MAP TO AC004032.7; EXPRESSED IN FETAL LIVER, SIGNAL = 1.5; EXPRESSED IN PLACENTA, SIGNAL = 1.3; SWISSPROT HIT: P12270, EVALUE 2.10e+00; NT HIT: AF087157.1, EVALUE 1.00e-03; EST_HUMAN HIT: AW518689.1, EVALUE 3.00e-05

SEQ ID NO: 31939 - DNA, 589 bp, Homo sapiens; identical to SEQ ID NO: 15382
  MAP TO AC007539.8; EXPRESSED IN FETAL LIVER, SIGNAL = 1.8; EXPRESSED IN PLACENTA, SIGNAL = 1.7; SWISSPROT HIT: O68006, EVALUE 2.30e+00; NT HIT: AJ400878.1, EVALUE 3.70e-01; EST_HUMAN HIT: BF367138.1, EVALUE 3.00e-92

SEQ ID NO: 31940 - DNA, 554 bp, Homo sapiens; identical to SEQ ID NO: 15374
  MAP TO AC008166.1; EXPRESSED IN FETAL LIVER, SIGNAL = 1.6; EXPRESSED IN PLACENTA, SIGNAL = 1.2; EST_HUMAN HIT: AV761161.1, EVALUE 5.20e-01; NT HIT: U40493.1, EVALUE 8.90e-02; SWISSPROT HIT: P36033, EVALUE 1.20e+00

SEQ ID NO: 31941 - DNA, 629 bp, Homo sapiens
  MAP TO AL049548.6; EXPRESSED IN LUNG, SIGNAL = 0.61; EXPRESSED IN BONE MARROW, SIGNAL =   2; SWISSPROT HIT: P48725, EVALUE 1.00e-04; EST_HUMAN HIT: BF246434.1, EVALUE 6.00e-01
gaccacgcagcagaagtagagagcaaaaagggcgaattgcagagtctgcagggtcacttagcaaagttgggttctctgggccgtgctgaggacctccacctcctgcagggaaaggctgaggactgcttccagctgtttgaggaggccagccaggttgtggagaggcggcagcttgccctgtcccatttggcagaattcctccagagccatgcctctctgtccggcattctccgccagctgaggcaaacagtggaagcaaccaacagtatgaataagaacgagtctgatttgatagaaaaggacctcaatgatgctcttcaaaatgctaaagcattagaatctgctgccgtcagtctggatggcattctttccaaagcccaataccatctgaaaatcgggagctctgagcaaaggacttcctgcagagccacggctgatcagctctgtggagaggtagagaggatccagaaccttctgggaaccaagcagagtgaggcagatgctctggcagtgttgaaaaaagcattccaagaccagaaagaggagcttctgaaaagcattgaggacattgaagaaaggactgacaaagagcgattgaaagaacctacccgccaagctcttcagcagag

SEQ ID NO: 31942 - DNA, 99 bp, Homo sapiens
  MAP TO AC009230.2; EXPRESSED IN LUNG, SIGNAL = 1.3; EXPRESSED IN BT474, SIGNAL = 1.3; EXPRESSED IN HBL100, SIGNAL = 0.99; NT HIT: AF030001.1, EVALUE 8.30e-01; EST_HUMAN HIT: BF038269.1, EVALUE 6.00e-49; SWISSPROT HIT: Q07929, EVALUE 9.20e+00
ctacaccatttccaaatagcttcaagtgctttacttgtgaaaacgcaggggataattataactgcaatcgatgggcagaagacaaatggtgtccacaaa

SEQ ID NO: 31943 - DNA, 316 bp, Homo sapiens
  MAP TO AF159056.1; EXPRESSED IN BT474, SIGNAL = 1.1; EXPRESSED IN BONE MARROW, SIGNAL = 2.2; EXPRESSED IN LUNG, SIGNAL = 1.1; SWISSPROT HIT: P03986, EVALUE 7.00e-58; NT HIT: M14996.1, EVALUE 0.00e+00; EST_HUMAN HIT: BF679123.1, EVALUE 0.00e+00
gcagatgtttcccccaagcccactatttttcttccttcaattgctgaaacaaagctccagaaggctggaacatacctttgtcttcttgagaaatttttccctgatgttattaagatacattggcaagaaaagaagagcaacacgattctgggatcccaggaggggaacaccatgaagactaacgacacatacatgaaatttagctggttaacggtgccagaaaagtcactggacaaagaacacagatgtatcgtcagacatgagaataataaaaacggagttgatcaagaaattatctttcctccaataaagacag

SEQ ID NO: 31944 - DNA, 110 bp, Homo sapiens
  MAP TO AC010754.1; EXPRESSED IN LUNG, SIGNAL = 1.9; EXPRESSED IN PLACENTA, SIGNAL = 2.3; NT HIT: X84900.1, EVALUE 2.00e-29; EST_HUMAN HIT: AW365648.1, EVALUE 2.00e-29; SWISSPROT HIT: Q16787, EVALUE 1.80e-02
  unsure 46
  unsure 65
  unsure 77
  unsure 85
  unsure 91
  unsure 107
ccagctcacctgtgtctacaacctgggggaccgtgaggctgaactnccaagtggaccagatcttngaccaagagtgnagactaanggaggncagttatggatcgggntga

SEQ ID NO: 31945 - DNA, 305 bp, Homo sapiens
  MAP TO AC006042.2; EXPRESSED IN BONE MARROW, SIGNAL = 1.1; EXPRESSED IN LUNG, SIGNAL = 0.98; EXPRESSED IN HELA, SIGNAL = 1.4; EXPRESSED IN PLACENTA, SIGNAL = 1.7; EST_HUMAN HIT: BE547086.1, EVALUE 0.00e+00; SWISSPROT HIT: P47604, EVALUE 3.20e+00
cggcccctctcttttcatgtcctgacaaaaacaaggttaatttcatcccaaccggatcagctttctgtcctgtaaaacttctaggccccctcttacctgcttctgaccttatgctcaagaactcccctaactctggccagagctcagctttggcaactctgaccgttgagcagctctcatcccgggtttcctttacgtctctttctgatgacaccagcacagcgggctccatggaggcctctgtccagcagccatcccagcagcagcagctcctgcaggaactgcagggtgaggaccacatctct

SEQ ID NO: 31946 - DNA, 106 bp, Homo sapiens
  MAP TO AC009532.2; EXPRESSED IN PLACENTA, SIGNAL = 3.3; EXPRESSED IN LUNG, SIGNAL = 1.8; NT HIT: gi11438448, EVALUE 3.00e-53; SWISSPROT HIT: P13608, EVALUE 5.40e-02; EST_HUMAN HIT: AA463325.1, EVALUE 2.00e-48
agctgaatttcacagaagctaaggaggcctgtaggctgctgggactaagtttggccggcaaggaccaagttgaaacagccttgaaagctagctttgaaacttgcag

SEQ ID NO: 31947 - DNA, 163 bp, Homo sapiens; identical to SEQ ID NO: 18170
  MAP TO AP000365.1; EXPRESSED IN PLACENTA, SIGNAL = 1.3; EXPRESSED IN HELA, SIGNAL = 0.99; EXPRESSED IN LUNG, SIGNAL = 1.2; NT HIT: gi11430598, EVALUE 2.00e-80; EST_HUMAN HIT: R78133.1, EVALUE 4.00e-87; SWISSPROT HIT: P56180, EVALUE 3.00e-12

SEQ ID NO: 31948 - DNA, 216 bp, Homo sapiens; identical to SEQ ID NO: 29672
  MAP TO AC007981.24; EXPRESSED IN BT474, SIGNAL = 3.6; EXPRESSED IN PLACENTA, SIGNAL = 2.5; EXPRESSED IN LUNG, SIGNAL = 0.98; NT HIT: gi11421595, EVALUE 1.00e-109; EST_HUMAN HIT: BE171984.1, EVALUE 1.00e-114; SWISSPROT HIT: Q62786, EVALUE 2.00e-07

SEQ ID NO: 31949 - DNA, 110 bp, Homo sapiens
  MAP TO AL022100.13; EXPRESSED IN PLACENTA, SIGNAL =   1; EXPRESSED IN LUNG, SIGNAL = 1.8; EST_HUMAN HIT: BE068922.1, EVALUE 3.00e-25; NT HIT: U91328.1, EVALUE 1.00e-18; SWISSPROT HIT: P31696, EVALUE 1.80e+00
agccaaatggcaggtacttgagaaagatatcaaatatgtgttacaggaaaagggtcccaatccagaccccaagagagggttcttggatctcgtgcaagaaagaattcagg

SEQ ID NO: 31950 - DNA, 273 bp, Homo sapiens
  MAP TO AP000567.1; EXPRESSED IN PLACENTA, SIGNAL = 0.94; EXPRESSED IN HELA, SIGNAL = 1.8; EXPRESSED IN HBL100, SIGNAL = 0.95; EXPRESSED IN LUNG, SIGNAL = 1.2; NT HIT: gi6754497, EVALUE 2.00e-09; EST_HUMAN HIT: AA011080.1, EVALUE 7.00e-81
ggcggcagcagccatatccatagcctccaaagccagagccatatccgtagcctccaaagccagagccatatccgtagcttccaaagccagagccatatccgtagcctccatagccacagccagaaccccgtctgcagaagctgccacatccacagccatagccatagcccaggccaccgaagcctccacagctgtagcccaggcctccgtagtagctgccgtagtgactcatggtgtcaggagtggtgagttggtttgttgttcaggcaagat

SEQ ID NO: 31951 - DNA, 94 bp, Homo sapiens
  MAP TO AL049796.17; EXPRESSED IN HELA, SIGNAL = 1.8; EXPRESSED IN PLACENTA, SIGNAL = 0.94; EXPRESSED IN HBL100, SIGNAL = 1.2; EXPRESSED IN LUNG, SIGNAL = 1.5; EXPRESSED IN BT474, SIGNAL = 1.9; NT HIT: gi11421343, EVALUE 3.00e-46; EST_HUMAN HIT: AU152731.1, EVALUE 3.00e-44
atacaaccgaaggaagtactcagagatcatggctgaaaaagcagcaaatgcagcaggaaaaaagttccgaaagaagaagaaatttcgcaattaa

SEQ ID NO: 31952 - DNA, 106 bp, Homo sapiens
  MAP TO AL079307.2; EXPRESSED IN LUNG, SIGNAL = 8.4; EST_HUMAN HIT: AA609555.1, EVALUE 2.30e-01; SWISSPROT HIT: Q05952, EVALUE 4.10e+00; NT HIT: AF010497.1, EVALUE 2.30e-01
taagtcattgttttcttcattggcttcagtggagctgaagttgctggtgactctgctgttgttgacagccctgtgtgtgtgtgtgtgggtggagaggagtgttata

SEQ ID NO: 31953 - DNA, 95 bp, Homo sapiens
  MAP TO AC007671.5; EXPRESSED IN LUNG, SIGNAL = 8.2; EST_HUMAN HIT: AA307074.1, EVALUE 1.00e-46; NT HIT: gi8923899, EVALUE 8.00e-47
cttaatactctttgctctgcaataggccaatcaatatccacatctatatccacactatgttcagctcgcatttcgtagtatgccatttttccacc

SEQ ID NO: 31954 - DNA, 129 bp, Homo sapiens
  MAP TO AC007705.13; EXPRESSED IN LUNG, SIGNAL = 2.7; EST_HUMAN HIT: BF371975.1, EVALUE 6.60e+00; NT HIT: AB009883.1, EVALUE 4.50e+00
gttctggttattgttgtttttcttctcctttatcatactttctgtcttcttttcctgtccctcatccttctttaccattctctttctctttctcctgctcttcgcttccttctcattccactaaaaata

SEQ ID NO: 31955 - DNA, 210 bp, Homo sapiens
  MAP TO AC008073.1; EXPRESSED IN HELA, SIGNAL = 0.91; EXPRESSED IN LUNG, SIGNAL = 2.7; SWISSPROT HIT: Q15811, EVALUE 3.00e-09; NT HIT: AF182199.1, EVALUE 3.00e-98; EST_HUMAN HIT: AW206547.1, EVALUE 3.00e-98
gttgatgaaaaaaccgtaggagaacctggttggctttatggtagttttcaaggaaattttggctggtttccatgcaattatgtagaaaaaatgccatcaagtgaaaatgaaaaagctgtatctccaaagaaggccttacttcctcctacagtttctttatctgctacctcaacttcctctgagtaagtttttagctaacagtaaagttta

SEQ ID NO: 31956 - DNA, 154 bp, Homo sapiens
  MAP TO AC010719.1; EXPRESSED IN PLACENTA, SIGNAL = 1.2; EXPRESSED IN LUNG, SIGNAL = 2.8; EST_HUMAN HIT: AI718028.1, EVALUE 1.30e-01; NT HIT: gi9627136, EVALUE 5.50e+00; SWISSPROT HIT: P43689, EVALUE 5.80e-01
gaagatactgctggtttaaataaaaccaggcaagttgaagacatagaatgcagacaagagaggactcaaaaagagacgaattcattagatgatagtaaagggaggtcccaggataacaactatgcttcaagtatgcagtctcaaaaatggagga

SEQ ID NO: 31957 - DNA, 250 bp, Homo sapiens
  MAP TO AL008718.23; EXPRESSED IN LUNG, SIGNAL = 5.9; SWISSPROT HIT: Q03215, EVALUE 3.70e+00; NT HIT: gi11434328, EVALUE 2.00e-03; EST_HUMAN HIT: R71120.1, EVALUE 4.00e-03
tggaccaggaaaactgatatttgccaggagttctggtgatccagctgtctcccctgcctcaagcgagtgacctgcttctgtaagtcactctcttcgaactccagaactggaagagccctttccaggtgagtgactccagggactagcaggggagagggcgcgtgggaagtgagcactaagcctgggccgtccacaccccagtgcggtgtctgccacctctgaattgccactaactctcctcctggttctg

SEQ ID NO: 31958 - DNA, 158 bp, Homo sapiens
  MAP TO AL118511.2; EXPRESSED IN LUNG, SIGNAL = 3.1; EXPRESSED IN HELA, SIGNAL =   1; EXPRESSED IN HBL100, SIGNAL =   1; NT HIT: AF221942.1, EVALUE 7.80e-02; EST_HUMAN HIT: AI791517.1, EVALUE 9.30e-02; SWISSPROT HIT: P31301, EVALUE 6.60e+00
ttactcaacagccatttgctggcagataaaactggctcggtcactgctccaaaagcatccagggtgtttggctctgtaggtggcattatgccttccagatagaaattgcaagcacacagggtggccctcataggggccatgaacattgtggttaaaac

SEQ ID NO: 31959 - DNA, 95 bp, Homo sapiens
  MAP TO AL121591.2; EXPRESSED IN LUNG, SIGNAL = 5.4; NT HIT: AL163278.2, EVALUE 4.30e-02; SWISSPROT HIT: Q90512, EVALUE 7.00e+00; EST_HUMAN HIT: BE566947.1, EVALUE 7.40e-02
atagtgtccttggattaggggcatccaggagctatacaacggctgggttctggcatcctgggagtgggcacagggtgggcagagagagagatgaa

SEQ ID NO: 31960 - DNA, 149 bp, Homo sapiens
  MAP TO AJ239329.2; EXPRESSED IN LUNG, SIGNAL =   2; SWISSPROT HIT: Q02508, EVALUE 3.90e+00; EST_HUMAN HIT: AA774113.1, EVALUE 4.00e-04; NT HIT: AL163285.2, EVALUE 1.00e-06
ttcacaggtcagagagccaatgttgggattacgcagactgccaagtatgtcaattccaattatgcattctggaaatgggaaaacaaccacaggatggttttggagacccactagccccattgtgggatggacctgagctaaaactccat

SEQ ID NO: 31961 - DNA, 115 bp, Homo sapiens
  MAP TO AC007558.3; EXPRESSED IN PLACENTA, SIGNAL = 1.5; EXPRESSED IN LUNG, SIGNAL =   1; NT HIT: AF003040.1, EVALUE 3.90e+00
acattttcttgtaagcaaaattcaggttgttggattggctgtatttggggtagaagtaatagaacaaaacagtgatgtcaaatggtcctcgattggtcaacacattctccatcct

SEQ ID NO: 31962 - DNA, 176 bp, Homo sapiens
  MAP TO AC009493.1; EXPRESSED IN LUNG, SIGNAL = 1.3; EXPRESSED IN PLACENTA, SIGNAL = 1.4; NT HIT: D90325.1, EVALUE 8.00e-95; SWISSPROT HIT: P14210, EVALUE 3.00e-33; EST_HUMAN HIT: R13658.1, EVALUE 9.00e-34
ctgacaatactatgaatgacactgatgttcctttggaaacaactgaatgcatccaaggtcaaggagaaggctacaggggcactgtcaataccatttggaatggaattccatgtcagcgttgggattctcagtatcctcacgagcatgacatgactcctgaaaatttcaagtgcaag

SEQ ID NO: 31963 - DNA, 137 bp, Homo sapiens
  MAP TO AC006445.10; EXPRESSED IN LUNG, SIGNAL = 6.6; EST_HUMAN HIT: BE063338.1, EVALUE 1.20e+00
ggcataagggttggaattacaagtcagacagggctgagcagcaatcttcaagaaaattgctctaaattggccttcattagctctcacggcactgaaaaacaactccaatgcatgcctatggaaggtaagccagtaga

SEQ ID NO: 31964 - DNA, 187 bp, Homo sapiens
  MAP TO AC009410.2; EXPRESSED IN HBL100, SIGNAL =   1; EXPRESSED IN LUNG, SIGNAL = 2.3; EST_HUMAN HIT: AA782516.1, EVALUE 2.80e-02; NT HIT: AL161541.2, EVALUE 9.40e-02; SWISSPROT HIT: P04931, EVALUE 2.90e+00
aggcattttggtgctttctagtgagaagtgtgaactcattcttctgtgggtgacagcactttttcctctttggaaactttttaaaattttcattcatgaagctgtgaaaattcatcatattttggtgtgcgtcatgatctttgttgttcatccttttcagcattcctttcaatttgaccatttgaga

SEQ ID NO: 31965 - DNA, 132 bp, Homo sapiens
  MAP TO AC010881.1; EXPRESSED IN LUNG, SIGNAL = 1.5; NT HIT: D87675.1, EVALUE 2.50e-01; EST_HUMAN HIT: AW178799.1, EVALUE 7.60e-02
gagactgacatgacttacctttcacatttcttacatttcctgatgatgagggatttgttgacattttctgcaaaccctgttgctattatgaatcggaaactagatttcaagctccagcatgctcagagttaa

SEQ ID NO: 31966 - DNA, 129 bp, Homo sapiens
  MAP TO AC010106.1; EXPRESSED IN PLACENTA, SIGNAL =   1; EXPRESSED IN LUNG, SIGNAL = 7.8; NT HIT: Z97343.1, EVALUE 7.20e-02; EST_HUMAN HIT: BE778139.1, EVALUE 4.30e-01; SWISSPROT HIT: P29537, EVALUE 7.00e+00
attcttgtcagtacaaaaaaggactgtatggagattgtgtcttgcagcatacttatttttaaaggtaaggttgatgcggtacaaccaggcagaaagagctttagtaagaaaaaggagcctctaatgaag

SEQ ID NO: 31967 - DNA, 103 bp, Homo sapiens
  MAP TO AC011348.1; EXPRESSED IN LUNG, SIGNAL = 5.2; NT HIT: AF217490.1, EVALUE 4.00e-06; EST_HUMAN HIT: AA429414.1, EVALUE 1.00e-06; SWISSPROT HIT: Q03376, EVALUE 9.10e+00
tgttttaatcctcagtaatcctgcttgctctaaggcagacttgttcaactggaggcctgcgcattgcatgtggcccaggacagctttgaatgaggctaaacac

SEQ ID NO: 31968 - DNA, 118 bp, Homo sapiens
  MAP TO AL008639.10; EXPRESSED IN HELA, SIGNAL =   1; EXPRESSED IN BONE MARROW, SIGNAL = 1.8; EXPRESSED IN LUNG, SIGNAL = 2.4; EST_HUMAN HIT: AW380450.1, EVALUE 2.00e-60; NT HIT: AF107206.1, EVALUE 8.70e-01
tcttcaggtatggctgcggggtcacgttactgccaaaggcatatttaaaatgaccatctcgtaaccgataagctttccttcttgacacaactgacgtcagtatatctttaaggtgatt

SEQ ID NO: 31969 - DNA, 77 bp, Homo sapiens
  MAP TO AL049691.17; EXPRESSED IN LUNG, SIGNAL = 4.1; EXPRESSED IN HELA, SIGNAL =  10; EST_HUMAN HIT: BF105776.1, EVALUE 3.60e+00; NT HIT: U15970.1, EVALUE 6.10e-01
aaataggtacacttttcaagtactttatggttatggtgccctttctgaatacttggtcctcgatgaaatgacagaag

SEQ ID NO: 31970 - DNA, 347 bp, Homo sapiens
  MAP TO AC010127.2; EXPRESSED IN LUNG, SIGNAL =   5; EST_HUMAN HIT: AA912739.1, EVALUE 1.00e-119; NT HIT: M22253.1, EVALUE 1.00e-103; SWISSPROT HIT: P04774, EVALUE 3.00e-40
gtcctgaatctctttctggccttgcttctgagctcatttagtgcagacaaccttgcagccactgatgatgataatgaaatgaataatctccaaattgctgtggataggatgcacaaaggagtagcttatgtgaaaagaaaaatatatgaatttattcaacagtccttcattaggaaacaaaagattttagatgaaattaaaccacttgatgatctaaacaacaagaaagacagttgtatgtccaatcatacagcagaaattgggaaagatcttgactatcttaaagatgtaaatggaactacaagtggtataggaactggcagcagtgttgaaaaatacattattga

SEQ ID NO: 31971 - DNA, 153 bp, Homo sapiens
  MAP TO AC008617.2; EXPRESSED IN LUNG, SIGNAL = 5.7; NT HIT: AF111170.3, EVALUE 5.40e+00; EST_HUMAN HIT: BE878659.1, EVALUE 2.00e+00
caacagcagtggcacagcagcccaagtggtagtatccagtggccagtgatgagtcagtataagccgaggagcctcggcttagtggaggtagcagtgatactgatagtgatccagtaccatggcctgattttagatgctgctgactttcttttc

SEQ ID NO: 31972 - DNA, 254 bp, Homo sapiens
  MAP TO AC009402.2; EXPRESSED IN LUNG, SIGNAL = 4.2; EST_HUMAN HIT: BF592089.1, EVALUE 9.10e-01; SWISSPROT HIT: P13276, EVALUE 2.30e+00; NT HIT: U77717.1, EVALUE 5.20e-01
acatgccttggcaagaactgggtctcagtgggccagtgtgctcagcttgttggttgtattggctaatcaatacagcgggaggcttcagctctgaagatgaacacggccctgggcaggagtcatcactggtgaatctgactgatggagtccctgctggaggaagcaggatgactgaaaaggaagctcatgcaattgaattttcagaggacatgagtcagacggaggcaggagtagtcagcagtctgaaaacctag

SEQ ID NO: 31973 - DNA, 115 bp, Homo sapiens
  MAP TO AC009497.2; EXPRESSED IN LUNG, SIGNAL = 2.1; NT HIT: AF040261.1, EVALUE 1.60e-02; EST_HUMAN HIT: AU129905.1, EVALUE 2.00e-58; SWISSPROT HIT: Q66479, EVALUE 4.00e+00
atcaattctctcttgcaactagaagaacttggatttcgtagtggagcacccatgattaaaaagatagcttttattgcttggaagagtttaatagataattttgctttaaatccag

SEQ ID NO: 31974 - DNA, 124 bp, Homo sapiens
  MAP TO AC009230.2; EXPRESSED IN LUNG, SIGNAL = 4.6; SWISSPROT HIT: P46331, EVALUE 4.00e+00; NT HIT: AF132728.1, EVALUE 2.80e-01; EST_HUMAN HIT: BE545165.1, EVALUE 1.60e+00
ccttttccttccactgctgaaacttggcaggtgcaagtgtcagtattgccctgcggctggaatgtgccctggacaagaactcccagcccatcactgcagcctggagagaaccaagggccttgtt

SEQ ID NO: 31975 - DNA, 153 bp, Homo sapiens
  MAP TO AC009500.1; EXPRESSED IN LUNG, SIGNAL = 5.9; NT HIT: AL163204.2, EVALUE 5.00e-03; SWISSPROT HIT: P08547, EVALUE 1.00e-03; EST_HUMAN HIT: BE144311.1, EVALUE 3.30e-02
cttaatagatacaggaaaagtatttggcaaaatgtaacacacccttgcatgatgaaaatgctcaacaagctaaatataaaaagaatgtacctgaatataataaaggccatatttattggccatgacaagcttacagctaacgttatcctctgg

SEQ ID NO: 31976 - DNA, 122 bp, Homo sapiens
  MAP TO AC009946.1; EXPRESSED IN LUNG, SIGNAL = 3.9; EXPRESSED IN BONE MARROW, SIGNAL = 1.1; NT HIT: AE004784.1, EVALUE 1.10e+00; SWISSPROT HIT: P07357, EVALUE 6.80e+00; EST_HUMAN HIT: BE878008.1, EVALUE 1.60e+00
ggagaatgggggatctctgagagcacggctgagaattagaggaaacgttcgaacagtcagcggcatggtgaccagccctgaggtcatgacggccatgcctgaccagagaggaggtgctgctg

SEQ ID NO: 31977 - DNA, 184 bp, Homo sapiens
  MAP TO AC010719.1; EXPRESSED IN LUNG, SIGNAL = 5.9; EST_HUMAN HIT: AI220975.1, EVALUE 7.00e-07; SWISSPROT HIT: Q63537, EVALUE 7.70e-01; NT HIT: AL163278.2, EVALUE 7.00e-03
aaggttgcattcacaggtgctggaggttaggacttcaacatatcttttttgagggatggcacaactcaactcatagccaacaccgaggcagtgtcctctgccccaggtatctacttggcccgctccctcaccttcttcaggactttgcttaaatgtgccttctgctaagtttatgttctcaatg

SEQ ID NO: 31978 - DNA, 184 bp, Homo sapiens
  MAP TO AC011094.1; EXPRESSED IN LUNG, SIGNAL = 5.2; NT HIT: U78027.1, EVALUE 1.00e-10; EST_HUMAN HIT: BE067821.1, EVALUE 5.00e-10; SWISSPROT HIT: P08547, EVALUE 1.00e-05
atataccatactaataagaataaaagacaaaaatcacatagtcatctcaatatatgtaggaaaagcatttgacaaaatctcaaaccctttcctgaaaagaatactcaacaaactaggaacagtagggaatgtcttcaacctgacaaacttcaacctcaacctcaaacctgataaagggcatcta

SEQ ID NO: 31979 - DNA, 118 bp, Homo sapiens; identical to SEQ ID NO: 20374
  MAP TO AL096814.10; EXPRESSED IN LUNG, SIGNAL =  10; EST_HUMAN HIT: AA380159.1, EVALUE 3.80e-01; NT HIT: AF123500.1, EVALUE 1.70e-02; SWISSPROT HIT: P50820, EVALUE 2.70e-01

SEQ ID NO: 31980 - DNA, 177 bp, Homo sapiens
  MAP TO AP000493.1; EXPRESSED IN PLACENTA, SIGNAL = 0.99; EXPRESSED IN LUNG, SIGNAL = 1.7; SWISSPROT HIT: Q9XT26, EVALUE 6.50e+00; NT HIT: gi7949114, EVALUE 1.60e+00; EST_HUMAN HIT: F03979.1, EVALUE 3.00e-95
cacatgacccatctgtgaccaatgagagtgaatttcaggatttattctctctttctctataaggatgtgaggtctggaacagctgcagccattttgccaccatgggaaacctgggacatctgaactgactccatgaagcctgaagagaaagctaataagaaggcagagagaagagga

SEQ ID NO: 31981 - DNA, 213 bp, Homo sapiens; identical to SEQ ID NO: 21000
  MAP TO AL035425.10; EXPRESSED IN HBL100, SIGNAL =   1; EXPRESSED IN LUNG, SIGNAL =   2; EXPRESSED IN HELA, SIGNAL =   5; NT HIT: M63468.1, EVALUE 1.00e-117; EST_HUMAN HIT: W07655.1, EVALUE 1.00e-109; SWISSPROT HIT: P29400, EVALUE 1.00e-23

SEQ ID NO: 31982 - DNA, 192 bp, Homo sapiens
  MAP TO AC007458.13; EXPRESSED IN PLACENTA, SIGNAL = 0.98; EXPRESSED IN LUNG, SIGNAL = 2.3; EST_HUMAN HIT: BE566050.1, EVALUE 1.10e-02; SWISSPROT HIT: Q03169, EVALUE 4.90e+00
atgtgtgccatcctccatgggccatcttccatgtttcttctctgttgaccaacttgatacgaacatgcacagtgacctcacagtccaagtattgaagatggtgaagatggtggagccacaggatgaaaggatcctggtcctgcttagagaagagatagctcctgttctgttacatctatttttgactttaca

SEQ ID NO: 31983 - DNA, 100 bp, Homo sapiens
  MAP TO AB020862.1; EXPRESSED IN LUNG, SIGNAL = 2.3; EST_HUMAN HIT: AA806199.1, EVALUE 3.40e+00
acaaaatgagcttcttggactccctctgagtgcagtatgagaatataaaactgaaccatcacacggacaaagtcacggaatcttgggtgtctggtcaaga

SEQ ID NO: 31984 - DNA, 115 bp, Homo sapiens
  MAP TO AL035462.12; EXPRESSED IN PLACENTA, SIGNAL =   1; EXPRESSED IN HBL100, SIGNAL = 0.96; EXPRESSED IN HELA, SIGNAL = 1.7; EXPRESSED IN LUNG, SIGNAL = 1.9; SWISSPROT HIT: P19750, EVALUE 4.00e+00; NT HIT: AF217514.1, EVALUE 1.00e-58; EST_HUMAN HIT: AW887671.1, EVALUE 2.00e-58
gtctgtagcatctctgtctgttggagaaggcacaggtgtcagagcaccagtcagaacagcaacagatgataccaaacctaaaaccacatgtgcatctaaagacagttggcacggg

SEQ ID NO: 31985 - DNA, 112 bp, Homo sapiens
  MAP TO AC007917.15; EXPRESSED IN LUNG, SIGNAL = 2.1; NT HIT: gi6680905, EVALUE 2.10e-01; EST_HUMAN HIT: AW892611.1, EVALUE 7.00e-11
gctgtcattggcatcatctgcctttatggattgtctctgtgggaaaatgcctgctgagttccaaaggggaggagaacaggtacaccatccagtcataccttgtatggtgtga

SEQ ID NO: 31986 - DNA, 224 bp, Homo sapiens
  MAP TO AC006466.3; EXPRESSED IN LUNG, SIGNAL = 2.3; NT HIT: AL163218.2, EVALUE 5.30e-01; EST_HUMAN HIT: BE439741.1, EVALUE 1.40e-01; SWISSPROT HIT: P40993, EVALUE 4.90e+00
cctttcctgctggggttgctgtgagaaccaaaatggctgacaaggatagcaaaaatgcagacagaagggctggggtcagaggggagtgttccaattgtgatggtggaactgtgttagccctgaatgctattcttatggaaatttttacccttatccctgcaacacgttctaaccacatgactgtctcaattgccagagttcaagctcttgggagtggaagtctt

SEQ ID NO: 31987 - DNA, 280 bp, Homo sapiens
  MAP TO AC009405.2; EXPRESSED IN LUNG, SIGNAL = 3.8; EXPRESSED IN BT474, SIGNAL =   2; EXPRESSED IN HBL100, SIGNAL = 1.5; EXPRESSED IN HELA, SIGNAL = 1.5; EST_HUMAN HIT: BE535426.1, EVALUE 2.00e-32; NT HIT: D84430.1, EVALUE 1.00e-32; SWISSPROT HIT: P15624, EVALUE 6.00e-08
gaagtcatatctattgacagagatgtcaattttgcaaagaacattagaagtcccttctgcctttacattatcttgttcattacttatttccttctcaaaagtaatgtcatcaacttccagaccaaattgaaaacatagttcatcaaattcttcatcagtgtaggcctggcccagggtttggaagaacagaaggtgcttctttgtgggtagttttttgattactgattcaatctctttacttattacaagtctatttatataatctctttcttcttgagtc

SEQ ID NO: 31988 - DNA, 208 bp, Homo sapiens
  MAP TO AC010087.2; EXPRESSED IN LUNG, SIGNAL = 5.3; EXPRESSED IN BT474, SIGNAL =   1; SWISSPROT HIT: Q39610, EVALUE 9.00e-16; NT HIT: AF178534.1, EVALUE 4.20e-01; EST_HUMAN HIT: AA007532.1, EVALUE 5.00e-01
catattcttgtcttctacaccagccattttgtacaacttcctcaggtcttcatgaaaactatcataattatatccccggctgagttcaatctgcaaacatttgtaaccgcatatatgagctgcaagtctcgtgagtgactgctttcctgtgcctcctactccaacaagcagggcattgcctctttcttgacgtatcatccgagcaatc

SEQ ID NO: 31989 - DNA, 338 bp, Homo sapiens
  MAP TO AC010091.1; EXPRESSED IN LUNG, SIGNAL = 2.5; SWISSPROT HIT: Q02487, EVALUE 5.00e-08; NT HIT: AE002404.1, EVALUE 1.80e-01
caattattacagtcattgtaagggtgagtcgcataaatgaactgaatccaattggaagtgcgtcagcatttaccttcagtgtatttgaaaatagtccagttgatacactagttggaaaagttacatttaccgatgcagactggccatttaataatatggaatataccgttgttggaggcaatttgggaacacctcccaaattttacattgaaccagatacaggtattgtaaaaacgctgacatcaattaatcataaaagtaaagagctcatatacactcattggaaatttattttatttagaaactatgatcatgagaacatcttaaaaactttctct

SEQ ID NO: 31990 - DNA, 161 bp, Homo sapiens
  MAP TO AC010798.1; EXPRESSED IN LUNG, SIGNAL = 5.4; NT HIT: AL021127.2, EVALUE 4.90e+00; EST_HUMAN HIT: BE155351.1, EVALUE 5.90e+00
  unsure 25
  unsure 36
  unsure 65
  unsure 89
  unsure 115
  unsure 120
agattcttgcccttcctgtcttttnggatacacccnatatggctaaagctcaatctatagtggantggttccattctatagccaacacnttttggaaaaatttaagcagagaggntttgnttaataaagccttcaaattcagggcccttatcgctctctaa

SEQ ID NO: 31991 - DNA, 187 bp, Homo sapiens
  MAP TO AC010088.2; EXPRESSED IN LUNG, SIGNAL = 2.3; NT HIT: AF135416.1, EVALUE 1.00e-07; EST_HUMAN HIT: AA016131.1, EVALUE 8.00e-12; SWISSPROT HIT: P54923, EVALUE 9.70e-01
agattctttcctctacttggcctattctgctgttaatacttgtgattacattacaaagttttcatattgtgttttttcagctctatcagattggtcacattttcctcctcattggcaattttttctatccattcctgcaatttttttcccttcattgcattgggttgcaactccatttgtagctcaa

SEQ ID NO: 31992 - DNA, 156 bp, Homo sapiens; identical to SEQ ID NO: 21736
  MAP TO AL078591.15; EXPRESSED IN LUNG, SIGNAL = 2.5; EST_HUMAN HIT: AW813906.1, EVALUE 1.00e-47; SWISSPROT HIT: Q14957, EVALUE 1.70e+00; NT HIT: AB013139.1, EVALUE 7.70e-02

SEQ ID NO: 31993 - DNA, 410 bp, Homo sapiens
  MAP TO AC005798.9; EXPRESSED IN HBL100, SIGNAL = 3.1; EXPRESSED IN LUNG, SIGNAL = 1.7; NT HIT: AF149412.1, EVALUE 0.00e+00; EST_HUMAN HIT: BF037713.1, EVALUE 0.00e+00; SWISSPROT HIT: P42674, EVALUE 2.30e+00
ggaatatctacagatgtctttctgtgagcgcagattccgggcaacttgtttccaatagactctctcatccttgagctttaggcatgaggttggattgccagcaaagacacaggaaaattcatggtccaattgagtgcactcaaccttgagagagatgccctcctcctgctcagtagcagcccatctgcagttggcttggtctttggtgacaaacttgcctttgttcccgggcctgcttttctgcttaatctgggtgttgcccagagtgtccttttgttctgagaccactttgctgtgaagtccattcttcactttttttttcccctccaccaggagcacctgagcagccagtaggaggaaggagagcagggtgaggctacagatcttcatggctgcagctgggcgttcac

SEQ ID NO: 31994 - DNA, 211 bp, Homo sapiens
  MAP TO AC006042.2; EXPRESSED IN PLACENTA, SIGNAL =   1; EXPRESSED IN LUNG, SIGNAL =   1; EST_HUMAN HIT: R45715.1, EVALUE 4.00e-48; SWISSPROT HIT: P52410, EVALUE 8.20e+00
ccgttggacataccagatggtcgaagagctccacttcctgctcattaccggagcagtagtactcgcagcattgacactcagactccttctgtccaggagcgcagcagtagctgcagcagtcattcaccctgtgtctcccctttttgtcccccggaatcccaggatggtagcccttgctcaacagaagatttgctctatgatcgtgataaag

SEQ ID NO: 31995 - DNA, 110 bp, Homo sapiens
  MAP TO AL049868.10; EXPRESSED IN PLACENTA, SIGNAL = 1.2; EXPRESSED IN HBL100, SIGNAL = 0.98; EXPRESSED IN BONE MARROW, SIGNAL = 0.98; EXPRESSED IN LUNG, SIGNAL = 1.1; EST_HUMAN HIT: AI281190.1, EVALUE 2.00e-55; SWISSPROT HIT: P53867, EVALUE 6.10e-01; NT HIT: AB033045.1, EVALUE 1.00e-55
ccaccctttaaacactggattattccggataaaaattcaaggagccactggaaaatttaatatggtcatccctcttgtggatgggatgattgtcagcaggcgagctcttg

SEQ ID NO: 31996 - DNA, 490 bp, Homo sapiens
  MAP TO AC007283.3; EXPRESSED IN BONE MARROW, SIGNAL = 1.1; EXPRESSED IN LUNG, SIGNAL = 3.1; EST_HUMAN HIT: T96912.1, EVALUE 1.00e-105; SWISSPROT HIT: Q92851, EVALUE 2.00e-93; NT HIT: U86214.1, EVALUE 0.00e+00
gggaccaatttcttcagatgattacacagagactgaatataccagctgccttcctccacatgccgaaaggatacatagcctgggacagtggccagaccaagtaggaagtcagcctcggcaggaatactgtcctgcagggaagtgggtgcctgctcagggttcagagcatctgcttcgatggatacggaaggctgtatctcttcaccttggcaggcctggatgaaaaagagtttaggtttttcagccagtctagggcactgcagggctgtgaagtgagacatgatctcccgaatgggaatgagggcctcatccgaagagtagacagctccaaatctcccatgggtcagaatacagaacacgaagcagtccccgtcggcatgggctggattgcacttctgcttctgcaggaccatctccatttccactttcgtcacattattgtgtatatgcactgtgaacccaagccactggaacacatgactcaggatct

SEQ ID NO: 31997 - DNA, 193 bp, Homo sapiens
  MAP TO AL109935.20; EXPRESSED IN LUNG, SIGNAL = 1.2; SWISSPROT HIT: P57567, EVALUE 1.30e+00; NT HIT: AB037855.1, EVALUE 1.00e-105; EST_HUMAN HIT: AW327746.1, EVALUE 1.00e-105
tgatagggtatctcccactgtactccacaaaatgtccaatagcttggagatatccttaataagcgacaatgagttcaagtgcaggcattcacagccggagtgtggttatggcttgcagcctgatcgttggacagagtacagcatacagacgatggaaccagataacctggaactaatctttgattttttcgaa

SEQ ID NO: 31998 - DNA, 153 bp, Homo sapiens
  MAP TO AC008159.1; EXPRESSED IN LUNG, SIGNAL = 0.64; EXPRESSED IN PLACENTA, SIGNAL = 0.8; EXPRESSED IN BT474, SIGNAL =   1; SWISSPROT HIT: Q08426, EVALUE 3.90e+00; NT HIT: AB008677.1, EVALUE 3.00e-01
gtgttagcaataacacattgttttattttatgtgataacatcatcattgtagctacagtggtaggctttgaactggttttagtggcatttgagaaagtaaatattgatgtcttaatgaaaacctgtaagcaaccaggtaagccaacttggttt

SEQ ID NO: 31999 - DNA, 80 bp, Homo sapiens
  MAP TO AC009651.2; EXPRESSED IN LUNG, SIGNAL =   3; EXPRESSED IN BT474, SIGNAL = 1.1; EST_HUMAN HIT: AW884259.1, EVALUE 7.00e-38
ggctggcagtctgatgtctagccaccaactggcagcaatcattattaaactgattcatgtgcccagggaaaatcttcata

SEQ ID NO: 32000 - DNA, 157 bp, Homo sapiens
  MAP TO AC007445.1; EXPRESSED IN BT474, SIGNAL = 0.98; EXPRESSED IN LUNG, SIGNAL = 1.1; EXPRESSED IN HELA, SIGNAL = 0.94; SWISSPROT HIT: Q50568, EVALUE 1.00e+00; EST_HUMAN HIT: AI022306.1, EVALUE 2.10e+00
ccattcattttggatctggatttaccttccttgctcacaatttttccacccaaaatatttctcactgatacaggaaacaacttattcatcaccaaagtatcccacacaatattgcttctgataaaaaaaaaaaaagcaattcacagcagtaatgaac

SEQ ID NO: 32001 - DNA, 209 bp, Homo sapiens
  MAP TO AC009962.1; EXPRESSED IN HBL100, SIGNAL = 1.1; EXPRESSED IN HELA, SIGNAL = 1.3; EXPRESSED IN LUNG, SIGNAL = 2.2; EST_HUMAN HIT: BE083088.1, EVALUE 1.00e-112
tgtttcagaattgttggaactttatgaggaagatcctgaagaaattctttataatcttggatttggacgtgatgaaccagatattgcttctaaaattccttccagattttttaattcatcatcctttgccaaagggatagatattaaagtatttttgagtgctcagatgcaacggatggaagtagaaaacccaaattatgctttaacaa

SEQ ID NO: 32002 - DNA, 165 bp, Homo sapiens; identical to SEQ ID NO: 17610
  MAP TO AP000317.1; EXPRESSED IN PLACENTA, SIGNAL = 0.69; EXPRESSED IN LUNG, SIGNAL = 0.62; EST_HUMAN HIT: AA194514.1, EVALUE 9.00e-03; SWISSPROT HIT: P51457, EVALUE 3.00e+00; NT HIT: gi11430271, EVALUE 6.00e-03

SEQ ID NO: 32003 - DNA, 407 bp, Homo sapiens
  MAP TO AC004595.1; EXPRESSED IN LUNG, SIGNAL = 1.2; EST_HUMAN HIT: BF698532.1, EVALUE 0.00e+00; NT HIT: gi4507168, EVALUE 0.00e+00; SWISSPROT HIT: Q02446, EVALUE 1.00e-39
gtgcaaattgtaggccaacctatcttacagcagatccagatccaacagcctcagcaacagatcattcaggctattccaccacagtcgtttcaactccagtcagggcagacgattcagaccatccagcagcagcctttacagaatgttcaacttcaagcagtaaatccgactcaggtgcttatcagggctccaactttaacaccttcagggcaaatcagttggcaaactgtacaggttcagaatattcagagtctttcaaatttgcaagttcagaatgctgggttatcccaacaattaaccatcaccccagtgtcttcaagtggtggcacaactcttgctcagattgctcctgtggctgttgctggtgccccaataactttgaatactgcccagcttgcatcagtgcc

SEQ ID NO: 32004 - DNA, 2047 bp, Homo sapiens
  MAP TO AJ010770.1; EXPRESSED IN LUNG, SIGNAL =   2; EXPRESSED IN BT474, SIGNAL = 1.1; SWISSPROT HIT: Q02224, EVALUE 3.00e-17; NT HIT: AJ010770.1, EVALUE 0.00e+00; EST_HUMAN HIT: AW028858.1, EVALUE 0.00e+00
atgaagcagtataatttgccagaagctaaaaatgccattcttacattttcattttttttcctaaaggaacaagataaaaaagtagaaaactcaaataaagaagaaatacaggaaaaggagacaatcattgaagaattaaacacaaaaataatagaagaagaaaagaaaactcttgagctaaaggataaattaacaactgctgataaattactaggagaattacaagaacagattgtgcaaaagaaccaagaaataaaaaacatgaaattagagctgactaattctaagcaaaaagaaagacagtcttctgaagaaataaaacagttaatggggacagtcgaagaacttcagaagagaaatcataaagacagccagttcgaaactgatatagtacaacgaatggaacaagaaacacaaagaaagttagaacaactccgggcagagctggatgagatgtatgggcagcagatagtgcaaatgaaacaagaattaataagacaacacatggcacagatggaggaaatgaaaacacggcataagggagaaatggagaatgctttaaggtcatattcaaatattacagttaatgaagatcagataaagttaatgaatgtggcaataaatgaactgaatataaaattgcaagatactaactctcaaaaggaaaaactcaaggaagaactaggactaattttagaagaaaagtgtgctctacagagacagcttgaagaccttgttgaagaattgagcttttcaagggaacagattcagagagctagacagacaatagctgaacaagaaagtaaacttaatgaagcacataagtcccttagtacagtggaagatttgaaagctgagattgtttctgcatctgaatccagaaaggaactagaattaaaacatgaagcagaagttacaaattacaagataaaacttgaaatgttagaaaaagaaaagaatgctgtgttagacagaatggctgaatcacaagaagctgaattagagaggctgagaacacagcttctatttagtcacgaagaagagctttccaaactgaaggaagatttagaaattgaacatcgaataaatattgaaaaacttaaagataatttaggcattcactataaacagcagatagatggtttacagaatgaaatgagtcaaaagatagaaaccatgcagtttgaaaaggacaatttgataactaagcagaatcaattaattttggaaatttcaaagctaaaagatttacagcagtctcttgtaaattcaaagtcagaagaaatgactcttcaaatcaatgaacttcaaaaagaaattgaaatactcagacaagaagaaaaagaaaagggtacacttgaacaagaagttcaagaattacaacttaaaacagaattgttagaaaaacagatgaaggaaaaagagaatgatcttcaagaaaaatttgcacaacttgaagcagagaatagcattcttaaagatgaaaagaaaacccttgaagacatgttgaaaatacatactcctgttagccaagaagaaagattgattttcttagactccattaagtccaaatccaaagactctgtgtgggaaaaagaaatagaaatacttatagaggaaaatgaggacctcaaacaacaatgtattcagctaaatgaagagattgaaaagcaaaggaacactttttcatttgctgaaaaaaactttgaagttaactatcaagagttacaagaggagtatgcttgccttctcaaagtaaaagatgatttagaagacagtaaaaataaacaggaattagagtataaaagtaaacttaaagcacttaatgaagagcttcatttgcaaagaataaatccaactacagtgaaaatgaaaagttctgtctttgatgaagacaaaacttttgtagcagaaacattggaaatgggtgaggttgttgaaaaggatacaacagaactcatggaaaaacttgaggtaaccaagcgagagaaattagagctgtcacagagactgtctgatctttctgaacaattgaaacagaaacatg

SEQ ID NO: 32005 - DNA, 94 bp, Homo sapiens
  MAP TO AF126483.1; EXPRESSED IN BT474, SIGNAL =   1; EXPRESSED IN LUNG, SIGNAL = 1.1; EXPRESSED IN HBL100, SIGNAL = 0.91; EXPRESSED IN PLACENTA, SIGNAL = 0.92; NT HIT: AF070670.1, EVALUE 2.00e-38; EST_HUMAN HIT: X85622.1, EVALUE 3.00e-38; SWISSPROT HIT: O62829, EVALUE 2.00e-11
gacactgaaagatctgaagaagatgatcacttcattatccttgcatgtgatagtatctgggatgttatgggaaatgaagagctctgtgattttg

SEQ ID NO: 32006 - DNA, 252 bp, Homo sapiens
  MAP TO AL021579.1; EXPRESSED IN BT474, SIGNAL = 1.1; EXPRESSED IN LUNG, SIGNAL = 1.3; EXPRESSED IN HELA, SIGNAL = 0.95; NT HIT: AB029019.1, EVALUE 0.00e+00; EST_HUMAN HIT: AW503709.1, EVALUE 0.00e+00; SWISSPROT HIT: O74135, EVALUE 1.40e-01
cttccagatttgagtccagtagaaaacaaagaacacaaacctggtcccattggaaaggaacgttcattaaaaaatagaaaagtaaaagatgcccaacaggtggagccagaaggacaagagaaaccaagcccagctacagtcagaagcacagatcctgtcacgacaaaggagactaaagcagtctcagaaatgtctactgaaataggaacaatgatctcggtatcatctgcagaatatggtactaatgcaaag

SEQ ID NO: 32007 - DNA, 159 bp, Homo sapiens
  MAP TO AL121775.1; EXPRESSED IN LUNG, SIGNAL = 0.98; EXPRESSED IN HBL100, SIGNAL = 1.6; EST_HUMAN HIT: BF341524.1, EVALUE 1.40e-01; SWISSPROT HIT: P51485, EVALUE 6.60e+00
ccctttttctataccttttgtcctgtcctccttcccgaagagataaacaaacagaagagaatcctgaatcttaggaccatcttcaagataaaatgcattttctttttctagacttctctccatattgtgaagcaggtaacaagtagtttggggaaagac

SEQ ID NO: 32008 - DNA, 189 bp, Homo sapiens
  MAP TO AC010678.1; EXPRESSED IN LUNG, SIGNAL =   2; EXPRESSED IN HELA, SIGNAL = 6.6; EST_HUMAN HIT: T79901.1, EVALUE 4.50e-01; SWISSPROT HIT: Q16548, EVALUE 6.40e+00; NT HIT: AF109372.1, EVALUE 3.80e-01
cgcttcagatctctctgggcttgccttgaggaagatgatgcctcttcttcatgagtgtaggcacaaaagcaaccagtcatttgtggtagagccatccacaaccccttttgtgggctgatttgggcctccttaatccactggcctgtgaaacgcaactggaattccagagtccagaattcacatttgatt

SEQ ID NO: 32009 - DNA, 114 bp, Homo sapiens
  MAP TO AC010170.3; EXPRESSED IN BONE MARROW, SIGNAL = 0.9; EXPRESSED IN LUNG, SIGNAL = 8.5; EXPRESSED IN HELA, SIGNAL = 0.97; EXPRESSED IN HBL100, SIGNAL = 1.2; SWISSPROT HIT: P27375, EVALUE 9.00e+00; EST_HUMAN HIT: AA883353.1, EVALUE 1.00e-04; NT HIT: X63789.1, EVALUE 4.00e-03
acaagtactgaacaatcttggacagtcacctctccaatctgaatctcggtttcgttgtctatattttattcatttatttattcattcatttactcatgaaacaaactttcctga

SEQ ID NO: 32010 - DNA, 382 bp, Homo sapiens; identical to SEQ ID NO: 15496
  MAP TO AL035412.22; EXPRESSED IN LUNG, SIGNAL = 0.6; EXPRESSED IN PLACENTA, SIGNAL = 0.73; NT HIT: AL096805.1, EVALUE 3.70e+00; SWISSPROT HIT: Q32091, EVALUE 8.10e+00; EST_HUMAN HIT: BF214381.1, EVALUE 3.50e-01

SEQ ID NO: 32011 - DNA, 576 bp, Homo sapiens
  MAP TO AC008079.7; EXPRESSED IN LUNG, SIGNAL = 0.64; EXPRESSED IN HELA, SIGNAL = 0.74; EXPRESSED IN BT474, SIGNAL = 0.7; EST_HUMAN HIT: AI904151.1, EVALUE 1.00e-121; SWISSPROT HIT: P32334, EVALUE 3.00e-03; NT HIT: U10925.1, EVALUE 1.40e+00
attggcagcatcttcttttttacagatgtcttgtacagtgtcctcattagcaatgtcatatacagcgtccttattagcgaattcgtatacagcatcctcattagcgatgccatatacagcgtcctcattagcgatgttgtatacagcgtcctcattagtgatgtcgtatagagcgtcctcattagcgatgtcatatacaatgtcctcattagcgatgtcatatacagcaacctcattcgctatgtcttgtaaagcatcctcattagcgatgtcatatacaacgtcctcattagcgatgtcgtatacagcgtcctcgttagtgatgtcttgtacggtgtccttataagcaatgtcgtctacagcgtccttgttagcatgccttgtgggtgtcattagcgatgtcatatagagcatcctcattggtgatgtcttatatggtgtcctcattagcgatgttgtgtacagcgtcctcgttagcaatgccttgtacagtgtcctcgttagcaatgtcatatacagtgtcctcattagcgatggcttgtacactgtcctcattagcgatgttgtgtacagcat

SEQ ID NO: 32012 - DNA, 143 bp, Homo sapiens
  MAP TO AL049797.8; EXPRESSED IN BONE MARROW, SIGNAL = 0.78; EXPRESSED IN HELA, SIGNAL = 0.89; EXPRESSED IN PLACENTA, SIGNAL = 0.6; EXPRESSED IN LUNG, SIGNAL = 0.63; EST_HUMAN HIT: BE439441.1, EVALUE 2.00e-39; SWISSPROT HIT: O77793, EVALUE 1.00e-21; NT HIT: M68874.1, EVALUE 3.00e-75
aaagtaaaaagattcatgtagtggacagtgggctcacatttaacctgccgtatcccttgatactgagacctcagagaggggttgatctcataatctcctttgacttttctgcaaggccaagtgactctagtcctccgttcaag

SEQ ID NO: 32013 - DNA, 308 bp, Homo sapiens
  MAP TO AC007881.2; EXPRESSED IN LUNG, SIGNAL =   1; NT HIT: X87825.1, EVALUE 1.00e-115; EST_HUMAN HIT: AA042813.1, EVALUE 0.00e+00; SWISSPROT HIT: Q95157, EVALUE 2.00e-27
tgcctccaaaaatggcaaagggagacatctgagtcaggcagcctgcataggagatgactctgctgtgagattggatgtccacaatcatcttggctaccgtggtggaggtgaaaccgatgtcaggcaaggacaggttggagaggaagaagtacatgggggtgtggaggtgggagtcagggctgacggccaggatgatgagcaggttccccagcaccgttaccaggcacatggacaggaacaacccagcaaggaccagctgccattctggatcctctgaggttctcggaggaggaatatagagacatctg

SEQ ID NO: 32014 - DNA, 172 bp, Homo sapiens
  MAP TO AL031676.2; EXPRESSED IN BONE MARROW, SIGNAL = 0.66; EXPRESSED IN LUNG, SIGNAL = 0.62; EXPRESSED IN PLACENTA, SIGNAL = 0.6; EXPRESSED IN HELA, SIGNAL = 0.65; NT HIT: U29187.1, EVALUE 8.60e-02; SWISSPROT HIT: P11227, EVALUE 3.90e+00
gagcagaggttgaggatctgatgactgcaggcacaattcctctgtgccaggcactgcgtgaactttctgcccaacttcttataatctatccaggtagatataatcactacctcccacataccttacgggcattagacgatcttcccaaggtcacacggccagccggggtcag

SEQ ID NO: 32015 - DNA, 189 bp, Homo sapiens
  MAP TO AC004832.2; EXPRESSED IN LUNG, SIGNAL = 0.8; EST_HUMAN HIT: AW067793.1, EVALUE 6.60e-01; SWISSPROT HIT: Q92503, EVALUE 1.70e-02; NT HIT: gi7110714, EVALUE 3.80e-01
ctgactctgcagctcacactcccgcaggagcagctcgcagctccggaagctgtccctgagcaactcctgtttggaggctgagagcaagaggcctttggggtccaggcttcccacaatgtggtaccagacagggctgccctcaccgtcgtggccgcatatgccgttagcgttgtacagcctgaccacctg

SEQ ID NO: 32016 - DNA, 86 bp, Homo sapiens
  MAP TO AP000054.1; EXPRESSED IN LUNG, SIGNAL = 0.66; EXPRESSED IN PLACENTA, SIGNAL = 0.62; SWISSPROT HIT: P17525, EVALUE 4.10e+00; NT HIT: AF092047.1, EVALUE 2.80e+00
ccgtcgtggagggagaacactttggactcgggtgtgtgtttgagggattccagagggtagaggttgaggaagaggagttgggagag

SEQ ID NO: 32017 - DNA, 135 bp, Homo sapiens
  MAP TO AL121658.1; EXPRESSED IN HBL100, SIGNAL = 1.2; EXPRESSED IN HELA, SIGNAL = 2.1; EXPRESSED IN LUNG, SIGNAL = 1.7; NT HIT: AJ246003.1, EVALUE 2.00e-70; SWISSPROT HIT: P32833, EVALUE 2.30e+00
ggtactccgaaaacaaataggacaaataaaccttctacccctacaactgctactcgtaagaaaaaagacttgaagaattttaggaatgtggacagcaaccttgctaaccttataatgaatgaaattgtggacaag

SEQ ID NO: 32018 - DNA, 116 bp, Homo sapiens
  MAP TO AC011242.2; EXPRESSED IN LUNG, SIGNAL = 1.5; NT HIT: AF187320.1, EVALUE 2.20e-01; EST_HUMAN HIT: AW451832.1, EVALUE 3.00e-59; SWISSPROT HIT: P42704, EVALUE 9.00e+00
gaaggatcgtcagtgaacaacgcaaatccagactgcgctggtttcctcattcctgtgtcctggttcaaagtattcaaaaattcttccactgtggtagatgcgtcaaaaccaactac

SEQ ID NO: 32019 - DNA, 245 bp, Homo sapiens
  MAP TO AF042089.1; EXPRESSED IN BT474, SIGNAL =   1; EXPRESSED IN LUNG, SIGNAL =   1; EST_HUMAN HIT: AA938905.1, EVALUE 1.00e-113; NT HIT: X87825.1, EVALUE 6.00e-90; SWISSPROT HIT: Q95157, EVALUE 1.00e-25
tgcagccggtcctcgctgggctgttcctgtccatgtgcctggtcacggtgctcaggaacctgctcatcatcctggccatcagccctgactcccacctccacacccccatgtacttcttcctctccaacctgtcctttcctgacagtcgtttcacctccaccacagtccccaagatgattgtggacatccagtctcacagcagagtcatctcctatgcaggctgcctgactcagatgtctctcttt

SEQ ID NO: 32020 - DNA, 109 bp, Homo sapiens
  MAP TO Z97985.4; EXPRESSED IN LUNG, SIGNAL =   1; EST_HUMAN HIT: AI126043.1, EVALUE 2.40e-01; NT HIT: AF143738.1, EVALUE 2.00e-01
tattgggtacattaagcacttgttggaccttaagctgctcaatcttatggtcaagaaaaggagatattccagcagtgccaagagaagaaaaggactctctctagactac

SEQ ID NO: 32021 - DNA, 527 bp, Homo sapiens
  MAP TO AF057177.1; EXPRESSED IN LUNG, SIGNAL = 1.1; NT HIT: AF057177.1, EVALUE 0.00e+00; EST_HUMAN HIT: AI961098.1, EVALUE 0.00e+00; SWISSPROT HIT: P03979, EVALUE 5.00e-39
ccagtcagaaatcttccaacttggaaggcagaacgaagtcagtcatcaggcagactgggtcatctgctgaaatcacttgtgatcttgctgaaggaagtaccggctacatccactggtacctacaccaggaggggaaggccccacagcgtcttctgtactatgactcctacacctccagcgttgtgttggaatcaggaatcagcccagggaagtatgatacttacggaagcacaaggaagaacttgagaatgatactgcgaaatcttattgaaaatgactctggagtctattactgtgccacctgggatgggcacagtgattcagatccgccctacaccacactgaaaacctgccttgtggctgcttctggtacacaagatagagctgccccctctcatttcctgccaccaaatttaccgtgtgctgaacaagagaaacattgcttaactcctgatctcccctgcaatattacactcccctggcagcagctgcaccctgttccccaccctcccccaggacttccctga

SEQ ID NO: 32022 - DNA, 120 bp, Homo sapiens
  MAP TO AL020990.1; EXPRESSED IN PLACENTA, SIGNAL = 1.1; EXPRESSED IN BONE MARROW, SIGNAL =   1; EXPRESSED IN LUNG, SIGNAL = 1.4; NT HIT: M68840.1, EVALUE 1.00e-61; EST_HUMAN HIT: H01419.1, EVALUE 5.00e-59; SWISSPROT HIT: P21397, EVALUE 1.00e-17
cttaatgacagctcccattggaagccgctgaattaactggtttctctctgctggaagctctggtctgaagtgaatcttggcagtcaaggtcggagggatcgcattaattacgtatttgca

SEQ ID NO: 32023 - DNA, 202 bp, Homo sapiens
  MAP TO AC005883.6; EXPRESSED IN BONE MARROW, SIGNAL = 0.66; EXPRESSED IN HBL100, SIGNAL = 1.1; EXPRESSED IN LUNG, SIGNAL = 0.81; EXPRESSED IN HELA, SIGNAL = 1.1; NT HIT: AF289379.1, EVALUE 8.00e-03; SWISSPROT HIT: P37228, EVALUE 5.60e-01
aactaaaaataccagcaggattctgagactcagagactccttgaatagtagagctggaataatgaaaataataatgaaagcagcaatgactacatgtgccaggccccaggatatgtactccatatatgttcatccagttctcacaaccctccctgcagtcatcatggtttttatggccgaacaatctcaggatcagaaagat

SEQ ID NO: 32024 - DNA, 560 bp, Homo sapiens
  MAP TO AF127577.1; EXPRESSED IN BT474, SIGNAL = 0.98; EXPRESSED IN LUNG, SIGNAL =   1; EXPRESSED IN HELA, SIGNAL = 0.99; EXPRESSED IN HBL100, SIGNAL = 0.99; EXPRESSED IN PLACENTA, SIGNAL = 1.2; NT HIT: AL163207.2, EVALUE 0.00e+00; EST_HUMAN HIT: BE082541.1, EVALUE 0.00e+00; SWISSPROT HIT: P48552, EVALUE 1.00e-106
gctcacatcattgtgtactccctgagggctggtgtttttttctacattttcttcattcttatggccaagtagcaattgaagaagtgttactttctggtgtgagtttagcttagaattctttgaggtatcttgatcttctttgatatctacatctgggacttttggatcccaagtgtttagcaaggattgagtgaagttatccagggaaacaggttggtcagattctgatttttcagttcggtgtttgcaagacaagtctatgggaacacagttggaataagaactttcatcaccactgctgtcatctgtaaaactaggattgttatctgaatattcatcaatagttgtaggtgtactactttcctcaaaaatgcttcctctctcactgtgactgtgtccattcattggcttaggtatagtctggcttttaagaagatgtaaaagcaaactattgttagcagcttgttttatattgtttctttccagtgagttcttataacctgcatttttaggggaagaaggaatgatacccattggattttgaaacactgtagcactac

SEQ ID NO: 32025 - DNA, 114 bp, Homo sapiens
  MAP TO AC009481.1; EXPRESSED IN LUNG, SIGNAL =   1; SWISSPROT HIT: P02165, EVALUE 6.90e+00; EST_HUMAN HIT: AA550984.1, EVALUE 5.70e+00; NT HIT: AJ239039.1, EVALUE 9.90e-01
aaatctgaggtgacataagaatgaggagagttttccatagctactgatctgaacattgcccagtttctcgagctcgttgcttttcctagccttctcttcaggctttatgtggct

SEQ ID NO: 32026 - DNA, 186 bp, Homo sapiens
  MAP TO AC009493.1; EXPRESSED IN LUNG, SIGNAL = 2.3; SWISSPROT HIT: P04929, EVALUE 3.70e+00; NT HIT: U24396.1, EVALUE 1.10e-01; EST_HUMAN HIT: BF315049.1, EVALUE 1.60e-01
catgtggtttttataatcatcatcaccatagtgatgaaagacttcactaccacaagttttgcaaatgccttaccgtccacccatgccaccaccagtgataatttgagtaagcctaataccaatgcaagccacaaattcgcaatgtctcatttaatttcaacaaagagaatctttgcatccattgaa

SEQ ID NO: 32027 - DNA, 169 bp, Homo sapiens
  MAP TO AC006111.2; EXPRESSED IN HELA, SIGNAL = 0.77; EXPRESSED IN BONE MARROW, SIGNAL = 0.91; EXPRESSED IN LUNG, SIGNAL = 0.6; SWISSPROT HIT: P50617, EVALUE 3.40e-01; NT HIT: AF148138.1, EVALUE 1.50e+00; EST_HUMAN HIT: BE791253.1, EVALUE 1.50e-01
cccaggctcggtgtgggtgtggtcatggcatgaacagcctgtggagtcacaggcccccaccacgtactccaggttcttcagggtgctgttggcgcagagggcatgagcgatggcctgggctccctcgggactgatggagttttctcgaaggctgaaaaaaaaggaaaga

SEQ ID NO: 32028 - DNA, 99 bp, Homo sapiens
  MAP TO AP000185.1; EXPRESSED IN HELA, SIGNAL = 0.85; EXPRESSED IN LUNG, SIGNAL = 0.7; SWISSPROT HIT: P13390, EVALUE 9.20e+00
ccttgaggtggttcccacagttttccatatcccagccagggctctcttcacactgtccccacttccatggctggagccgtagttttttcctggtcataa

SEQ ID NO: 32029 - DNA, 215 bp, Homo sapiens
  MAP TO AL132778.2; EXPRESSED IN HBL100, SIGNAL = 1.1; EXPRESSED IN BT474, SIGNAL = 0.91; EXPRESSED IN LUNG, SIGNAL = 1.5; EXPRESSED IN PLACENTA, SIGNAL = 1.9; NT HIT: AF055066.1, EVALUE 4.00e-29; EST_HUMAN HIT: BE062570.1, EVALUE 8.00e-34; SWISSPROT HIT: P38099, EVALUE 2.70e+00
agatgcagatgaagaacttattgggaactacagtaaagatcacttttgttatgcattagcaaagaacttggaggcattgtgcccctggcctaaggatctgtggaactttggacttgtgagtcgtgatttagggtacctggctaaagaaatgtctaaccagcaaagcattcaagatgtagccttgctgcttttaacagcctatgctgtcatatgtg

SEQ ID NO: 32030 - DNA, 88 bp, Homo sapiens
  MAP TO AC010135.1; EXPRESSED IN LUNG, SIGNAL = 4.3; EST_HUMAN HIT: BF676282.1, EVALUE 4.20e+00
agctcatcaaaagggacgaagaaaatgctacatatcccagtgtagtaaaggttgttatcactaagtagtaatttttaataagtaataa

SEQ ID NO: 32031 - DNA, 158 bp, Homo sapiens
  MAP TO AC010141.1; EXPRESSED IN LUNG, SIGNAL = 3.3; SWISSPROT HIT: P07196, EVALUE 6.70e-02; NT HIT: gi4758523, EVALUE 1.40e+00; EST_HUMAN HIT: BE700087.1, EVALUE 2.10e+00
ctttttctttcttctttcttgttcttttccatctccatgtacactgtgttcttcttaagtcttttcttcttgtacattcccttcattctgcattttcccatcttgctcagttttttctcctctggtctcctctcctattcttctttccatagcctctt

SEQ ID NO: 32032 - DNA, 140 bp, Homo sapiens
  MAP TO AC010150.2; EXPRESSED IN LUNG, SIGNAL = 1.3; NT HIT: AB003688.1, EVALUE 1.70e-02; EST_HUMAN HIT: BE162654.1, EVALUE 3.20e-01; SWISSPROT HIT: P49833, EVALUE 6.70e+00
ctgacattgacgttgagacaccggactccattctggttaatacaaatctgcgagcactgatcaacaagcacacattttcagtccttcctggagattgccagcaacgactgcttttactactcccagaggtagatcgacag

SEQ ID NO: 32033 - DNA, 408 bp, Homo sapiens
  MAP TO AL032822.1; EXPRESSED IN BT474, SIGNAL = 1.5; EXPRESSED IN LUNG, SIGNAL = 1.1; EXPRESSED IN HELA, SIGNAL = 1.1; EXPRESSED IN HBL100, SIGNAL = 1.2; EST_HUMAN HIT: BE871908.1, EVALUE 0.00e+00; NT HIT: AF255711.1, EVALUE 8.60e-01; SWISSPROT HIT: P03378, EVALUE 5.90e-01
ggaaggatgtactcatcataaagcacatctccgttgtagttgacaatgctacattgagccaagaaactaacatgccccttgggtcctgtgcccaccatctcagagtcaattgccaccatcatcttccttggcaacttctgggatgctctggagcatttattctcagaatgagcttgggtggagttctgtggtgcattcttctgaggatgattcttcttagaggatttcttccgggagcccttcttctgggagtgggttgggtggctattaatctttggaagggcactccagatctcccccaacaaatctagtttagcagcaacagaatcggccttcttcaaataggcaggaatcagtcaaaacactgcagctttcttgtccagggactgtcctgacccattgctggag

SEQ ID NO: 32034 - DNA, 111 bp, Homo sapiens
  MAP TO AL049738.4; EXPRESSED IN PLACENTA, SIGNAL = 0.63; EXPRESSED IN LUNG, SIGNAL = 7.7; NT HIT: AF306546.1, EVALUE 9.60e-01
ttgctggagaaggtttatctccttggctttgaaacgcttgcagcctttcagcccctaaaagcatttagaagcaggatgtggatgattttccatatttctaaaaagactctt

SEQ ID NO: 32035 - DNA, 887 bp, Homo sapiens
  MAP TO AL109823.11; EXPRESSED IN HBL100, SIGNAL = 1.3; EXPRESSED IN BT474, SIGNAL = 0.98; EXPRESSED IN LUNG, SIGNAL = 1.1; EXPRESSED IN HELA, SIGNAL = 1.1; EST_HUMAN HIT: BE563657.1, EVALUE 0.00e+00; NT HIT: AB007866.2, EVALUE 0.00e+00; SWISSPROT HIT: P76558, EVALUE 1.60e+00
acaaggaaagagtagagaatttgccctggtcatcttgggagttcattaggcgaggaagagatgtggcaagggaatgcaggctttctgacaagatgtcagcgagggctttgttgcccaccactactttttgatctgcaaaatgtctcagaactttattgcactgggcttggatttcaggactctcatcatttactagtcccactaaggccttcagaaggggaccagcacattcgaccaatgattgactgcacttcaaaagaaggtcctccacaagttctaccagttccagtctcaccttccagtgtgggtgaacagaaacacactcaattatctttttaataaggatagtcaacttgtcgccagtcttttttacccaatctgcttccctgtaaaccatcagctctgctactctgtgctcaactgcaggttttgcttggacctttgagattcttttgagctgttcatcagccataatgaagctcactgtcttgtaaaagatctttagggaagatacgacaatgctgtgaccttgtttaaagtctcctgtgataagcctggtcagtgcagttgagattccaggtaaaaaagaggcaaacaaatcccccagctgcttttgttcaagttcatccaatgaccttggatggtcctgacaatcacactgcaagagtagaacctgtaaacattttaaggcagcaattttaatttgctttgatttctcctgttctgcaaggcctaacagtaaagatacagcaaatcctaaacgtggcagaatggagggctcataaaaagtcagaatgatgtccccataagctgagtgcattaatgtgctaagtccctggatcacagccaatttcaactcctcggacacagccgcaggtttttgggag

SEQ ID NO: 32036 - DNA, 248 bp, Homo sapiens
  MAP TO AL096701.14; EXPRESSED IN LUNG, SIGNAL = 1.3; EXPRESSED IN BT474, SIGNAL =   1; EXPRESSED IN HELA, SIGNAL = 1.6; NT HIT: gi10947034, EVALUE 1.00e-119; EST_HUMAN HIT: AW294800.1, EVALUE 0.00e+00; SWISSPROT HIT: P49337, EVALUE 2.10e+00
agaaggcaaagtcccacttgccttcattgtgctcactagcttgttgaacgcagtcatgtctccgtctttcttcagttgtcgattgttggttacggcactcaaggtctcttctaggtgttctgccatgaagggagttgaattcttcacttgctggtcaaccttcaagcccttcagacctgcttctacctcctccactgaaagcacaacccctgaatgtgctgagaagttgagaacgtccaggttaaatc

SEQ ID NO: 32037 - DNA, 162 bp, Homo sapiens
  MAP TO AL049694.9; EXPRESSED IN BONE MARROW, SIGNAL = 0.65; EXPRESSED IN HBL100, SIGNAL = 1.7; EXPRESSED IN LUNG, SIGNAL = 0.9; EXPRESSED IN HELA, SIGNAL = 1.5; EST_HUMAN HIT: BE734169.1, EVALUE 1.00e-75; NT HIT: AF082097.1, EVALUE 5.00e-03; SWISSPROT HIT: P27653, EVALUE 1.00e-13
caaatcatctgctgtcacaggctgcccgcttttgtcactggccaccaccatccttcccagccgtgccttcatgtctgcgaggctgtccgtcagggccagcaccgccatgatctcgctggccactgcgatgtcaaactgcgcctgaaccagcccaaacacagg

SEQ ID NO: 32038 - DNA, 191 bp, Homo sapiens
  MAP TO AC005105.2; EXPRESSED IN LUNG, SIGNAL = 0.71; EXPRESSED IN PLACENTA, SIGNAL = 0.73; EXPRESSED IN HELA, SIGNAL = 0.59; EXPRESSED IN BT474, SIGNAL = 0.6; NT HIT: AE001895.1, EVALUE 3.80e-01; SWISSPROT HIT: P49805, EVALUE 6.40e+00; EST_HUMAN HIT: BF439247.1, EVALUE 1.00e-67
agctcagtgatacaacaaatacctatgagcccagcccccagcccccagccccagaaccagagcatcaccagtcatttctaactgtcagtgtgttccttccacgttccatcctgcctcgcccttggggtcgtcactgtcctgaagttggggctcatcatcctttggcatttaaaaggagttttatcacaaat

SEQ ID NO: 32039 - DNA, 146 bp, Homo sapiens
  MAP TO AL078596.8; EXPRESSED IN LUNG, SIGNAL = 3.8; NT HIT: gi11419055, EVALUE 5.00e-77; EST_HUMAN HIT: AW751779.1, EVALUE 5.20e+00; SWISSPROT HIT: Q9Y466, EVALUE 6.00e-25
gccgcattttagatatcccctgcaaagtgtgtggcgaccgcagctcggggaagcactacggggtctacgcctgcgacggctgctcaggttttttcaaacggagcatccgaaggaataggacctatgtctgcaaatctggaaaccag

SEQ ID NO: 32040 - DNA, 279 bp, Homo sapiens
  MAP TO AC007708.13; EXPRESSED IN BT474, SIGNAL = 4.8; EXPRESSED IN LUNG, SIGNAL = 3.2; NT HIT: AF225925.1, EVALUE 5.70e-01; EST_HUMAN HIT: AI904151.1, EVALUE 1.00e-94; SWISSPROT HIT: O13695, EVALUE 1.60e-02
tcaagacaaagaaaagtgtcttacattggcagcatcttcttttttacagatgtcttgtacagtgtcctcattagcaatgtcatatacagcgtccttattagcgaattcgtatacagcatcctcattagcgatgccatatacagcgtcctcattagcgatgttgtatacagcgtcctcattagtgatgtcgtatagagcgtcctcattagcgatgtcatatacaatgtcctcattagcgatgtcatatacagcaacctcattagctatgtcttgtaaagc

SEQ ID NO: 32041 - DNA, 152 bp, Homo sapiens
  MAP TO AL118512.2; EXPRESSED IN LUNG, SIGNAL = 1.4; SWISSPROT HIT: P16170, EVALUE 1.70e-02; NT HIT: M95107.1, EVALUE 1.40e+00; EST_HUMAN HIT: AA578403.1, EVALUE 8.90e-02
tgtacaccttcacttcatagtgctttatcatttctccagcctcattcgtggctacacaagagtatcttccagcattgtcctcctgtgcattgaggatctgcagagttctgcctcctgtaaaatcatgggacatcaaagagtctctaaaatca

SEQ ID NO: 32042 - DNA, 102 bp, Homo sapiens
  MAP TO AC010974.2; EXPRESSED IN LUNG, SIGNAL = 0.89; NT HIT: AE001355.1, EVALUE 3.40e+00; EST_HUMAN HIT: AA873479.1, EVALUE 5.60e-02
aaacttcactcacgtctcttggatctttcatctggagatttgctttcagaggtggaaagaaaccgaagtctgacacagtcacgaactgatgctgaggtgcac

SEQ ID NO: 32043 - DNA, 113 bp, Homo sapiens
  MAP TO AC011003.1; EXPRESSED IN LUNG, SIGNAL = 1.2; NT HIT: AJ245365.1, EVALUE 3.90e+00; EST_HUMAN HIT: BE786444.1, EVALUE 3.60e-01
ccaaatctgtagcaacagccttgaccttggcaatacttcttacggccagatccaaagtcttcatggacatcttcatctgggaagctcccacataaaatatccataaataagct

SEQ ID NO: 32044 - DNA, 138 bp, Homo sapiens
  MAP TO AL109843.5; EXPRESSED IN BT474, SIGNAL =   3; EXPRESSED IN HBL100, SIGNAL = 1.7; EXPRESSED IN BONE MARROW, SIGNAL = 1.5; EXPRESSED IN LUNG, SIGNAL = 1.2; SWISSPROT HIT: P48965, EVALUE 6.90e+00; NT HIT: AL163247.2, EVALUE 1.00e+00; EST_HUMAN HIT: AU131990.1, EVALUE 1.80e+00
ctaatcaaagcctttatgatgcaggccttggttactgtggctttgacatcaagattggcaagcgcaaaagtaaataaagaaaccttagagatgtctataccctttggctcagtaattcctcttgtagagatctggcct

SEQ ID NO: 32045 - DNA, 311 bp, Homo sapiens
  MAP TO AB023057.1; EXPRESSED IN HBL100, SIGNAL = 0.66; EXPRESSED IN BONE MARROW, SIGNAL = 0.68; EXPRESSED IN LUNG, SIGNAL = 0.94; EXPRESSED IN HELA, SIGNAL = 0.67; NT HIT: J00191.1, EVALUE 0.00e+00; SWISSPROT HIT: P01893, EVALUE 3.00e-46; EST_HUMAN HIT: BE896125.1, EVALUE 1.00e-108
cgccctcgctctggttgtagtagcggagcgcgatccgcaggttctctcgttcagtccgtgcttgggccttgcagatctgtgtgttccggtcccaatactccggcccctcccgctccatccacggcgcccgcggctcctctctcggactcgcgtcgtcgctgtcgaaccgcacgaactgcgtatcgtccacgtagccgacggagatgaagcggggctccccgcggccgggccgggacatggtggtgtagaaatacctcatggagtgggagcctgggagcgaggaggagctgagacccgcccgaccctcctcc

SEQ ID NO: 32046 - DNA, 127 bp, Homo sapiens
  MAP TO AL109614.4; EXPRESSED IN LUNG, SIGNAL = 1.5; SWISSPROT HIT: Q9KV17, EVALUE 4.10e+00; EST_HUMAN HIT: AW027569.1, EVALUE 7.20e-02; NT HIT: X00371.1, EVALUE 2.80e-01
tctgtcttcaggtggtcatgcgtgtgagggcgaacatgcaggatgagggcgacaggctggaggatgacctgagcctgcgcttgcaatgggtgagggaaggggccaagccatttagacgggatattca

SEQ ID NO: 32047 - DNA, 367 bp, Homo sapiens
  MAP TO AC009497.2; EXPRESSED IN LUNG, SIGNAL =   7; EXPRESSED IN BT474, SIGNAL = 1.5; EXPRESSED IN HELA, SIGNAL = 1.6; NT HIT: U58109.1, EVALUE 1.00e-117; EST_HUMAN HIT: BE185376.1, EVALUE 1.00e-100; SWISSPROT HIT: gi127998, EVALUE 1.00e-22
tctccccggggtctggcgataatatacgcacatcgctctgcaggtcgtaggctttcttggcctggatcacatcgttctgatctggcagacacgtccactggtgcagataattgcgataatcaatgtcgctaaccaggacctggcatttcttggcttgaacaattgacatcatgtccaacggtgtgttgtgaattcctttagacttctcataagctttcttatattctctgtcactctggatcttggcagcatgtatagcccatactgacttggggtcatcttgtagggtgcggaaacccatgtggtggcccagttgcttacggtaaccttctttgtatttgtactaaagtagtaagaaatcatatta

SEQ ID NO: 32048 - DNA, 100 bp, Homo sapiens
  MAP TO AL049794.13; EXPRESSED IN LUNG, SIGNAL = 8.1; EST_HUMAN HIT: AI085050.1, EVALUE 2.20e-01; NT HIT: D87675.1, EVALUE 1.80e-01
ttttccattttgtggagaagatgtgtattgggagtgtaatggattcggaagcagctctcgtaactggggctgttgctcagcaggcttgtaggcgggtcag

SEQ ID NO: 32049 - DNA, 214 bp, Homo sapiens
  MAP TO AC007738.1; EXPRESSED IN BT474, SIGNAL = 1.2; EXPRESSED IN HELA, SIGNAL = 1.7; EXPRESSED IN LUNG, SIGNAL = 0.98; EST_HUMAN HIT: AW869159.1, EVALUE 2.00e-50; NT HIT: U60780.1, EVALUE 2.80e-02; SWISSPROT HIT: P71677, EVALUE 3.90e-01
tgtcgtggagcgcaaactcacaaggcggtagtttttagtaatggttcgtgggcgtttccgtggtggtgcaaatcgctccatttcagtcaccaagtaaaggccctgttttatataaccaaagtagcgagccttggcagatatttcataatcagaatcagaatcctcttctccttcatcttcttctccagctctagtctccaaacgagatcgtttg

SEQ ID NO: 32050 - DNA, 85 bp, Homo sapiens
  MAP TO AB020876.1; EXPRESSED IN LUNG, SIGNAL = 3.7; NT HIT: AF109905.1, EVALUE 2.70e+00
tggccatgggtcagggagggtatcttcaggggctttctcagcctttctgtcgccaggaagtttcaatcctccagacaaagaaggg

SEQ ID NO: 32051 - DNA, 103 bp, Homo sapiens
  MAP TO AB020873.1; EXPRESSED IN LUNG, SIGNAL = 0.88; NT HIT: AB030033.1, EVALUE 1.00e-03
aaagaatgaatttggattctacttccatttcttaatgaatattaataacaatagtaataacagcaacaaaaacaagaataagctccaggctttatggagctct

SEQ ID NO: 32052 - DNA, 1887 bp, Homo sapiens
  MAP TO AC004616.1; EXPRESSED IN BT474, SIGNAL = 2.2; EXPRESSED IN LUNG, SIGNAL = 1.3; EXPRESSED IN PLACENTA, SIGNAL = 0.94; NT HIT: AF245505.1, EVALUE 0.00e+00; SWISSPROT HIT: Q09625, EVALUE 5.00e-06; EST_HUMAN HIT: BE007935.1, EVALUE 0.00e+00
ctgtggaaacctttgtccaagtaacgaaaggctttggttttcctgttgcctcacaggggaacacagtgtctgtctcagcggtgacggacacagtctgtggggacttggtgaggatttgtggcttttccccaagagaccagaatttggatgcaggaggtcctcctgcaaagaactttgagctgctctggtggaagcttcctgaggactggacagaagatgttataaaggagatagaactctgggtggaagagaccatagggatattctgtaagttagttgagggtgatcccgtggtctgcggagtgtgcaacaacggaggtgccggagggccaaagtccagatggaaggtgctatgggaatgtatcctgttgtaggaacctggaataacttttctctctctcattactggggcaggagaagtgggtatctggggtctccgggtgactcccaactgtggaaaagaaagagtcttgttggtaaagaaagggagtcttccattggaataatgaggaattcttggactgggaggctttccaactgggtttcttgcctcagggatgttgttatttccaaacactttggagtagccattgaattggtcagttcttcggtcagtaaacttactaggaatgctgggtttggacatgtgcaatgggagaggaattgttgtacttgataatcttggagttgtaaactgtttgttctctggcaaagccccagaaggatatgtagttatttccggtttgttggtccagtgacgaggtgactgggaagttacaaagtatctggaagcgctttgtgtggacatttcaggcagcctcactgttgctgttggtaggatgggtttggcagggactctggttagttgatgagaagcatgaactcttccatcctggcgttggctatctgggccacgtggtagactcctactaccaaatacttgcttttccaattccagctttgtagacaagttaaatgcatcctggtcggaagagggtgttgataattcatttggccctgacatatgctgtgttccttcattgttcactggggttgcttctgtttctggattccccacataattcaagaaaacattttccttggaatctctagatgcttgagatattcttggactgggaagtgctggcttagtggtggtggtttgtcccaaagacatgagaattgtggatggggacgaggatgctggctccttcatccgggcagcagtaggggtgtgattctgtggtctagtttcagaaaggagaatagccacagtggtttcaagatgatcttgatcaagggtggtggtttctgcctgacttgaagccacctccacttttatgcttgagagagttgtggaagaaccagcttcttcctggtgaaatggtgtggagactgtcaaagaggacaaaaactcggaagtgaaatccacatcctcaagctctttaagaaggggagggtctgtaagattttccccagaagtggtaacaggtatgcctgtctgtagcctcccaggctgggccgtccttgagggattccaggttggagttcctggaaagcctacaggagaggattcttccttaaattctcccatagtggagaccaaggagcgagaagttggtatggcattagtaattgattcaccagtgactaaaatgtcacttttatgtttgtcaacatttgtggcaacatcatccttaatttcttttccatctgatgtgggtttatatgtgactggaagtgtctcttggactttagggtaagatgaatatatttttctggtggttgtcatgtaatctaaggaatcataagggccctcagttttcagagaaacagttctaggcaaaagtatagtttctgaactgggagtaacaatgtttctatgtt

SEQ ID NO: 32053 - DNA, 251 bp, Homo sapiens
  MAP TO AL096763.9; EXPRESSED IN LUNG, SIGNAL = 7.1; NT HIT: Z47563.1, EVALUE 9.40e+00; EST_HUMAN HIT: W39395.1, EVALUE 6.10e-01; SWISSPROT HIT: P25062, EVALUE 1.90e-01
catatgacatttggagtggacggtgatggccatcattgccgcctggaaaatttggttgtgtggctgtgtcatcagtgggattatctgctgtgacataagtggaatcatctgctatgtcattagtggaattatctgctgtttcagaaacttccaccatctcaatactgcaatcattgttatcatcactgtcgtcgacagttataataacaaaatctaagaataagcaaagaggaagattagattcaatatca

SEQ ID NO: 32054 - DNA, 244 bp, Homo sapiens
  MAP TO AL078645.18; EXPRESSED IN LUNG, SIGNAL =   1; EST_HUMAN HIT: BF329846.1, EVALUE 1.40e-02; SWISSPROT HIT: P39717, EVALUE 4.00e-01; NT HIT: M17440.1, EVALUE 9.10e+00
ggttccctttatcagagcccacactggaagaaatggagacagccaccgttacagccagagggtcctggcgcagaaaaacgtgccaactcgaggaagagaagggagacacaggacctgtcttccttcggctccccccagcttccttgcacctgttcccaatttttcttttcttcctgttgatcttgtcaggtggcttattaaaatgcacgtcgggaacagtaggctgactcctgttctctgcatg

SEQ ID NO: 32055 - DNA, 76 bp, Homo sapiens
  MAP TO AF165147.1; EXPRESSED IN LUNG, SIGNAL = 1.7; NT HIT: AL163247.2, EVALUE 1.00e-35
agcctcattcctgtataatcctctgttcctgctgtagctccttcttcagcatctcttgggctgggtgaataaaaaa

SEQ ID NO: 32056 - DNA, 91 bp, Homo sapiens
  MAP TO AL109657.7; EXPRESSED IN BT474, SIGNAL = 1.5; EXPRESSED IN LUNG, SIGNAL = 3.1; EST_HUMAN HIT: BF509718.1, EVALUE 1.00e-34; SWISSPROT HIT: P94461, EVALUE 2.10e-01
ccagtttcatgacggcaaagagcacaggtatgtgggcatctggactcgtttgagcagccatgtcgtacaatcttctggccaagtgaatgtc

SEQ ID NO: 32057 - DNA, 76 bp, Homo sapiens
  MAP TO AC007538.5; EXPRESSED IN LUNG, SIGNAL = 0.99; EXPRESSED IN BT474, SIGNAL = 0.97; EST_HUMAN HIT: BF130357.1, EVALUE 8.90e-01; NT HIT: Y12564.1, EVALUE 1.30e-01
ccagtggaagattgccttagggaagagtaggaacaggtcctccactgtaattacagataaacaaatgaaaaacatc

SEQ ID NO: 32058 - DNA, 264 bp, Homo sapiens
  MAP TO AC007038.3; EXPRESSED IN LUNG, SIGNAL = 0.98; EST_HUMAN HIT: BF530735.1, EVALUE 0.00e+00; NT HIT: AF091342.1, EVALUE 1.40e-01; SWISSPROT HIT: P17801, EVALUE 1.10e+00
agtgagaacttccccactgaagaaggagaaaaggaggaggacacagaagcacaaggtgctactgcacacagtccactctctgcccaactctctgaccctgatgacttcacaggcctcgagacatccagcctcctacagcatggagacactgtccttcatatcagtgaggaaaatggcatggagaacccgctactatctagtcagttcacctttactcccactgagctggggaaaacggatgcagtattagatgagtctcatgtt

SEQ ID NO: 32059 - DNA, 97 bp, Homo sapiens
  MAP TO AC007773.1; EXPRESSED IN LUNG, SIGNAL = 1.4; EST_HUMAN HIT: AW847089.1, EVALUE 6.00e-48; NT HIT: gi11426010, EVALUE 6.00e-48
agagaacagcacagtcttccagataccttgtcaatagcaacttctaatgagccaagaatttccagtgatacagctgatggaaaatgtgtccaggaag

SEQ ID NO: 32060 - DNA, 100 bp, Homo sapiens
  MAP TO AC000052.8; EXPRESSED IN LUNG, SIGNAL = 0.61; EXPRESSED IN BONE MARROW, SIGNAL = 0.64; NT HIT: AF068847.1, EVALUE 1.80e-01; SWISSPROT HIT: P79621, EVALUE 7.00e+00; EST_HUMAN HIT: AV732194.1, EVALUE 1.00e-28
ctgctcctcattgatgtagggctaatgtcgaaactcagaagcctgcagggccagacaggtaacttaatggaggggatggggccggatgtgcagttaatga

SEQ ID NO: 32061 - DNA, 102 bp, Homo sapiens
  MAP TO AC007435.12; EXPRESSED IN LUNG, SIGNAL = 0.92; EXPRESSED IN BT474, SIGNAL = 0.66; EST_HUMAN HIT: BF343921.1, EVALUE 8.10e-02; NT HIT: AB035477.1, EVALUE 3.40e+00; SWISSPROT HIT: P34641, EVALUE 9.10e+00
gattgtgcccacgtggtcaaagttgagtctactttccgtattgctgatgcctgtggccatagccatggaaggacgtggaagaagccgtggtcctgcccctgt

SEQ ID NO: 32062 - DNA, 1673 bp, Homo sapiens
  MAP TO AL035660.11; EXPRESSED IN LUNG, SIGNAL = 1.3; EST_HUMAN HIT: BF678746.1, EVALUE 0.00e+00; NT HIT: Z47556.1, EVALUE 0.00e+00; SWISSPROT HIT: Q02383, EVALUE 0.00e+00
tgtgtcaaatgatcatcttgggcaacctcatgctcagtaattacaatattatgtgactcactggattcctgtttgtatctgcctttttgttcatgactgagtaggtcttgtttgctatctgcagattgaccagactttccttttgcattttggccagaccattgatcttgattaggatttggtgtctggatttgagacttgccttctactagcttttcaatttggaaagaaatactgctttgggatacatctttctgcgtgctctttcctccatagttgagtcgtctttcttctgtacttgaagattggtatgacattttattttccttatggccatgctcttgatcttgactaggaattgttacctggttttgagacttgccatgtattttctcttcagtttggatagaaatactgcctttggatacacctttctgtacatccttttctccactgttgagacgtctttcttctgtactcgaagattggtatgatattttattttccttatggccatactcttgagcttgactaggaattcttacctggttttgagacttgccatgtatttgctcttcagtttggatcgaaatactgcctttggatacacctttctggatgcccttttctccacagttgagatgtctttcttctgtacttgaagattggtatgatattttattttccttatggccatgctcttgatcttgactatgaattgttacctggttttgagacttgccatgtattttctcttcagtttggatagaaatgctgcctttggatacatctttctgtacactcttttctccatggtgaagttgtctttcttctgtacgtgaagacgggtatgatattttatgtgccttccggccatgctcttgatcttgactgagattttttgtctggtgttgattcttgttatatactaggagctcatcttgggtagtaaaaatgtctttgggtccatgttggagtctgtcttgatgtgcaggatggagtgaagtttgtagtttacttgaatgttcctctctcacgtcaaccacattttggtaatgccctttattttgatgagaatttttagtctcacgttgttgtttgttaactactagttcttcagtttggagaacataactgctttgggatccaccttgtgttctacctttttgtgcaccagaggctgaagcttgttctttacttagtccatgaacccatagccttttttctgtgtttgaacattgactggataatccctttccagatgggctattcccctgatcttgagaaggattttgtgtcccatgatgagcttggcctcctttatgatgtataactatcatgtgaaaatgaccttttgatttatcatggtctctgccttcttgtttataattgagcagttgttgacttccacctaggtgttgttttgattttgtcgccttatgtagggcattcaaatcatattgctgactttttcgggtccagtcatgatcattgatgtctacatgatatgtgtgttgaatagaaaaactgcctttggatttagtatgttgttggtctttttgtccaaaatagtgctggcccttttgtccatgtggaaattgggaagatccgcttggcaattggccttttgatccacctggtaattgataatagaaatgtatgcattcattatc

SEQ ID NO: 32063 - DNA, 165 bp, Homo sapiens
  MAP TO AC010142.2; EXPRESSED IN LUNG, SIGNAL = 1.2; EXPRESSED IN BT474, SIGNAL = 1.2; EST_HUMAN HIT: AW887541.1, EVALUE 1.00e-04; SWISSPROT HIT: P40102, EVALUE 2.20e+00; NT HIT: AF036405.1, EVALUE 4.00e-04
ctttgactgaaacacttctacctcttgatagccattgctttcgtcttcgggatcatactggtaaagccatgtattatctcctgttacaagtccttgaatacatgtttcagcatcttcatcccattgtttgacatttccaatgaaaactctgctcttatctgcaga

SEQ ID NO: 32064 - DNA, 165 bp, Homo sapiens
  MAP TO AC007163.2; EXPRESSED IN LUNG, SIGNAL = 3.1; NT HIT: AF233581.1, EVALUE 3.00e-11; EST_HUMAN HIT: R41558.1, EVALUE 8.80e+00; SWISSPROT HIT: Q06278, EVALUE 5.00e-17
ggtttgtgatgatggcagcaaggagacattgaactcctctgggacatcagtgatggttggaattttgtactcatctgggctccgagagtacaggacaccttctggggaatatttcagttcttcagtggtataaagccccattccctgaataaacaaaccttcaat

SEQ ID NO: 32065 - DNA, 145 bp, Homo sapiens
  MAP TO AC008015.4; EXPRESSED IN LUNG, SIGNAL =   5; EXPRESSED IN HELA, SIGNAL = 1.1; SWISSPROT HIT: O35984, EVALUE 8.80e+00; EST_HUMAN HIT: BF335227.1, EVALUE 9.00e-15; NT HIT: AB049094.1, EVALUE 5.10e+00
atactttgccagcctcctcactcctattggaaaaccagcagtgcagatcatgtaattcaggactagttctggacccccagtgtttgggagcaatgcggggtcgggggagctcaggttcatccactgcacgtccagtattgccagg

SEQ ID NO: 32066 - DNA, 89 bp, Homo sapiens
  MAP TO AP000094.1; EXPRESSED IN LUNG, SIGNAL = 1.1; EXPRESSED IN PLACENTA, SIGNAL = 0.83; EXPRESSED IN BONE MARROW, SIGNAL = 0.63; NT HIT: AL161593.2, EVALUE 1.00e-02; EST_HUMAN HIT: R98747.1, EVALUE 1.90e-01
atccatgccagtgattgacttttcccctaaatacctgcagcctgaacgtcctaaagatgccttggtctccccaaggatgctgattctga

SEQ ID NO: 32067 - DNA, 192 bp, Homo sapiens
  MAP TO AC008176.1; EXPRESSED IN LUNG, SIGNAL = 4.8; NT HIT: AB020020.1, EVALUE 2.40e-02; EST_HUMAN HIT: T09068.1, EVALUE 3.00e-42; SWISSPROT HIT: O00852, EVALUE 2.80e+00
aaccagagctatctccagctctttgcagacacttgactcagtcttctctaggatttcatcaatattatccattgcgtcttctgaaatcagtgatccttccacagataggtcaaaaacctcatttgcaaaaataaacacatgaaatatctcatttaattcaatcagcattcatcgtgccttaatacctgaagc

SEQ ID NO: 32068 - DNA, 167 bp, Homo sapiens
  MAP TO AC010876.1; EXPRESSED IN HELA, SIGNAL = 0.95; EXPRESSED IN LUNG, SIGNAL = 1.7; SWISSPROT HIT: P20662, EVALUE 1.30e+00; EST_HUMAN HIT: AW580584.1, EVALUE 1.00e-84; NT HIT: gi11545921, EVALUE 2.00e-89
ataatggaaaagaaaatgaaaaccaagagaaatattgccaagcattacaagaataacccatcactaataactttcctttgcaaaaactgcagtgtgctagcctgttctggggaagatatccatgtaattgagaaaatgcatcacgtcaatatgaccccagaattcaa

SEQ ID NO: 32069 - DNA, 101 bp, Homo sapiens
  MAP TO AC008278.1; EXPRESSED IN PLACENTA, SIGNAL = 0.65; EXPRESSED IN BONE MARROW, SIGNAL = 2.1; EXPRESSED IN LUNG, SIGNAL = 0.59; SWISSPROT HIT: Q28141, EVALUE 7.00e+00
caaccaacatcatggcttcctcctcttcctgcttggcctattccacgccagaagcctgcagtgggatggaggatggggtcagtctcttttctgtactcgcc

SEQ ID NO: 32070 - DNA, 183 bp, Homo sapiens
  MAP TO AC011334.1; EXPRESSED IN HBL100, SIGNAL = 0.95; EXPRESSED IN HELA, SIGNAL = 1.1; EXPRESSED IN LUNG, SIGNAL = 9.3; NT HIT: gi7662173, EVALUE 2.30e-02; EST_HUMAN HIT: AW291062.1, EVALUE 2.50e+00; SWISSPROT HIT: P20208, EVALUE 7.40e-01
taggtatgactttgcccctaaaggacatagacaccagggatgttgctaaatatcctccaatgcacaacacaaccctcacgacaaagagttatctggccaaaaatatcaatagggctgaggttgggaatcccaaccttacaggttgcctttttggcatttatgcaaatgaagtcccagagaaga

SEQ ID NO: 32071 - DNA, 136 bp, Homo sapiens
  MAP TO AL035696.14; EXPRESSED IN BONE MARROW, SIGNAL = 8.5; EXPRESSED IN LUNG, SIGNAL = 0.64; SWISSPROT HIT: P56116, EVALUE 6.80e+00; EST_HUMAN HIT: AA412077.1, EVALUE 6.00e-21; NT HIT: D14547.1, EVALUE 2.00e-23
acaatgtgaagatgatgaggatgaagaccttcatgatgatccacttccacttcatgaatagtaaatgtattttttctcttccttatgattttcttagtaacgttttcttttctccagcttactttttgctaagaat

SEQ ID NO: 32072 - DNA, 85 bp, Homo sapiens
  MAP TO AC011308.2; EXPRESSED IN LUNG, SIGNAL = 0.95; SWISSPROT HIT: P43304, EVALUE 2.00e-09; NT HIT: AF311325.1, EVALUE 7.00e-41; EST_HUMAN HIT: BE816002.1, EVALUE 2.60e-01
agggaccagcagcagaagcactaaattgatccatggtggtgtgagatatctgcagaaggccatcatgaagttggatattgagcag

SEQ ID NO: 32073 - DNA, 218 bp, Homo sapiens
  MAP TO AC007218.2; EXPRESSED IN LUNG, SIGNAL = 5.6; EST_HUMAN HIT: BE703354.1, EVALUE 5.00e-05; SWISSPROT HIT: P35436, EVALUE 3.00e-32; NT HIT: gi11431044, EVALUE 1.00e-102
catcacccacaaactgaagcaaggccaggtcgatctgcctcttccaaggagagcctttctgaagggcaattccataaccggtggtggcaaagatgtacccactcccgatggtcaccagcttgcagccttcatccctcccagccttgtaattcaagactgcggcatcgtagatgaaagcgtccagcttcctgaaatgacaagaaaccagggggtcatag

SEQ ID NO: 32074 - DNA, 297 bp, Homo sapiens
  MAP TO AL009182.12; EXPRESSED IN LUNG, SIGNAL = 1.2; EXPRESSED IN HELA, SIGNAL = 1.4; NT HIT: U61380.1, EVALUE 3.90e-02; EST_HUMAN HIT: AA993897.1, EVALUE 7.30e-01; SWISSPROT HIT: P05882, EVALUE 6.00e-01
ctcccagggtgacagtcgagccctgttttgaagctactactcgaacagtcctcctgctgtccaaacaatccaagtaggggtcccattccaggtttctcttgctgagagattgggcccgggtagaggacatgcccaaggattctcccatgcgatcctggcagtaggacttgaacttccactgcacaactgcaggctgatgggaggatgttgagaagtggcagcgaagcacagtgggctggaagagcatggccaccttcttcttgtcgggcactgtgacctgaaggccttcgaccatgg

SEQ ID NO: 32075 - DNA, 83 bp, Homo sapiens
  MAP TO AC009312.1; EXPRESSED IN LUNG, SIGNAL =   1; NT HIT: gi7661529, EVALUE 5.70e-01; EST_HUMAN HIT: AW975815.1, EVALUE 1.10e-02
ctcatgggcttgccgtgaatatcaaatacagtgtctggcacaaggtagccactcagtttacattggtgactgtaaagagtgat

SEQ ID NO: 32076 - DNA, 360 bp, Homo sapiens
  MAP TO AC009497.2; EXPRESSED IN LUNG, SIGNAL =  16; EXPRESSED IN BT474, SIGNAL = 1.2; NT HIT: U58109.1, EVALUE 1.00e-116; EST_HUMAN HIT: BE185376.1, EVALUE 1.00e-100; SWISSPROT HIT: gi127998, EVALUE 2.00e-25
tacaaatacaaagaaggttaccgtaagcaactgggccaccacatgggtttccgcaccctacaagatgaccccaagtcagtatgggctatacatgctgccaagatccagagtgacagagaatataagaaagcttatgagaagtctaaaggaattcacaacacaccgttggacatgatgtcaattgttcaagccaagaaatgccaggtcctggttagcgacattgattatcgcaattatctgcaccagtggacgtgtctgccagatcagaacgatgtgatccaggccaagaaagcctacgacctgcagagcgatgtgcgtatattatcgccagaccccggggagatgtgtatttgtgtgttt

SEQ ID NO: 32077 - DNA, 246 bp, Homo sapiens
  MAP TO AC009954.1; EXPRESSED IN LUNG, SIGNAL = 2.5; EST_HUMAN HIT: AA663281.1, EVALUE 3.80e-02; NT HIT: gi6753229, EVALUE 3.20e-02; SWISSPROT HIT: P47884, EVALUE 8.00e-11
ttctcataattttagccacagcccagttggctggaccaatggatggagagaatcactcagtggtatctgagtttttgtttctgggactcactcattcatgggagatccagctcctcctcctagtgttttcctctgtgctctatgtggcaagcattactggaaacatcctcattgtgttttctgtgaccactgaccctcacttacacttccccatgtactttctactggccagtctctccttcattg

SEQ ID NO: 32078 - DNA, 78 bp, Homo sapiens
  MAP TO AF165176.1; EXPRESSED IN LUNG, SIGNAL = 3.2; EST_HUMAN HIT: BE867135.1, EVALUE 2.30e-01; NT HIT: AL163283.2, EVALUE 2.00e-34
gtcccccaacatgaacgcatgaaccaacaacatgtacccttttatatcaactttacaccccagccaagagaagcttca

SEQ ID NO: 32079 - DNA, 186 bp, Homo sapiens
  MAP TO AC007778.1; EXPRESSED IN LUNG, SIGNAL = 0.95; SWISSPROT HIT: Q18115, EVALUE 1.30e+00; NT HIT: gi11465652, EVALUE 1.10e-01
gcctctcacatcaaatgcaaaattcaacaaagaacctaaatatggtggctgtatttatttgttttttgggggggttagtcatgcatgagttccacttcctaatagcatctccatttcctttgggaaacttactcttcctccctgtaagtcatcttcgtaagccaataagcaagatgctcattcctc

SEQ ID NO: 32080 - DNA, 220 bp, Homo sapiens
  MAP TO AC010088.2; EXPRESSED IN LUNG, SIGNAL = 2.5; SWISSPROT HIT: P46987, EVALUE 2.10e+00; EST_HUMAN HIT: AI984806.1, EVALUE 9.00e-06; NT HIT: AF016109.1, EVALUE 5.20e-01
atcaaaatgagattttgacaaatccttggtataagcatcttcatgatttgactgtgttatcttaataatatccacaggcgtgactgtaacgtatttctggcccatcacataggttacatgactgttctctcccacctgtacatgattttctttggtaactgtatcatttctaaacactgtatccaaatgatatgactctcttgcctgggccctgtcaaga

SEQ ID NO: 32081 - DNA, 122 bp, Homo sapiens
  MAP TO AC009966.2; EXPRESSED IN LUNG, SIGNAL = 1.9; EST_HUMAN HIT: AI914702.1, EVALUE 1.60e+00; NT HIT: AF021344.1, EVALUE 1.10e+00
agatgtgtggagctgctgttgatgtggttgtggaagtgatgctacgtttacgggatgttttctctgagcctacagggttggaaatgatccattacagctatttgtggacactggacatgtga

SEQ ID NO: 32082 - DNA, 201 bp, Homo sapiens
  MAP TO AJ239320.2; EXPRESSED IN BT474, SIGNAL = 1.4; EXPRESSED IN HELA, SIGNAL = 0.94; EXPRESSED IN LUNG, SIGNAL = 2.7; SWISSPROT HIT: P18688, EVALUE 4.00e-27; NT HIT: gi11419831, EVALUE 2.00e-86; EST_HUMAN HIT: AA247817.1, EVALUE 2.00e-43
ctgctccaattcataggcctttgccttatcctcatcccggtctgcattcttccgataggccaggcccaaaccccacacagccaagatgctgtacacattatctcggacccaagcatctttctgatcatagctggctggaagcaagccagtcactggattctgcaaggtcaagaaaaagagggcaggaaggtaaccataggt

SEQ ID NO: 32083 - DNA, 249 bp, Homo sapiens
  MAP TO AC010127.2; EXPRESSED IN LUNG, SIGNAL =  12; EST_HUMAN HIT: BF347024.1, EVALUE 1.00e-21; NT HIT: S71446.1, EVALUE 0.00e+00; SWISSPROT HIT: P04774, EVALUE 2.00e-42
gcaattccatccatcatgaatgtgcttctggtttgtcttatattctggctaattttcagcatcatgggcgtaaatttgtttgctggcaaattctaccactgtattaacaccacaactggtgacaggtttgacatcgaagacgtgaataatcatactgattgcctaaaactaatagaaagaaatgagactgctcgatggaaaaatgtgaaagtaaactttgataatgtaggatttgggtatctctctttg

SEQ ID NO: 32084 - DNA, 175 bp, Homo sapiens
  MAP TO AC009705.2; EXPRESSED IN LUNG, SIGNAL = 5.8; EST_HUMAN HIT: BF380870.1, EVALUE 6.00e-78; SWISSPROT HIT: Q03661, EVALUE 2.90e+00
  unsure 21
  unsure 141
gcaaatactgaatagtaggcnaaatgaaagcaagccacaggactgggaaacaaacagagaagcagagttagaagttgtcaactggaagtcaccaagaaaagacgaacaaagatatcataaaaagaggaagttaaatattgnagcccctgaattcaaagccatcagatgtcagcag

SEQ ID NO: 32085 - DNA, 217 bp, Homo sapiens
  MAP TO AC009405.2; EXPRESSED IN LUNG, SIGNAL = 1.7; SWISSPROT HIT: Q18411, EVALUE 1.80e-01; NT HIT: AF082501.1, EVALUE 3.30e-02; EST_HUMAN HIT: BE265580.1, EVALUE 1.30e-01
atctcttcttcatttggtcaatttaccctttaaggctcaaagccacctcctctgtggagcatttcttgattccttgcaacatggtcctcatcctctcctgtatttgcacacaccacagctgtcatccttatcagactctacagagggctctcacgaggtgttgcctccacttctggaccatagctccttacatgttgtgttgccacagcacccagga

SEQ ID NO: 32086 - DNA, 77 bp, Homo sapiens
  MAP TO AC009476.2; EXPRESSED IN BONE MARROW, SIGNAL = 0.93; EXPRESSED IN LUNG, SIGNAL = 1.5; EST_HUMAN HIT: AV722942.1, EVALUE 6.00e-05; NT HIT: AL163267.2, EVALUE 1.00e-02
cagttatctgtgtatcccttgcccggtcaagctgatacataaaattaaccatccaaaggtggttctgaagaacattg

SEQ ID NO: 32087 - DNA, 103 bp, Homo sapiens
  MAP TO AC009971.1; EXPRESSED IN LUNG, SIGNAL = 4.4; NT HIT: AB052101.1, EVALUE 3.40e+00; EST_HUMAN HIT: BE154623.1, EVALUE 1.00e-03; SWISSPROT HIT: Q11052, EVALUE 9.10e+00
ggctaaggatgccacacagcaaagatggcggcttacctctccctctgggaactccaaatcagatgagtgtaatgctgctactggtgactggctggagctccaa

SEQ ID NO: 32088 - DNA, 186 bp, Homo sapiens; identical to SEQ ID NO: 21793
  MAP TO AC010740.2; EXPRESSED IN LUNG, SIGNAL = 4.6; NT HIT: AF176832.1, EVALUE 2.00e-98; EST_HUMAN HIT: AA169522.1, EVALUE 6.50e-01; SWISSPROT HIT: P98157, EVALUE 9.00e-16

SEQ ID NO: 32089 - DNA, 149 bp, Homo sapiens
  MAP TO AL020997.1; EXPRESSED IN LUNG, SIGNAL = 2.2; EST_HUMAN HIT: BE548762.1, EVALUE 3.00e-70; NT HIT: AF064755.1, EVALUE 8.00e-79; SWISSPROT HIT: Q28147, EVALUE 3.00e-20
agttcaacactgcccacaacaagcggatttctacccttaccattgaggagggaaatctggacattcaaagaccaaagaggaagaggaagaactcacgggtgacattcagtgaggatgatgagatcatcaacccaggtgaggtatcttgc

SEQ ID NO: 32090 - DNA, 218 bp, Homo sapiens
  MAP TO AC010908.1; EXPRESSED IN LUNG, SIGNAL = 1.2; EST_HUMAN HIT: AA126085.1, EVALUE 1.30e-01; NT HIT: gi9625955, EVALUE 5.20e-01; SWISSPROT HIT: O13415, EVALUE 4.70e+00
acctcatctcttcttcttcttcttcttcttcttcgtttttttaattcttatggataactctgatgcaagacttaagcagtgcctcaaaattaagagcaaagaaatagaagagaagatccacgtaactcttcatttgtctgtaaaagttaaaatcctactcaaacacagctaaataagattcattcaaaaaataatatacatttacatttgagttttaa

SEQ ID NO: 32091 - DNA, 114 bp, Homo sapiens
  MAP TO AL035608.11; EXPRESSED IN LUNG, SIGNAL = 1.8; NT HIT: D10014.1, EVALUE 1.40e-02; EST_HUMAN HIT: AA652989.1, EVALUE 1.60e-02
aaatgatcaggcttgttttggaaactactctaaaatatcagctgaaggagcttggaaaagtggtccatgcctaaatgatgccagttagaagacacaatgaaaatctctatcccc

SEQ ID NO: 32092 - DNA, 213 bp, Homo sapiens
  MAP TO AP000359.1; EXPRESSED IN LUNG, SIGNAL = 2.1; EST_HUMAN HIT: BF246708.1, EVALUE 5.00e-05; NT HIT: gi10946611, EVALUE 8.00e-06; SWISSPROT HIT: O04379, EVALUE 2.70e-02
ggaatgtcatgtttgctggttttcaaggtgatttgtatcctgcccaatgatgacaaacgtagatatgacagcataaaaagatacctatgtaccaaatgcccaattccaagccagtgtgtggtgaaaaagaccttagaaaaagtccaggcaaggaccatcgtcaccaagattgcccagcagatgaattgcaagatgggaggagccctctggaag

SEQ ID NO: 32093 - DNA, 351 bp, Homo sapiens
  MAP TO AL049548.6; EXPRESSED IN BONE MARROW, SIGNAL =   1; EXPRESSED IN LUNG, SIGNAL = 0.65; SWISSPROT HIT: P11532, EVALUE 5.50e-02; EST_HUMAN HIT: AW948453.1, EVALUE 1.40e-02; NT HIT: AJ276417.1, EVALUE 4.70e-02
cactttagagtctgtgattagccaatggaatgactatgtagagaggaaaaaccagttggagcagtggatggaatcagtggatcaaaaaatagaacatcccttacaaccacagccaggtctgaaagagaagttcgtcctgcttgaccacctccagtccatcctgtctgaggcagaagatcacacgagagcccttcaccgtctaattgcgaagtccagggagctctacgaaaagacagaggatgagtctttcaaggacacagctcaagaggagctgaaaacacagtttaatgatataatgactgttgccaaggttagtgctttatattgaaagtagatgctttataatacatt

SEQ ID NO: 32094 - DNA, 152 bp, Homo sapiens
  MAP TO AP000547.1; EXPRESSED IN LUNG, SIGNAL = 1.5; EST_HUMAN HIT: BE766554.1, EVALUE 5.10e-01; NT HIT: U19251.1, EVALUE 3.50e-01; SWISSPROT HIT: Q03385, EVALUE 9.00e-06
ctctcagtctcaccgagccgcttcatggtcccaaaccaggacccaaagtgctgcttgggctcaaggttgtaattatttgcagccaactggagcagcggacctccttgcttactttgaattcctgggtccagagggaaaaactgggtggtgac

SEQ ID NO: 32095 - DNA, 84 bp, Homo sapiens
  MAP TO AL035407.15; EXPRESSED IN BONE MARROW, SIGNAL = 1.1; EXPRESSED IN LUNG, SIGNAL =   1; NT HIT: gi11427248, EVALUE 1.70e-01; EST_HUMAN HIT: AI222505.1, EVALUE 2.60e-01
atgattaaatgtaatatactgcatgccaatgattttgagcataagatgcaatcagtgtatgataagctaccgatcaccccaagg

SEQ ID NO: 32096 - DNA, 171 bp, Homo sapiens
  MAP TO AL050335.17; EXPRESSED IN LUNG, SIGNAL = 1.8; NT HIT: U67579.1, EVALUE 3.40e-01; EST_HUMAN HIT: AL042479.2, EVALUE 2.30e+00
agcagtgaattaaaattgcctgagaaatcaagcaggtggtaatcgcttctctgtcagataagttatccgaggacagacttttttctgaggcggttacgctgtcttcctcagctccatgatgcagaaacccatagagattaaaatcagctgcatcgtggatacagttacacc

SEQ ID NO: 32097 - DNA, 108 bp, Homo sapiens
  MAP TO AC007679.2; EXPRESSED IN PLACENTA, SIGNAL = 0.68; EXPRESSED IN LUNG, SIGNAL = 0.63; SWISSPROT HIT: P06935, EVALUE 1.80e+00; EST_HUMAN HIT: AA593971.1, EVALUE 5.40e+00; NT HIT: AF212996.1, EVALUE 3.70e+00
gacatcctcacaggagaagaaggtcttcttggaagcctgggtacagagcaggtggcatgaccggatgctggaagagtaggacatggaaagacagatcaaatcacaaag

SEQ ID NO: 32098 - DNA, 178 bp, Homo sapiens
  MAP TO AP000512.1; EXPRESSED IN LUNG, SIGNAL = 1.4; NT HIT: gi9632416, EVALUE 4.10e-01; SWISSPROT HIT: P40458, EVALUE 8.80e+00; EST_HUMAN HIT: AW449328.1, EVALUE 6.00e-96
cagcaacaagcatctctggcagtctatcatttcccttcaactgaaatcagatcttcttaaagaaatgcttggctctcagactgggaacggaaatgtacaagatgtgcttcgatatctggtcaaatcagaaactcaaaaagctatcaaagtctctttggactgtgtcagaaagaggtga

SEQ ID NO: 32099 - DNA, 156 bp, Homo sapiens
  MAP TO AC007867.1; EXPRESSED IN LUNG, SIGNAL = 7.7; EST_HUMAN HIT: AI979276.1, EVALUE 2.00e-80; SWISSPROT HIT: P10587, EVALUE 2.60e-01; NT HIT: AJ011616.1, EVALUE 7.70e-02
atcatagcagaacttcagacaaccatttcctctctgaaagaagagaacagccagcagcagcttgctgcagaaaggcggctccaggatgttagacaaaagtttgaagatgagaagaagcagctgattagagataatgaccaagcaatcaaggtaatc

SEQ ID NO: 32100 - DNA, 552 bp, Homo sapiens
  MAP TO AC010826.2; EXPRESSED IN LUNG, SIGNAL =   1; EXPRESSED IN HELA, SIGNAL = 0.95; EXPRESSED IN HBL100, SIGNAL = 0.99; EST_HUMAN HIT: AV711714.1, EVALUE 0.00e+00; SWISSPROT HIT: P22793, EVALUE 1.00e-06; NT HIT: U12859.1, EVALUE 8.80e-02
aattcgaagtctgtctttctctacctgtaagcgttccttttcaatctgcagcttctcagattcaaacttcaaaaactgcagcctatccttttccagttgcaagcgttctcgctcaagttttaacttctctgtttctatgtcctgtggttgaagcatggatttttctccttgaccaagttcattttccaaggacggtttctctgaattgactatctgtaacctcaacttttctctttcaatctgcagccgctccttctctagctgaagccgctcatgttccatgtctaaatgccgcagcctctctttctcgatttgtaggcgttccttttctacctgcagcctttcggcctcgatatccagtcgtcgtttttccaactctagtttctgtttctcaatatttacgagcaaatgaggctcatcatatgcagatctagatggtgttgagttaagggtaaaaaactcatcaatgtgggggaaatcgggaagttcattttctctcctggaatctggtatgacggatgacaacatttcttcctcctcctcaatttcaaa

SEQ ID NO: 32101 - DNA, 145 bp, Homo sapiens
  MAP TO AC011294.1; EXPRESSED IN LUNG, SIGNAL = 1.1; NT HIT: AL115397.1, EVALUE 2.80e-01; EST_HUMAN HIT: AA307073.1, EVALUE 8.40e-02; SWISSPROT HIT: P17388, EVALUE 6.70e+00
ccactggctgggatgtggtctaagagaagaaacgtgtgccttctgctggatcttttggaactcctccaagataaaaggaattctgacaccacattcagcagtatcaacttcagggaggtactacagaaacactcacggatctcaa

SEQ ID NO: 32102 - DNA, 102 bp, Homo sapiens
  MAP TO AC005481.2; EXPRESSED IN LUNG, SIGNAL = 0.96; NT HIT: AL163204.2, EVALUE 7.30e-01; EST_HUMAN HIT: AW188265.1, EVALUE 7.00e-51; SWISSPROT HIT: P16112, EVALUE 5.30e+00
acggaaatggacgtggcagtgaaactgttctgctcctgttcgtctcctccgtgtccgtcatcacagccacagtcacctctgagagaggcagtgatatcgatt

SEQ ID NO: 32103 - DNA, 229 bp, Homo sapiens
  MAP TO AC007735.2; EXPRESSED IN LUNG, SIGNAL = 0.89; SWISSPROT HIT: O05953, EVALUE 5.10e+00; EST_HUMAN HIT: W01834.1, EVALUE 3.20e+00; NT HIT: AF129074.1, EVALUE 4.60e-01
agttaatggtgtagtaatttgtgccatgactaacaaggctgaattacttgtcaacactgtggcaggtatctgtttcctagtaactcttcatgggtcagatattgaggtcagttctgaagaacttgaggaaatgagagtaagtaaggagagaaatgctgggtcggaccttacatttaaaattttttttcatggagaaaaacatgatctttgtgaagatggaagcaactgt

SEQ ID NO: 32104 - DNA, 138 bp, Homo sapiens
  MAP TO AC009311.1; EXPRESSED IN BONE MARROW, SIGNAL =   1; EXPRESSED IN LUNG, SIGNAL = 4.6; EST_HUMAN HIT: AW188198.1, EVALUE 3.00e-70; NT HIT: gi11431062, EVALUE 3.00e-72; SWISSPROT HIT: P98066, EVALUE 8.00e-24
ggatggctaagggcagagttggataccccattgtgaagccagggcccaactgtggatttggaaaaactggcattattgattatggaatccgtctcaataggagtgaaagatgggatgcctattgctacaacccacacg

SEQ ID NO: 32105 - DNA, 472 bp, Homo sapiens
  MAP TO AL049794.13; EXPRESSED IN LUNG, SIGNAL = 2.8; EST_HUMAN HIT: AW500705.1, EVALUE 1.90e-02; NT HIT: L03382.1, EVALUE 7.50e-02; SWISSPROT HIT: P46889, EVALUE 3.70e+00
tgatgccattcaggacctcggcacctgccactcgtctgctggaggtgttctttctccagatgtccgcatctcccactccttctctcttgagtttttgttcaaatgtcgcttcttcaatgtgggctttctcagttattccattgaaaatagtgccccctattgctggtgtttcctgtcccccctctatttttcctcgtttacagcacttatcaaaatttggcctcttaggtattttccttacttactggtttatagtctgagtccctctgtgagcactgggaccatttctgtcttgttcttggattatgctccttgtgcttggcgtgtaccaagtgttcaggtgttgaatgaaaaatgggaacccgtactgttaaaatccctaaattttcaaatattggcaaggattttagcggaaacaaacaaccaaacaaggaaaccatgcaggccaaacagatactctctctgggtatga

SEQ ID NO: 32106 - DNA, 224 bp, Homo sapiens
  MAP TO AC005674.9; EXPRESSED IN LUNG, SIGNAL = 0.58; EST_HUMAN HIT: BE122658.1, EVALUE 1.00e-123; SWISSPROT HIT: P31334, EVALUE 1.70e+00; NT HIT: gi4826753, EVALUE 1.00e-123
ccaggaaggagaaaacagagatgtcccccagggagcacatcaagggcaaagagaccaccccctctagcctagcagtgacccagaccatggccaccaaagctcccgagtgtgtggaggacccagatatggcaaaccagaggaagactgccctggagttctgtggagagacttggagctctctctgcacattcttcctcagcatagtgcaggacacgtcatgctaa

SEQ ID NO: 32107 - DNA, 108 bp, Homo sapiens
  MAP TO AL109653.9; EXPRESSED IN LUNG, SIGNAL = 2.1; EST_HUMAN HIT: AI277899.1, EVALUE 2.40e-01; SWISSPROT HIT: Q08303, EVALUE 1.80e+00
tattcagctttgggatgaggggacaaggggaagaggtcaccaaaggctttccagaagtggtgacacctcaggtgagtcttggaagttgagtgagagttcccatcaggg

SEQ ID NO: 32108 - DNA, 498 bp, Homo sapiens; identical to SEQ ID NO: 15599
  MAP TO AC007367.3; EXPRESSED IN PLACENTA, SIGNAL = 0.74; EXPRESSED IN BT474, SIGNAL = 2.7; EXPRESSED IN LUNG, SIGNAL = 0.64; EXPRESSED IN BONE MARROW, SIGNAL = 0.7; EXPRESSED IN HBL100, SIGNAL = 0.84; NT HIT: AL161586.2, EVALUE 4.90e+00; EST_HUMAN HIT: AI271995.1, EVALUE 2.00e-02; SWISSPROT HIT: Q95102, EVALUE 5.20e+00

SEQ ID NO: 32109 - DNA, 122 bp, Homo sapiens
  MAP TO AL035451.5; EXPRESSED IN LUNG, SIGNAL = 0.94; EXPRESSED IN PLACENTA, SIGNAL =   1; EST_HUMAN HIT: BF084347.1, EVALUE 6.20e+00; SWISSPROT HIT: P52340, EVALUE 2.30e+00
aaaatgctttaaaatgtattttgatacgctttttactgcatttctcttgcattttaccataatcattagcaacattgtacatgtttcattactttcttttatagatcatccagttgtattac

SEQ ID NO: 32110 - DNA, 250 bp, Homo sapiens
  MAP TO AC009594.2; EXPRESSED IN LUNG, SIGNAL = 3.3; EST_HUMAN HIT: AA621924.1, EVALUE 3.90e-02; SWISSPROT HIT: Q95155, EVALUE 1.00e-20; NT HIT: AJ251154.1, EVALUE 1.00e-08
  unsure 227
actgcctctttcacatccttgtttctaagactgtagattaaaggattcatcatgggagtcatcaccccatagaacatggatataattttgtcggtagcatccaagtcatctgaattaagtgtctctttagacttgggcttcatatacatgaagaggatggtcccatagaatattatgaccacagtcagatgggctgagcaggtagagaaagctttgcttctcccctncagaggagtgaatcttgaggatg

SEQ ID NO: 32111 - DNA, 120 bp, Homo sapiens
  MAP TO AC009613.2; EXPRESSED IN LUNG, SIGNAL = 1.6; NT HIT: AB017105.1, EVALUE 5.70e-02; EST_HUMAN HIT: N48745.1, EVALUE 1.50e+00; SWISSPROT HIT: P32616, EVALUE 6.90e+00
aatcattcagttacacaagcagaaaggatatctttcttgtagagaaatccttatgcgtaagtagaatagaaaactacccacatgtgagtgatttcagagtgtaggagaagacagcttcac

SEQ ID NO: 32112 - DNA, 90 bp, Homo sapiens
  MAP TO AC009444.1; EXPRESSED IN LUNG, SIGNAL = 4.2; NT HIT: AE001257.1, EVALUE 6.30e-01; SWISSPROT HIT: P36717, EVALUE 9.20e+00
atgacagtgcaattgtggaacaatggccctttgctgaagggttgtcccttccattcctggcacttttacgatcagcattcaggacttttc

SEQ ID NO: 32113 - DNA, 77 bp, Homo sapiens
  MAP TO AC009722.1; EXPRESSED IN LUNG, SIGNAL = 2.4; EXPRESSED IN BT474, SIGNAL =   1; EST_HUMAN HIT: AL353984.1, EVALUE 1.60e-01; NT HIT: AL163201.2, EVALUE 9.50e+00
ataaggatgaaaatgtgttccatgaccaagaagagaaatgtaccctctcagccaatgtaattcattcaatagccagg

SEQ ID NO: 32114 - DNA, 198 bp, Homo sapiens
  MAP TO AC010740.2; EXPRESSED IN LUNG, SIGNAL = 9.7; SWISSPROT HIT: P98157, EVALUE 7.00e-27; EST_HUMAN HIT: BE787670.1, EVALUE 4.40e-02; NT HIT: AF176832.1, EVALUE 1.00e-108
atccttttgaagcattcatcatcttttctattcgtcatgagatcagaaggattgatcttcacaaaagagactatagtctacttgttcctggattgagaaacacaatagcacttgattttcacttcaatcaaagtttactttattggacagatgttgtagaagacagaatataccggggaaagctttctgaaagtggag

SEQ ID NO: 32115 - DNA, 107 bp, Homo sapiens
  MAP TO AC010885.1; EXPRESSED IN LUNG, SIGNAL = 5.2; NT HIT: AF275345.1, EVALUE 2.30e-01; EST_HUMAN HIT: BE701894.1, EVALUE 3.40e-01
tgaccttcaacattgtattgacttttattaatgatctcttcaatagtgcatttgcttttatcaatgactcctcaaaaaaagtagtaataataatgaagatggctatt

SEQ ID NO: 32116 - DNA, 231 bp, Homo sapiens
  MAP TO AC010754.1; EXPRESSED IN BONE MARROW, SIGNAL =   1; EXPRESSED IN LUNG, SIGNAL = 1.6; NT HIT: AL161518.2, EVALUE 1.20e-01; SWISSPROT HIT: Q61982, EVALUE 2.10e+00
ctttataacctgacatttttatcgagtggagaaaacacagccttaactctcccttgcaatgtgaatccggggcaggtgtcaatgccaactacagctgccacaagtattactagtccacgtgttctcttccttcaggatttggaggctctttttgtatccctcaccacgggcaaatattttaaaatgtcccttcatgatgatgatgctaatgtaactgttttggtacctggt

SEQ ID NO: 32117 - DNA, 236 bp, Homo sapiens
  MAP TO AC007363.3; EXPRESSED IN LUNG, SIGNAL = 4.3; NT HIT: AB014726.1, EVALUE 1.40e-01; EST_HUMAN HIT: AA196735.1, EVALUE 3.00e-67; SWISSPROT HIT: O42163, EVALUE 1.00e-09
tactggacaacacccatcagtggaccggcagggccaatgtcaagagcttgggcaacatcagccaggagctgcttctggattcggaatcgccgtttgccaatgctggtgctcccatcaattaaaaacgacaagtcaattttgcagtctgcggaacggaaaaagactctattattctcatgatctctcactgcatttacctgggcatcctcttgttcctctttctccatcagagcccc

SEQ ID NO: 32118 - DNA, 156 bp, Homo sapiens
  MAP TO AC010128.1; EXPRESSED IN LUNG, SIGNAL = 6.5; NT HIT: U39680.1, EVALUE 7.70e-02; SWISSPROT HIT: Q46968, EVALUE 2.90e+00
aaaactgacatgactcttggttggatagcatttaatataaatgtcgtggctgacatgttggttttgatagtcatcaaaactggtgcacctgatgcaccagtttattctctgatcttctattgctttgataatcttaataaacaacaacagagccac

SEQ ID NO: 32119 - DNA, 204 bp, Homo sapiens
  MAP TO AL096763.9; EXPRESSED IN LUNG, SIGNAL =   6; EXPRESSED IN BT474, SIGNAL = 1.1; SWISSPROT HIT: Q48221, EVALUE 2.90e+00; EST_HUMAN HIT: AU121248.1, EVALUE 7.20e-01; NT HIT: AL163279.2, EVALUE 1.00e-01
ctcggagagcactaatcttattggggtcaagggcacacaggccatgcttcagattgccatagacgttactttggaccaggacatcttttgtgaagagtttctgaataaggtatctagccgacaggcttgcgcaagacttagtttttgccaaagtcagtactgaacatggcatccgtatatttctccatggtcttccaaaatagc

SEQ ID NO: 32120 - DNA, 173 bp, Homo sapiens
  MAP TO AC011287.1; EXPRESSED IN BONE MARROW, SIGNAL = 1.1; EXPRESSED IN LUNG, SIGNAL = 3.6; NT HIT: AE004890.1, EVALUE 4.00e-01; EST_HUMAN HIT: AW361799.1, EVALUE 9.30e+00; SWISSPROT HIT: P39393, EVALUE 6.50e+00
ggaggcagtccttcaggctgcagctattaaacttagggatctcctaccaggaagaagccgaaggcttgtttttatcactgaatcaaaccaggaaggaaaagccaagggaaatgcccacatacctggtcaagttcctagaggacttatgattgcctgctcttttagctctgagt

SEQ ID NO: 32121 - DNA, 140 bp, Homo sapiens
  MAP TO AC008079.7; EXPRESSED IN HELA, SIGNAL = 0.6; EXPRESSED IN LUNG, SIGNAL =  11; EST_HUMAN HIT: R01053.1, EVALUE 5.00e-04; NT HIT: AL163201.2, EVALUE 2.00e-54; SWISSPROT HIT: P08970, EVALUE 3.90e+00
gttatcatagagaatgacagctgcatgtatgttattgccactgaagaccctgaagacctttcacttggacaagatttcgagatggaagacagtgatattgattatcctgacccttacaggactaagctagtgtgtgtgtt

SEQ ID NO: 32122 - DNA, 236 bp, Homo sapiens
  MAP TO Z98946.15; EXPRESSED IN LUNG, SIGNAL = 0.61; EST_HUMAN HIT: BE729090.1, EVALUE 2.00e-87; NT HIT: gi4505256, EVALUE 1.00e-87; SWISSPROT HIT: P26041, EVALUE 4.00e-09
ggcagacaaggaagaaagttcagttcccataatcccagcccaccctacagctttaccagctgttcctgagtctttttctggtcccgggaggcctgcagcaaggcctccttggcctcttcagcttcttgacgctccttggccagcttttcagcctcgctctgggcacgcttccgttcctgctcaagttccagagccctacgggtctgttcttccagttctgagcagaaaaggagggg

SEQ ID NO: 32123 - DNA, 262 bp, Homo sapiens
  MAP TO AL078583.15; EXPRESSED IN BONE MARROW, SIGNAL =   1; EXPRESSED IN LUNG, SIGNAL = 1.4; NT HIT: AF193829.1, EVALUE 2.10e+00; SWISSPROT HIT: P22229, EVALUE 1.10e+00; EST_HUMAN HIT: AA291840.1, EVALUE 3.70e+00
ttagaggtttggaaccccaaagaagcagtggggtatggctctccatacactccccgcgtcttcccaagtgccccttctcactgttgtctcactaaaggcacctgcagaaaataactgactcttaatgaatgcctttgtcagtgacccgacaagtgccccttgcctggaccaagatgagaaagccagtgttacttccaggaaccccatttccatggactgatggaatctgcccctgattctgctgtcggaggcgaaccagacc

SEQ ID NO: 32124 - DNA, 123 bp, Homo sapiens
  MAP TO AL049836.2; EXPRESSED IN LUNG, SIGNAL = 0.62; SWISSPROT HIT: P30929, EVALUE 6.80e+00
atcaggggaactttgttgagagttttgatcattatcttaagagcaacaggaagcctgacattgaaggcttcaagcagagctgtgaaatcagaagttcatggtttaagaactcaccatatccac

SEQ ID NO: 32125 - DNA, 161 bp, Homo sapiens
  MAP TO AL050403.12; EXPRESSED IN LUNG, SIGNAL = 0.96; EST_HUMAN HIT: AA226232.1, EVALUE 3.80e-01; SWISSPROT HIT: P08123, EVALUE 7.60e-01; NT HIT: AL117210.1, EVALUE 3.10e-01
tgttcgatttggtatgcaataatttccagggcaaaattactcagcaacagcaagaagggttggaaggcttcagcaaattcctcccggtgggccttgacttgaacttttcgggtctggactatttcttccacagctccctgacactcctgttaccccaaggg

SEQ ID NO: 32126 - DNA, 202 bp, Homo sapiens
  MAP TO AL078588.9; EXPRESSED IN LUNG, SIGNAL = 8.4; SWISSPROT HIT: P45451, EVALUE 1.60e+00; EST_HUMAN HIT: AW194050.1, EVALUE 5.00e-04; NT HIT: AL161536.2, EVALUE 7.40e+00
aatttcaaaattaatatttaaagagatatttttatgcagttgtaattattttttacctgaacactgttgctatatcctcctcagatggatgcaaagtatctcccaaacttccagatccaggatgacttcaccattttatttttcagcaataataataataatgatatcaacaaaaacaactaaagtaacagcaacaatcatt

SEQ ID NO: 32127 - DNA, 134 bp, Homo sapiens
  MAP TO AL080274.10; EXPRESSED IN LUNG, SIGNAL =   1; EXPRESSED IN BT474, SIGNAL = 1.1; EST_HUMAN HIT: R98170.1, EVALUE 7.00e-34; NT HIT: AF029983.1, EVALUE 1.00e+00
tatgcctccttgaaactccattacctgatgcagtgacctatatctcatatgaggccttcaatgaagatgtggtcatgatgatgatgacaatgatggtgatgatgatgctgatagtatcactgctgttaaactat

SEQ ID NO: 32128 - DNA, 158 bp, Homo sapiens
  MAP TO Z97985.4; EXPRESSED IN BT474, SIGNAL =   1; EXPRESSED IN LUNG, SIGNAL = 3.4; SWISSPROT HIT: Q9ZPX1, EVALUE 7.00e-08; EST_HUMAN HIT: AA401549.1, EVALUE 4.00e-84
cagcagatgtgttaagatgatcttcacttcctgcatgcgtcttatgtcactggaatccaggacgaaaacaagcccatgggcctgtgcatagtagtttggccatgcttcccggcccttcaggtctccattcaggtcatagatggaaagttcatactcat

SEQ ID NO: 32129 - DNA, 220 bp, Homo sapiens
  MAP TO AC009724.1; EXPRESSED IN LUNG, SIGNAL = 5.1; NT HIT: U52111.2, EVALUE 2.80e-02; EST_HUMAN HIT: AI243033.1, EVALUE 5.30e-01; SWISSPROT HIT: P48608, EVALUE 1.20e+00
atcctcaaagttttgaaaatctgcagctacttaacaataacagcctcaggcttctcagggagaaaaatttccatttccagccccaagacttcaccacaagtgtggcttcagaagatgttgtgaactgggaaaggccagaaaccagagagtgggaaaaagtgatagcagccatagaatcaagaaaggaccctgcagagggtgacagctttcatctgaattg

SEQ ID NO: 32130 - DNA, 97 bp, Homo sapiens
  MAP TO AC005008.2; EXPRESSED IN LUNG, SIGNAL = 2.9; EST_HUMAN HIT: AI261635.1, EVALUE 3.00e-01
gaagctgaaggcagatgtaagatcagtagaagacttttataaaatagtctatattagagcatttctttgtgctcattggaatgattcagaagagaag

SEQ ID NO: 32131 - DNA, 221 bp, Homo sapiens
  MAP TO AC005998.3; EXPRESSED IN HBL100, SIGNAL = 2.1; EXPRESSED IN LUNG, SIGNAL = 5.5; NT HIT: AP000001.1, EVALUE 4.50e-01; SWISSPROT HIT: Q91677, EVALUE 1.60e+00; EST_HUMAN HIT: BE698671.1, EVALUE 4.00e-55
gcagattcagcagcggtaagcccttcttgactcttttctgcaggttgtggatgagagagctgtcccatggctgggctgtttttacgtatactggctgcttacaggatatcacgctgctgaatgacgtgtacttgaagaccagcagagggtggtggatgtgcctctgcccacgctgtgtaaagatggcggcagagcggacccaacagcacccttggagtcta

SEQ ID NO: 32132 - DNA, 208 bp, Homo sapiens
  MAP TO AL031602.10; EXPRESSED IN PLACENTA, SIGNAL = 1.1; EXPRESSED IN LUNG, SIGNAL = 0.93; EST_HUMAN HIT: AW294203.1, EVALUE 1.00e-114; SWISSPROT HIT: P50636, EVALUE 1.00e-03
tggcagatgcctggagagccctcaagaatcccagcattggggaaagcagcattgaaggcctgactagtgtattgagcactagtggaagccctacagatggacttagtgttatgcaaggtccttacagcgaaacggccagctttgcagccctctcagggggcacgctgagtggcggcattctctccagtggcaagggaaaatatagcag

SEQ ID NO: 32133 - DNA, 331 bp, Homo sapiens
  MAP TO AL032821.2; EXPRESSED IN LUNG, SIGNAL =   2; NT HIT: AE004054.1, EVALUE 2.70e+00; EST_HUMAN HIT: BE069220.1, EVALUE 2.00e-78; SWISSPROT HIT: P03243, EVALUE 2.80e+00
gagtagagaaatgcaagtatagaagaatggaccccagctttaacttggaagggcaaatattttggcctacactcaaaggaaagtgggaaatacttctaaaatacataccaataccgtagccacgttatttggaaaagcctttgccaggatagaagaagatgcagtcattgctgcagcaaagctaactgcatccattactctcactagaaaacacatagcaataaatactggcccatctggaactcggtccaatacactaaaaaggaataagacaattctgaaatgccaagctggttttctttttttttttttcctttttaactgtactcac

SEQ ID NO: 32134 - DNA, 131 bp, Homo sapiens
  MAP TO AC007252.2; EXPRESSED IN LUNG, SIGNAL = 0.91; EST_HUMAN HIT: BF576551.1, EVALUE 2.80e-02; NT HIT: AF237379.1, EVALUE 1.10e+00
ttccaaagaggaacagggtaaaacacagatttaatgagaaatttgagaaatggctatttgacttccttttcttcctccttttctctgctccccaaggagctggaaactttgctgaagcatgtgtggagatg

SEQ ID NO: 32135 - DNA, 668 bp, Homo sapiens
  MAP TO AC005532.1; EXPRESSED IN LUNG, SIGNAL = 1.5; EXPRESSED IN PLACENTA, SIGNAL = 1.5; NT HIT: gi11421147, EVALUE 0.00e+00; EST_HUMAN HIT: BE336820.1, EVALUE 0.00e+00; SWISSPROT HIT: Q50950, EVALUE 5.20e-01
ctctacaggaggataatagttgtaattccagtaccaaaacgttctaggtagataacctttaattaaatggtgttctggcacaaagggatgaaaagtttcttttccaatggtatctctggaatctcctgcttctacattcataatttccatgcatctccccagtgctaagtcttcaatggaggaactatgtgtacacttgtctgttttaaatgcatcaacaaatcttttcaaggcttctttgcttagtacatatcctgctcctccactcatgtagccctgctttacataaggcttaaatcttctcccaaagtaaatgggttcttcagggtcgtattttgaaagaagccacctcaaattgtctagtatgacatacgtgtcatcatctgctttcaaaaaccaatcagcatcttctaaataatgttcatgaacatactgaaaagctttaattgttttccagtatagttgatctctgccttctttggttttcagtcccacagcagggaagtctttattttcttctgaactcataaacaacactttgttacaacgctgggcccaagtagctttgacgtgtttggcctttttctctaggttttgagggccggtcataacccagcaaagaattctaactttctgatagaggttttcagcaatgtctgtgttctcat

SEQ ID NO: 32136 - DNA, 1078 bp, Homo sapiens
  MAP TO AF117829.1; EXPRESSED IN HELA, SIGNAL = 1.2; EXPRESSED IN BT474, SIGNAL =   1; EXPRESSED IN LUNG, SIGNAL = 1.9; NT HIT: gi11427262, EVALUE 0.00e+00; SWISSPROT HIT: Q9Y236, EVALUE 0.00e+00; EST_HUMAN HIT: BF692975.1, EVALUE 0.00e+00
aactgaaagtagtatccttataggatatttttccttttccttttttaggagcctaaaaggggatcgagttatgccagaggaaatagctcgctactataaacattatgtaaaagtcatgggtcttcagaagaatttcagagagaatacttacataacttccgtatcaagactctacagagatcaagatgatgatgatattcaagacagagatatttcaacaaagcatttacagatagagaagtcaaactttatcaagagaaactgggaaattaggggttatcagcgaatagctgatggttctcatgttcccttctgcctctttgctgagaatgtagcgctggcaactggaacgctggattctcctgcccatctggaaattgaaggggaagattttccttttgtgtttcattcaatgcctgaatttggagctgctataaacaaaggaaagttgcgtggcaaagtggatccagtgttaattgtaggttctgggcttactgccgctgacgcagtactgtgtgcttacaacagtaatatccctgtgattcatgtgtttcgcagacgagtaactgatccaagcttaattttcaaacagcttcccaaaaagctgtatcctgaatatcataaagtctatcatatgatgtgtactcagtcatattctgtagactcaaatcttttatctgattataccagctttcccgagcaccgtgtgctttcctttaagtcggacatgaaatgtgttctccaaagcgtttctggattgaagaaaatatttaagctgtctgcagcagtagtattgataggttctcatcctaatctgtcttttctgaaggatcaagggtgttacctaggccataagtcaagccagccaatcacatgtaagggtaatcctgtggaaatagatacatatacctatgagtgtattaaagaagccaacctttttgcattgggtcctttggttggagacaattttgttcgatttttaaagggaggggcgctgggtgttacacgctgtttagctacaagacagaagaaaaagcatttgtttgttgaaagaggaggaggagatgggatagcttaa

SEQ ID NO: 32137 - DNA, 104 bp, Homo sapiens
  MAP TO AC012111.1; EXPRESSED IN LUNG, SIGNAL = 0.96; EST_HUMAN HIT: AW859388.1, EVALUE 2.30e-01; NT HIT: AF046059.1, EVALUE 2.20e-01
gttgttgttattgttgttgttgttgttgaggattttttttaagaacacacagagaaagacctggtagaagtctttctgacatctggcatagaagacaattatac

SEQ ID NO: 32138 - DNA, 178 bp, Homo sapiens
  MAP TO AC006474.3; EXPRESSED IN PLACENTA, SIGNAL = 0.79; EXPRESSED IN BONE MARROW, SIGNAL = 0.93; EXPRESSED IN BT474, SIGNAL = 0.66; EXPRESSED IN LUNG, SIGNAL =  94; NT HIT: gi10864040, EVALUE 5.00e-96; EST_HUMAN HIT: BF369194.1, EVALUE 4.00e-67; SWISSPROT HIT: P36044, EVALUE 7.50e-01
gagttccagattttgttggagccgaggatgaactaagtagtggatctaaggaaggatccaagaaacctgtgttcatgtttgttttatataaaagctgagctccatcttctgacagattatctaaacttatcttgctttgtctacttgtatctagaagatcttttccaaagaaagcttc

SEQ ID NO: 32139 - DNA, 162 bp, Homo sapiens
  MAP TO AC007358.2; EXPRESSED IN LUNG, SIGNAL = 2.7; EST_HUMAN HIT: AI655402.1, EVALUE 3.80e-01; NT HIT: D00859.1, EVALUE 9.40e-02; SWISSPROT HIT: P17672, EVALUE 2.20e+00
tcacatgacccaacttcggtcttttatctgccttccccaggcactcttttggggaactgtcttttccagagatgcgtggcccattgcagccattgtagtgggcgctgttcgtgtgattagcctggccttttgtgtttcctgcctcgaatccgctagatcttt

SEQ ID NO: 32140 - DNA, 468 bp, Homo sapiens
  MAP TO AP000107.1; EXPRESSED IN HELA, SIGNAL = 0.75; EXPRESSED IN LUNG, SIGNAL = 0.69; SWISSPROT HIT: Q00078, EVALUE 7.20e-01; EST_HUMAN HIT: H11666.1, EVALUE 1.00e-112; NT HIT: gi11526194, EVALUE 0.00e+00
atggctgccagcctttgtgtaaccacatgggcttctctctggagtcactgtccccaccgctatggatgagtaagctctgctctgggaagggatgcttggcctccatgttgatgcgcagcctcttcagaccacaaatagccaggtattcagtggggagagtgttggtgctgcacagggaaagcttcaggtcttggaccagcgtgaagttcagcaggtggcccagcgcagatgtgtccgtgaaccagatggtcagatggccattgtagctggttcgctctactgcaaggggcaggacggttttacagttgcacatcaggttggccaaactgtagtcacaatcccggatgtccgcagaacagctgcagttccgaatggtgttttcccttgtgaagatgagcgtgctgttcttctgacctttggtgaagcagttaagtgcaaagacacccagagtgctgatcagaagaagac

SEQ ID NO: 32141 - DNA, 211 bp, Homo sapiens
  MAP TO AC007271.2; EXPRESSED IN LUNG, SIGNAL = 2.6; EXPRESSED IN PLACENTA, SIGNAL = 1.2; EST_HUMAN HIT: AU140044.1, EVALUE 1.00e-115; NT HIT: gi11430667, EVALUE 1.00e-115; SWISSPROT HIT: P14778, EVALUE 1.00e-37
aaataattttagtgtcatctgcaaatgaaattgatgttcgtccctgtcctcttaacccaaatgaacacaaaggcactataacttggtataaagatgacagcaagacacctgtatctacagaacaagcctccaggattcatcaacacaaagagaaactttggtttgttcctgctaaggtggaggattcaggacattactattgcgtggtaag

SEQ ID NO: 32142 - DNA, 84 bp, Homo sapiens
  MAP TO AC007464.2; EXPRESSED IN LUNG, SIGNAL = 2.4e+02; NT HIT: AJ243951.1, EVALUE 6.80e-01; EST_HUMAN HIT: BE395671.1, EVALUE 1.70e-01
atgagtgtgtgccaagctcatctgcaaagagtggatggacactcctggtttctccagcatttgtgttcagattgtggccacctc

SEQ ID NO: 32143 - DNA, 142 bp, Homo sapiens
  MAP TO AL035425.11; EXPRESSED IN LUNG, SIGNAL = 0.94; EXPRESSED IN HELA, SIGNAL = 1.3; EST_HUMAN HIT: AV728760.1, EVALUE 2.00e-74; NT HIT: M63470.1, EVALUE 1.00e-74; SWISSPROT HIT: P29400, EVALUE 2.00e-23
tgcctttcatgttctgcaacatcaataatgtttgcaactttgcttcaagaaatgactattcttactggctctctaccccagagcccatgccaatgagcatgcaacccctaaagggccagagcatccagccattcattagtcg

SEQ ID NO: 32144 - DNA, 254 bp, Homo sapiens
  MAP TO AF165926.1; EXPRESSED IN HBL100, SIGNAL = 1.2; EXPRESSED IN HELA, SIGNAL = 1.7; EXPRESSED IN LUNG, SIGNAL = 2.1; SWISSPROT HIT: O75694, EVALUE 7.00e-25; EST_HUMAN HIT: BE883863.1, EVALUE 2.00e-78; NT HIT: AJ007558.1, EVALUE 2.00e-78
gattaagattaagagatttatgggttctaagattaagattaagagatttgtttttcttatgtgtgtacaaggtatacagcctcctgccatgtcaactccagtgtgtgctctgggaaacccagcaactcaggccacaaatatgagttgtgtgactggaccagagattgtgtactctggaaaacacaatggtatttgcatttacttttctcggatcatggggtaagtttgtcatgaaataatgaattattgctcac

SEQ ID NO: 32145 - DNA, 420 bp, Homo sapiens
  MAP TO AL132780.1; EXPRESSED IN LUNG, SIGNAL = 1.1; NT HIT: gi11345485, EVALUE 0.00e+00; EST_HUMAN HIT: AI831858.1, EVALUE 0.00e+00; SWISSPROT HIT: O60583, EVALUE 6.20e-01
ttattcatccttttccaccttgatttcaatgaatgagttcaagtcaggacagcaggttttgtggggttggtcaaaagatggggagccaggtgcattctcatcccctccctcatcttcctcttcttggaaattaggattgtaaagttctggtggaaggagctgggcttcagcagaaggcagtctgtctgagggaggcccatacacacggttggctttggtgccatgcttagagttagcatccaggtggtagcagagctctgtgaggcgctgggcccggaaacggggagggcgggccacccacacacctggctcgttaagactgtcctcttcatctgacatcagttcctctgtcacatcattccacagacgttggtcctcaggtccaaaatgcctcatgatactggatcggttggcaaaaag

SEQ ID NO: 32146 - DNA, 108 bp, Homo sapiens
  MAP TO AC009396.3; EXPRESSED IN HELA, SIGNAL = 1.4; EXPRESSED IN LUNG, SIGNAL = 3.8; NT HIT: M59257.1, EVALUE 2.00e-01; SWISSPROT HIT: P95816, EVALUE 6.90e+00
atgagggagaagatgatggagtgcattttagaaatgggaattgatagaatctgggatttgcttgacaaaaagttgaaggagaagcagatgcaaagacctgagattcag

SEQ ID NO: 32147 - DNA, 166 bp, Homo sapiens
  MAP TO AC007568.1; EXPRESSED IN LUNG, SIGNAL = 1.7; SWISSPROT HIT: Q99572, EVALUE 2.20e+00; EST_HUMAN HIT: BE969740.1, EVALUE 1.40e-01; NT HIT: AL161537.2, EVALUE 3.80e-01
ggactttttcaggaagaaatgtgagtcagttcttgagtacaaacacagaagcaagcatgaaaaacacttaggggtgtcaattaacaagatattgaaccaccaagccatgaaatggacactgcccctcctccaaatcagcaactcaaccccagacttcattattcag

SEQ ID NO: 32148 - DNA, 914 bp, Homo sapiens
  MAP TO AC005365.1; EXPRESSED IN LUNG, SIGNAL = 1.4; EST_HUMAN HIT: AI873302.1, EVALUE 1.00e-116; SWISSPROT HIT: O60673, EVALUE 0.00e+00; NT HIT: gi11417568, EVALUE 0.00e+00
ggagattggtggacggctcctcatggtagaaactcgacttgcaaatgatctggctgagtttgagggagacttttccttggaaggacttcgtctttggaaaacagcattctcagcaatgactcagaatccaaggccagggtcaccccttcgcagtggccaaggagttgtcaataaagggtcaagtaatagccctaagatggttgaagataaaaaaattgtgattatgccttgcaaatgtgccccaagtcgacaactggttcaagtgtggcttcaagccaaagaagaatacgaacgttccaagaaactgcctaaaaccaagccaactggagttgtaaaatctgctgagaactttagctcttcagttaacccagatgacaaacctgtagtgcctccaaaaatggatgtaagtccatgtatactccccactacagcacataccaaggaggatgttgataattctcagattgctttacaagcaccaaccacgggatgtagtcaaactgcaagtgaaagtcagatgctgccaccagttgcctctgcaagtgatcccgaaaaagatgaagatgatgatgataactattacattagttatagctcccctgattctccagtaattcccccttggcaacaaccaatatccccagattccaaagcattaaatggagatgatagaccctcatcaccagtagaggagctgccttcattggcttttgagaacttcttaaagccaataaaagatggtatacaaaaaagcccctgcagtgagcctcaagagcctctagtgatatctccaattaatactagggcaagaactgggaaatgtgaatcactttgctttcatagtacaccaatcatacagagaaaacttctggaaaggcttcctgaagcacctggccttagcccattatcaacag

SEQ ID NO: 32149 - DNA, 793 bp, Homo sapiens
  MAP TO AL096829.12; EXPRESSED IN LUNG, SIGNAL = 0.99; EST_HUMAN HIT: BE887580.1, EVALUE 0.00e+00; SWISSPROT HIT: Q99014, EVALUE 1.10e+00; NT HIT: gi11417118, EVALUE 0.00e+00
aaataaatcctggaaattatcaacatttcttccaccatgcagatgaagatgatgaggaggaagatgattctccaccagaaaggcagattgtggttggaatatgttccatggcaaagaaatccaaatccaaaccaatgaaggaaattcttgaatgggtctccttatttaaatatatcacagtagtggtatttgaagaggaggttattttgagggaaccagtggaaaactggcctttatgtgattgtcttttttctttgcactctaaaggatttccactggacaaagtggttgcctatgcaaaactcaggaatccatttgtaatcaatgacttgaatatgcagtatctcatacaagattggagagaggtatatagtattcttcaagctgaagttattttacttccttgttatgcaattttgaaccgtgacccaaataatcccaaagaatgtaatctgattgaaggggaagatcatgtagaagtaaatgaggaagtttttcaaaagccatttgtagaaaagccagtcagtgcagaagatcacaatgtttacatttattacccaacttctgctggcagtggaagtcaaagactctttagaaagattggcagtagaagtagtgcttattctccacaaagcaatgtacaaaaatcaagctcatatacacatgaagagtttatgcccggagacgatactaatgttaagagattcctcatgttttgcaccaccaacatctttggcagtctgaagcctatggactctttcttaacaaaagtgttcttaaatgctttaaacat

SEQ ID NO: 32150 - DNA, 130 bp, Homo sapiens
  MAP TO AC011242.1; EXPRESSED IN LUNG, SIGNAL = 1.3; NT HIT: D90915.1, EVALUE 2.50e-01; EST_HUMAN HIT: BF106266.1, EVALUE 2.00e-67; SWISSPROT HIT: P31826, EVALUE 4.00e+00
ttttgcaagaaacaacttggcaccaaagaatggccacttcctggctactgtcaaataaatgcgcacacagtcagcagcactgtgtccccggagggccatccatctggttgaaagtcgctggcaaagctgc

SEQ ID NO: 32151 - DNA, 169 bp, Homo sapiens
  MAP TO AC007064.25; EXPRESSED IN LUNG, SIGNAL = 0.96; NT HIT: gi8922593, EVALUE 1.00e-59; EST_HUMAN HIT: AW367811.1, EVALUE 1.00e-59; SWISSPROT HIT: P15620, EVALUE 2.00e-01
caagcctttcagctcatcccacagactgtgctggcacaaccggatcaagcacaaaggcatcaggaaagtgtatgcctgctcacactgcccagactccagaggtacttttaccaaagggttgatgctggagaagcatgtccagctgatgcatggcatcaaagaccttgac

SEQ ID NO: 32152 - DNA, 116 bp, Homo sapiens
  MAP TO AC008273.1; EXPRESSED IN LUNG, SIGNAL = 0.62; EST_HUMAN HIT: BF210290.1, EVALUE 5.90e+00; NT HIT: AF227135.1, EVALUE 2.20e-01
gatggtgcactatttattcccccggtttacttcttgcctcagagtgctaatattaggcactgcatcttagcagacacggctgaggccctgataccagctgctcagatccccccagg

SEQ ID NO: 32153 - DNA, 153 bp, Homo sapiens
  MAP TO AL031053.1; EXPRESSED IN LUNG, SIGNAL = 1.1; EST_HUMAN HIT: U69179.1, EVALUE 4.00e-81; NT HIT: gi6382070, EVALUE 3.00e-81; SWISSPROT HIT: O60879, EVALUE 9.00e-23
agcatcatagcagtaactcttgcctgtgaagaactgaagaaaagtgaaagctttaacagacttttagagttagttcttcttgttggaaactacatgaactcaggctcaagaaatgcccagtctttgggatttaagatcaacttcctttgtaag

SEQ ID NO: 32154 - DNA, 380 bp, Homo sapiens; identical to SEQ ID NO: 15648
  MAP TO AC006369.3; EXPRESSED IN LUNG, SIGNAL = 2.7; EXPRESSED IN HBL100, SIGNAL = 1.4; NT HIT: X05288.1, EVALUE 9.40e-01; EST_HUMAN HIT: AI220330.1, EVALUE 6.10e-02; SWISSPROT HIT: P71318, EVALUE 1.80e-01

SEQ ID NO: 32155 - DNA, 124 bp, Homo sapiens
  MAP TO AC010149.2; EXPRESSED IN LUNG, SIGNAL = 1.1; NT HIT: gi11429927, EVALUE 6.00e-64; EST_HUMAN HIT: AA057395.1, EVALUE 9.00e-64; SWISSPROT HIT: P23497, EVALUE 7.00e-10
gtttcagcagtagtgacttttcagacctgagtaatggagaagagcttcaggaaacctgcagctcatccctaagaagagggtcaggtaaagaagattaggatgccaagacttggcctgcagaatg

SEQ ID NO: 32156 - DNA, 160 bp, Homo sapiens
  MAP TO AC007617.10; EXPRESSED IN LUNG, SIGNAL = 0.81; NT HIT: AE001180.1, EVALUE 3.70e-01; EST_HUMAN HIT: AV747729.1, EVALUE 9.00e-03; SWISSPROT HIT: P28363, EVALUE 6.60e+00
ttgagatcctgcagaaaaacatgttttatagccacactcatgctttgtgtcagaacttttctccttcagagaaaattgctaacattatctaaaaagagagttttttcagttctgacttcgcttttaagttttaaaaataataaaacattaaaaagatgaa

SEQ ID NO: 32157 - DNA, 134 bp, Homo sapiens
  MAP TO AC010102.1; EXPRESSED IN LUNG, SIGNAL = 1.3; EST_HUMAN HIT: AW440280.1, EVALUE 1.00e-03
acacctttatgaaaagtcagatcctctacatttcaatttcctattacaatacagaagatggacattttagcagcaagacttcaaaggggaaaacttcagacacagactgagtgcactttgcattctgtcattta

SEQ ID NO: 32158 - DNA, 181 bp, Homo sapiens
  MAP TO AL109952.6; EXPRESSED IN HBL100, SIGNAL =   1; EXPRESSED IN HELA, SIGNAL = 1.5; EXPRESSED IN LUNG, SIGNAL =   1; EST_HUMAN HIT: AI825179.1, EVALUE 2.00e-77; SWISSPROT HIT: Q92674, EVALUE 1.00e-29; NT HIT: gi11419594, EVALUE 9.00e-98
agaatttaatcactatttgacatcaatggttggttgcctgtggacgtccaaaccctttgggaaaggaatatatattgaccctgaaatcctagaaaaaactggagtggctgaatataaaaacagtttaaatgtagtccatcatccttctttcttgagttacgctgtttcctttttgctacag

SEQ ID NO: 32159 - DNA, 126 bp, Homo sapiens
  MAP TO AC011347.1; EXPRESSED IN LUNG, SIGNAL = 0.99; NT HIT: U76377.1, EVALUE 4.00e-12; EST_HUMAN HIT: AV730598.1, EVALUE 8.00e-12; SWISSPROT HIT: P08547, EVALUE 2.00e-06
tttgacataattgaacatcattttatgttaaaaactctcagtaaattaggtatagaaggaatgtacctcaacacaatgaaggttgtgcatgacaaactgaaagctaacatcattctcagtaataaa

SEQ ID NO: 32160 - DNA, 194 bp, Homo sapiens
  MAP TO AC007738.1; EXPRESSED IN LUNG, SIGNAL = 2.2; SWISSPROT HIT: P52867, EVALUE 7.30e-01; EST_HUMAN HIT: BF569848.1, EVALUE 2.00e-50; NT HIT: Z97341.2, EVALUE 7.10e+00
cttagtttttcaatgtctttcatctgctggagttctttcagggttagagttacatcacacctggcttcataaaccaatgtttccagagtaaccaaattgtcacagagaaccagcaaaccaggaatattccgctccatcccaagtcgaataagtgacaatgcacagtccacctaaaattgaaaagcaacaataag

SEQ ID NO: 32161 - DNA, 308 bp, Homo sapiens
  MAP TO AC009474.1; EXPRESSED IN LUNG, SIGNAL = 2.6; NT HIT: U07144.1, EVALUE 2.00e-13; SWISSPROT HIT: P11369, EVALUE 3.00e-24; EST_HUMAN HIT: BE673893.1, EVALUE 1.00e-18
cactacttctattcattgttgtactggagattcaatccagagcaattaggcaagacaaagaaataaaaggcatccagtttggaaaagaagatataagactatctctatttgcaaatgacatgatcttgcttattgaaaagcctgaagaatctacaaaacagctatcagaactaataaccaagttcagtgaggttgcagagtataagatcaatacacaaaaatcagctgtatatctatacactagtaacaaacaatctgaaaatggaattaagaaagtaatttcacttacagtaacatcacaaaataaa

SEQ ID NO: 32162 - DNA, 138 bp, Homo sapiens
  MAP TO AC006323.3; EXPRESSED IN HBL100, SIGNAL = 0.97; EXPRESSED IN LUNG, SIGNAL = 4.1; EXPRESSED IN HELA, SIGNAL = 0.91; EST_HUMAN HIT: BE905143.1, EVALUE 6.00e-62; SWISSPROT HIT: Q61188, EVALUE 2.00e-18; NT HIT: gi11420161, EVALUE 4.00e-62
gtggaagatgaaactgttttacataacattccttatatgggagatgaagttttagatcaggatggtactttcattgaagaactaataaaaaattatgatgggaaagtacacggggatagaggtgagccatatgcttct

SEQ ID NO: 32163 - DNA, 160 bp, Homo sapiens
  MAP TO AC009558.2; EXPRESSED IN LUNG, SIGNAL = 1.7; EST_HUMAN HIT: R50199.1, EVALUE 3.70e-01; SWISSPROT HIT: P14546, EVALUE 8.80e-02
tggggaccatttttatttgcatggttgctgcaaactctgtccctttcttgatgtgggtttgccttttgtctgtgatcatccagggagtttttttttccttctttggcatcttatcagactgggggcaggtctgggaaaaataattgtgcttcctcaaaaa

SEQ ID NO: 32164 - DNA, 119 bp, Homo sapiens
  MAP TO AC009612.2; EXPRESSED IN LUNG, SIGNAL = 1.9; SWISSPROT HIT: Q01013, EVALUE 9.30e+00; NT HIT: AF162436.1, EVALUE 1.00e+00
  unsure 13
atggtggccacgnggattcttagggtcaagagaaatcaggcaaatcctcgccaggcacatgtgcagaacgataacactatcgcctctgccactttcacattcaggatataaagaatgtt

SEQ ID NO: 32165 - DNA, 244 bp, Homo sapiens
  MAP TO AC007320.2; EXPRESSED IN LUNG, SIGNAL = 1.5; EXPRESSED IN PLACENTA, SIGNAL = 0.79; EST_HUMAN HIT: AI220048.1, EVALUE 1.00e-29; NT HIT: gi11418336, EVALUE 0.00e+00; SWISSPROT HIT: P38159, EVALUE 2.00e-12
gatgccacataacttgagctaccatatgcttcacgaggatcagggagcaccctacccagagaaggcggattcctttggtcttttctgcaaacatgctcacgatcacaataatgaaaatcaccacagctcgagtaactctcccaacttctgccatatctatctcgtgtattactatatgcgtggcaggtgcttccaccataagacatccgaggccctcttgcaggtggtgcaccatgagaggtcc

SEQ ID NO: 32166 - DNA, 129 bp, Homo sapiens
  MAP TO AC010850.2; EXPRESSED IN HBL100, SIGNAL = 1.2; EXPRESSED IN LUNG, SIGNAL = 0.89; SWISSPROT HIT: P98158, EVALUE 1.60e-01; EST_HUMAN HIT: AA127198.1, EVALUE 2.90e-01; NT HIT: U18867.2, EVALUE 2.50e-01
tcctgcaggtgatgctgccttctgagggcaaagcgctctgggacgggtcggccccgctcacgtgggtgtgcagccccagggcagtggaacagtgcagaatcctcgctccactgctgaggttactatggg

SEQ ID NO: 32167 - DNA, 103 bp, Homo sapiens
  MAP TO AC010130.2; EXPRESSED IN LUNG, SIGNAL =   3; SWISSPROT HIT: Q10283, EVALUE 7.00e+00; NT HIT: gi11417342, EVALUE 2.20e-01
ctgtcctgtcttcattaccacatcccacaccaaggtgccacagtactcacatttaagctctgccatgacactatcaccttggctgtgctttacttcactcccc

SEQ ID NO: 32168 - DNA, 113 bp, Homo sapiens
  MAP TO AC010905.1; EXPRESSED IN BONE MARROW, SIGNAL = 2.6; EXPRESSED IN LUNG, SIGNAL = 5.2; EST_HUMAN HIT: AA147572.1, EVALUE 6.40e-02; NT HIT: gi11422838, EVALUE 9.80e-01
ggctttcagtacaggagatgcaaggagacagagtaaatgaacgagaaacacattatgtgaagtcactggcagcaatcaaggacaagccacacaaaaagcctgcaggaaccaga

SEQ ID NO: 32169 - DNA, 145 bp, Homo sapiens
  MAP TO AC010874.1; EXPRESSED IN LUNG, SIGNAL = 2.2; NT HIT: U60822.1, EVALUE 9.00e-05; SWISSPROT HIT: P08547, EVALUE 3.40e-01; EST_HUMAN HIT: AW812011.1, EVALUE 1.00e-04
ccctgacagcattagacagatcatcaaggtggaaattctgaaattaaactttacacttgaccaactggacctaataaacatctacagaactccagccaataactacagaatatgcattattttcatctgcatacagaacatattc

SEQ ID NO: 32170 - DNA, 88 bp, Homo sapiens
  MAP TO AC010087.2; EXPRESSED IN LUNG, SIGNAL = 0.89; SWISSPROT HIT: P38650, EVALUE 6.00e-03; NT HIT: X95966.1, EVALUE 7.20e-01; EST_HUMAN HIT: AI707484.1, EVALUE 1.70e-02
gctcttccattgccaacatccaagaaacagcaagatggcaattttgcaaaaatacccagtttcctgatttcattgcatccttgaccat

SEQ ID NO: 32171 - DNA, 259 bp, Homo sapiens
  MAP TO AL031283.15; EXPRESSED IN LUNG, SIGNAL = 2.2; NT HIT: L76927.1, EVALUE 3.40e-02; EST_HUMAN HIT: AI285302.1, EVALUE 0.00e+00; SWISSPROT HIT: P35978, EVALUE 4.50e-02
tacctggatatgagcaaaaccctcggaagtctcatgaacatcaagaatatgtcaggccacgtgtccatgaaatacctctcccgccaggagagggagaaggtcaaccagcttcgacaaagggacctcgacctggtgtttgataagatcacccaactcaagaaccagctggggaggaaagaggagctgttgagaggatatgaaaaggacgttgaacagctcaggtacctcggcacccccatgtccccacagaaaggcccgg

SEQ ID NO: 32172 - DNA, 135 bp, Homo sapiens
  MAP TO AC011296.1; EXPRESSED IN HBL100, SIGNAL = 1.4; EXPRESSED IN LUNG, SIGNAL = 1.8; SWISSPROT HIT: Q55497, EVALUE 6.80e+00; NT HIT: AF071473.1, EVALUE 1.20e+00
aaacttccccttgggcccctctggctggcagatgtaacctccctccccttgctggaagggagcacgtttatcctgcagacctcaactgaggccaaggttccacaaaaggatgtcctgttcctcgaggagaccagc

SEQ ID NO: 32173 - DNA, 99 bp, Homo sapiens; identical to SEQ ID NO: 20693
  MAP TO AL034344.19; EXPRESSED IN LUNG, SIGNAL = 2.3; EST_HUMAN HIT: AI215419.1, EVALUE 8.50e-01; NT HIT: Y19177.1, EVALUE 8.30e-01

SEQ ID NO: 32174 - DNA, 328 bp, Homo sapiens
  MAP TO AL049796.17; EXPRESSED IN LUNG, SIGNAL = 3.5; SWISSPROT HIT: Q10156, EVALUE 2.40e-01
ggtggccaggcaggaacaggggaaggaaaagaaaattttccaggatgaagaaaaacataacgtcaagacaaaaatgagggttggatgggtccttatggaagtacagtttggggtgatggaagatgtgtcaacagacgaggttgggaaggtaggatccaggccagatacggcaaaaggggtaggggcagacttgattcaagataaggaatgtggcaatgggaaagcatttggcatgagaaaagctgtgtttagagtgattactataggaggggatgtgcaggcagaatggagtgggtccagagggtcagggagactactgcatcctatt

SEQ ID NO: 32175 - DNA, 182 bp, Homo sapiens
  MAP TO AF179633.1; EXPRESSED IN HBL100, SIGNAL = 1.3; EXPRESSED IN LUNG, SIGNAL = 1.3; NT HIT: L49236.1, EVALUE 4.20e-01; EST_HUMAN HIT: H84572.1, EVALUE 4.30e-01; SWISSPROT HIT: O86028, EVALUE 8.40e+00
catgaagatgagttgcagttttgtctgtctcatcttctccacttttcttgtcattgacccaccccttctcatcattaaccacttttagtgagctaagaacataacagaaggcgcccttctccaattgtgaatacttcctcaagccttctccttccacaaagtcaagaaggactagacccagc

SEQ ID NO: 32176 - DNA, 153 bp, Homo sapiens
  MAP TO AF186996.1; EXPRESSED IN HBL100, SIGNAL = 0.97; EXPRESSED IN LUNG, SIGNAL = 1.4; SWISSPROT HIT: Q15746, EVALUE 3.00e-13; NT HIT: AF069601.2, EVALUE 8.00e-45; EST_HUMAN HIT: AW957429.1, EVALUE 1.00e-53
tgggtgagctccacatccaggatgccctgccggaggaccatggcacctacacctgcctggctgagaatgccttggggcaggtgtcctgtagcgcccgggtcaccgtccgtggtaggagcctctggtcacccgagtagaagcacctttcctgca

SEQ ID NO: 32177 - DNA, 145 bp, Homo sapiens
  MAP TO AL049564.10; EXPRESSED IN LUNG, SIGNAL = 1.5; NT HIT: X94335.1, EVALUE 5.10e+00
caatggaaacttagaaggcaggaaaacaactcttatgtcaaattcagagccattaatcaccttcaattttaatttattactcatattattgctgacttgttcagataaagacatcataaacatgtacccaccaagtgcaatgata

SEQ ID NO: 32178 - DNA, 122 bp, Homo sapiens
  MAP TO AL109935.20; EXPRESSED IN LUNG, SIGNAL = 0.96; NT HIT: AB037855.1, EVALUE 8.00e-63; SWISSPROT HIT: Q10003, EVALUE 2.00e-03; EST_HUMAN HIT: R79719.1, EVALUE 1.00e-62
tcctatattcaagaggcaaaagctaagggactagtcatattctgctggggtgatgataccaatgatcctgaaaacagaaggaaattgaaggaacttggagttaatggtctaatttatgatag

SEQ ID NO: 32179 - DNA, 104 bp, Homo sapiens
  MAP TO AC005375.4; EXPRESSED IN LUNG, SIGNAL = 1.7; EST_HUMAN HIT: BE546188.1, EVALUE 8.30e-02; NT HIT: AF273841.1, EVALUE 2.20e-01
agtgtgaactcagaagagagagaactgaagaataagttatacttgcaaaacatttgggtgacgactttctcagctaatctttactcagccaaaaaagagataag

SEQ ID NO: 32180 - DNA, 1855 bp, Homo sapiens
  MAP TO AC005083.1; EXPRESSED IN BT474, SIGNAL = 1.3; EXPRESSED IN LUNG, SIGNAL =   1; EST_HUMAN HIT: BF334738.1, EVALUE 0.00e+00; SWISSPROT HIT: Q13813, EVALUE 7.50e-01; NT HIT: U67477.1, EVALUE 4.80e+00
agaaatagaaaatggaaattcttttgattcctccggtgatgaacttgatgtgcatcagttacttaggcagacttcctcaagaaattctggaagatctaaaagtgtttcagaacttctggacattttagacgacacagcacatgcccatcagagtatacataactctgaccagatcctactacacgacttagagtggcttaaaaatgatcgggaggcttataaaatggcttggttaagtcaacgccagctggcccgctcctgccttgatttgaatacaattagtcagagccctggatgggcccagacacaacttgcggaggtcaccatagcttgcaaagtaaaccatcaaggagggtcagtacaattacctgaatcagacatcactgttcatgtgccccaaggtcatgtggctgtgggagaattccaagaggtgtctctaagggctttccttgatccgccacacatgcttaaccatgatctttcgtgcactgtgagcccgttgttggaaatcatgttaggcaacctcaatacaatggaagcccttttgctggagatgaaaattggggctgaagtaagaaaggatcctttcagccaagtcatgacagaaatggtgtgtttacacagcttgggtaaagaaggcccttttaaagttttaagcaactgctacatttataaagacaccatccaagtcaagctaatcgacttgagtcaggtaatgtatctagtggttgctgcacaagctaaagctcttccgtcaccagctgccaccatttgggattatatccacaaaaccacctcaattggaatttatggacccaaatatatccatcccagttttactgttgttttaacagtttgtggacacaattatatgccaggacagcttacaatttctgatattaagaagggtggaaaaaacatatctccagttgtgtttcagctctgggggaagcagtcatttttacttgacaagccacaagatttaagtatttctattttttcctgtgatcctgattttgaagtaaagacagaaggagaaaggaaagaaattaaacaaaagcagttggaagcaggtgaagtagttcatcaacaatttttattttctttagttgagcacagagagatgcacttgtttgatttttgtgttcaagtggagcctcccaatggtgaaccagttgcacagttctctatcactactcctgatccaaccccaaacctaaaaagactctcgaatctgccaggctatttgcagaagaaggaggaaatcaagtctgctcctttatcaccaaaaattcttgttaaatatcctacatttcaagataaaacattgaactttagcaactatggggtaaccctgaaggcagtgctaagacaaagcaagattgattacttccttgaatatttcaaaggggacacaatagctctcctcggggaaggtaaggtaaaagctattggtcagtccaaagtgaaagaatggtatgtaggagtcctcagaggtaagattggacttgtacactgcaaaaatgtcaaggtgatttcaaaggagcaagtaatgtttatgtcagatagtgtctttacaaccagaaatcttcttgaacagattgtcctgcctttaaaaaaattgacttatatctactcagttgtattaaccttggtgtcagaaaaagtttatgattggaaagttttagctgatgtcctgggttactcacatctgtccctggaagattttgatcaaattcaagcagacaaagaatcagagaaagtttcttatgttataaagaagttaaaggaagattgccacacagagagaaatacaaggaagtttctgtatgaacttattgtggtgagtattgct

SEQ ID NO: 32181 - DNA, 104 bp, Homo sapiens
  MAP TO AL035705.14; EXPRESSED IN LUNG, SIGNAL = 3.2; SWISSPROT HIT: P54646, EVALUE 7.00e-13; EST_HUMAN HIT: BF340888.1, EVALUE 1.30e+00; NT HIT: gi11427345, EVALUE 4.00e-52
ttgaatttctcgttttatttttccaacaacatctaaactgcgaatcttctgtctatttaagattttaactgccactttatggcctgttaattgatgttctccaa

SEQ ID NO: 32182 - DNA, 77 bp, Homo sapiens
  MAP TO AC007392.3; EXPRESSED IN LUNG, SIGNAL = 0.71; EST_HUMAN HIT: AU129359.1, EVALUE 6.00e-36; NT HIT: gi4505150, EVALUE 3.00e-36; SWISSPROT HIT: P97368, EVALUE 2.00e-08
cacccttacccttctgaagaacagaaaaagcagttggcacaagacacgggactcaccatccttcaagtgaacaattg

SEQ ID NO: 32183 - DNA, 538 bp, Homo sapiens
  MAP TO AL021068.1; EXPRESSED IN LUNG, SIGNAL = 1.7; NT HIT: gi11423143, EVALUE 0.00e+00; EST_HUMAN HIT: BE972461.1, EVALUE 1.00e-127; SWISSPROT HIT: Q09309, EVALUE 2.10e-01
atggcttgtgagaaggaagagaatattaaccaagacttaaaagagaatgagacagtaatggagcacaccaaacggcattctgatcctgacaaatctttgcaggatgaggtctcaccaagaagaaatgacatcatttctgtaccaggtattcaacctttggatcccatatcagattcagatagtgaaaactctttccaggaatccaaactagaaagccagaaagacttggaggaggaagaggatgaggaagtaaggagatatattatggagaaaattgtacaagctaacaagcttctacagaatcaagaaccggtgaatgataaaagggagcgaaaacttaagttcaaggaccagttagttgatttggaagttcctccactagaagacactactacttttaaaaattattttgaaaacgaaaggaatatgtttgggaaactgtcacaattatgtatttccaatgattttggacaagaagatgtgctcctgtcacttactaatggaagctgtgaagaaaacaaggataggacaatactgg

SEQ ID NO: 32184 - DNA, 83 bp, Homo sapiens
  MAP TO AL080313.13; EXPRESSED IN LUNG, SIGNAL = 2.7; EXPRESSED IN BT474, SIGNAL =   1; EXPRESSED IN HBL100, SIGNAL = 0.95; EST_HUMAN HIT: AA825184.1, EVALUE 6.80e-01
gttgaagatggagatgagcaagctgcgagtctgggtgatctgcatcttgtggatcaaagctacagcttttgcttatttaaaag

SEQ ID NO: 32185 - DNA, 103 bp, Homo sapiens; identical to SEQ ID NO: 21396
  MAP TO AL080274.10; EXPRESSED IN LUNG, SIGNAL = 3.2; EST_HUMAN HIT: AW081403.1, EVALUE 3.30e-01; NT HIT: U29185.1, EVALUE 8.00e-04

SEQ ID NO: 32186 - DNA, 181 bp, Homo sapiens
  MAP TO AP000428.1; EXPRESSED IN LUNG, SIGNAL = 2.8; NT HIT: X15577.1, EVALUE 3.60e-01; SWISSPROT HIT: P23845, EVALUE 4.90e+00; EST_HUMAN HIT: AV750884.1, EVALUE 2.50e+00
acatgccatcagcagtcttatcagtccttgcattcttacctttggccttgattctgctcctattgccattacattgattcaaaccttccttaatttccacctagatgattggaaaagacactctttcatcctgcctctctatgctgttgttcacctcgtaaccataaaagcttattccttc

SEQ ID NO: 32187 - DNA, 229 bp, Homo sapiens
  MAP TO X97051.1; EXPRESSED IN HBL100, SIGNAL = 0.98; EXPRESSED IN LUNG, SIGNAL = 4.3; NT HIT: M22431.1, EVALUE 2.00e-03; EST_HUMAN HIT: R05859.1, EVALUE 6.00e-84; SWISSPROT HIT: Q61188, EVALUE 5.10e-02
aaatgcaatgaccagcacaggacccagaataaagagagttgccagcggacgcctggtgtccatgtgtccaggtgagttcgagatgcggacggcgctggccagccagtcacaccctaagtcaatctgctgcatgcatttgtccttgccacagcagaaaacgagaaagcctttgggctgcaaagcttcacaggctcctcttctcccgactccatggaaacagctacaaaga

SEQ ID NO: 32188 - DNA, 136 bp, Homo sapiens
  MAP TO AC004998.2; EXPRESSED IN LUNG, SIGNAL = 2.6; NT HIT: AF023424.1, EVALUE 6.60e-02; EST_HUMAN HIT: BE272698.1, EVALUE 3.10e-01
ttctatgatagccttcaaaactagtagcctcgcaaacatgagagctgtgagaaccagcaggcttgccttcaccagaggagccagactggatttggagctcctcaaaacgtctcatctcgaggccattttcactatt

SEQ ID NO: 32189 - DNA, 435 bp, Homo sapiens
  MAP TO AL078615.2; EXPRESSED IN LUNG, SIGNAL = 9.8; NT HIT: AF100956.1, EVALUE 4.00e-03; SWISSPROT HIT: P57052, EVALUE 6.00e-67; EST_HUMAN HIT: D61628.1, EVALUE 0.00e+00
cagcagtggcatgtgtataatccagtgctgcagcttccttactatgaaatgacagctccacttcctaatagtgcatccgtgtcttcctcactgaatcatgttccagatcttgaggctggacccagctcatataaatggactcaccaacaaccaagtgactctgacctttatcagatgacagctccacttcctaatagtgcatccgtgtcttcctcactgaatcatgttccagatcttgaggctggacccagctcatataaatggactcaccaacaaccaagtgactctgacctttatcagatgaataaacgaaagagacaaaagcaaacaagtgatagtgatagtagcacagacaacaacagaggcaacgaatgtagccaaaagttccgaaagtctaagaagaagaaaagatactagtattacctacaaatgaaa

SEQ ID NO: 32190 - DNA, 140 bp, Homo sapiens
  MAP TO AC010727.1; EXPRESSED IN LUNG, SIGNAL = 1.2; SWISSPROT HIT: Q36090, EVALUE 3.90e+00; EST_HUMAN HIT: AI951812.1, EVALUE 4.70e-01; NT HIT: AL163246.2, EVALUE 2.00e-05
acttgccctgtgctatcttattttcccctacctcctggtgggaagagagaaaattgattattttaaggaactggctcatgtgatagtgggggccaacaagtctgacatctgcagggcagtccagcagactggacattcag

SEQ ID NO: 32191 - DNA, 442 bp, Homo sapiens
  MAP TO AC009396.3; EXPRESSED IN LUNG, SIGNAL = 3.3; SWISSPROT HIT: Q21313, EVALUE 2.00e-04; NT HIT: gi4758827, EVALUE 0.00e+00; EST_HUMAN HIT: AA815329.1, EVALUE 3.00e-29
gttgtttataagaataatgacatccgtctggagctgtctcgcctggcccggattgcggacaccaagatgaaaatctatggcgaagttgtgtttaagtgtgagaatgtggccacactggaccccatcaactttgagaccccagaggcttacatcagcttgcccaagtggaacactaaacgtatgggctccatctcctttgacttccgcaccacagagcccaatggcctgatcctcttcactcatggaaagccccaagagaggaaggatgctcggagccagaagaatacaaaagtagacttctttgccgtggaactcctcgatggcaacctgtacttgctgcttgacatgggctctggcaccatcaaagtgaaagccactcagaagaaagccaatgatggggaatggtaccatgtggacattcagcgagatggcagatcaggta

SEQ ID NO: 32192 - DNA, 154 bp, Homo sapiens
  MAP TO AP000172.1; EXPRESSED IN LUNG, SIGNAL = 3.4; EST_HUMAN HIT: N81203.1, EVALUE 3.60e-01; SWISSPROT HIT: P19751, EVALUE 5.10e+00
tttcagggacaagcagacggcgacagggatcacactgtcacctgtgtgcgccttttcttctaatggccttaaactgccaagtggctgcaactgcagcgtgctgattttaaatgcttttatggaaagcaccatccccttttcgactagcatcact

SEQ ID NO: 32193 - DNA, 222 bp, Homo sapiens
  MAP TO AL109798.8; EXPRESSED IN LUNG, SIGNAL = 0.91; NT HIT: AF046145.1, EVALUE 1.00e-122; EST_HUMAN HIT: AA227320.1, EVALUE 9.00e-40; SWISSPROT HIT: P20831, EVALUE 3.20e-01
aagtaagtctccttccttttcacatgtcccaacaggttgtatgtctggggaatcgacaagcctccaaaaatcatttctgttgtcactaccatccagtcgtaaccgtaacctggccccagtaattccaataaccgtagcaatacatactgaagtggcattgcgagggtcacgggcttccaatttcataccaactttgaaatcattcacaggtggaatctgaga

SEQ ID NO: 32194 - DNA, 201 bp, Homo sapiens
  MAP TO AC010134.1; EXPRESSED IN LUNG, SIGNAL = 5.5; SWISSPROT HIT: Q01522, EVALUE 2.90e+00; EST_HUMAN HIT: F31626.1, EVALUE 1.00e-13; NT HIT: gi11429810, EVALUE 1.00e-109
ttaatttttcataatgatattcatttgcaacgcaatttggtcaccaggtatgctatgctcagaaagagccacacaatcagtaaattggggctcagagctaataaagggatggaacagaggaggctggggtctagccttaagtctcggatgggcaccaggccgctcaagttcttctgggtgactacctcccgtgttccaatg

SEQ ID NO: 32195 - DNA, 167 bp, Homo sapiens
  MAP TO AC004838.2; EXPRESSED IN LUNG, SIGNAL = 7.7; SWISSPROT HIT: Q01277, EVALUE 3.80e+00; NT HIT: gi8394068, EVALUE 3.80e-01
gactccagtcttccttcagaattcactatgtggaagcctaacaggaaggcagctgaaaaagtggaaatgtagtttgcggagccccagacctactaagacaaggaaaaatacaagagtgtgtttgaaactaagtgataatggcttaaaaacaagcacgtatgataaaa

SEQ ID NO: 32196 - DNA, 162 bp, Homo sapiens
  MAP TO AC007882.2; EXPRESSED IN LUNG, SIGNAL = 5.6; NT HIT: U62765.1, EVALUE 3.20e-01; EST_HUMAN HIT: N66966.1, EVALUE 8.60e+00
atgtactgtgatgccataatacatatgaagtataatgtcataatatattgtgatgtcataacacatactgatgatgatgtcacaatatactgtgacgtgataatgcctatgaattttgatgtcataatacatgtgcattatgatgtcatgatatattgtgat

SEQ ID NO: 32197 - DNA, 161 bp, Homo sapiens
  MAP TO AC007748.2; EXPRESSED IN LUNG, SIGNAL = 1.3; EST_HUMAN HIT: BE047451.1, EVALUE 6.00e-03; SWISSPROT HIT: O24310, EVALUE 9.90e-01
gtttccactcctgattgtctttctcatcattacagtgttcaggtttctatggctgcgttcacgggtttcaatccagctctgactcttaccagcctgcagacctgggtcacccctgcactgcggctttctcatccacacagtggggatcatggtggtaccta

SEQ ID NO: 32198 - DNA, 141 bp, Homo sapiens
  MAP TO AF057177.1; EXPRESSED IN LUNG, SIGNAL = 6.6; NT HIT: AF057177.1, EVALUE 4.00e-74; EST_HUMAN HIT: AV733743.1, EVALUE 4.00e-26; SWISSPROT HIT: P03979, EVALUE 5.00e-11
gccttctacatccactggtacctacgccaggaggggaaggccccacagcatcttctgtactatgatgtctgcaactccagggatatgttggaatcaggagtcagtcaggaaagcatgatacttatggaagtagaaggataa

SEQ ID NO: 32199 - DNA, 371 bp, Homo sapiens
  MAP TO AC006042.2; EXPRESSED IN LUNG, SIGNAL =  11; EST_HUMAN HIT: BF540825.1, EVALUE 2.20e-02; SWISSPROT HIT: O35847, EVALUE 2.00e+00
tttgaagaaggtagtccactagctgatgctattggagccaccttgaaaattaaccttgggagttcctctctttccttatctaatctgtcacattggcaagtatggttaatttgtgttggcagtgcatctgtcaatgcaagagacactccatcaacctgttctatttttgtgtttgtaaaatgtcagagcatagaaatcatggtcttttatataaatgaggaaaatagaatgacaattggacctgaattcaagttgtttttttcactgtcttgtactttattcacagtgattttagatgagcctcacataaagaatattaacgagaaatatggagctattctacttgaggctcttcccaaaagtctgctttg

SEQ ID NO: 32200 - DNA, 359 bp, Homo sapiens
  MAP TO AC010722.1; EXPRESSED IN LUNG, SIGNAL = 2.7; NT HIT: AJ276803.1, EVALUE 0.00e+00; SWISSPROT HIT: P57615, EVALUE 1.90e+00
aatggcaacctccacttcataaaagcaatgctcatcccttgggataccagcacataatttctcacgatcaatgcgagcgccggtagtgaagatctcaccagtatcctcttcaattcgaatcagtggcacatctccggtcttgtacactagcttgaactgcatagtagttgtcaaggacttgtttggaatcagcgacaagttaaggtctttcaacaagttgcctatcaggacgttttctggaatttcttctcggatggtgtagtttttctcctgggcgccagagtggaacaccacgcatactagcaggaccgcgaaaatgtacgtcccggacaacaaacacttgtgacagtttgttgtat

SEQ ID NO: 32201 - DNA, 102 bp, Homo sapiens
  MAP TO AC009483.2; EXPRESSED IN LUNG, SIGNAL = 1.5; SWISSPROT HIT: P24380, EVALUE 4.10e+00; EST_HUMAN HIT: BE006225.1, EVALUE 1.30e+00
gcagataatgagagttctcctctatcttctggggttgagaaattgacatgtgtgaagttgagggtgccagcaccacctccctggcagcatggaaaaagccat

SEQ ID NO: 32202 - DNA, 98 bp, Homo sapiens
  MAP TO AC009226.2; EXPRESSED IN LUNG, SIGNAL =   3; EST_HUMAN HIT: AI972501.1, EVALUE 3.00e-03; NT HIT: AJ277661.1, EVALUE 9.00e-04
atgttgcatggctataagatccttgtctggacctacaaggtccagaagaagaaactgaagcccagagaagttaggtaatttgcacaagaatacttagc

SEQ ID NO: 32203 - DNA, 83 bp, Homo sapiens
  MAP TO AC009957.2; EXPRESSED IN LUNG, SIGNAL = 1.3; NT HIT: U80017.1, EVALUE 5.70e-01; EST_HUMAN HIT: AW197270.1, EVALUE 1.10e-02
tcttaagaacttggtagaaacaaagaccttcttcacaggaaacttaagtactaagtccatcttaggagttttatccaggaaac

SEQ ID NO: 32204 - DNA, 292 bp, Homo sapiens
  MAP TO AC010137.1; EXPRESSED IN LUNG, SIGNAL = 1.7; NT HIT: gi8923266, EVALUE 1.00e-35; SWISSPROT HIT: P35867, EVALUE 3.30e-01; EST_HUMAN HIT: AW838419.1, EVALUE 2.00e-35
atccctgggatttaagcattccagagaggagccaaggagaatctggagttcatttgtacattctagtaaatctagtagtttgttgctttccagattgaaggcttccaagtctttggaggaagagaacaagatacttgctgaaacctgtctgtaaaactctgcctctgcaattgggacaattttcagatgtggaaaactccagcgaaatatgcaggatgacattttcactttcttaagtacatctgaaagcaataaccagttttgtggtctgcaaaataaaaagaaaaggtag

SEQ ID NO: 32205 - DNA, 126 bp, Homo sapiens
  MAP TO NM_006902.1; EXPRESSED IN LUNG, SIGNAL = 0.9; SWISSPROT HIT: P28572, EVALUE 1.30e+00; EST_HUMAN HIT: R84418.1, EVALUE 2.70e-02
gaaaaaatagacaaatatgagacagatgatgacattgtacaaatgaataaatatttttactgtctgcataatcatgcccaaaatccatgcttattcattggcatacttgaggactttgttgtaggt

SEQ ID NO: 32206 - DNA, 545 bp, Homo sapiens
  MAP TO AL033383.24; EXPRESSED IN LUNG, SIGNAL = 0.95; NT HIT: AL163207.2, EVALUE 5.40e+00; EST_HUMAN HIT: Z21378.1, EVALUE 3.00e-88; SWISSPROT HIT: P87207, EVALUE 3.00e-01
acagaaatgagattcatgttagttcatgttcaactatagaaaacaatgatggtgaaacattacctgctccaaattggaatttgaaacatggaaacagcagtgtggaagaaaatttcacagatgaaagtgatttatcagaaaatgagaagacaaatgatactttactcagctattttaaaaaggtggacctgaacttgaagccagaaacaataaaaaatgttgaggaacctttcaccgaggagccaaatgaagtatttccatatcctgattttctccctcctcctttcagtgctctagacttgcacaatttagccctctccaaatctgacaattggaaagtgacagtggaccctgcagaaacctctgttgaacacttgataactcgtttactggaactagaacgattacaacatatgactattcaaaaagagaggccaagactacaaacgactttctgtactccagcagttactgaacgaccctcttcctccaaagctacaccaaaagtgagacagccaaaactttgcgactctttgagtcttcag

SEQ ID NO: 32207 - DNA, 111 bp, Homo sapiens
  MAP TO Z92540.1; EXPRESSED IN LUNG, SIGNAL = 2.2; SWISSPROT HIT: P38760, EVALUE 9.10e+00; EST_HUMAN HIT: AI565615.1, EVALUE 2.50e-01; NT HIT: AB046800.1, EVALUE 9.60e-01
aaagatgctacaaatgaaactgcagctttgattgtcattatcatcatcggattttatttctgatgatctgtggtcattcttcataacccaactgacctttgttttaggcaa

SEQ ID NO: 32208 - DNA, 184 bp, Homo sapiens
  MAP TO AH007965.1; EXPRESSED IN LUNG, SIGNAL = 0.66; NT HIT: AF149774.1, EVALUE 1.00e-99; SWISSPROT HIT: Q91987, EVALUE 9.70e-01; EST_HUMAN HIT: BE932231.1, EVALUE 2.00e-69
gtccgcaaaattctggacctggtacagagcaagggcgaggaggtgtccgagttcttcctctacttgctccagcaactcgcagatgcctacgtggacctcaggccttggctgctggagatcggcttctccccttccctgctcactcagagcaaagtcgtggtcaacactgacccaggtaggagtc

SEQ ID NO: 32209 - DNA, 359 bp, Homo sapiens
  MAP TO AL033378.7; EXPRESSED IN LUNG, SIGNAL = 1.1; EST_HUMAN HIT: AU141284.1, EVALUE 0.00e+00; NT HIT: AB018333.1, EVALUE 0.00e+00; SWISSPROT HIT: P26550, EVALUE 1.10e+00
gtggggaggagcacgtgtttgagaattcgccggtcctggatgaacggtccgccctctactctggcgtgcacaagaagccccttttctttgatggctctcctgagaaacctcccgaagatgactcagactctctcaccacgtctccatcctccagcagcctggacacctggggggctggccggaagttggtcaaaaccttcagcaaaggagagagccggggcctgattaagccccccaagaagatggggacattcttctcctacccagaagaagaaaaggcccagaaagtgtcccgctccctcaccgagggggagatgaagaagggtctcgggtccctaagccacggggtaagtacggat

SEQ ID NO: 32210 - DNA, 172 bp, Homo sapiens
  MAP TO AC007678.1; EXPRESSED IN LUNG, SIGNAL =   8; NT HIT: gi5032158, EVALUE 7.00e-27; EST_HUMAN HIT: T78159.1, EVALUE 9.00e-27; SWISSPROT HIT: P09627, EVALUE 7.50e-01
gttccagtccagtgaaatgacatctgacatctttgttacttgggatgtcatggccccttctggtatacggtgccttaacataagctgggtggaggccctgttgccattctcattcaggttccatatctttgcagttgagtcttcagatctgcagaataaaaacacaggaggc

SEQ ID NO: 32211 - DNA, 108 bp, Homo sapiens
  MAP TO AC009492.1; EXPRESSED IN LUNG, SIGNAL = 1.8; EST_HUMAN HIT: BE906919.1, EVALUE 3.40e-01; SWISSPROT HIT: O35609, EVALUE 4.70e-01
gttttgagaatacttgtctttttttctctggatgctattgagacgctctctctgctcctgttttttcagctgtttggccatcatgtgcttggatacgctttggtttgt

SEQ ID NO: 32212 - DNA, 83 bp, Homo sapiens
  MAP TO AC009185.2; EXPRESSED IN LUNG, SIGNAL =   5; NT HIT: L10717.1, EVALUE 1.00e-39; EST_HUMAN HIT: AV649905.1, EVALUE 1.00e+00; SWISSPROT HIT: Q08881, EVALUE 9.00e-09
cttacaacagccttggtgaaaacagacacggtgtatgttcctgcagtcctggaatcccttaccatgaaggctccttctttgcc

SEQ ID NO: 32213 - DNA, 75 bp, Homo sapiens
  MAP TO AC009303.1; EXPRESSED IN LUNG, SIGNAL = 3.7; NT HIT: U67539.1, EVALUE 2.30e+00; EST_HUMAN HIT: AI902949.1, EVALUE 6.00e-35
gaactgggatacagagtaggagcggatatagtcacccatctcttcttttgtttctatagctcgtttcaccagcca

SEQ ID NO: 32214 - DNA, 172 bp, Homo sapiens
  MAP TO AC006548.19; EXPRESSED IN LUNG, SIGNAL = 0.67; EST_HUMAN HIT: BF347817.1, EVALUE 5.90e-01; NT HIT: AL163201.2, EVALUE 2.00e-92; SWISSPROT HIT: P50876, EVALUE 1.70e+00
atggccaccaagaccatcctgatgctggtgaattcctttgtgctgatgtactcagtggacttcatcctctcatcatccacaatgctgttatgggtaattggccctgtcacctatggtgtccacaagtttgtggtcaatgcctatgccactgtcagtcctctggtgctaatca

SEQ ID NO: 32215 - DNA, 395 bp, Homo sapiens
  MAP TO AL023754.1; EXPRESSED IN LUNG, SIGNAL = 1.5; EST_HUMAN HIT: AW176422.1, EVALUE 5.70e+00; SWISSPROT HIT: P39690, EVALUE 6.40e+00
atccttcttgatgctgggcagcagtaataggatcaagaagaaagcctttctcctcctgtgctcccaaggatgcccagcgggagactgtgaggagatggaacacagccttcactctgttaattgttcaagagcaaatcacctgtcagcaggaaacagaaaaaaagacagcacgaaattcagagtcagaacaataaataacattcagtgctatacccttgagaaaaataaagctgccaacattctgtttcttagggaaaacaaaaatgctcagtgtttctgcagacctgtgaaatccagtagaaaatactgcagcctgcccagactggtcgtctcttttatcaactcagggtgcaccagcccaaaccccacagccagcaccactgtccagagagaca

SEQ ID NO: 32216 - DNA, 270 bp, Homo sapiens
  MAP TO AC009892.1; EXPRESSED IN LUNG, SIGNAL = 1.1; NT HIT: AK024467.1, EVALUE 0.00e+00; EST_HUMAN HIT: AW951147.1, EVALUE 3.00e-12; SWISSPROT HIT: P43629, EVALUE 2.00e-15
gctccctggtgcatgcaggagccagggtgagcctgcgctgtcactcagaactggcctttgatgaatttatcttatacaaagaggggcacatacagcattcccagcagcttgaccaggggatggaggctgggatccattacgtcgaggctgtcttttccatgggtcctgtaacgcctgcccatgcaggagcctacagatgctgtggttgtttcagtcactcccgctatgagtggtcggctcccagtgaccccctggacattgtgatcacag

SEQ ID NO: 32217 - DNA, 93 bp, Homo sapiens
  MAP TO AC010170.3; EXPRESSED IN LUNG, SIGNAL = 1.6; EST_HUMAN HIT: BF446402.1, EVALUE 1.10e+00
ctttgaaaggtgttatgtcaatgaggaaggccattatagaagatactatatcaacaaggatagtcatggtagaagatacattcacaagggtga

SEQ ID NO: 32218 - DNA, 190 bp, Homo sapiens
  MAP TO AC009925.2; EXPRESSED IN LUNG, SIGNAL = 3.8; NT HIT: U72723.1, EVALUE 4.40e-01; EST_HUMAN HIT: AV746904.1, EVALUE 1.00e-11; SWISSPROT HIT: P42799, EVALUE 3.70e+00
ctcctagctccaaccggctctgtggagcacgtagcagcagcttcaccaccccaaatgcagccaccatcatggcagcagcgacttcagatgggctgccactgcccatcaattccctctctgaagaggtacgtttaactgctgttaggatagggacaatgactgctcttaactgcttcatgctgacaggggg

SEQ ID NO: 32219 - DNA, 180 bp, Homo sapiens
  MAP TO AC009957.2; EXPRESSED IN LUNG, SIGNAL =  14; SWISSPROT HIT: P34029, EVALUE 2.90e+00; EST_HUMAN HIT: AI701637.1, EVALUE 2.50e+00; NT HIT: AE000814.1, EVALUE 1.70e+00
ccttctcctgttccagaaacgaaggaatttgcattatcaatgcttctcagctattgtgttctagggtttctactagatattgtgagttttgatgataaaccttcagatgttgatgatgtcaaaacttgggagaattcaggatatttatgttctattatcacctgttttacaggaaaaaag

SEQ ID NO: 32220 - DNA, 496 bp, Homo sapiens
  MAP TO AC010731.1; EXPRESSED IN LUNG, SIGNAL =  12; EST_HUMAN HIT: AI221878.1, EVALUE 1.00e-116; SWISSPROT HIT: Q04820, EVALUE 2.00e-10
gcctctgctcctgcctgctacaacctaattcccatattgacgagtggcgaagtgtttgggatgcatacagaaattagcataactctatttgacaacaagcaggcggaagaacatctcaaaagccttgtggtggagacccaagacctggcatctcccgtcctgcgcagtgtctccatctgcacgaaggtggaggaggccttccgccaggcccacgtcattgtggtgctggatgacagcaccaacaaggaggtgttcactctggaggactgcctccgaagcagggtgcctctctgcaggctctatgggtacctgatagagaaaaatgctcatgagtctgtcagagtcatcgtgggagggagaacctttgtaaacctgaagacagttttactcatgagatatgccccacgcattgcacacaacattattgctgtggcgctgggggtggaaggtgaagcgaaagccatactggccagaaaactgaagacagctccttcat

SEQ ID NO: 32221 - DNA, 88 bp, Homo sapiens
  MAP TO AC010142.1; EXPRESSED IN LUNG, SIGNAL = 2.3; EST_HUMAN HIT: BF305078.1, EVALUE 2.70e-01; NT HIT: Y15802.1, EVALUE 3.90e-02
aatatacattcaaagaaatgaaaatgggcattttagggagcctgaagctctgtaactggacaaagtaagacaaatgtaagtagaggag

SEQ ID NO: 32222 - DNA, 82 bp, Homo sapiens
  MAP TO AC009890.1; EXPRESSED IN LUNG, SIGNAL = 2.4; NT HIT: AJ002286.1, EVALUE 2.60e+00; SWISSPROT HIT: O54898, EVALUE 9.30e+00; EST_HUMAN HIT: BE549156.1, EVALUE 1.00e-03
agatgccatgtttcctgtagcctctctgagccatgccacaggatggatctatcagttctttttgtaatgaagtagtggccat

SEQ ID NO: 32223 - DNA, 135 bp, Homo sapiens
  MAP TO AC009959.2; EXPRESSED IN LUNG, SIGNAL = 1.1; NT HIT: AF020503.1, EVALUE 2.60e-01; SWISSPROT HIT: Q14140, EVALUE 3.50e-01
gttaagactctggccccggaagccaaggaacctttgacccctagtcaacctgtggaatctgagctacctctagagagactcacaatgactgagccggttaatggactttgtggagtacctcaaattgtggtcatt

SEQ ID NO: 32224 - DNA, 90 bp, Homo sapiens
  MAP TO AL117693.1; EXPRESSED IN LUNG, SIGNAL =  12; NT HIT: D83329.1, EVALUE 7.40e-01
aatgtgttcttcctcaaagaccaattcaagtgtcacctgctccatcaacctttttctaaagacacttcggtccacaaacaattctctctt

SEQ ID NO: 32225 - DNA, 91 bp, Homo sapiens
  MAP TO AC011229.1; EXPRESSED IN LUNG, SIGNAL = 1.1; EST_HUMAN HIT: AI269379.1, EVALUE 2.80e-01; NT HIT: AB018261.1, EVALUE 4.00e-30; SWISSPROT HIT: P49621, EVALUE 2.00e-06
tgagtttggcacatctgaaactttctcagccacctgcaagaagctacatgaatctgtagaaatagaagtaagaaaaaaatgaattctcttt

SEQ ID NO: 32226 - DNA, 107 bp, Homo sapiens
  MAP TO AC011403.1; EXPRESSED IN LUNG, SIGNAL = 1.5; EST_HUMAN HIT: BF356207.1, EVALUE 8.60e-02; NT HIT: AJ242480.1, EVALUE 3.60e+00
tacaagaaaggaaattccagaaaacgaagttcagactagccaagttaaacattacaaagccacttcaaaatggtaagaaatgttaggtccctagatgattgaagtca

SEQ ID NO: 32227 - DNA, 177 bp, Homo sapiens
  MAP TO AC011459.1; EXPRESSED IN LUNG, SIGNAL = 5.9; EST_HUMAN HIT: F26818.1, EVALUE 1.50e-01; SWISSPROT HIT: P47969, EVALUE 1.70e+00
acgaatgaaaaagataagctgcttttccgtggatttgccaagcttatggaagacaagcttggagctgctgaaggtcaacttgcagaggctactcatgaagaaagccaagaatcagagagagacaggctcctggatccagtcatgcctgaagacacagccctggatgtatcagttatg

SEQ ID NO: 32228 - DNA, 268 bp, Homo sapiens
  MAP TO AL035089.18; EXPRESSED IN LUNG, SIGNAL = 3.4; SWISSPROT HIT: P40603, EVALUE 4.80e-01; NT HIT: AF188894.1, EVALUE 5.50e-01
gtccagaactggagcaggctaccaagtttacagatgtgatccctgctggagagaggctgtgttcagacagatgtgtggacagaaatggcagtggagggcaaggagtgccaatgggggttacccaggggccacaggggctgggagtggaggctgcaggaggcaagaagggatgcagaaagacttccaggatggggacactcccaaacgaggtctcagagatgaccaggagccggctgagcaaagcagaattctttagtcagaagacaca

SEQ ID NO: 32229 - DNA, 140 bp, Homo sapiens
  MAP TO AF165424.1; EXPRESSED IN LUNG, SIGNAL =  20; NT HIT: AJ006345.1, EVALUE 1.70e-02; EST_HUMAN HIT: AI870847.1, EVALUE 8.10e-02; SWISSPROT HIT: P56266, EVALUE 8.80e+00
accagataaaaatattggagaagaaggtggggattgaaatactggaaacaatgaagaatatggaacagagatacccaaaatccaacaggagcatcctgacactagtgaatgtagttcctgcaacaataaaagctcccaaa

SEQ ID NO: 32230 - DNA, 109 bp, Homo sapiens
  MAP TO AF186998.1; EXPRESSED IN LUNG, SIGNAL =  11; EST_HUMAN HIT: BF082097.1, EVALUE 3.50e-01; NT HIT: gi11560136, EVALUE 8.00e-26
atgatggaaaattatcctttgaagaattcaaagcatattttgcagatggtgttctcagtggagaagaattacacgagcttttccataccattgatacacataatactaa

SEQ ID NO: 32231 - DNA, 87 bp, Homo sapiens
  MAP TO AF186997.2; EXPRESSED IN LUNG, SIGNAL = 0.94; EST_HUMAN HIT: AV761450.1, EVALUE 2.70e-01
gggatgcattcagagctgccagtggccctgggtcccgtccacacgaagaagctggaaagaatgaggccatgccaaaacagaggctga

SEQ ID NO: 32232 - DNA, 103 bp, Homo sapiens
  MAP TO AL118523.9; EXPRESSED IN LUNG, SIGNAL = 1.9; NT HIT: AF013167.1, EVALUE 2.90e+00
cctcccttttttctttttccttctttctcttttcccttctttttcctcctcttcctcctcctcttcttcctcctctacttctctctgcatttcttggctttcc

SEQ ID NO: 32233 - DNA, 195 bp, Homo sapiens
  MAP TO AC007077.2; EXPRESSED IN LUNG, SIGNAL = 0.68; EXPRESSED IN HELA, SIGNAL = 0.73; EST_HUMAN HIT: AW892592.1, EVALUE 1.20e-01; SWISSPROT HIT: O53307, EVALUE 2.50e-01
gctacctctccttcctccaccttcttccaccagaactggccagcctcggagaagttggcttttgtctgtctctcccaccagccattgccaaggatggcagccagtcctttattggagccaggtggagctggcaaagccagctgttgcctgccttgtgttgcctggacttgtggatgccaatcttcctcttccctg

SEQ ID NO: 32234 - DNA, 610 bp, Homo sapiens
  MAP TO AL021997.1; EXPRESSED IN LUNG, SIGNAL = 1.1; SWISSPROT HIT: Q15776, EVALUE 3.00e-61; EST_HUMAN HIT: AA701913.1, EVALUE 0.00e+00; NT HIT: gi9790290, EVALUE 2.00e-21
atggtgaaagtatacctgagaaccaggagttggcatcaaagcaagaaatcttaaaagaaatggaacatttgggggatagcaaactccaaagagatgtatctttggattctaagtacagagaaacttgtaaacgagacagcaaggcagaaaagcagcaggcacattccactggagagagacgccacaggtgcaatgaatgtgggaaaagcttcactaagagttcagtactcattgagcaccagagaatccacactggggagaagccatatgaatgtgaagaatgtgggaaggccttcagccggaggtcaagcctgaatgaacatcggcggagccacactggagagaaaccctatcaatgtaaggagtgtgggaaagccttcagtgccagcaatggcctcactcgacacagaagaatccacacaggggaaaaaccatatgaatgcaaagtgtgtgggaaggctttcctcctcagctcatgccttgttcagcatcagaggatacacactggagagaagcgctatcagtgtcgtgagtgtggcaaagccttcattcagaatgcagggcttttccagcatctccgagtccacactggtgagaaaccctatcagtg

SEQ ID NO: 32235 - DNA, 464 bp, Homo sapiens; identical to SEQ ID NO: 15730
  MAP TO AL034399.6; EXPRESSED IN LUNG, SIGNAL =   1; EST_HUMAN HIT: AA431200.1, EVALUE 7.50e-02; NT HIT: AL139074.2, EVALUE 4.60e+00; SWISSPROT HIT: P50748, EVALUE 1.20e+00

SEQ ID NO: 32236 - DNA, 169 bp, Homo sapiens
  MAP TO AL031661.16; EXPRESSED IN BT474, SIGNAL =  12; EXPRESSED IN LUNG, SIGNAL = 0.94; SWISSPROT HIT: P38991, EVALUE 3.40e-01; EST_HUMAN HIT: BE007082.1, EVALUE 2.30e+00
tccagggtcagacatacataaatatcaccataaatatggcactttacctttaaatagatctgaggattacttgcgaaataagtttcctgggcattgggttgcagcttgtcagttgttatgaaggagagtcgtctgaaatcagatggaaggttgtaacactaagagtgga

SEQ ID NO: 32237 - DNA, 297 bp, Homo sapiens
  MAP TO AC010125.2; EXPRESSED IN LUNG, SIGNAL = 0.91; NT HIT: Z34530.1, EVALUE 7.20e-01; EST_HUMAN HIT: AW998984.1, EVALUE 4.70e-02; SWISSPROT HIT: P08728, EVALUE 1.30e+00
aatatcaaatcagtacttaagaagaatgctgggaaaggccaggaaataaagattacagaaattgaagagaacacaaattatcagaagccaaagtccagccctagcccacccatcctctatacccattatctaggggaaatatatgatcttagggcaagtgcaagaaaggttacaattaaaaacatctcagtgatgattcttgccttaaactccagaagaatccttgtccaactctgctggatgaaggatgaagtagagaaatacacttctgcatccctgccttgccccagcatggac

SEQ ID NO: 32238 - DNA, 301 bp, Homo sapiens
  MAP TO AL034375.23; EXPRESSED IN HELA, SIGNAL = 3.8; EXPRESSED IN LUNG, SIGNAL = 2.2; EST_HUMAN HIT: AI023026.1, EVALUE 1.10e+00; NT HIT: AE004594.1, EVALUE 1.90e-01; SWISSPROT HIT: Q9WUU9, EVALUE 1.80e+00
agttctcatgctatcccacctcctgcttgtgttactcactattcaaaatttaagaataagaagtcatctgggagaaaggggatgggaccgagcatccctgaaacacggctcagggcttggttccctcctatgcccatcacctgctccctcactcaaccacaaacacggctgcaatatcagggtcagtgttccacatcccgtagcagatgaccctctgttccagaacaaacaaagtgtgcaccctataagcatgatgacattagaattagacttcaaagctagcctcaagatgctcacagac

SEQ ID NO: 32239 - DNA, 139 bp, Homo sapiens
  MAP TO AC006481.3; EXPRESSED IN LUNG, SIGNAL = 0.44; SWISSPROT HIT: Q92179, EVALUE 2.40e+00; NT HIT: AF196779.1, EVALUE 7.90e-02; EST_HUMAN HIT: BF312819.1, EVALUE 4.60e-01
gaaaaagatgagaaagagaagaaagaaaaacaaaacaagcatcaacgttgtttctaagcattttcccagtgaagagttggtcccttgccctcaccactccatcgagcccatgaagtatagctcaatgaataactaacag

SEQ ID NO: 32240 - DNA, 160 bp, Homo sapiens
  MAP TO AC002532.1; EXPRESSED IN LUNG, SIGNAL = 0.71; SWISSPROT HIT: Q15654, EVALUE 6.80e+00; EST_HUMAN HIT: AA449012.1, EVALUE 2.20e+00; NT HIT: gi6754833, EVALUE 3.70e-01
ttcctgaaggtgtgctttttagacaattgctaccaaaattggcccttgatagttaccctcaggataagattctgcaattgaatcacttgccagtcaatggcaaggggcatcctcctgctgatggtaagtgtggtcatgataagcctggcgggctgcagcc

SEQ ID NO: 32241 - DNA, 122 bp, Homo sapiens
  MAP TO AC005908.1; EXPRESSED IN LUNG, SIGNAL = 0.49; EXPRESSED IN BONE MARROW, SIGNAL = 0.51; EST_HUMAN HIT: BF243741.1, EVALUE 4.00e-01; NT HIT: AE001331.1, EVALUE 4.20e+00
tgcttattgtctgtttcccccataaaatgaaagctctgtaaatgctggcagcatcaggctcctctgtactataatcccagtttatagaactgtctcttacgctgagtgaacattcaataaat

SEQ ID NO: 32242 - DNA, 218 bp, Homo sapiens
  MAP TO AC000059.1; EXPRESSED IN LUNG, SIGNAL = 0.44; SWISSPROT HIT: P24685, EVALUE 6.10e+00; NT HIT: gi6912583, EVALUE 1.00e-120; EST_HUMAN HIT: BE244210.1, EVALUE 1.00e-114
ttaggtgactctttgccagtggaggaggtcttaaagttaatgcaagcattgttctcagaatgcaccctctttacttgattagctggtttctcaaatgggtcaaaagtgctctgtgtcctctgaactctgacttttttatcctcaggaattgtgtccaggggtttgatcactgagtccattccctggcagttccgtgtagacatctttgtgacacatat

SEQ ID NO: 32243 - DNA, 82 bp, Homo sapiens
  MAP TO AC004049.1; EXPRESSED IN LUNG, SIGNAL = 0.48; EXPRESSED IN BONE MARROW, SIGNAL = 0.52; NT HIT: gi11420402, EVALUE 9.00e-25; EST_HUMAN HIT: AI422083.1, EVALUE 8.00e-23
ggtcttctggccagagccccagtgggtgcccatggaggccctcagcatgcccagcgtggcttgatcacctgcctgtccagct

SEQ ID NO: 32244 - DNA, 219 bp, Homo sapiens
  MAP TO AC005725.1; EXPRESSED IN LUNG, SIGNAL = 0.42; NT HIT: L31625.1, EVALUE 3.30e-02; SWISSPROT HIT: P97347, EVALUE 2.20e+00
aatgagataggtgatcagaaatcaagagtgcctccagtaatgagacttgctctcctaggagccgtgtcagctgtctctgaaggcaggagcccagaagaggcatttcagaaaggagtgaatggcagctctgcacaggagtgcctggcaatccacgatgatcattttgaagaggacactcctcatgaggaacgacaattattggccttaagaaaatcagtt

SEQ ID NO: 32245 - DNA, 194 bp, Homo sapiens
  MAP TO AC003070.1; EXPRESSED IN LUNG, SIGNAL =  70; EST_HUMAN HIT: BE222594.1, EVALUE 2.00e-96; SWISSPROT HIT: P30337, EVALUE 2.00e-04; NT HIT: D50921.1, EVALUE 7.10e+00
tcagtgcggcgggaagatgtccgcgcactgctgcaggatgagctccaccacctggttctggaacaccatggtcatgggcatgctggtctcttccacctcgggccgcagcagcgtgggcccgaacacaatggccacgctctgcaccgacatgcggttctgctcgccgtgctcgatcaccctgtggcaggggtggg

SEQ ID NO: 32246 - DNA, 95 bp, Homo sapiens
  MAP TO AC006084.1; EXPRESSED IN LUNG, SIGNAL = 0.44; NT HIT: AF182034.1, EVALUE 2.00e-44; EST_HUMAN HIT: AF150259.1, EVALUE 5.00e-37
tgaaaaaatggaaagagaggcttgagaaaaagtattattctatggaaattcaagatgactaccagcctgtcactcaagaagaatttcgagagtaa

SEQ ID NO: 32247 - DNA, 78 bp, Homo sapiens
  MAP TO AC004384.1; EXPRESSED IN LUNG, SIGNAL = 0.44; SWISSPROT HIT: P08547, EVALUE 1.70e-01; EST_HUMAN HIT: BE018794.1, EVALUE 1.00e-12; NT HIT: AJ271735.1, EVALUE 1.00e-11
tgtttccattagcatatgtttcaagaaatttttcagtttctgtcttaatttcatcattgatccacatgtcattcagga

SEQ ID NO: 32248 - DNA, 268 bp, Homo sapiens
  MAP TO AC004544.1; EXPRESSED IN LUNG, SIGNAL = 0.51; EST_HUMAN HIT: AA661832.1, EVALUE 2.40e-01; SWISSPROT HIT: Q13242, EVALUE 5.60e+00
ccagctctctgaggctaactcttctcttgcacaaaacaaaaatgataacaacgccttaattcccaaagcttttagaatgatcaaacaaaacaatgcatataaaagctttgaaaactcagtcactgctgtcaactttcactaccagaaggattctgcctttgcctatagaaaatcgattattttaatttttccccacaagaatcctagaagaaatgattcaaatccttattatttcaatccatttaatcttgtgtgaattctaaaagga

SEQ ID NO: 32249 - DNA, 331 bp, Homo sapiens
  MAP TO AC004527.2; EXPRESSED IN LUNG, SIGNAL = 0.51; EST_HUMAN HIT: AF109301.1, EVALUE 1.00e-115; NT HIT: AL163204.2, EVALUE 0.00e+00; SWISSPROT HIT: gi127772, EVALUE 1.30e+00
atttaaaaaactaacctgtaaatggatttcttctaatttttctactgccgtcattgccctttcatctagctccgatttatattcttgtagtttactaagttctaccatattgtcttccatatgtgtcttaagatttaatatttcttcttccaacatctttttatccttctcaagtttttcacattgctgttgtacttttttcatagataataactcctgttgaagaacttgattgtctttagccaaatcgacacattttgaagatacagcttccttctctgctgtaagatcatcaaactgcatgaataaaatagtatagcttgataatgaa

SEQ ID NO: 32250 - DNA, 284 bp, Homo sapiens
  MAP TO AC001226.1; EXPRESSED IN LUNG, SIGNAL = 0.41; EST_HUMAN HIT: AW391684.1, EVALUE 0.00e+00; NT HIT: gi7662379, EVALUE 0.00e+00; SWISSPROT HIT: P32790, EVALUE 1.70e+00
ctggaattgaaaatcatcggaagagtaactgttgtaactcctttgcccacagtggtaccagctgttccagtgatggtggttcctttggcttttagctgtacagtgagtgctttggcaatgcatcctagaaacatgtccaagatacccagcttattccagtctcctttctctgttgagtgaatgatatcactgatatctgctggggggagggatttcactcctatgatgctggccagacgactaggggttacttcaggcaaaactcttcttagtaaagaggttac

SEQ ID NO: 32251 - DNA, 140 bp, Homo sapiens
  MAP TO AC004027.1; EXPRESSED IN LUNG, SIGNAL = 0.45; SWISSPROT HIT: P07395, EVALUE 4.00e+00; NT HIT: AF223391.1, EVALUE 4.00e-22; EST_HUMAN HIT: AW971754.1, EVALUE 1.00e-20
agagggtcagagtcatcaatatcaatattttccacttccacatcttgtcccactggaaggtcttcaggggcaataacaagcacggaactgtcatctcctatgagaacaatgcactaggtttgtttacaacagcatcacca

SEQ ID NO: 32252 - DNA, 147 bp, Homo sapiens
  MAP TO AC002980.1; EXPRESSED IN LUNG, SIGNAL = 0.45; EXPRESSED IN BONE MARROW, SIGNAL = 0.64; EST_HUMAN HIT: H73425.1, EVALUE 1.30e-01; SWISSPROT HIT: Q92075, EVALUE 9.00e+00
tattggaagcaaaccctggccttccttctccagagcttgcatcttgacctgagctttacactgttcctttctttccccattgactaggctgttgtgtgccttagaataggcttgctccatatactgctactatttatatcctcctgc

SEQ ID NO: 32253 - DNA, 97 bp, Homo sapiens
  MAP TO AC003036.1; EXPRESSED IN LUNG, SIGNAL = 0.42; EXPRESSED IN BONE MARROW, SIGNAL = 0.56; SWISSPROT HIT: P09364, EVALUE 9.50e+00; EST_HUMAN HIT: AI792791.1, EVALUE 1.90e-02; NT HIT: Z79478.1, EVALUE 3.00e-06
ggagtcagccatgtcagatttctctcactgtcataatttcttccgttacaatatttgcaaaggcagtttcagtaacacccttttccgggttaactaa

SEQ ID NO: 32254 - DNA, 197 bp, Homo sapiens
  MAP TO AC005730.1; EXPRESSED IN BONE MARROW, SIGNAL = 0.56; EXPRESSED IN LUNG, SIGNAL = 0.43; NT HIT: gi6005706, EVALUE 1.00e-107; SWISSPROT HIT: P41180, EVALUE 7.50e-01; EST_HUMAN HIT: AV704513.1, EVALUE 2.00e-59
tagaactaacagcactcagaatcacttgctgctttcccaggaatgtgacagtgcccattctctccgtcttgaaatggccagagcaggaactcaccaagtttccatggaaacccaagaatcttcctctacacttacagtagccagtagaaatagtcccgcttctccactaaaagaattgtcaggaaaactaatgaaaa

SEQ ID NO: 32255 - DNA, 88 bp, Homo sapiens
  MAP TO AC004033.3; EXPRESSED IN LUNG, SIGNAL = 0.44; NT HIT: AF056191.1, EVALUE 6.00e-23; EST_HUMAN HIT: AW499614.1, EVALUE 9.00e-23; SWISSPROT HIT: P33124, EVALUE 3.20e+00
agtaaatccagcaaggatatggagagccatgttttcctgaaggccaagacccgggtaaggccctagtaagtggagccactctggcaga

SEQ ID NO: 32256 - DNA, 132 bp, Homo sapiens
  MAP TO AC005304.1; EXPRESSED IN LUNG, SIGNAL = 0.52; NT HIT: AF101236.1, EVALUE 1.90e-02; EST_HUMAN HIT: AW827336.1, EVALUE 4.40e-01; SWISSPROT HIT: O00591, EVALUE 1.10e+00
aagcttgctgttatctgcttcatacttcatagaatttatactcaacgtagaatagaagagaatagaataaatgaggtgactgtaggcaatgcacaacttcgccttctgagaaatggtgtgatcatctacaac

SEQ ID NO: 32257 - DNA, 206 bp, Homo sapiens
  MAP TO AC002490.1; EXPRESSED IN LUNG, SIGNAL = 0.48; SWISSPROT HIT: P32018, EVALUE 3.30e-01
  unsure 106
  unsure 158
  unsure 163
  unsure 164
  unsure 179
  unsure 181
  unsure 184
aagagtcctacatcatctctccagggggtccctgcctctgggaccatcatctctggagcatcctcctggacctctggcagctctgccatcccccaaaccaggaggncagaggtcccagggatccgcggagcagggacaccaaggtggccgtggagtgnaggannccctgatgggccgtncnagnactccatgactggaaggaaggc

SEQ ID NO: 32258 - DNA, 117 bp, Homo sapiens
  MAP TO AC005589.1; EXPRESSED IN LUNG, SIGNAL = 0.42; EST_HUMAN HIT: AI908500.1, EVALUE 1.50e+00; NT HIT: U22971.1, EVALUE 2.60e-01
cacgttacaactaacagaccaaatgacattcatgggcatcaatattaaagctcatgagctctctattaaagagcaccaagagaatgcaaacaaaacagatgatggtaatggagttcg

SEQ ID NO: 32259 - DNA, 393 bp, Homo sapiens
  MAP TO AC005191.1; EXPRESSED IN LUNG, SIGNAL = 0.43; SWISSPROT HIT: Q9UL62, EVALUE 3.00e-47; NT HIT: gi11420764, EVALUE 0.00e+00
tggtgccctgttgtgcctggctatttcccagcctataggaatttctcttacctgcttctctccgctgggccgcctgtagctgagcagaagctccacagcgcccaccacttccttgcgtatggcatagagcaatgcatcacccacatacacgctgtggttcagcagtagctccatgatctccaggttctcgttctcaatggcaatgagcagggcactccggcccaaggggtccatgcagttgatgttaacattatagtagatctcagcctcctgaagggcctgcttcacagtggcatagtcccccttctccacagcattgaggaaggccttctcctctgcagagagctctgtctcagccctcacaatttgcagggggatgcggtctctgtacgg

SEQ ID NO: 32260 - DNA, 181 bp, Homo sapiens; identical to SEQ ID NO: 27571
  MAP TO AC005206.1; EXPRESSED IN LUNG, SIGNAL = 0.53; SWISSPROT HIT: P34369, EVALUE 1.70e+00; NT HIT: gi11465934, EVALUE 4.20e-01; EST_HUMAN HIT: BE925803.1, EVALUE 1.60e-01

SEQ ID NO: 32261 - DNA, 163 bp, Homo sapiens
  MAP TO AC004544.1; EXPRESSED IN LUNG, SIGNAL = 0.43; EST_HUMAN HIT: AA463883.1, EVALUE 1.40e-01; NT HIT: AF207550.1, EVALUE 2.00e-03
gtacacagacaccacaacaagatgttccaggcttatcttgtatttatgctgttccagcctggaatcagctacttttcccagaaactctggtttctgatttattgaaccataatttttagaaactacattgtggttctcagtgtgctcattactatttgggtat

SEQ ID NO: 32262 - DNA, 190 bp, Homo sapiens
  MAP TO AC005951.1; EXPRESSED IN LUNG, SIGNAL = 0.44; SWISSPROT HIT: Q60563, EVALUE 7.60e-01; NT HIT: AB015294.1, EVALUE 1.10e-01; EST_HUMAN HIT: AW172846.1, EVALUE 1.70e-01
agatctcaaactaaatgcctcttcctcaaaatggtctttctcttcaatcacacaaatgcagtcatccatcatagcatcctttttaattctctgcagagtaattatgatgtcatgtttttcctgcttattgattcctttttttgttgtttcctccagtacctctaccccactgctaaaatataagcaacct

SEQ ID NO: 32263 - DNA, 349 bp, Homo sapiens
  MAP TO AC003958.1; EXPRESSED IN LUNG, SIGNAL = 0.49; EXPRESSED IN BONE MARROW, SIGNAL = 0.5; SWISSPROT HIT: O76011, EVALUE 1.00e-54; EST_HUMAN HIT: BF569905.1, EVALUE 0.00e+00; NT HIT: Y16790.1, EVALUE 0.00e+00
atgtcttacagttgttgcctgcccagcctgggctgccgcaccagctgctcctcccggccctgcgtgccccccagctgccacggctacaccctgcctggggcctgcaacatccccgccaatgtgagcaactgcaactggttctgtgagggctccttcaatggcagcgagaaggagactatgcagttcctgaacgaccgcctggccagctacctggagaaggtgcgtcagctggagcgggacaacgcggagctggagaaactcatccaggagcggtcccagcagcaggagcccttgctgtgccccagctaccagtcctacttcaagaccattgaggagctccagcagaagg

SEQ ID NO: 32264 - DNA, 213 bp, Homo sapiens
  MAP TO AC004041.1; EXPRESSED IN LUNG, SIGNAL = 0.41; EXPRESSED IN BONE MARROW, SIGNAL = 0.52; SWISSPROT HIT: P12753, EVALUE 1.50e+00; EST_HUMAN HIT: AW813884.1, EVALUE 1.00e-95; NT HIT: U63139.1, EVALUE 1.00e-100
ttactcccagttcattactcagctaacagacgaaaaccagtcatgttgccccgtttgtcagagagtttttcagacagaggctgagttacaagaagtcatcagtgatttgcagtctaaactgcgacttgctccagataaactcaagtcaacagaatcagagctaaaaaaaaaggaaaagcggcgtgatgaaatgctgggacttgtgcccatgag

SEQ ID NO: 32265 - DNA, 258 bp, Homo sapiens
  MAP TO AC002093.1; EXPRESSED IN LUNG, SIGNAL = 0.5; EST_HUMAN HIT: BE798126.1, EVALUE 1.00e-114; SWISSPROT HIT: P34369, EVALUE 8.00e-14; NT HIT: gi11426714, EVALUE 1.00e-121
ttcctgctgtccctcaacggctggtggtcatagaaccagtccaacacaggggcgtcctcctcagggtccagctctagctgaatggcctccagtggctcaacatctaggatgttgtcagcatagtccaagggcggctcctcatcatcaaaagggggaaaacgcatcctcttgaaatgcctcctatctcttttttctcggcgcatcataatccacattgacctggaaggcaagacatcacacaaccatttctacccactg

SEQ ID NO: 32266 - DNA, 168 bp, Homo sapiens
  MAP TO AC004869.1; EXPRESSED IN LUNG, SIGNAL = 0.53; NT HIT: AJ231163.1, EVALUE 3.30e-01; EST_HUMAN HIT: AW749363.1, EVALUE 3.90e-01
gtaacaatcacctcataaagggatcagttctccagattgttttatcatttaatgaaattaaatttaaaatgatagatttagtgtatgcatttgatcaactgactctgaaatttacatacaagaataacatcctaagaattgataagacaaagttcaaaaagcaaagca

SEQ ID NO: 32267 - DNA, 125 bp, Homo sapiens
  MAP TO AB019437.1; EXPRESSED IN LUNG, SIGNAL = 0.43; SWISSPROT HIT: P19181, EVALUE 1.00e-05; EST_HUMAN HIT: AI147237.1, EVALUE 5.00e-13; NT HIT: Z12341.1, EVALUE 1.00e-46
ggttgaccatctccagagaaaacaccaagaactcactgtatctgcaaataaacagtttcattgctgacaccatggccgtctattactgtaagagacacagtgaggagaagtcagtgtgagcccag

SEQ ID NO: 32268 - DNA, 467 bp, Homo sapiens
  MAP TO AC003071.1; EXPRESSED IN LUNG, SIGNAL = 0.42; EST_HUMAN HIT: R60817.1, EVALUE 1.00e-126; SWISSPROT HIT: P19158, EVALUE 1.10e-01; NT HIT: AF233437.1, EVALUE 0.00e+00
ccgaatgtaaagaggggcttgtgtgcaatggtgccccagagactgaaaacagggcctcagagcagcccccaggtcttagcaccctccagatgtaccccacacccaatgggcattgcgccaatggggaggctggtaggagcaaggactcactgagccgtcagctgtctgctatgagctgcagctctgcccacttacactcaaggaacttgcaccacaagtggctgcatagccactcaggaaggccatctgcaaccagcagccccgaccagccttcccgcagccacctggacgatgatggcatgtcagtgtacacagacacgatccaacagcgcctgcgtcagattgagtcaggccaccagcaggaagtagaaactttgaagaaacaagtccaggagctgaagagtcgcctggagagccagtacctgaccagctccctacactttaatggagactttggggatgaggtg

SEQ ID NO: 32269 - DNA, 175 bp, Homo sapiens
  MAP TO AC002466.1; EXPRESSED IN LUNG, SIGNAL = 0.41; NT HIT: U67279.1, EVALUE 4.10e-01; SWISSPROT HIT: P36464, EVALUE 3.90e+00
gaagaaaatgatgagagtaatgccgagggaagacagcagtgtgtttaacatcacaagatcagagggagcccagaagcagaacctagaaaaatcctttcacagcatgcaatatagaacaaaaatccccagaaaactcaaatactactattatcatgtttcaaaacaagaaagctaa

SEQ ID NO: 32270 - DNA, 157 bp, Homo sapiens
  MAP TO AC006151.3; EXPRESSED IN LUNG, SIGNAL = 0.48; EST_HUMAN HIT: AI631520.1, EVALUE 1.00e-78; NT HIT: L36467.1, EVALUE 2.30e-02; SWISSPROT HIT: Q12659, EVALUE 4.00e+00
ttggactaccatttatccaagacgacgaattgtgctctggaatgcagaatacagcactgggagttggcctcaggacttcaagatttgctgcaggcattcagaagagttatttaaattctctggacttcagttttctcacctacaaatacaaacaaag

SEQ ID NO: 32271 - DNA, 260 bp, Homo sapiens
  MAP TO AC005701.1; EXPRESSED IN LUNG, SIGNAL = 0.47; SWISSPROT HIT: P23098, EVALUE 1.00e-17; NT HIT: AJ404468.1, EVALUE 0.00e+00
ctgaacaagggcgtggatcttaaggccagattccttgatgagattgtaatatttttccattcgatcatgccgatcatccagagaaagaagggattccctttttccatcttttgtcttaaatattggagtcacccatgttttcatgatgttttggatctcttccacattgtctttagttttctgaattctttgttcaagatcatgaatactactggtgatttcagtgacataatcgcaaatgcctgttccccaaaagaaac

SEQ ID NO: 32272 - DNA, 122 bp, Homo sapiens
  MAP TO AC004468.1; EXPRESSED IN LUNG, SIGNAL = 0.41; EST_HUMAN HIT: BE781438.1, EVALUE 1.60e+00; SWISSPROT HIT: P11532, EVALUE 1.00e-17; NT HIT: X06178.1, EVALUE 9.00e-63
aacaagatcttctttcaacactgaagaataagtcagtgacccagaagacggaagcatggctggataactttgcccggtgttgggataatttagtccaaaaacttgaaaagagtacagcacag

SEQ ID NO: 32273 - DNA, 99 bp, Homo sapiens
  MAP TO AC004820.2; EXPRESSED IN LUNG, SIGNAL = 0.43; SWISSPROT HIT: Q13563, EVALUE 2.00e-03; EST_HUMAN HIT: AW857928.1, EVALUE 1.20e+00; NT HIT: AF182034.1, EVALUE 4.00e-49
tttaatcattttgccaagttcaaaatctggccttctgcctattgaatagtcagctttcacttcagaataggtatcattaataattgccaagaacatatt

SEQ ID NO: 32274 - DNA, 309 bp, Homo sapiens
  MAP TO AB019441.1; EXPRESSED IN BONE MARROW, SIGNAL = 1.8; EXPRESSED IN LUNG, SIGNAL = 0.42; NT HIT: M37277.1, EVALUE 1.00e-124; SWISSPROT HIT: Q99372, EVALUE 1.10e+00; EST_HUMAN HIT: BE295500.1, EVALUE 5.00e-89
ctccctgggatccccggacaggttgcaggcacactgtgtggcagggcaggctggtacatgctggcagctcctggggcctgatgtggagcaagcgcagggctgtatacccccaaggatggcacagtcagtgaattccagagagaagcagctcagccacactgcccaggcagagcccgagagggacgcccacgcacagggaggcagagcccagctcctccacagccaccaccacctgtgcacgggccaccaccttgcaggcacagagtgggtgctgagaggaggggcagggacaccaggcagggtgagcac

SEQ ID NO: 32275 - DNA, 131 bp, Homo sapiens
  MAP TO AC005886.1; EXPRESSED IN LUNG, SIGNAL = 0.44; NT HIT: AL161596.2, EVALUE 2.50e-01; EST_HUMAN HIT: BE145478.1, EVALUE 1.20e+00
catccatcgaacagaaacctcctgatgctgctgttggtaacgtctggttgtcaccagccacggaccttgttttcttttcatcactgtcatgtttcttctccctctttggggatctgtcttccatgtgtttt

SEQ ID NO: 32276 - DNA, 481 bp, Homo sapiens
  MAP TO AC005906.1; EXPRESSED IN LUNG, SIGNAL = 0.47; EST_HUMAN HIT: AV731469.1, EVALUE 3.00e-08; NT HIT: AL163284.2, EVALUE 5.00e-06
tggaaaactactacaatccaatttaggcaaaactactggtggcccaggcctttcaagaatgatggtttgggtcattttattaggcaaaagcacaaccaactgagatatttgtggaggtcacagggaatatggaatgggtagtagaagaaggcagttataaataccagctttgactatgtaagcagtagcaaaaacaaggattgtaattatttttttaaattttattatgaatatgtttgtaggtgtatatgtataaacatatctgtatacataaaatatccttaatatatctttgttttcttccttgttatccccttatcctataacataagatgtattagctttatattatagtatttaagctacaggatgtcaaggaggagaatgaacattatccaaggactttggatcttcttctaaagaaaggcttagtgcactttcagttgtatgcagaatagttgtatcgttaggtgggagtatg

SEQ ID NO: 32277 - DNA, 502 bp, Homo sapiens
  MAP TO AB001523.1; EXPRESSED IN LUNG, SIGNAL = 0.44; SWISSPROT HIT: P11994, EVALUE 4.00e-03; EST_HUMAN HIT: AJ003350.1, EVALUE 1.00e-125; NT HIT: AB001523.1, EVALUE 0.00e+00
ggagagcgggtcagtgttccacggagcagtgggaggcagcaggaggccgtcctctgtggtaatggagagttctgggccagggccgctgtggttgttacacgaatctacacatgtgacaaatgccatagaattagacccaaagaatgcctgcgaaagctgctgaaatccagtggggtctgcagcctggttcactctgtagtgaaatccagtggggtctgcagcctggttctatctgtattgaaatccagtggggtctgcagcctggtccactctgtagtgaaatccagtgtggtctgcagcctggttctatctgtattgaaatccagtggggtctgcagcctggtccactctgtagtgaaatccagtggggtctgcagcctggttctagctgtattgaaatccagtggggtctgcagcctggtccactctgtagtgaaatccagtggggtctgcagcctggttctatctgtattgaaatccagtggggtctgcagcctggttc

SEQ ID NO: 32278 - DNA, 145 bp, Homo sapiens
  MAP TO AB003151.1; EXPRESSED IN LUNG, SIGNAL = 0.42; NT HIT: Z92669.1, EVALUE 1.30e+00; SWISSPROT HIT: P47899, EVALUE 6.10e-01; EST_HUMAN HIT: BE728489.1, EVALUE 1.20e-01
agagccgctgccgctggttctccggctcttcctcggcggttctggctcccggccgcgccgcagccctgcccagtctctctcccccagcccggagggctcctccgcgccgcacgtgagcgcgcccgccaacagggccactgccgcg

SEQ ID NO: 32279 - DNA, 117 bp, Homo sapiens
  MAP TO AC005859.1; EXPRESSED IN LUNG, SIGNAL = 0.43; SWISSPROT HIT: P10069, EVALUE 3.20e+00; EST_HUMAN HIT: AA251181.1, EVALUE 1.50e+00; NT HIT: AJ229041.1, EVALUE 4.00e+00
tgggagagagaggaggtagggtaagggcagcaagtgatgccggaagagctgcagcttccatctatagtaactctgcaaaaggtttgggtctgtgctcttcaccaggccagagctaag

SEQ ID NO: 32280 - DNA, 107 bp, Homo sapiens
  MAP TO AC002556.1; EXPRESSED IN LUNG, SIGNAL = 0.45; NT HIT: AB025540.1, EVALUE 9.10e-01; EST_HUMAN HIT: AA725888.1, EVALUE 5.30e+00
tctgcctcttgagcacagggaaaccacgtccttttccttccaaagatccactggaagttctccttgtactctcgctcttcctacttggagggtcacttacctatatt

SEQ ID NO: 32281 - DNA, 238 bp, Homo sapiens
  MAP TO AC006079.1; EXPRESSED IN LUNG, SIGNAL = 0.46; SWISSPROT HIT: Q60476, EVALUE 2.00e+00; NT HIT: AL161590.2, EVALUE 5.70e-01
gttaacctatgccacatttatcgttctgctcaaagagaagaaatatcaaggaaaaaaaaagtgtgttgaaacattgcccagcccagatgaagaagtagagaagaatactatttcgacaaatttgaggggaagacagagaaaaacaatctctgcaaagagagtggaggaaggaaatgctattggcactgtcaggaaatatggccaagtaggaaagagagtggtagaaagagttcaaaag

SEQ ID NO: 32282 - DNA, 151 bp, Homo sapiens
  MAP TO AC004547.1; EXPRESSED IN LUNG, SIGNAL = 0.48; SWISSPROT HIT: P15433, EVALUE 5.20e+00; NT HIT: AJ271735.1, EVALUE 2.00e-15; EST_HUMAN HIT: AW629172.1, EVALUE 1.00e-29
agatgctgtcaacattatttatatgacaacaaaggatctagaatattacatcaacttaatcgacaaagcaatggcagggtttgaaaggattgacttcagtttcgaaagaagttccactgtgggtaaaatgcaatcaaacagcatcacatgc

SEQ ID NO: 32283 - DNA, 93 bp, Homo sapiens
  MAP TO AC005703.1; EXPRESSED IN LUNG, SIGNAL = 0.47; NT HIT: AF155960.1, EVALUE 1.90e-01; SWISSPROT HIT: P53813, EVALUE 7.30e+00
agatctggaatgcaggtagtgcaggtagacagatccgggttagaattgcagctctgccagctgaccttcatccaggtacttaaactcttggat

SEQ ID NO: 32284 - DNA, 89 bp, Homo sapiens
  MAP TO AC000389.1; EXPRESSED IN LUNG, SIGNAL = 0.42; EST_HUMAN HIT: BE798737.1, EVALUE 4.30e+00; NT HIT: X15648.1, EVALUE 3.00e-03
agagcatatttagaatgatgaaccgtaggcaacataaaagcatcatcaaagaacatttctttcatgttcattatacatactctatagca

SEQ ID NO: 32285 - DNA, 132 bp, Homo sapiens
  MAP TO AC006398.1; EXPRESSED IN LUNG, SIGNAL = 0.49; EXPRESSED IN BONE MARROW, SIGNAL = 0.5; SWISSPROT HIT: Q9ZD13, EVALUE 5.30e+00; NT HIT: U66061.1, EVALUE 2.00e-05; EST_HUMAN HIT: AI758773.1, EVALUE 1.70e+00
caagataaaagccacaatgtctggcatccagtaacaattactagccatgcaaagaagcagaaaaatatggctcataatgaggagaaaattaatcaacagagacttaaatatgtcatagatgataagagtaga

SEQ ID NO: 32286 - DNA, 314 bp, Homo sapiens
  MAP TO AC002504.1; EXPRESSED IN LUNG, SIGNAL = 0.42; SWISSPROT HIT: O35085, EVALUE 2.00e-29; NT HIT: AB026673.1, EVALUE 3.00e-46; EST_HUMAN HIT: AW028575.1, EVALUE 5.00e-80
cgtcgggccaagtggcgcaagcgggagaaggcaggcgcgcagacccacccccctgggctgcccttcccggggccgctctccgccacccacccgctcagcccctacctggacgccagccccttccctccgcaccacccggcgctcgactccgcttggactgccgctgccgccgccgccgccgccgccttcccgagcctacctccgcctccgggctcggccagcctgccgcccagcggggcgccgctgggcctgagcactttcctcggagcggcagtgttccgacacccagctttcatcagcccggcattcggcag

SEQ ID NO: 32287 - DNA, 166 bp, Homo sapiens
  MAP TO AC004544.1; EXPRESSED IN LUNG, SIGNAL = 0.46; NT HIT: AB007955.1, EVALUE 2.00e-03; EST_HUMAN HIT: AA574381.1, EVALUE 4.00e-05; SWISSPROT HIT: P11369, EVALUE 1.80e-02
attgatgaattccattctattgtatagacatactacaatttgtttatccactcgcctgttgatgggcatatgagtagtttctagtttaggactatgacaactaaaaccgctatgaacattcttataaaagtgtagagataggctttcatttctcatgtgtgaatac

SEQ ID NO: 32288 - DNA, 265 bp, Homo sapiens
  MAP TO AC006115.1; EXPRESSED IN LUNG, SIGNAL = 0.45; SWISSPROT HIT: P41315, EVALUE 4.00e-05; NT HIT: gi6137801, EVALUE 2.00e-04
aacagtcggatggtttcccaccacagctgcatcacatcacgatcgcaccaacggtgcaggtgtttcagcctctccaaatcctgtcagtgttgttatattctgtttaacggatagtgaccatggaaacggcaatgagttagttccttatttctttgccagggaaaatattgctttcatttttaatacttattacttaatcatggtatatgtctttggttataccgtggcaatggctactgaagagtatcctgacacatggatgggg

SEQ ID NO: 32289 - DNA, 105 bp, Homo sapiens
  MAP TO AC005186.1; EXPRESSED IN LUNG, SIGNAL = 0.49; EXPRESSED IN BONE MARROW, SIGNAL = 0.49; SWISSPROT HIT: P06264, EVALUE 4.20e+00; NT HIT: L44140.1, EVALUE 6.00e-08; EST_HUMAN HIT: AI277851.1, EVALUE 6.00e-06
ggttctccagagaaacagaaccaacaggacgtgtatatggagggagagaaaggcactgatgataaggaatgtgcttatgctgttagggagcctgaagagtcctga

SEQ ID NO: 32290 - DNA, 194 bp, Homo sapiens
  MAP TO AC004057.1; EXPRESSED IN LUNG, SIGNAL = 0.54; EXPRESSED IN BONE MARROW, SIGNAL = 0.58; NT HIT: gi10947053, EVALUE 1.00e-102; EST_HUMAN HIT: BF677641.1, EVALUE 7.00e-04; SWISSPROT HIT: Q01484, EVALUE 6.00e-30
gtaccttggattgtacgtcagcattgtggtcattctgaagcagaagtgcggcagatttggtgtcgtctttcctagcggcaatatgcagagctggcagcctcactttccctttggtgtcattctccaagaggatggccaccgcctggttgtgtccttgctggagtgccacagctagaggagtaaagccatcctgg

SEQ ID NO: 32291 - DNA, 192 bp, Homo sapiens
  MAP TO AC002452.1; EXPRESSED IN BONE MARROW, SIGNAL = 0.53; EXPRESSED IN LUNG, SIGNAL = 0.48; EST_HUMAN HIT: AI433657.1, EVALUE 1.70e-01; NT HIT: AE003932.1, EVALUE 2.90e-02
aagaaatctgcagagagttacaatgtgctggttgtgcagaggaagtataagcgtacagtgacacacatgtatgtggccaccaggggaagtaatcattctttattaaaaaacactctgcagcggatgaatcaaaggcctattaagaaagcctttgattcaaagcccattcaaagaaactaacatccagataaa

SEQ ID NO: 32292 - DNA, 155 bp, Homo sapiens
  MAP TO AC005219.1; EXPRESSED IN LUNG, SIGNAL = 0.52; EST_HUMAN HIT: BF381837.1, EVALUE 5.30e-01; SWISSPROT HIT: P70597, EVALUE 2.30e+00
gatttgccataagttattttcactgtgatgctcttcttgggaattttcaagatgttgtttcctgtggtgttcctgtcatcttcactagggtttttgttgttccttgtcaggattcccctgctccacttggctctgcacaaagaaggaactgtggg

SEQ ID NO: 32293 - DNA, 185 bp, Homo sapiens
  MAP TO AC005026.1; EXPRESSED IN LUNG, SIGNAL = 0.47; SWISSPROT HIT: Q61602, EVALUE 1.00e-17; NT HIT: AJ250408.1, EVALUE 1.00e-100; EST_HUMAN HIT: BE208008.1, EVALUE 2.50e+00
cccaggctgtcagccaggccgagccgaaaacgtacactgtccatatcaccactctccgatcatagctttgaccttcagaccatgataaggacgtctcccaactccttggtcacgattctcaataattcccgtagcagctcttcagcaagtggctcctatggtcacttatctgcaagtgcaatcag

SEQ ID NO: 32294 - DNA, 156 bp, Homo sapiens
  MAP TO AC000120.1; EXPRESSED IN LUNG, SIGNAL = 0.43; EST_HUMAN HIT: AL041469.1, EVALUE 2.00e-80; NT HIT: X02599.1, EVALUE 3.60e-01; SWISSPROT HIT: P28654, EVALUE 3.00e+00
tttcatctgccctctgtagatagcgtgcaatagtatacaactgttttcctttacagatttccactggaggtctcagcaaagggttgtcatcaaaatttatctccttcagtgaaaaaatattgtagatagcactaggtagagctgtcagattatttc

SEQ ID NO: 32295 - DNA, 169 bp, Homo sapiens
  MAP TO AC000003.1; EXPRESSED IN LUNG, SIGNAL = 0.43; EXPRESSED IN BONE MARROW, SIGNAL = 0.53; EST_HUMAN HIT: AL043272.2, EVALUE 2.00e-04; NT HIT: L77570.1, EVALUE 2.00e-03; SWISSPROT HIT: P87115, EVALUE 6.70e+00
caattcgtttgaaggttatagacctattcaggttttctatttcctcttgagtcaatttggaatttttattttcctggaaaattgtcagtggcaggagagaacaaataaccagggagttccagaacttgggggaaaatagcatctttgtctgattcattgctatccaaca

SEQ ID NO: 32296 - DNA, 87 bp, Homo sapiens
  MAP TO AC004067.1; EXPRESSED IN LUNG, SIGNAL = 0.42; EST_HUMAN HIT: AW160735.1, EVALUE 7.00e-42; NT HIT: gi11437174, EVALUE 5.00e-42
cttctaccttgatggatattttgctaatgaatgattttaaacttgtcattaataaaatagcatatgatgtgcagtgtccaaagagag

SEQ ID NO: 32297 - DNA, 362 bp, Homo sapiens
  MAP TO AB019439.1; EXPRESSED IN LUNG, SIGNAL = 0.43; SWISSPROT HIT: P06331, EVALUE 1.00e-28; EST_HUMAN HIT: AW408410.1, EVALUE 0.00e+00; NT HIT: X05715.1, EVALUE 0.00e+00
gggtcctgtcccagctgcagctgcaggagtcgggcccaggactggtgaagccttcggagaccctgtccctcacctgcactgtctctggtggctccatcagcagtagtagttactactggggctggatccgccagcccccagggaaggggctggagtggattgggagtatctattatagtgggagcacctactacaacccgtccctcaagagtcgagtcaccatatccgtagacacgtccaagaaccagttctccctgaagctgagctctgtgaccgccgcagacacggctgtgtattactgtgcgagacacacagtgaggggaggtgagtgtgagcccagacaaaaacctccctgcagggag

SEQ ID NO: 32298 - DNA, 264 bp, Homo sapiens
  MAP TO AL137853.3; EXPRESSED IN LUNG, SIGNAL = 0.86; SWISSPROT HIT: P55265, EVALUE 3.80e-01; EST_HUMAN HIT: BE818331.1, EVALUE 8.00e-63; NT HIT: AB029290.1, EVALUE 0.00e+00
atggtgacccgattcatggagacagcagacagtactacagcagcagtgctgcagggcaaactggcagaggtgagccagcggttcgaacagctctgtctacagcagcaagaaaaggagagctccctaaagaagcttctaccccaggcagagatgtttgaacacctctctggtaagctgcagcagttcatggaaaacaaaagtcggatgctggcctctggaaatcagccagatcaagatattacacatttcttccaacagatccag

SEQ ID NO: 32299 - DNA, 347 bp, Homo sapiens
  MAP TO AC023009.3; EXPRESSED IN LUNG, SIGNAL = 8.7; EXPRESSED IN PLACENTA, SIGNAL = 7.3; SWISSPROT HIT: P00488, EVALUE 1.00e-49; EST_HUMAN HIT: AL037746.1, EVALUE 0.00e+00; NT HIT: M21998.1, EVALUE 0.00e+00
ctagcaagacaggggccagacagcgagtctcagaaagaaccacaccattgttagcttacaggacaagggctccagcgtcacgtcgaacgtctccttcttgaattctgccttcgggaccccggtgtagaaggtgatgttggctgagagataagctgtgatggtgtaacggttgtggctgttgttccggaaggtgatggagagcttgaagtcttttcccagcacagcattttccacttcaaagtccatgtcaacgttggaccttgatttcatgacaccttctgtgttgaggggctttttagctccgtacatcagggcagtttctagggccaatctctcttcttcttgac

SEQ ID NO: 32300 - DNA, 252 bp, Homo sapiens
  MAP TO AC008850.4; EXPRESSED IN LUNG, SIGNAL = 2.1; EXPRESSED IN PLACENTA, SIGNAL = 4.2; NT HIT: U62769.1, EVALUE 0.00e+00; SWISSPROT HIT: P20265, EVALUE 3.40e-01; EST_HUMAN HIT: AW797088.1, EVALUE 2.30e-01
atcggcttcagctccccaggaatatgattgaaaacagcatgtttgaggaagaaccagatgtggtggatttagccaaagagccttgtttacatcctctagagcctgatgaggtggaatatgagccccggggttcccgactgctggtgcggggtcttggtgagcatgagatggaggaggatgaagaggattatgagtcatcagcaaagctgctgggcatgtccttcatgaatagaagctcaggccttcggaaca

SEQ ID NO: 32301 - DNA, 509 bp, Homo sapiens
  MAP TO AC016025.11; EXPRESSED IN PLACENTA, SIGNAL = 1.3; EXPRESSED IN LUNG, SIGNAL = 2.8; NT HIT: gi7662505, EVALUE 0.00e+00; EST_HUMAN HIT: BE883386.1, EVALUE 0.00e+00; SWISSPROT HIT: P34926, EVALUE 1.10e-01
ggcactgtgtttagtcttgagtcagaggaggaggaataccctggaatcactgcagaagatagcaatgacatttacatcctgcccagcgacaactctggacaagtcagtcccccagagtctccaactgtgaccacttcctggcagtctgagagcttacctgtgtcactgtcagctagccagagttggcacacagaaagcctgccagtgtcactaggccctgagtcctggcagcagattgcaatggatcctgaagaagtgaaaagcttagacagcaatggagctggagagaagagtgagaacaactcctctaattctgacattgtgcacgtggagaaagaagaggtgcccgagggcatggaagaggctgctgtggcttctgtggtcttgccagcgcgggagctgcaagaggcacttcctgaagccccagctcccttgcttccacatatcactgccacctccctgctggggacaagggaacctgacacagaagtgatcacagttgagaaatc

SEQ ID NO: 32302 - DNA, 389 bp, Homo sapiens
  MAP TO AC024123.1; EXPRESSED IN LUNG, SIGNAL = 5.8; EXPRESSED IN PLACENTA, SIGNAL = 1.7; EST_HUMAN HIT: BE872908.1, EVALUE 0.00e+00; NT HIT: gi11436757, EVALUE 0.00e+00; SWISSPROT HIT: Q07954, EVALUE 1.00e-23
ggcgccgtgtgctctgtggcctggctgtgcctttgctgacaccgtgcccgtgtgtgttcatgcaggtcaggagcgggtcgtgattgccgacgatctcccgcacccgttcggtctgacgcagtacagcgattatatctactggacagactggaatctgcacagcattgagcgggccgacaagactagcggccggaaccgcaccctcatccagggccacctggacttcgtgatggacatcctggtgttccactcctcccgccaggatggcctcaatgactgtatgcacaacaacgggcagtgtgggcagctgtgccttgccatccccggcggccaccgctgcggctgcgcctcacactacaccctggaccccagcagccgcaactgcagcc

SEQ ID NO: 32303 - DNA, 181 bp, Homo sapiens
  MAP TO AC002036.1; EXPRESSED IN BONE MARROW, SIGNAL = 1.7; EXPRESSED IN LUNG, SIGNAL = 2.4; EXPRESSED IN PLACENTA, SIGNAL = 1.5; NT HIT: X99660.1, EVALUE 3.00e-73; SWISSPROT HIT: Q62419, EVALUE 2.00e-23; EST_HUMAN HIT: AU132135.1, EVALUE 1.00e-66
gctccttctggtggcggatcaggcactcgctcaggagcccctccgactgcgggtagccggggttcttcacctggccccggatcttgcacaccgcgttcagcatggtcagcttagcctgcgaggctgggttgggctgcaggtacttgatggtccttgccagcatttccgtcaccgccttgct

SEQ ID NO: 32304 - DNA, 136 bp, Homo sapiens
  MAP TO AC011375.3; EXPRESSED IN PLACENTA, SIGNAL = 1.5; EXPRESSED IN LUNG, SIGNAL = 1.8; NT HIT: gi11417012, EVALUE 5.00e-71; EST_HUMAN HIT: AW131656.1, EVALUE 7.00e-71
gagagacgataataaagacattgactcagagaaagaagctgccatggaagctgaaattaaagctgcccgagaaagggccattgtccctctggaggctcgaatgaagcagttcaaggacatgctgctagagagaggg

SEQ ID NO: 32305 - DNA, 329 bp, Homo sapiens
  MAP TO AL121808.2; EXPRESSED IN BONE MARROW, SIGNAL = 3.4; EXPRESSED IN LUNG, SIGNAL = 2.1; EXPRESSED IN PLACENTA, SIGNAL = 1.3; NT HIT: AB032957.1, EVALUE 1.00e-111; SWISSPROT HIT: Q64322, EVALUE 8.30e+00; EST_HUMAN HIT: AW296467.1, EVALUE 1.00e-111
gatttttgtgagcatggaacaaagtctgggttaaaccagggggccatttctactcttcaaagtagtgatattcttaatttaacaaaagaacaacctcaggccaaagcaggcaatggacagaactcttgtggagtagaagatgtccttcagcttctgcgtattctatatatagttgcaagtgacccttattcaagaatatcccaggaaggtctgtaagaagccttgtttcatttctatagcagttttaaagcaagtcagtttatatttttattaattttattaattaattttatagatggtgatgaacagcttcagtttacttttccacc

SEQ ID NO: 32306 - DNA, 476 bp, Homo sapiens
  MAP TO AP001224.1; EXPRESSED IN LUNG, SIGNAL =  18; EXPRESSED IN BONE MARROW, SIGNAL =  14; EST_HUMAN HIT: AA464313.1, EVALUE 0.00e+00; SWISSPROT HIT: P06309, EVALUE 9.00e-55; NT HIT: X12691.1, EVALUE 0.00e+00
gatccagtggggatattgtgatgactcagtctccactctccctgcccgtcacccctggagagccggcctccatctcctgcaggtctagtcagagcctcctgcatagtaatggatacaactatttggattggtacctgcagaagccagggcagtctccacagctcctgatctatttgggttctaatcgggcctccggggtccctgacaggttcagtggcagtggatcaggcacagattttacactgaaaatcagcagagtggaggctgaggatgttggggtttattactgcatgcaagctctacaaactcctcccacagtggtacaacccctaacagaaacctcctcctggggttgcccagttgctcacatgtgctgcttgtctggagagcagctcagcagggtctctgagtctgcagaagaggaggctgttggagacctcagggcagaggttgctgctgaggactctggctcatga

SEQ ID NO: 32307 - DNA, 138 bp, Homo sapiens
  MAP TO AC009989.6; EXPRESSED IN LUNG, SIGNAL = 2.4; NT HIT: AB030074.1, EVALUE 3.00e-72; SWISSPROT HIT: P18461, EVALUE 7.00e-23; EST_HUMAN HIT: R13671.1, EVALUE 2.00e-65
ctggtccttcggggtgttaatgtgggagatcttcactttagggggctcgccctacccagggattcccgtggaggaactttttaagctgctgaaggaaggacacagaatggataagccagccaactgcaccaacgaact

SEQ ID NO: 32308 - DNA, 271 bp, Homo sapiens
  MAP TO AC022325.3; EXPRESSED IN LUNG, SIGNAL = 1.6; SWISSPROT HIT: P21872, EVALUE 8.70e-01; EST_HUMAN HIT: AV711898.1, EVALUE 9.80e-01; NT HIT: U37768.1, EVALUE 1.70e-01
tgatcattttgcttttgatcaatgtccagtagtccgaaacctttccagtaatgcttattcaagtgtgtttcacattaatgatcttggtctgctagaaaaccaattacacattcttacatttaatctcggctctgtaatggatagtgttttccttaaagatgtgccagcggtggattgtcgcaagcacagcagcacacaaagctgtgattgctttaagaaaaatggtccaagcaagacgttacataaaaactctggaaatcaatcaaagtag

SEQ ID NO: 32309 - DNA, 414 bp, Homo sapiens
  MAP TO AL136092.7; EXPRESSED IN LUNG, SIGNAL = 3.5; EXPRESSED IN PLACENTA, SIGNAL = 1.4; SWISSPROT HIT: P52795, EVALUE 1.00e-40; NT HIT: gi11421688, EVALUE 0.00e+00; EST_HUMAN HIT: AA377505.1, EVALUE 0.00e+00
tcagaccttgtagtagatgttcgccgggctctggggcggcatctcttggacgatgtagacagggtgcccgtagtccccactcaccttctcatagtgggggcagtagttgttctctgtagtccgtaagggaatgatgatgtcgctgggctcggtgcccgctgtgccactgccccccttgggactggccagggtactgagcgagagggcagccgcccgctgctgtgtgtgcttgcggtgccgcttgcgtagcttcagtagtaggaccgtcaggaagatgatgatgagcaggaagatgacgcaaccggcaccgacagccgcgaacaatgccaccttggagttgaagaagccatcagggtccccgctgctgcccccacttgcacctgggccactcttctcttcctggttcacagtctc

SEQ ID NO: 32310 - DNA, 268 bp, Homo sapiens
  MAP TO AC008635.4; EXPRESSED IN LUNG, SIGNAL = 2.4; EXPRESSED IN BONE MARROW, SIGNAL = 1.7; SWISSPROT HIT: Q15139, EVALUE 3.00e-42; EST_HUMAN HIT: BE264995.1, EVALUE 0.00e+00; NT HIT: gi11424891, EVALUE 0.00e+00
ctccagctgagatgtggctccaggggctggccgggtacatgaaggcggcgttctggatctggtcattgatgtcctcatcctcgttgaaagggaaggtgccgctgaggctgacgtacatgatcacgcccactgaccacatgtccagcgagcggttgtagccctggttgagcagcacctcgggtgccaggtaggccggcgtgcccaccactgagcggcggaacgacttctcgccgatgatgcgagcaaagccaaagtcacacagcttcac

SEQ ID NO: 32311 - DNA, 481 bp, Homo sapiens; identical to SEQ ID NO: 28607
  MAP TO AL138828.4; EXPRESSED IN LUNG, SIGNAL =   3; EXPRESSED IN PLACENTA, SIGNAL = 2.1; NT HIT: gi11418871, EVALUE 0.00e+00; EST_HUMAN HIT: AI367350.1, EVALUE 0.00e+00; SWISSPROT HIT: P41695, EVALUE 5.90e-01

SEQ ID NO: 32312 - DNA, 177 bp, Homo sapiens
  MAP TO AL138761.3; EXPRESSED IN PLACENTA, SIGNAL = 1.4; EXPRESSED IN LUNG, SIGNAL = 2.6; SWISSPROT HIT: Q08022, EVALUE 1.70e+00; EST_HUMAN HIT: BE888211.1, EVALUE 3.00e-95; NT HIT: gi7661993, EVALUE 2.00e-95
ctgtttaattttatcacggtcctgatctggtgtggctgttgagttaattctcaaactcttcttaaacatggccattcgagtcttggcttcactgcgctgaatcttgggcagtcttgctctttcttgagtctgtctgtttttcaattcctcaataagtctttgattgtaacgctgcat

SEQ ID NO: 32313 - DNA, 226 bp, Homo sapiens
  MAP TO AL135744.2; EXPRESSED IN BONE MARROW, SIGNAL = 2.6; EXPRESSED IN LUNG, SIGNAL = 1.7; NT HIT: gi11437455, EVALUE 1.00e-91; EST_HUMAN HIT: AW374340.1, EVALUE 1.00e-111; SWISSPROT HIT: P32558, EVALUE 5.00e-15
ttcaaccattccttgatggggtcaagagaggctacaggaatggcgttgatcatggtcactttcttgctgtagtccttgtagacgattaccatatcaaagttcttcaggtgaaactggacccgctcaaagtggatcagctctacctcatccaatgtcaccacaaaaggtggctgtcagggagaaactgaatcattagcatataagtatttcccccaaagcaataata

SEQ ID NO: 32314 - DNA, 192 bp, Homo sapiens
  MAP TO AL159191.1; EXPRESSED IN LUNG, SIGNAL =   2; SWISSPROT HIT: Q28279, EVALUE 1.10e-01; NT HIT: AJ001525.1, EVALUE 4.50e-01
atggtgaaacagctcttacacactggctcttcagaaaagatggaaactcctagacaggctaataaaaataacataaaaaggacaaccaggagatccagtaaggtaggtaataaacaaaacatgagtaagaaggatggagaagacaggaataagacccagatgcagcaggaagagaaacttgacacctctgag

SEQ ID NO: 32315 - DNA, 278 bp, Homo sapiens
  MAP TO AL136092.7; EXPRESSED IN LUNG, SIGNAL = 4.1; EXPRESSED IN PLACENTA, SIGNAL = 1.9; SWISSPROT HIT: P98172, EVALUE 4.00e-51; NT HIT: U09304.1, EVALUE 0.00e+00; EST_HUMAN HIT: BE562822.1, EVALUE 0.00e+00
aggtaatgtagtaatcatggtgcttcttgaactccaggcccatgtagttggggctgaactcctggaacttgatggtaaagcgtatttcctgctctggcctattgcaggtgaccaacacgttggggtcgagaactgtgctacaggcagctgcctgctcaggccgcaccaggtacagcttgtagtactcatagggccgccctgcttctgctcgggggcagatgatgtccagcttgtctccaattttcggatagatcaccaagcccttcccactcaggaac

SEQ ID NO: 32316 - DNA, 271 bp, Homo sapiens
  MAP TO AL138725.4; EXPRESSED IN BONE MARROW, SIGNAL = 1.5; EXPRESSED IN LUNG, SIGNAL = 1.7; NT HIT: gi11419297, EVALUE 1.00e-101; EST_HUMAN HIT: BE671418.1, EVALUE 1.00e-103; SWISSPROT HIT: P20839, EVALUE 2.00e-32
ccaccaggtctgtgatgaagcccccctgttcaaacttcttgaccttctgcacctcttggcctggaactctggggtgcagttgtggtgaatgaaaccaatacctcccatcagagccatcgcaatggccatgtcggcctctgtcacagtgtccatgggggaggagatcagcgtcagcggcgtcttcagcgtgatcttccgggtcaggactgaggtcaggtccacctcatcagctatgaagtctatgaatcctgggagaatcgggacgtcgttg

SEQ ID NO: 32317 - DNA, 140 bp, Homo sapiens
  MAP TO AL136418.1; EXPRESSED IN PLACENTA, SIGNAL = 1.4; EXPRESSED IN LUNG, SIGNAL = 1.7; NT HIT: X52493.1, EVALUE 1.20e+00; SWISSPROT HIT: Q08879, EVALUE 1.00e+00; EST_HUMAN HIT: BE711238.1, EVALUE 3.00e-73
atggcagatgtggacccagatacattgctggaatggctacagatgggacagggagatgaaagggacatgcaactaatagcccttgaacagctatgcatgctgcttttgatgtctgacaacgtggatcgttgttttgaaac

SEQ ID NO: 32318 - DNA, 108 bp, Homo sapiens
  MAP TO AC012568.3; EXPRESSED IN PLACENTA, SIGNAL = 1.4; EXPRESSED IN LUNG, SIGNAL = 2.5; NT HIT: gi4759101, EVALUE 4.00e-03; EST_HUMAN HIT: R59458.1, EVALUE 6.00e-03
tggcatcatcatcactgtcatcatcattgctatactggcaccgaccaggacaggatacaagagctcgacctcagagagcaggcaggcctacccagtacatgccagagg

SEQ ID NO: 32319 - DNA, 179 bp, Homo sapiens
  MAP TO AL158823.1; EXPRESSED IN LUNG, SIGNAL = 2.7; EST_HUMAN HIT: AU125586.1, EVALUE 2.00e-96; NT HIT: gi11428722, EVALUE 1.00e-96; SWISSPROT HIT: P16884, EVALUE 1.70e+00
actactatcatccattctctcgcgccttttagatttgtgtgtctcatagtcttccatgagggtctgcatcagattcttgggccgctgggttccggcagcctcttcaggggctaagtcaggctgcaagctggggccttcagtggtgggggatggaggaggtttgactttctctattttcc

SEQ ID NO: 32320 - DNA, 160 bp, Homo sapiens
  MAP TO AC018573.2; EXPRESSED IN LUNG, SIGNAL = 2.6; EXPRESSED IN HELA, SIGNAL = 2.5; SWISSPROT HIT: P10568, EVALUE 4.00e+00; NT HIT: AF149766.1, EVALUE 3.70e-01
aataatatacttacaaggtgcacagatgataaaagtatagctccaggaattttcataaagtccacacatctatgtaagcagacccagattaagaaagagcataatcagaagccagggggtgtcactcaggcctcctttagtcacaagctccctagccagg

SEQ ID NO: 32321 - DNA, 193 bp, Homo sapiens
  MAP TO AL157996.1; EXPRESSED IN BONE MARROW, SIGNAL = 1.7; EXPRESSED IN LUNG, SIGNAL = 1.7; NT HIT: gi4758301, EVALUE 9.00e-18; SWISSPROT HIT: P43902, EVALUE 5.00e+00; EST_HUMAN HIT: AV744220.1, EVALUE 1.00e-33
ctttttgcctttatcgaagatggctgaaacagagtcagtagctgctctagctgccggaagtgactgtgcctctatgatccaaaaggctcttttgcgttgcactttcgacgacttccggcggctcctctcgcgaggattggctgttagcggcgttgtagttaagctcgtgtaacggcggcggtgtcggcagctg

SEQ ID NO: 32322 - DNA, 300 bp, Homo sapiens
  MAP TO AC002477.1; EXPRESSED IN HELA, SIGNAL =   2; EXPRESSED IN LUNG, SIGNAL =   2; EXPRESSED IN PLACENTA, SIGNAL = 1.3; NT HIT: S64727.1, EVALUE 1.80e-01; EST_HUMAN HIT: BF203406.1, EVALUE 9.00e-63
cttgtttcttattcgatctctcttgaccacttcttctttcttttcagttttttctgagctgcctattgattctgtactttcagccttctttcctttatcccgaagtgtgtctttctcttttttcatttcttcttcttttctcttaaaagtcttctctttctcatagcgctccttctgcctacggcgctcttcttcttgccgcttcagcctctctctttctcgaagtatgcgctcctgatctcgttcatattcccgttccctctccctatagtctctgccgctctcatcttcaggtctgca

SEQ ID NO: 32323 - DNA, 197 bp, Homo sapiens
  MAP TO AC008891.4; EXPRESSED IN LUNG, SIGNAL = 1.7; NT HIT: gi11424084, EVALUE 1.00e-107; SWISSPROT HIT: O94759, EVALUE 2.00e-08; EST_HUMAN HIT: AI460004.1, EVALUE 9.00e-56
ttacacattcggcaaagtacagggcaacagcgatctctactggaaggcgcagcgttaccgcctcatccgggaattccactctcggcccgcgctggccccgccctttatcgtcatctcccacttgcgcctcctgctcaggcaattgtgcaggcgaccccggagcccccagccgtcctccccggccctcgagcatttcc

SEQ ID NO: 32324 - DNA, 284 bp, Homo sapiens
  MAP TO AC008752.3; EXPRESSED IN LUNG, SIGNAL = 1.8; SWISSPROT HIT: P49911, EVALUE 2.20e-02; EST_HUMAN HIT: AA524458.1, EVALUE 0.00e+00; NT HIT: gi11424832, EVALUE 0.00e+00
atgtggcacctccttcgaaggtacatggcatcccggctccattccctgcggatgggtggctacctgttctctggctcccaggccccccagttgtcccctgctctgttgagagccctgggccagaagtgccccaacctgaagcgcctctgcctgcacgtggccgacctgagcatggtgcccatcaccagcctgcccagcaccttgaggaccctggagctgcacagctgcgagatctccatggcctggctccacaagcagcaggaccccaccgtgctgcccctgct

SEQ ID NO: 32325 - DNA, 100 bp, Homo sapiens
  MAP TO AL136039.1; EXPRESSED IN LUNG, SIGNAL = 2.2; EXPRESSED IN BONE MARROW, SIGNAL =   2; EST_HUMAN HIT: BE077907.1, EVALUE 4.90e+00; SWISSPROT HIT: P41245, EVALUE 5.00e-10; NT HIT: AB020335.1, EVALUE 1.00e-49
tttcacaaaagccccacttttcatctgctttgtagtcataggttgtagcacaccacagtctgccatcttccctcccatctgatgtacattcatcatactc

SEQ ID NO: 32326 - DNA, 354 bp, Homo sapiens
  MAP TO AL158070.2; EXPRESSED IN LUNG, SIGNAL = 1.6; SWISSPROT HIT: P87377, EVALUE 1.40e+00; EST_HUMAN HIT: AA044156.1, EVALUE 1.30e+00; NT HIT: AB038490.1, EVALUE 0.00e+00
atgttaaggaacttataatcaaaactgtattaagctcggcaagagatgagccctctggtcctgcacgatgtgtagcactttgtagtttaggtatttggatttgtgaagaactagtccatgagtctcatcatcctcaaattaaggaagctctgaatgtgatttgtgtttccttaaagtttactaataaaacagtagcccacgtagcttgtaacatgcttcacatgctggttcattatgtacctagacttcagatttaccagcctgattctcccttgaaaattattcagatccttatagctaccatcacccatcttttaccagtacagacgcttcatcttatgaaatggacaagag

SEQ ID NO: 32327 - DNA, 335 bp, Homo sapiens
  MAP TO AP001221.1; EXPRESSED IN BONE MARROW, SIGNAL =  15; EXPRESSED IN LUNG, SIGNAL = 5.8; NT HIT: X59314.1, EVALUE 0.00e+00; SWISSPROT HIT: P01614, EVALUE 3.00e-52; EST_HUMAN HIT: H62115.1, EVALUE 1.00e-111
gatccagtgaggatattgtgatgacccagactccactctccctgcccgtcacccctggagagccggcctccatctcctgcaggtctagtcagagcctcttggatagtgatgatggaaacacctatttggactggtacctgcagaagccagggcagtctccacagctcctgatctatacgctttcctatcgggcctctggagtcccagacaggttcagtggcagtgggtcaggcactgatttcacactgaaaatcagcagggtggaggctgaggatgttggagtttattactgcatgcaacgtatagagtttccttccacagtggtacagccctga

SEQ ID NO: 32328 - DNA, 263 bp, Homo sapiens
  MAP TO AL133223.1; EXPRESSED IN LUNG, SIGNAL = 1.7; NT HIT: AB002323.1, EVALUE 1.00e-120; EST_HUMAN HIT: BE741519.1, EVALUE 1.00e-120; SWISSPROT HIT: P38650, EVALUE 6.00e-38
gccctgacatcacaactgtctccattccagcaggcagcagcatacctgatgccatctggcatttgaatgtctttatgtccgtcgaccttgcatgccagcttaaactcactgtcgaaactcctggttgtgaacaggcgctccaggaaggtgttgagcagacgctggtcaaactcgttgtccacgcgcccgccataaatggactgggccattaaggtctttagtgcagaccacgggatcttatccggtgagatgttctgcctgcc

SEQ ID NO: 32329 - DNA, 188 bp, Homo sapiens
  MAP TO AC013533.3; EXPRESSED IN LUNG, SIGNAL = 1.9; EST_HUMAN HIT: AA490201.1, EVALUE 1.00e-102; NT HIT: AJ252060.1, EVALUE 1.00e-102; SWISSPROT HIT: Q01293, EVALUE 2.90e+00
ctctgtaagcaatattgctagcatatcctgcctctgaaaacgtatagccaagtgtacaagagtatagccaacatcaaaggcagaaggacgattcagcaagcgtacttcatctgcggtgagctgacgtgcaatgtctcctcctgatgacttgtatgcttctatggcagctaaatcaccttctacaaccc

SEQ ID NO: 32330 - DNA, 228 bp, Homo sapiens
  MAP TO AC012664.3; EXPRESSED IN LUNG, SIGNAL =  36; EXPRESSED IN PLACENTA, SIGNAL = 2.4; SWISSPROT HIT: P07093, EVALUE 9.00e-38; NT HIT: M17783.1, EVALUE 1.00e-123; EST_HUMAN HIT: AL040655.1, EVALUE 1.00e-125
ccctggtttcatttttaacccatgcattgatggaatcacaggcagaggctggatcctcaaagttcacattccggacctcacactggaacacatctttgttccttgtaacaaaaggcacttcaatttcagaggcattcttaacaaacacggcgttagccactgtcacaatgtctttattcttcttggagacgatggccttgttgatcttctttaatattttaccaactc

SEQ ID NO: 32331 - DNA, 233 bp, Homo sapiens
  MAP TO AC023078.2; EXPRESSED IN PLACENTA, SIGNAL = 1.5; EXPRESSED IN LUNG, SIGNAL = 2.1; SWISSPROT HIT: P79240, EVALUE 2.00e-07; NT HIT: AF080451.1, EVALUE 3.60e-02; EST_HUMAN HIT: BE439409.1, EVALUE 2.00e-78
agggaatatataaggcggccgctgaggaagaggaagtctgctgcggccaagttgaggatgtagatggagaaggcgttcctgcgcatgcggcagcccaggagccagagcacaactgcgtttcctgtcagcccgacaagggaaacgatgcacgtcagcaccgtgaggctcaaggtctgcttgtagcaaagagtctcctcagttccgttgattggtgtcagttctgtgtccaaggt

SEQ ID NO: 32332 - DNA, 397 bp, Homo sapiens
  MAP TO AC024123.1; EXPRESSED IN PLACENTA, SIGNAL = 1.4; EXPRESSED IN LUNG, SIGNAL = 2.1; SWISSPROT HIT: Q07954, EVALUE 1.00e-24; NT HIT: gi11436757, EVALUE 0.00e+00; EST_HUMAN HIT: AI073917.1, EVALUE 0.00e+00
cctcgccgctcctgctatttgccaaccgccgggacgtacggctggtggacgccggcggagtcaagctggagtccaccatcgtggtcagcggcctggaggatgcggccgcagtggacttccagttttccaagggagccgtgtactggacagacgtgagcgaggaggccatcaagcagacctacctgaaccagacgggggccgccgtgcagaacgtggtcatctccggcctggtctctcccgacggcctcgcctgcgactgggtgggcaagaagctgtactggacggactcagagaccaaccgcatcgaggtggccaacctcaatggcacatcccggaaggtgctcttctggcaggaccttgaccagccgagggccatcgccttggaccccgctcacgg

SEQ ID NO: 32333 - DNA, 109 bp, Homo sapiens
  MAP TO AC011475.2; EXPRESSED IN PLACENTA, SIGNAL = 1.6; EXPRESSED IN LUNG, SIGNAL = 1.9; EST_HUMAN HIT: AA368328.1, EVALUE 6.00e-43; NT HIT: AJ245621.1, EVALUE 1.00e-46
tttattgttcttgaagccaggaacacagaactgcttatagtatcaaagtcccgggagctgcgagcattcaggtacgtgaggtagcggtcgggcatttttccacgcagat

SEQ ID NO: 32334 - DNA, 250 bp, Homo sapiens
  MAP TO AL096700.14; EXPRESSED IN LUNG, SIGNAL = 1.7; NT HIT: AF092207.1, EVALUE 2.00e-22; EST_HUMAN HIT: BE784237.1, EVALUE 2.00e-91; SWISSPROT HIT: P34614, EVALUE 9.80e-01
atgcctcactaactagttttatccctgtagtgaatgatttgacctcttacctctttcgtaccaaatccaaaagtgaagaaatcaagattgaactggaaaattttgaaaaaaaatctaactgcaactttagtattagaaaaatgtctacaagaggatctcaagaaagcagagttgcatctgtctacagaaagggccaaagttgataatcgtcatcagaacatggactttctaaaaccaaagtcagtggaat

SEQ ID NO: 32335 - DNA, 82 bp, Homo sapiens
  MAP TO AL109628.2; EXPRESSED IN LUNG, SIGNAL = 1.9; EST_HUMAN HIT: BF371201.1, EVALUE 6.00e-39; SWISSPROT HIT: P33485, EVALUE 1.90e+00; NT HIT: D83327.1, EVALUE 2.60e+00
atggcggatgaggcgttgtttttgcttctccataacgagatggtgtctggagtgtacaagtccgcggagcagggggaggtgg

SEQ ID NO: 32336 - DNA, 78 bp, Homo sapiens
  MAP TO AC003677.1; EXPRESSED IN BONE MARROW, SIGNAL = 1.7; EXPRESSED IN LUNG, SIGNAL = 1.7; NT HIT: AF096872.1, EVALUE 2.40e+00; EST_HUMAN HIT: R67876.1, EVALUE 3.60e+00
atgctcaaggagtcaaatcacacattggagtttcacctaacagtgatggtgctcacagtgggtttaaggcaagtcttc

SEQ ID NO: 32337 - DNA, 107 bp, Homo sapiens
  MAP TO AL136384.2; EXPRESSED IN LUNG, SIGNAL = 2.7; EST_HUMAN HIT: AA564085.1, EVALUE 1.00e-53; NT HIT: gi9506684, EVALUE 7.00e-54; SWISSPROT HIT: Q07139, EVALUE 1.90e+00
ctcaatggtgaatagcttcctttttaatttaaaagctaagtctttgacatctgattcatcacagatcaagttattaagccgaggaatctgccgtatatgaatcaatc

SEQ ID NO: 32338 - DNA, 286 bp, Homo sapiens
  MAP TO AC008783.4; EXPRESSED IN LUNG, SIGNAL = 1.9; EST_HUMAN HIT: AI703216.1, EVALUE 0.00e+00; SWISSPROT HIT: P55289, EVALUE 1.00e-50; NT HIT: gi4757953, EVALUE 0.00e+00
ccacaggagacatttctggaacagtagcaacataaggtccatccaaaaactttggctcattatcattaatatcctgcactttgatgatgaattctgattcaggctccaggggctttctggtttctatgtccacagcctgagcacgaagagtgtagaaaggtttctcttctctatctaggctccttattgcatgaatgtcccctgtggtttcatcaatggtaaaaacggtgccagcgccatctcctgagagggtgtatttcacagtgccctctcccttgtctaagtc

SEQ ID NO: 32339 - DNA, 191 bp, Homo sapiens
  MAP TO AC012568.3; EXPRESSED IN BONE MARROW, SIGNAL =   6; EXPRESSED IN LUNG, SIGNAL = 6.3; EST_HUMAN HIT: BE885279.1, EVALUE 1.00e-103; NT HIT: AF178669.1, EVALUE 2.00e-24; SWISSPROT HIT: P53973, EVALUE 1.30e+00
ttgtgtgctgtcaaagtaaaccacaaatgcttggacagattctgcaatctctgcagtaacaagaaatttgtttggcaccacacatagattgatgtctgctgaatagtatttattatcaatggtccagggataaaatctcacagcatcattggaagtcacttccacaataagatcttctgttccaaggatat

SEQ ID NO: 32340 - DNA, 130 bp, Homo sapiens
  MAP TO AC022035.2; EXPRESSED IN LUNG, SIGNAL = 5.8; SWISSPROT HIT: P03457, EVALUE 4.10e+00; EST_HUMAN HIT: AA348111.1, EVALUE 2.00e-67; NT HIT: U67493.1, EVALUE 4.50e+00
ttctactgtgccatccaaaatgttattaataaactggaccatgtcttcaacattcttaatctgtctatctagcaagaaatattgctggtttgaagtattcagtacaactacagttgggactgtcaattca

SEQ ID NO: 32341 - DNA, 115 bp, Homo sapiens
  MAP TO AC019248.3; EXPRESSED IN LUNG, SIGNAL = 3.4; EST_HUMAN HIT: AI151356.1, EVALUE 2.00e-58; NT HIT: gi11431260, EVALUE 1.00e-58; SWISSPROT HIT: Q15404, EVALUE 2.00e-15
ctagttctgggggcagaacggtgaggcggttcccctgaatgtggagctctttaagctgggtaagctccccgatttccttaggcagcgagatcaggtcgttatccctaaggctgag

SEQ ID NO: 32342 - DNA, 201 bp, Homo sapiens
  MAP TO AL136170.2; EXPRESSED IN LUNG, SIGNAL =   2; NT HIT: AF255303.1, EVALUE 5.00e-04; EST_HUMAN HIT: AW962574.1, EVALUE 1.00e-109; SWISSPROT HIT: P34184, EVALUE 5.00e+00
cttgtcaataatggactgcatatgagatttgtgagactggtctccataaagcaaagaggaccactggtccggtgcaattcgtaagcctgcttccatagcaatctgcactatctgggagtcatgttctcgccgcagagcttcataggttctaaattcttctttcagctgcatcaaagaagagtcttcatcacgtttggtgac

SEQ ID NO: 32343 - DNA, 464 bp, Homo sapiens
  MAP TO AC008752.3; EXPRESSED IN LUNG, SIGNAL = 2.8; SWISSPROT HIT: P10569, EVALUE 4.90e-02; EST_HUMAN HIT: R00904.1, EVALUE 0.00e+00; NT HIT: gi8923178, EVALUE 0.00e+00
cgcgcttccgggccttgcgctcgctggtgctgggtggtacctaccgtgtgaccgagacagggctggatgctggcctgcaggagctcagctatctgcagaggcttgaggtgctgggctgcaccctgtctgccgacagcaccctgctggccatcagccgccacctccgagatgtgcgcaagatccggctgaccgtgaggggcctctctgcccctggcctggctgtgctggagggaatgccggccctggagagtctgtgcctgcagggtcccctcgtcaccccagaaatgccctcccccactgaaatcctctcctcctgcctcactatgcccaagctcagagtccttgagctgcaggggctggggtgggagggtcaggaggcggagaagatcctgtgtaaggggctgccccactgtatggtcatcgtcagggcttgccccaaagagtctatggactggtggatgtaa

SEQ ID NO: 32344 - DNA, 266 bp, Homo sapiens
  MAP TO AC008569.3; EXPRESSED IN BONE MARROW, SIGNAL = 3.2; EXPRESSED IN LUNG, SIGNAL =   9; EST_HUMAN HIT: BE017960.1, EVALUE 0.00e+00; NT HIT: gi11424487, EVALUE 0.00e+00; SWISSPROT HIT: P48960, EVALUE 1.00e-43
cttggcaggagggtctcttcccgcctccccatcggaggactcaaggtgggagaaggcgaaaaggatgggggagttgagttccttggtgttgttgtggctcagaaagatggagttgacggcagagaggcgtctgagttggacaccacggatgctgctttcatatatctcctccagttcggcttgcttcttggaatgcaggttcaaggaggcattggccagcaatgtcgtcatgttctggatggagaggatgcccgccacggcggggc

SEQ ID NO: 32345 - DNA, 476 bp, Homo sapiens
  MAP TO AL034380.25; EXPRESSED IN LUNG, SIGNAL = 4.7; EST_HUMAN HIT: N98886.1, EVALUE 0.00e+00; SWISSPROT HIT: Q09712, EVALUE 5.00e-08; NT HIT: gi8923441, EVALUE 0.00e+00
ctgaacatgcatgcacagacctccaaacagcagcagcactgcagcgtggaccacgtacacaaacacctgaggactgaggaatccaagatcgggcttctctagggtcttattgttcttgctcctttgcagcccaagtgtaaggcagagccaagggtgagtggtcacgtatgtccaagttgcccaggcaaccagtatagccactggtgcagccagtagaaaattgggcacctgcttgagctcatagtatttcaaaaagccaacattccagtagacatcctggatatagctgtatattagtggaacatcccagaagcaccaaggcggttcatttccctctgcaatccggtagcccttgtctacagctaactgtaccaaaggctcaggaatggggcgggctgagcctggcagacagaattgggtgtaggcataatactgaaagagggcaaagggaaggccaagtgtgaacaccgacagaa

SEQ ID NO: 32346 - DNA, 183 bp, Homo sapiens
  MAP TO AC021993.2; EXPRESSED IN BONE MARROW, SIGNAL =   3; EXPRESSED IN LUNG, SIGNAL = 3.3; SWISSPROT HIT: P55200, EVALUE 5.10e+00
gaggttgtgatagacacgactgtacacaccaacattcagttctttctgaatgttacacgcccacaggcatgtgtttcactccttctgttatgtgggatgcaggcctgagccactgtatttgctatcagaaggctgaaggggcttcacatcttcaggcagcatacccaggttgtatcaataaaa

SEQ ID NO: 32347 - DNA, 142 bp, Homo sapiens; identical to SEQ ID NO: 21039
  MAP TO AL122020.2; EXPRESSED IN BONE MARROW, SIGNAL = 2.6; EXPRESSED IN LUNG, SIGNAL = 2.9; EST_HUMAN HIT: BF363327.1, EVALUE 8.00e-03; SWISSPROT HIT: P32957, EVALUE 2.40e+00; NT HIT: gi6680855, EVALUE 3.20e-01

SEQ ID NO: 32348 - DNA, 143 bp, Homo sapiens
  MAP TO AL158070.2; EXPRESSED IN LUNG, SIGNAL = 2.5; NT HIT: AB038490.1, EVALUE 4.00e-50; SWISSPROT HIT: P19447, EVALUE 2.30e+00; EST_HUMAN HIT: AI813328.1, EVALUE 2.00e-46
ttatttgattcatacttgaatttttttcctgttttggcctgagtgcctccattccacatgtgatcagtttcttcatagaagaaaaaaacatcaagttttacatcatcttttccctggaaggatagttccaagctgtcttctac

SEQ ID NO: 32349 - DNA, 232 bp, Homo sapiens
  MAP TO AC018676.3; EXPRESSED IN BONE MARROW, SIGNAL = 1.6; EXPRESSED IN LUNG, SIGNAL = 1.9; SWISSPROT HIT: P46506, EVALUE 8.20e-01; EST_HUMAN HIT: AI057301.1, EVALUE 8.20e-01; NT HIT: AL161496.2, EVALUE 1.40e-01
atggctaagcaaaagcaaaattgtcaataccttattattgcaataaaatatgctaagaattacgcattgaatttcccagactgcattattgaaatgtttgctaattttcacgacaatttaccagatactgctgaagaggaacttaatgaaactgtggctgaagttaaatttaaaataatccaatgcacttctcaaaggaagattactccccagctgtcaaacagctttgatg

SEQ ID NO: 32350 - DNA, 185 bp, Homo sapiens
  MAP TO AC008686.3; EXPRESSED IN PLACENTA, SIGNAL = 1.4; EXPRESSED IN LUNG, SIGNAL = 1.9; SWISSPROT HIT: Q09651, EVALUE 1.00e-08; EST_HUMAN HIT: BE791831.1, EVALUE 6.00e-75
tcagggccagggcccccaggcaggtaagtgggtggcgctcacctgtggtcagcacctgctcattgtccgccatgtcccagcgctcctccttgcgctgggcgccactcacgatcacgtagtcgcagttggcggggtccgtctgcatctcgatgtagttgacacagaggtggcatttcatccggaac

SEQ ID NO: 32351 - DNA, 178 bp, Homo sapiens
  MAP TO AL136170.2; EXPRESSED IN LUNG, SIGNAL = 1.9; SWISSPROT HIT: P32486, EVALUE 1.70e+00; EST_HUMAN HIT: BE005992.1, EVALUE 8.00e-96
gatcttcagagaagagcagcagaaaccagtgatgatgacctcatcccatttggagaccgaccaacagtgtctcggtttggtgccatctcacgaacttccaaaactatatatcagggtgctggtccaatgcaggctatggcacctcagggagctcctacaaaatctattaacatttcag

SEQ ID NO: 32352 - DNA, 125 bp, Homo sapiens
  MAP TO AC011450.3; EXPRESSED IN BONE MARROW, SIGNAL = 1.9; EXPRESSED IN LUNG, SIGNAL = 3.3; NT HIT: gi11424091, EVALUE 2.00e-64; SWISSPROT HIT: P11049, EVALUE 3.00e-17; EST_HUMAN HIT: BE269660.1, EVALUE 2.00e-64
gcttggccttcgtgcctctgcagatctggtccaaagtcctggccatctcaggaatcttcaccatgggcatcgccctcctgggttgtgtgggggccctcaaggagctccgctgcctcctgggcctg

SEQ ID NO: 32353 - DNA, 162 bp, Homo sapiens
  MAP TO AC009181.5; EXPRESSED IN BONE MARROW, SIGNAL = 1.6; EXPRESSED IN LUNG, SIGNAL =   2; EXPRESSED IN PLACENTA, SIGNAL = 1.4; NT HIT: gi11422113, EVALUE 2.00e-79; EST_HUMAN HIT: AV690469.1, EVALUE 3.00e-86
gtcctctcagggtgcgccatcattgtccgaggtcagcctcgtggtgggcctcctcctgagcggcagatcaacctcagcaacattcgtgctggaaatcttgctcgccgggcagccgccacacaacctgatgcaaaggatacccctgatgaggtaggtgtttcc

SEQ ID NO: 32354 - DNA, 99 bp, Homo sapiens
  MAP TO AL159165.1; EXPRESSED IN LUNG, SIGNAL = 9.7; NT HIT: Z72955.1, EVALUE 5.30e-02
gtccatttgttgagagagaagaggaacagagacaaatagaggtttctggtgcttttctactaggtaaagagggtgtagggacagggaaagagaaagatg

SEQ ID NO: 32355 - DNA, 130 bp, Homo sapiens
  MAP TO AL138775.1; EXPRESSED IN LUNG, SIGNAL = 1.8; NT HIT: AE002110.1, EVALUE 9.80e-01; EST_HUMAN HIT: BE061838.1, EVALUE 1.20e+00
ggtcataagagaagaagatgatgcaacacaggggaatggaatgcatcctttttcaggggattgggaacctaaaatgatgattattgagctgctcaaggtagtttcattaaaggtaaacatggagaatcat

SEQ ID NO: 32356 - DNA, 169 bp, Homo sapiens
  MAP TO AL136039.1; EXPRESSED IN LUNG, SIGNAL = 1.8; NT HIT: AF157516.2, EVALUE 5.00e-90
ccgaggacgccgaggccaagctcagcagcaccgcacacagcagcagcgtcagccctatccggacccgcatcctcctctcggggccggtgccaacccctagagctgtcgccttcgcctctgccaccacggactcagccaccaccgccgcctcgccgctgctcttcctgct

SEQ ID NO: 32357 - DNA, 401 bp, Homo sapiens
  MAP TO AC024123.1; EXPRESSED IN BONE MARROW, SIGNAL = 1.5; EXPRESSED IN LUNG, SIGNAL = 4.6; SWISSPROT HIT: Q07954, EVALUE 2.00e-25; EST_HUMAN HIT: AL043705.1, EVALUE 0.00e+00; NT HIT: AB017498.1, EVALUE 0.00e+00
gagccgaggaggtgctgctgctggcccggcggacggacctacggaggatctcgctggacacgccggacttcaccgacatcgtgctgcaggtggacgacatccggcacgccattgccatcgactacgacccgctagagggctatgtctactggacagatgacgaggtgcgggccatccgcagggcgtacctggacgggtctggggcgcagacgctggtcaacaccgagatcaacgaccccgatggcatcgcggtcgactgggtggcccgaaacctctactggaccgacacgggcacggaccgcatcgaggtgacgcgcctcaacggcacctcccgcaagatcctggtgtcggaggacctggacgagccccgagccatcgcactgcaccccgtgatggggtaa

SEQ ID NO: 32358 - DNA, 392 bp, Homo sapiens
  MAP TO AL136298.1; EXPRESSED IN LUNG, SIGNAL = 2.2; SWISSPROT HIT: P21458, EVALUE 2.90e+00; EST_HUMAN HIT: BF669207.1, EVALUE 0.00e+00; NT HIT: AB032969.1, EVALUE 0.00e+00
gctactatttttaatttgtttttgtgagttctttttgaccgagtcctgatttacttcatcttcatttggcttcttcttttttgagcttgctgttaaacctgaatatttttcatctgagggatgcttgactggttttcgatatatgactcttccatcggctggagttggttcttcatctgctttggcagcctttatttctgctttaattttcgtgacttcttcaactgacaggtctcccttttttaaaaccaccacttgaggctgttcatcttctttgtcactgtgatccccatcttcatctgggggctgaggctgaattctcttagtctctacggtgggtccctccctgtagccgacccgttccttgaagcgggccagaaacgccggctcgg

SEQ ID NO: 32359 - DNA, 138 bp, Homo sapiens
  MAP TO AC011450.3; EXPRESSED IN BONE MARROW, SIGNAL = 3.2; EXPRESSED IN LUNG, SIGNAL = 7.9; NT HIT: gi11424091, EVALUE 3.00e-72; SWISSPROT HIT: P11049, EVALUE 2.00e-24; EST_HUMAN HIT: AW406508.1, EVALUE 4.00e-72
ctgcgctgctgcggctggcactacccgcaggactggttccaagtcctcatcctgagaggtaacgggtcggaggcgcaccgcgtgccctgctcctgctacaacttgtcggcgaccaacgactccacaatcctagataag

SEQ ID NO: 32360 - DNA, 519 bp, Homo sapiens
  MAP TO AL133444.1; EXPRESSED IN LUNG, SIGNAL =   3; NT HIT: AB028976.1, EVALUE 0.00e+00; SWISSPROT HIT: P39143, EVALUE 6.60e-01; EST_HUMAN HIT: AA436092.1, EVALUE 0.00e+00
gaatcattaaccaatggcaacaggaatccaaggataaagtgatttccctcctgttaactcatctgcctttgctgaagccaggaaacctcgacgcgaaagtagaatatatgaaactgctgcccaaaatcctggctcactctattgaacacaaccagcacattgaggagagcaggcagctgctgtcctatgctttgatacatccagccacttcgttagaagaccgtagtgctttagccatgtggctgaatcacttggaggaccgcacgtcgaccagctttggtggccagaaccgaggccgctcagactctgtggattatggacagacacactactatcaccaaagacagaactctgatgacaagctcaatgggtggcagaactctcgggattctgggatttgcatcaatgcctccaactggcaggacaaaagcatggggtgtgagaatggccatgtgcccctctactcctcctcatctgtccccaccacaatcaatacgattggaaccagcacaagtacaa

SEQ ID NO: 32361 - DNA, 83 bp, Homo sapiens
  MAP TO AP001207.1; EXPRESSED IN LUNG, SIGNAL = 2.2; SWISSPROT HIT: O70228, EVALUE 4.30e+00; NT HIT: U22516.1, EVALUE 1.70e-01; EST_HUMAN HIT: AA633972.1, EVALUE 2.00e-39
ctgatatccacactgatcttggccttggccttccctctctcaacatgcaaagccattcctctcccaggcccaccatgtggccc

SEQ ID NO: 32362 - DNA, 97 bp, Homo sapiens
  MAP TO AC012566.3; EXPRESSED IN LUNG, SIGNAL = 2.2; EST_HUMAN HIT: BE072352.1, EVALUE 4.70e+00
gaaccacagagaagtcatcattcaagatccgaaatgaagaaaaaaaaaggaagaaaaaggaaagaaaacagagccaactatttattcgccaagctcc

SEQ ID NO: 32363 - DNA, 238 bp, Homo sapiens; identical to SEQ ID NO: 31345
  MAP TO AL133249.1; EXPRESSED IN LUNG, SIGNAL = 1.8; NT HIT: gi11423962, EVALUE 5.00e-94; SWISSPROT HIT: P54819, EVALUE 3.00e-32; EST_HUMAN HIT: AB005622.1, EVALUE 7.00e-94

SEQ ID NO: 32364 - DNA, 95 bp, Homo sapiens
  MAP TO AL138828.4; EXPRESSED IN PLACENTA, SIGNAL = 1.4; EXPRESSED IN LUNG, SIGNAL = 1.6; NT HIT: AJ011500.1, EVALUE 7.90e-01; EST_HUMAN HIT: AI125063.1, EVALUE 7.40e-02
atcgctcagacgtctacccagacctcgacccagtttccacccgcgcgcctcggcttgcagccacaggcggtaacgatgccctcagcgaggaataa

SEQ ID NO: 32365 - DNA, 85 bp, Homo sapiens
  MAP TO AC021887.2; EXPRESSED IN LUNG, SIGNAL =   2; NT HIT: gi11559924, EVALUE 6.90e-01; EST_HUMAN HIT: BE788822.1, EVALUE 1.00e+00
gtcaaccatgaacagacagagatcatgaagaacattaaagttaaggagaaagcaatcatatttagagatgaacatttgaggaagg

SEQ ID NO: 32366 - DNA, 196 bp, Homo sapiens
  MAP TO AL138761.3; EXPRESSED IN BONE MARROW, SIGNAL = 1.6; EXPRESSED IN LUNG, SIGNAL = 1.8; SWISSPROT HIT: O26541, EVALUE 3.00e-03; NT HIT: AF273048.1, EVALUE 2.00e-98; EST_HUMAN HIT: AW999682.1, EVALUE 4.00e-98
agtagtttacacttacctccttctttcggttcttcagcatattctgaaatttggacaactctttctcttgttctcctttgatgcgtttggcttcatctcgcaagcgatttgtgtgctcttgttccaggcgttcgatagtctgtttctgctgtttttctagattctcaatttcctggtcatattgtcgctttttact

SEQ ID NO: 32367 - DNA, 180 bp, Homo sapiens
  MAP TO AC015971.2; EXPRESSED IN LUNG, SIGNAL = 1.9; NT HIT: AF219226.1, EVALUE 4.00e-97; EST_HUMAN HIT: BE270749.1, EVALUE 5.00e-97; SWISSPROT HIT: P36095, EVALUE 8.90e-02
cgagctggttcttcatccccatgagcactgagttcatgtgtgctttggatgcatacagcttgctcacagccttccttgacctgatcatctccttggccagaactatgcagacatccttctggcccttcttggcagcatctttcacagatcgtttcactttttcttcttctctttggatat

SEQ ID NO: 32368 - DNA, 148 bp, Homo sapiens
  MAP TO AL121787.22; EXPRESSED IN LUNG, SIGNAL = 4.5; EST_HUMAN HIT: AI310410.1, EVALUE 3.20e-02; NT HIT: U87270.1, EVALUE 8.50e-02; SWISSPROT HIT: P07636, EVALUE 1.00e+00
gctgcagaggttcaggtggagggaaggacaggatttttcttccatctctttcatgaagtttatctcacctaaaatcaacacccacaggatggacaggacttcactagggagcaagtggggagagacccttcaggagaggacactggtg

SEQ ID NO: 32369 - DNA, 186 bp, Homo sapiens
  MAP TO AL139120.3; EXPRESSED IN PLACENTA, SIGNAL = 1.3; EXPRESSED IN LUNG, SIGNAL = 2.7; NT HIT: AF111167.2, EVALUE 3.00e-08; EST_HUMAN HIT: AW835619.1, EVALUE 1.00e-05; SWISSPROT HIT: P34417, EVALUE 1.70e+00
gccctatttcttttaaaaccgatgacgataatgataataacaaatacctcaatgtttcctggcactttattatgtgccaggcattgttgtgtgcactttacatgtatctacacatttataaaaatttccatagtaaagactattgttatccctattttgcagatgaggaaactgaggtacggagag

SEQ ID NO: 32370 - DNA, 313 bp, Homo sapiens
  MAP TO AC011467.3; EXPRESSED IN LUNG, SIGNAL = 1.7; NT HIT: AF012337.1, EVALUE 0.00e+00; SWISSPROT HIT: P10267, EVALUE 5.00e-42; EST_HUMAN HIT: AW086063.1, EVALUE 2.00e-60
acatttgaagttctacaatgaacccatcggagatgaaaagaaaagcgcctccatggagatggaaacaccactcacatggatggataatcctattgaagtatatgttaatgatagtgtatgggtacatggccccacagatgatcgctgccctgccaaacctgaggaagaagggatgatgacaaatatttccactgggtatcattatcctcctatttgcctagggagagcactaggatgcttaatgcctgcagtccaaaattggttggtagaagtacctactgtcagtcccatcagtagattcacttatcacatg

SEQ ID NO: 32371 - DNA, 176 bp, Homo sapiens
  MAP TO AC008635.4; EXPRESSED IN LUNG, SIGNAL = 2.1; EXPRESSED IN PLACENTA, SIGNAL = 1.3; EST_HUMAN HIT: BF348134.1, EVALUE 1.00e-94; NT HIT: gi7019572, EVALUE 8.00e-95; SWISSPROT HIT: P70483, EVALUE 5.00e-19
ttcttggccgtgaccgccttctgcaggttccagagcttgagcgtgccgtcctcggaggcggtgagcagagccgactggctgtggtggaaggccagggaacgaatgccgtcgtagtgcgagcgcagggtgaacttggggttccacgtcttcttaaaagcatctttgctgtcagacag

SEQ ID NO: 32372 - DNA, 123 bp, Homo sapiens
  MAP TO AC024167.1; EXPRESSED IN LUNG, SIGNAL =  35; NT HIT: AB040930.1, EVALUE 2.00e-63; SWISSPROT HIT: Q40288, EVALUE 3.10e+00; EST_HUMAN HIT: T07640.1, EVALUE 5.00e-53
ttgttgtgctaaactcaataatgctgttctaactacagtgctcaataaaatgattaatgacaggatggggttcccctgtgcttttaccagtagcatgaccccttctgaagccatccgtagaaa

SEQ ID NO: 32373 - DNA, 209 bp, Homo sapiens
  MAP TO AL157885.2; EXPRESSED IN LUNG, SIGNAL = 2.2; NT HIT: gi11431250, EVALUE 1.00e-114; SWISSPROT HIT: P22897, EVALUE 2.00e-36; EST_HUMAN HIT: BF574757.1, EVALUE 1.00e-114
caagttactgttcagggcgatccacacacgttcattagatgtttccatctgcagccacgcaaatgcattactgtagggatccagaatgctggctataagggaattgtgaagcttgcagtatgtctccgcttcatgccattgaaatttttgtctcatgagtgaatagctgcttttgccatatttaacaaagccatctgtttgaatcgttg

SEQ ID NO: 32374 - DNA, 108 bp, Homo sapiens
  MAP TO AC020714.2; EXPRESSED IN LUNG, SIGNAL = 1.9; EST_HUMAN HIT: AU131774.1, EVALUE 3.00e-54; NT HIT: gi6715588, EVALUE 2.00e-54
ttgctgtagatttaattttgctgacttcttcattaacagcagacgcagaaaccagtggtgcttgtggtctgttatccacagaccttggttgaatagaatcatgaatat

SEQ ID NO: 32375 - DNA, 237 bp, Homo sapiens
  MAP TO AC024123.1; EXPRESSED IN LUNG, SIGNAL = 3.6; SWISSPROT HIT: P98157, EVALUE 2.00e-14; EST_HUMAN HIT: BF528303.1, EVALUE 1.00e-121; NT HIT: AF077820.1, EVALUE 1.00e-126
ctgctgccagaccatcagccgcgccttcatgaacgggagctcggtggagcacgtggtggagtttggccttgactaccccgagggcatggccgttgactggatgggcaagaacctctactgggccgacactgggaccaacagaatcgaagtggcgcggctggacgggcagttccggcaagtcctcgtgtggagggacttggacaacccgaggtcgctggccctggatcccaccaaggg

SEQ ID NO: 32376 - DNA, 120 bp, Homo sapiens
  MAP TO AC022034.3; EXPRESSED IN LUNG, SIGNAL = 2.2; SWISSPROT HIT: Q9VAZ3, EVALUE 1.80e+00; EST_HUMAN HIT: BE207127.1, EVALUE 9.00e-27; NT HIT: AE001024.1, EVALUE 1.70e-02
gtggcatgctccaacagcatcatgttctgggcccacacctacactgaggtgaccaatgtcttcaactgttgtatctgcaccaccctttcagcagcagctgcaggcagcttgccctggaac

SEQ ID NO: 32377 - DNA, 121 bp, Homo sapiens
  MAP TO AC013359.4; EXPRESSED IN LUNG, SIGNAL = 3.1; EST_HUMAN HIT: Z42596.1, EVALUE 5.00e-62; SWISSPROT HIT: Q64338, EVALUE 9.30e+00; NT HIT: AB029025.1, EVALUE 4.00e-62
atccatcccagaatcagcagacatcaaatccaacgcacagttcagaagatgtgaagccaaaaaccctcccgctggataaaagcattaaccatcagatcgagtctcccagtgaaaggcggaa

SEQ ID NO: 32378 - DNA, 232 bp, Homo sapiens
  MAP TO AC010582.6; EXPRESSED IN LUNG, SIGNAL = 1.8; EXPRESSED IN PLACENTA, SIGNAL = 1.3; EST_HUMAN HIT: BE255107.1, EVALUE 1.00e-73; NT HIT: X77225.1, EVALUE 9.00e-74
ttcttccacctgcccatcttcagctccatctttctctttgtcttcctcctcatcatcatcatagtcttcttcttcatcttcatcttcttcagatgatgtatccccagttccatcaacttgtaagaccaatggagcttgtgtttgagcaggctgggcctgcggttgctgctggccagttgcagttatctgtgcttgggctggtgtaggtgctgccactgtcgtaggtataact

SEQ ID NO: 32379 - DNA, 138 bp, Homo sapiens
  MAP TO AL121975.3; EXPRESSED IN LUNG, SIGNAL =  13; NT HIT: gi4506052, EVALUE 3.00e-72; SWISSPROT HIT: P49643, EVALUE 8.00e-20; EST_HUMAN HIT: AV757142.1, EVALUE 4.00e-72
tgccaaagccttggacagtttggctctaaattcattcaggatgattgccacaatgtccttaagtggtacgtaagcaaagccatcttccaaatagactttccttcctcgaaacaaatccagagcatcagcaaaagggat

SEQ ID NO: 32380 - DNA, 105 bp, Homo sapiens
  MAP TO AC008045.5; EXPRESSED IN PLACENTA, SIGNAL = 1.4; EXPRESSED IN LUNG, SIGNAL = 1.9; EST_HUMAN HIT: AW844320.1, EVALUE 2.10e-02; SWISSPROT HIT: Q42920, EVALUE 7.20e+00; NT HIT: gi11641272, EVALUE 8.90e-01
aaaacaacaacaacagcagcagcaacaacaacaacaacaaaaaacatctaacaacggagccaatgcttactcatgccagtcccaggattccatatatggggacat

SEQ ID NO: 32381 - DNA, 83 bp, Homo sapiens
  MAP TO AC010745.2; EXPRESSED IN LUNG, SIGNAL = 1.7; NT HIT: M80478.1, EVALUE 1.10e-02; SWISSPROT HIT: P54547, EVALUE 9.60e+00; EST_HUMAN HIT: AV732068.1, EVALUE 3.90e+00
agaaagtgtcagtatccccatcttaccaatggggaagcttaggcccagagagggcaagcaatttgctcacaatcacacagctg

SEQ ID NO: 32382 - DNA, 102 bp, Homo sapiens
  MAP TO AC008860.5; EXPRESSED IN PLACENTA, SIGNAL = 1.8; EXPRESSED IN LUNG, SIGNAL =   2; SWISSPROT HIT: P10463, EVALUE 1.00e-05; EST_HUMAN HIT: AA885514.1, EVALUE 9.00e-51; NT HIT: U51053.1, EVALUE 2.20e-01
ttaaagcttccaggcggttctcatcatgatgatgaagtacacatcagtgtcaatggatgcgctcacacctgcatagtagttcatgaactcctcaggggtcac

SEQ ID NO: 32383 - DNA, 152 bp, Homo sapiens
  MAP TO AC022211.2; EXPRESSED IN LUNG, SIGNAL = 2.7; NT HIT: gi11432723, EVALUE 8.70e-02; SWISSPROT HIT: Q9SCW5, EVALUE 1.80e+00; EST_HUMAN HIT: BE253522.1, EVALUE 2.00e-80
cctgtggcagctgggggtcgattactttgattactgccccgagctgggccgagtctccctggagctgcacattgagcggatacctctgaacaccgagcagaaagccctgaaggtgctgcggatctgtgagcagcggcagatgactgaacaag

SEQ ID NO: 32384 - DNA, 95 bp, Homo sapiens
  MAP TO AL121923.7; EXPRESSED IN LUNG, SIGNAL = 2.3; EST_HUMAN HIT: AI765528.1, EVALUE 3.00e-10; NT HIT: M18680.1, EVALUE 2.00e-07
ggcgggtacgtgtcttccggccagctctcttccgcttctgctgtcttgatgacgcacagtgctggcgcaagtcgtcttgcgccaggcgactgggt

SEQ ID NO: 32385 - DNA, 169 bp, Homo sapiens
  MAP TO AC010291.5; EXPRESSED IN LUNG, SIGNAL = 1.9; NT HIT: M33874.1, EVALUE 6.10e+00; EST_HUMAN HIT: AI884404.1, EVALUE 1.50e-01; SWISSPROT HIT: P36292, EVALUE 1.30e+00
agacctgcttcaggcagtgcatttcagcaaggagcagaccatggaggatcacagggatctgaatttgcaggtgatggtccaaattcttggctccaagtataaaatactgatttcccaactcctctacccagggctttcttgctctgaggccaggctggcactgtttgca

SEQ ID NO: 32386 - DNA, 530 bp, Homo sapiens
  MAP TO AC022034.3; EXPRESSED IN BONE MARROW, SIGNAL = 2.9; EXPRESSED IN LUNG, SIGNAL = 1.7; SWISSPROT HIT: P54459, EVALUE 1.50e+00; NT HIT: AL163303.2, EVALUE 1.00e-06; EST_HUMAN HIT: AL046939.1, EVALUE 9.00e-12
gcaaggcggagagcagcaggagaactggtggtctccttcctcactatgacttaaaaaaaaaaaacaagagtcccttcaaaatattactgctcattgacaatgcacttggtcactcaagagtcctgacagagaggtacaaggatattttcagacctgcaaacacaacatcgcttctgaagcccatggttcaaggactaattccaactttcaagtcttgtaatttaagaaatacattccctaacactataactgccatagatggtgattcctctgatggactagaaaaggaaattgaaaacattctggaaagtattcattcttctagatgccactctagaacattcatgattcatgacatcaaaatatcaacattaactgtagtttggaagaagttaattttaaccttcataggtgattttgacgggttcaaggtttcagtggaggaagcaacagcagatgcgatagaaatagcaagagaactagaagtggagcctgaaggtgggactgaatttctacaatcaaggtgggac

SEQ ID NO: 32387 - DNA, 164 bp, Homo sapiens
  MAP TO AC012596.2; EXPRESSED IN LUNG, SIGNAL = 2.5; EST_HUMAN HIT: F31628.1, EVALUE 2.20e+00
atgaagaaagggaagattctaggcaaggaggaagagataaaagggctaagaggggataaagaggaaaagaagaaggaggagaaagcaaagcaggaggagggggaaaagaaggaagcaagcaagggaagaaagaagggaagggaagaagaagaagaagaaggaag

SEQ ID NO: 32388 - DNA, 233 bp, Homo sapiens
  MAP TO AC010322.4; EXPRESSED IN BONE MARROW, SIGNAL = 5.7; EXPRESSED IN LUNG, SIGNAL = 3.8; SWISSPROT HIT: P22467, EVALUE 4.00e-14; EST_HUMAN HIT: BE145498.1, EVALUE 1.00e-30; NT HIT: U57053.1, EVALUE 1.00e-102
gacactggggtgctgacatggttctctcggattcagggcaagtactttgagatccagttcagccgaggtggggagccagatgggggcaagatctccaacttcttgctggagaagtcccgcgtggtcatgcaaaatgaaaatgagaggaacttccacatctactaccaggtgcagggaaggggccgggggagagggagcaccacctggagcccagcggggtggacaatgggaag

SEQ ID NO: 32389 - DNA, 139 bp, Homo sapiens
  MAP TO AC011338.2; EXPRESSED IN LUNG, SIGNAL = 2.8; EST_HUMAN HIT: AA602845.1, EVALUE 1.00e-04; NT HIT: gi9628550, EVALUE 7.90e-02; SWISSPROT HIT: Q03603, EVALUE 6.90e+00
aagtgaatcctgcaggaaaacttgctccattttggttatttctgttatatcacaggtgggctggatagcaagttttggaagcactgaacacccacacggagctgctcctctcaagcggggaggcatcttcactaaggag

SEQ ID NO: 32390 - DNA, 218 bp, Homo sapiens
  MAP TO AC011465.4; EXPRESSED IN LUNG, SIGNAL =   2; SWISSPROT HIT: O35601, EVALUE 2.00e+00; NT HIT: U84004.1, EVALUE 8.10e+00; EST_HUMAN HIT: AA584764.1, EVALUE 1.00e-117
tccatcctggaagatgctacgcccacagccaccaagcatgggaccgggcggggcctgcccttgaaggatgccctggagtatgtcatccccgagctcaacatccactgcctgcggctggccctcaacacccccaaggtgacggagcaactgctgaagctcgatgagcaaggggtgagtcaggggctggaggtgggggtgctgctggggcagtaccttgc

SEQ ID NO: 32391 - DNA, 119 bp, Homo sapiens
  MAP TO AL138970.2; EXPRESSED IN LUNG, SIGNAL = 2.2; EST_HUMAN HIT: AW961155.1, EVALUE 3.90e-01
ttaggagtcagtagatccaagtgtgtgctttagagctggcattgttccatctaggtccaccacttcttggctagattcttgggcaaactgtttacattctttgtcttctgttttctcat

SEQ ID NO: 32392 - DNA, 157 bp, Homo sapiens
  MAP TO AC018897.2; EXPRESSED IN LUNG, SIGNAL = 1.8; SWISSPROT HIT: Q95208, EVALUE 3.00e+00; NT HIT: U66061.1, EVALUE 6.00e-06; EST_HUMAN HIT: AW173008.1, EVALUE 9.00e-09
cttttggcattgctgtcttgtgaatgaggatttttgtttttatgttctttaatgcccctgagggtttgactgcgatatatgttgggtttagttgattggcttcatttctggatgctttcagagggcaaaggctcagtttggcactcctgtgctgcat

SEQ ID NO: 32393 - DNA, 222 bp, Homo sapiens
  MAP TO AL121716.16; EXPRESSED IN LUNG, SIGNAL = 1.9; SWISSPROT HIT: O52325, EVALUE 3.70e+00; NT HIT: AB029040.1, EVALUE 1.00e-122; EST_HUMAN HIT: BE002805.1, EVALUE 1.00e-122
gttctccagtttcatgtccttattagggaaggcatttgagtagaggataggactccctgagtgtcctccacatcggcttgtgactttgctgttgaagacttgactgagcacattgaagaacggcaggagctgctccatactgcgcacggtgcagatggtgagcagcaagtgccctggctcccaacccaatgttctccctgagttgtcttcctctggattttt

SEQ ID NO: 32394 - DNA, 172 bp, Homo sapiens
  MAP TO AC016939.8; EXPRESSED IN LUNG, SIGNAL = 1.6; SWISSPROT HIT: P03230, EVALUE 1.50e-01; EST_HUMAN HIT: AW797342.1, EVALUE 7.00e-53; NT HIT: AF010473.1, EVALUE 2.50e-02
ggacccaacccataccagaaatgaagaaaatgaccctgcaggacccgcagccccagacaatactgcttcctcggatgacacaagccccagacattacctgggggatgctgaagaagacaactcaggaggccgagcgaatcctgctccggacacagacaccattcactccaga

SEQ ID NO: 32395 - DNA, 112 bp, Homo sapiens
  MAP TO AC019248.3; EXPRESSED IN PLACENTA, SIGNAL = 1.5; EXPRESSED IN BONE MARROW, SIGNAL = 1.7; EXPRESSED IN LUNG, SIGNAL = 3.8; NT HIT: gi11431260, EVALUE 8.00e-57; SWISSPROT HIT: Q15404, EVALUE 6.00e-14; EST_HUMAN HIT: BF573603.1, EVALUE 1.00e-56
agaggccgttgacatccagcatgttggagatgccccggtcactcatgtccacctcgggctggttcttctcccggctctcctccaccaacttcttcagagacttggacatggt

SEQ ID NO: 32396 - DNA, 170 bp, Homo sapiens
  MAP TO AC022211.2; EXPRESSED IN LUNG, SIGNAL = 2.8; NT HIT: AF190864.1, EVALUE 3.00e-91; SWISSPROT HIT: P22892, EVALUE 5.00e-04; EST_HUMAN HIT: BE563443.1, EVALUE 5.00e-91
cttgggcactgcagcctgcagcacgatgctcttgacaggtaagggagccgtgttcagcatggacaccaccaccaccagcacgtcaggtcgtcctgggggacactccttggcaaagtggaagaggatgcggaagccgtttttatcgtaggctgtcacaggaagggcactgc

SEQ ID NO: 32397 - DNA, 254 bp, Homo sapiens
  MAP TO AC022034.3; EXPRESSED IN PLACENTA, SIGNAL = 3.4; EXPRESSED IN LUNG, SIGNAL = 3.7; NT HIT: gi4506090, EVALUE 9.00e-68; SWISSPROT HIT: Q16659, EVALUE 1.00e-30; EST_HUMAN HIT: AW992394.1, EVALUE 1.00e-67
accagccgacacttagggaaaatagaaaagaacgtacgttgaaatactgggggctggttcccccgaaaatgagcatatgttcttttccaatggatgagctaatttcaagtcatccctttcatgttgaagataaagttgatgatgttttacttatggatgaaactcacagtcacatttataactgggaaaggtaccgtaattgtcagttttcagaacatgattggcctatacataacaactttgatattgattaa

SEQ ID NO: 32398 - DNA, 375 bp, Homo sapiens
  MAP TO AC022211.2; EXPRESSED IN LUNG, SIGNAL = 1.8; SWISSPROT HIT: P35223, EVALUE 3.00e-03; EST_HUMAN HIT: BE250543.1, EVALUE 0.00e+00; NT HIT: gi11428785, EVALUE 3.70e+00
atggatcagcgctgccgtggggccacgctcctcggcagtgggatacccagggcagagtgcgcctgccggctgcgggcctcggccacctggcggggggagcagaagtcctccaggaagatctgtgccaggttccggagcctggcgctggccgagagggagaagcgaagcatgcactgcaccacgggcgtggcggtcagctctgggagaaagctgcggcccggcgggctcaggtgcatgagcgtggtgatggcagacagcaccgtctcctcattggggctggataggcagttgatgatgagtgggacacctcctgcgtgcaggatgtgctccttgttggccctgtctgggcacaggttgcacaggcctcctgtggga

SEQ ID NO: 32399 - DNA, 224 bp, Homo sapiens
  MAP TO AL121808.2; EXPRESSED IN BONE MARROW, SIGNAL = 1.9; EXPRESSED IN LUNG, SIGNAL = 1.7; SWISSPROT HIT: Q15431, EVALUE 5.80e-01; NT HIT: gi9506864, EVALUE 3.00e-15; EST_HUMAN HIT: AW751191.1, EVALUE 2.00e-60
aaactggccagttttgtccgcaaagttcttgcactcttctttgagctctgtggtctgctgggtaacctctgagtccaacacccacagcttgttcaactcatcaaagtgcagtccctcttcagccaggatgtcctttaccatagttgtttcgcatccaagttccctagagaagctctgctctgaaggagtgacggtgacagtcaggaggaggtgtgtcataggaa

SEQ ID NO: 32400 - DNA, 206 bp, Homo sapiens
  MAP TO AC006548.20; EXPRESSED IN BONE MARROW, SIGNAL = 6.6; EXPRESSED IN LUNG, SIGNAL = 1.9; SWISSPROT HIT: P01614, EVALUE 1.00e-26; NT HIT: M20707.1, EVALUE 1.00e-112; EST_HUMAN HIT: AW406473.1, EVALUE 2.00e-50
tggaactccagaggcccggttggaaacctcatagatcaggagctgtggagactggcctggcttctgcaggtaccaattcaaataggtgtattcatcatcagtatccaagaggctctcactagatctgcaggagatggaggctggctctccaggagtgacaggcagggagagtggagtctgggtcatcacaatgtccccactggatc

SEQ ID NO: 32401 - DNA, 209 bp, Homo sapiens
  MAP TO AC008655.3; EXPRESSED IN LUNG, SIGNAL =   3; EST_HUMAN HIT: BE391856.1, EVALUE 1.00e-114; NT HIT: gi11321629, EVALUE 1.00e-114; SWISSPROT HIT: P55055, EVALUE 1.00e-33
ctgcggcctcttgatgcgcgtgtaggacagcagcgcctccacgtagggctgctgcaacgcctccacgcggcccggctcctgcacgttgggccggtcggccgagaagatgttgatggcgatgagcagggcgtactcagcgtcgtccaggcccagccgccgcatggcccgcgagaactcgaagatggggttgatgaactccacctgcaggc

SEQ ID NO: 32402 - DNA, 522 bp, Homo sapiens
  MAP TO AC022035.2; EXPRESSED IN LUNG, SIGNAL = 2.5; SWISSPROT HIT: Q07283, EVALUE 3.40e-02; EST_HUMAN HIT: AI858300.1, EVALUE 9.00e-12; NT HIT: M93661.1, EVALUE 5.10e+00
cttattatttgtgtcctcctttgtagaaaattgtctttttaccaaatactctctgatagactcatgcatttgtgaactcaattgaaattggtctgtatgttcacaggattcttctacgaagccaggaagcttcagatcctgggtaactttagcttctaatgcctccttctgaggtggcaaactctgtttctttttcagtgtactcaattctttcatcgccatctctagttttattctgagttgtcttccttcctccctggcactgttcctttcagctcgaactttactccatttttctctccagttggcagtgcagtccgaccaccaccgcatggtcttttccatctgagcagctctggccttgacttcttcaagctcccgcaggcgaagttcttcacaaatatcccatttgttggtgttatatgagtgagcacagaaattgtgagcagcatgagattgtagcccatgaagtgggaagcaggtattacaggtatccctggggggtgaggcaggtgccaccat

SEQ ID NO: 32403 - DNA, 198 bp, Homo sapiens
  MAP TO AC008635.4; EXPRESSED IN LUNG, SIGNAL = 1.7; SWISSPROT HIT: Q13033, EVALUE 1.00e-06; NT HIT: gi7019572, EVALUE 1.00e-108; EST_HUMAN HIT: BE798869.1, EVALUE 1.00e-107
ctctttatctgctcctcgatctgtttcaccagcagcgactccccaccactgagccctgcagggcctggtggagccctgggggccccttcactcggctccactgccccgttgagctccagcgagcggcccagcagggaacggacgcgcttggaccgcatgtcgaggatggtgtctgtgtagcccacctcttccaggtac

SEQ ID NO: 32404 - DNA, 193 bp, Homo sapiens
  MAP TO AL132773.14; EXPRESSED IN PLACENTA, SIGNAL = 1.3; EXPRESSED IN LUNG, SIGNAL = 1.9; EST_HUMAN HIT: BF313142.1, EVALUE 1.00e-104; NT HIT: AF218896.1, EVALUE 1.00e-105; SWISSPROT HIT: Q19981, EVALUE 1.00e-05
gaatgtgaccaatgagttgagagtttttcacattcataatgagtcatgggtgttgttgacccctaaggcaaaggagcagtatgcagtggttgggcactctgcacacattgttacactgaagaatggccgagtggtcatgctggtcatctttggtcactgccctctctatggatatataagcaatgtgcaggaa

SEQ ID NO: 32405 - DNA, 143 bp, Homo sapiens
  MAP TO AC008655.3; EXPRESSED IN LUNG, SIGNAL = 3.1; SWISSPROT HIT: P35579, EVALUE 6.00e-06; NT HIT: gi6981235, EVALUE 1.00e-12; EST_HUMAN HIT: BE796623.1, EVALUE 5.00e-75
cgaagccggttcctcagtgtggtcacttcacggttcatggactcggccgactctgtgacatcttccagctcacgctgcagcctccggcggccggcctgagcccgggatgcctcctcctcggcctcctccagctgccgcttcag

SEQ ID NO: 32406 - DNA, 179 bp, Homo sapiens
  MAP TO AL137858.1; EXPRESSED IN LUNG, SIGNAL = 1.8; NT HIT: AF207568.1, EVALUE 1.10e-01; SWISSPROT HIT: P09087, EVALUE 5.90e-01
ctgctgttggcgtaggagctgggctctagggtgaggaaagtggtgatggggagaggtatggtagtacagttgcatgttttggatagtcctgtgtggaataaaatgtcgtgcttcatctgcagagagtgttaaccacagcagctctgggataacctccaacttggtttcctcaattagtt

SEQ ID NO: 32407 - DNA, 453 bp, Homo sapiens
  MAP TO AC010358.5; EXPRESSED IN LUNG, SIGNAL = 2.7; NT HIT: AF247457.2, EVALUE 0.00e+00; EST_HUMAN HIT: BE257612.1, EVALUE 0.00e+00; SWISSPROT HIT: Q13402, EVALUE 8.10e-02
ctccacatcaaacagcgtcgagccatagccaggccactccttgatcaaggccatgtacttggccatggcctgttcctggttcattccctgaaatttcctccacttgtcaatgatactggctcgagcagaggagacttcttccttaatccacatgtccagcatctgctcctcctcgaccttctgccggaccacggatcctgtccggaagctccgcctcagggtcccctctaggaagctcgtccgcctcttctccagccgttcacaaggggtgaaggttttggttgactggctgatgcgggccttgagtctctgcagggaataaacctcttcgagaggtgggatggcagcgtgcagagtataatccccctgcagatactggagtcgcagggcagcaagaacctggaggttttcttccggggctggatggtggccatggataaccgcttcgtgggc

SEQ ID NO: 32408 - DNA, 150 bp, Homo sapiens
  MAP TO AL133374.1; EXPRESSED IN LUNG, SIGNAL = 1.6; SWISSPROT HIT: P28178, EVALUE 6.00e-10; NT HIT: gi11434729, EVALUE 1.00e-62; EST_HUMAN HIT: F05701.1, EVALUE 3.00e-79
atgtttaagaaagaaaaatgtatttcatttttagattatataaatggtggtgaactttttactcatctttctcaaagagagcgtttcacagagcatgaggtgcagatttatgttggagagattgtgcttgccctcgaacatctccacaag

SEQ ID NO: 32409 - DNA, 112 bp, Homo sapiens
  MAP TO AC008154.6; EXPRESSED IN LUNG, SIGNAL =   5; EST_HUMAN HIT: AW088510.1, EVALUE 3.60e-01
cacctctcaccagtggtctacactattatacaactttagaagaactctggaaaagttttgatctttgtgaagactattttaaacctccatttggaccatatcctgaaaagag

SEQ ID NO: 32410 - DNA, 300 bp, Homo sapiens
  MAP TO AC006111.2; EXPRESSED IN LUNG, SIGNAL = 1.8; EST_HUMAN HIT: BE693272.1, EVALUE 3.00e-32; SWISSPROT HIT: Q92793, EVALUE 2.00e-55; NT HIT: U85962.3, EVALUE 0.00e+00
ctcgcacacagtgcagtgccagcgcgtctccacgtggtgcttgcactcgttgcaggtgtagacaaagcggtcctggccctgggtgtgcagctccaccagcatgcagagcgtggaccacttggagcggcgcaaggaggagaactcccagtgcttgtctctggcgagggtgaggaaggcgtcgcgcccatccatgaggtcacagctgagcagggggtcggggtcgacgatggggggcagggtgttgatgacaggcccagcgtgcaggtggatcacgaagaagacctgcaggagaggaggggc

SEQ ID NO: 32411 - DNA, 122 bp, Homo sapiens
  MAP TO AC023000.2; EXPRESSED IN LUNG, SIGNAL =   6; NT HIT: M38526.1, EVALUE 6.80e-02; EST_HUMAN HIT: AA599442.1, EVALUE 6.20e+00
atgaagaggaggaggaagaggagcagaagaaagaagaggaggaagaggaagaggaggaggaatataaacatatcgaaatacttttttatcttgggctgaattctggagcagcagacccaagg

SEQ ID NO: 32412 - DNA, 172 bp, Homo sapiens
  MAP TO AC023847.2; EXPRESSED IN LUNG, SIGNAL = 5.1; SWISSPROT HIT: P43234, EVALUE 1.70e+00; EST_HUMAN HIT: AW575317.1, EVALUE 2.30e+00; NT HIT: U51002.1, EVALUE 2.50e-02
gaaggacttctcaagttcaaattccatagatccaaagtcactaaatataccagcacctaacagcagatttacaagcactaacctctggaaatatatcttccccagaaaaagcaagtctgcctttgctgagtccaagaaaaccaattacccgaaagactctgaaaccaccacc

SEQ ID NO: 32413 - DNA, 458 bp, Homo sapiens
  MAP TO AL121787.22; EXPRESSED IN LUNG, SIGNAL = 2.1; NT HIT: gi6671607, EVALUE 2.00e-91; SWISSPROT HIT: P97303, EVALUE 1.00e-37; EST_HUMAN HIT: BE890758.1, EVALUE 4.30e-01
agccggtgccaaagggtctgtgggtgggagccggccagtccctccccagctcgcaggcctactcccacggtgggctgatggccgaccacttgccaggaaggatgcggcccaacaccagctgcccggtaccaatcaaagtctgccctcgctcaccccccttggagaccaggaccaggacttccagctcctgctcttcctattcctacgcggaggacgggagcgggggctcaccctgcagcctccctctctgtgagttctcctcctcgccctgttcccagggagccagattccttgccacagaacatcaggaaccaggcctgatgggagatggaatgtacaaccaagtgcggccccaaattaaatgtgagcagtcttatggaaccaactccagtgacgaatccggatcgttctcggaagcagacagtgagtcgtgtcctgtgcaggacaggggccaggag

SEQ ID NO: 32414 - DNA, 146 bp, Homo sapiens
  MAP TO AF236876.1; EXPRESSED IN LUNG, SIGNAL = 1.7; EST_HUMAN HIT: AI902599.1, EVALUE 8.00e-77; NT HIT: gi7662041, EVALUE 5.00e-77
cttctcagcagtggaagccgatacctcattcgatcagatgatatgatagaaacagtttacaacgacagaggagagattgttaaaaccaaagaacgccgagtcttcatgttaaatgatgtgttaatgtgtgccaccgtcagctcacg

SEQ ID NO: 32415 - DNA, 148 bp, Homo sapiens
  MAP TO AC008403.3; EXPRESSED IN LUNG, SIGNAL = 2.8; SWISSPROT HIT: Q99418, EVALUE 7.00e-21; EST_HUMAN HIT: BE897509.1, EVALUE 5.00e-78; NT HIT: gi10880123, EVALUE 4.00e-78
ctgccctcattggcctccagcccctccacctcgctcatggcttcactgagctcctcccgcaggcgctgaatctccaccagcagctcctgcttccgccgccggatgttctccagctccatccgctcctccggagtcaggtctgggggtt

SEQ ID NO: 32416 - DNA, 239 bp, Homo sapiens
  MAP TO AL158801.1; EXPRESSED IN LUNG, SIGNAL = 1.9; NT HIT: gi7662325, EVALUE 0.00e+00; EST_HUMAN HIT: AA626160.1, EVALUE 0.00e+00; SWISSPROT HIT: P40223, EVALUE 4.50e+00
gtcagggccctttgaagtacgagcagaccttgaggagtccatggaatttgtggatcccggagttgctggagaatcagatgagagcggagatgagcgcgtcagcgatgaagaaaccgacctgggcacagactgggagaacttgcctagtccccggttttgtgatatcccttcccagtctgtggaagtctcccagagtcagagcacccaggcgtccccacccatcgcgagcagcagtgcag

SEQ ID NO: 32417 - DNA, 201 bp, Homo sapiens
  MAP TO AL158017.2; EXPRESSED IN PLACENTA, SIGNAL = 2.3; EXPRESSED IN LUNG, SIGNAL = 8.2; EST_HUMAN HIT: AW024079.1, EVALUE 7.00e-04; NT HIT: AB007932.1, EVALUE 1.00e-109; SWISSPROT HIT: P51805, EVALUE 7.00e-23
gactgtccccagctggtgcccacagaggagatcttgattccagtcggggaggtaaagccaatcacccttaaggcgcgaaatctgccccagccgcagtccggccagcgaggctatgagtgtgtcctcaacatacaaggagccatccaccgggtccccgctctgcgcttcaacagctccagcgttcagtgtcagaacagctcg

SEQ ID NO: 32418 - DNA, 142 bp, Homo sapiens
  MAP TO AC023302.2; EXPRESSED IN LUNG, SIGNAL = 3.2; NT HIT: Z29337.1, EVALUE 1.30e+00; EST_HUMAN HIT: BE700327.1, EVALUE 4.80e-01
agacctgtcactcagtgattcatgcgagcatccgatcctcaacactgggttcttttaaaggcctggtggcaacactgatcaaagatgctacggagccagatgagcagagcgcctacagggtgattttggcacagaagcagag

SEQ ID NO: 32419 - DNA, 145 bp, Homo sapiens
  MAP TO AC008655.3; EXPRESSED IN LUNG, SIGNAL =  59; SWISSPROT HIT: O96009, EVALUE 8.00e-22; NT HIT: AF200345.1, EVALUE 2.00e-76; EST_HUMAN HIT: AW025398.1, EVALUE 3.00e-76
tgtgaaggtgggcccagggctgactctctgtgccaagggctgtgctgccatcctggatacgggcacgtccctcatcacaggacccactgaggagatccgggccctgcatgcagccattgggggaatccccttgctggctggggag

SEQ ID NO: 32420 - DNA, 142 bp, Homo sapiens
  MAP TO AC008569.3; EXPRESSED IN LUNG, SIGNAL = 4.8; EST_HUMAN HIT: AW327963.1, EVALUE 2.00e-74; NT HIT: D26181.1, EVALUE 1.00e-74; SWISSPROT HIT: Q16512, EVALUE 9.00e-21
cccgtggtccgggcctcggatcctggagaagccccagggctaaaggtgcctgtgcccgtggcattggggatgagcctccggagcagccgcacccacgtggcgacatcgatgttcatctgcctagcacgctggaacgccttcc

SEQ ID NO: 32421 - DNA, 190 bp, Homo sapiens
  MAP TO AL133445.2; EXPRESSED IN LUNG, SIGNAL = 1.9; SWISSPROT HIT: P05719, EVALUE 1.30e+00
ccagtgggctgtagtagaccctggctatatgcgtgtgtacaggcacattcatgactctgagaataccactagacataggtaactgggcatcctctggagacaatttgtctgcatcgtctctggtcgtagataccacagtcatcataatctgtatcatctcatcatcaaatatcacagttttgatcacagt

SEQ ID NO: 32422 - DNA, 134 bp, Homo sapiens
  MAP TO AC013528.3; EXPRESSED IN LUNG, SIGNAL = 2.4; SWISSPROT HIT: P22105, EVALUE 2.40e+00; EST_HUMAN HIT: R01455.1, EVALUE 2.90e-02; NT HIT: X56657.1, EVALUE 7.60e-02
tcagtggcagtcaggggatggaggtggagggaaggtgttgttgcaataaagggatagggcaagaaaattcaggggataacaaaactgttctgtctcatgattatagtggtagtaacacaaatctacgcatgtgt

SEQ ID NO: 32423 - DNA, 84 bp, Homo sapiens
  MAP TO AC011836.3; EXPRESSED IN LUNG, SIGNAL = 2.9; NT HIT: D16233.1, EVALUE 6.80e-01; EST_HUMAN HIT: AW904112.1, EVALUE 6.50e-02
cattgtaggttgttgtagtcatgtcataatctacataatgagccaacatagtcttatagctggctgtagggcagtaagtagcat

SEQ ID NO: 32424 - DNA, 303 bp, Homo sapiens
  MAP TO AL135744.2; EXPRESSED IN LUNG, SIGNAL = 1.8; EXPRESSED IN PLACENTA, SIGNAL = 1.4; NT HIT: AB046784.1, EVALUE 0.00e+00; SWISSPROT HIT: Q62910, EVALUE 5.50e+00; EST_HUMAN HIT: BE292840.1, EVALUE 0.00e+00
atctttgatttgaactgtaaactccttttcatccatgcctcggcgaagtttggtgaactgggctgccgctgtgctgactgcagatgcttcctcctctgccatggaagctgcactactacttcgtggtgtggggactggagagtcaccatattctccaggagtcaatgagggactgtctagcaagtggttgcctggccccaaaattcctcctgttaccatttcctggctcctacggctagaaggccacttccctgagagtacagcctggcagacgaggtcaatacggtttatcaggacacgatc

SEQ ID NO: 32425 - DNA, 241 bp, Homo sapiens
  MAP TO AC018633.2; EXPRESSED IN LUNG, SIGNAL = 2.8; SWISSPROT HIT: P54418, EVALUE 1.50e+00; EST_HUMAN HIT: Z28888.1, EVALUE 2.00e-51; NT HIT: D87682.1, EVALUE 1.00e-118
gtagaagaagctctgatccagatccatgatccagaactcaggaagctgcttaacccaaccactgcagacctaaggttcgcagactacctagtgaggcacgtgactgagaatcgggatgacgtcttcctagatggcacgggctgggagggaggtgacgaatggatccgggcccagtttgcggtctacattcatgccctgctggctgccacactgcaattaggtaagaaaccacacggagcct

SEQ ID NO: 32426 - DNA, 294 bp, Homo sapiens
  MAP TO AC010582.6; EXPRESSED IN LUNG, SIGNAL = 1.8; EST_HUMAN HIT: AA984839.1, EVALUE 0.00e+00; SWISSPROT HIT: P52976, EVALUE 6.00e-01; NT HIT: AF216972.1, EVALUE 3.00e-03
aatcatcaaaactgatggcatcctggtagatgacaatgagggaatctctttggcttttgcccgtggtactggaaatggaactgttttgggagcgcctctcctgctcctcaaagaaagcactgaaagggttgataggggagggctgtacatcctgcagagtctcattcaggaaagggttggttgccctccaaggtgaagcctcagttacagaaggcgtgcggtttaaagaggaaatatccagcttctgaactttggagaagttcatcaaagtgctcttgggacggtccctcttct

SEQ ID NO: 32427 - DNA, 240 bp, Homo sapiens
  MAP TO AL139392.1; EXPRESSED IN LUNG, SIGNAL = 1.9; EXPRESSED IN BONE MARROW, SIGNAL = 6.5; NT HIT: gi11419020, EVALUE 0.00e+00; SWISSPROT HIT: P20749, EVALUE 3.00e-12; EST_HUMAN HIT: AV741265.1, EVALUE 1.00e-120
gagggcaccagtggtaagacagcgctgcacctggctgtggaaacccaagagcggggcctggtacagttcctgctccaggctggtgcccaggtagatgcccgcatgctgaacgggtgcacacccctgcacctggcagctggccggggtctcatgggcatctcatccactctgtgcaaggcgggtgctgactccctgctgcggaatgtggaggatgagacgccccaggacctgactgaggaa

SEQ ID NO: 32428 - DNA, 122 bp, Homo sapiens
  MAP TO AC017089.2; EXPRESSED IN LUNG, SIGNAL = 2.7; SWISSPROT HIT: Q61193, EVALUE 4.10e+00; NT HIT: AF055066.1, EVALUE 4.20e+00
cttggctcatgcacgaggttgcctggttgccatggcacctgcttttctccaggtgtcactttcgttatttcctgaataacagccttggctttttctatggcttctatggggggctggcacac

SEQ ID NO: 32429 - DNA, 123 bp, Homo sapiens
  MAP TO AC008655.3; EXPRESSED IN LUNG, SIGNAL =  22; SWISSPROT HIT: O96009, EVALUE 6.00e-18; EST_HUMAN HIT: W19120.1, EVALUE 3.00e-51; NT HIT: AF200344.1, EVALUE 2.00e-63
ggaccctgaagtggctgatggaggagagctggtcctggggggctcagacccggcacactacatcccacccctcaccttcgtgccagtcacagtccccgcctactggcagatccacatggagcg

SEQ ID NO: 32430 - DNA, 395 bp, Homo sapiens
  MAP TO AL158047.2; EXPRESSED IN LUNG, SIGNAL = 4.4; SWISSPROT HIT: Q13206, EVALUE 8.00e-35; EST_HUMAN HIT: BE747617.1, EVALUE 0.00e+00; NT HIT: AB040537.1, EVALUE 0.00e+00
aaccaactccccttcatcagtacatgttatcttcttattcgctttaaaatttctcttcattactttttttgcttctgcaactttggtcacttttttcttgatgctggatttagaaggttctttcttctgtaatgttttctcctctttaaagtcaaatccaaacacattgtgccacttcaccttcaagaaatcagcatcttcttcctcctcatctctgtccaggaactgcataggaacttccttgatcttctttgcttcactggtgttaggaagagatggagcttgagatccttttgcttttgccagtttctcttccatttcttcttcattatcttcctcttcctcctgttcttcatcactagtatcattagccagtctgtgctctgtccctttga

SEQ ID NO: 32431 - DNA, 289 bp, Homo sapiens
  MAP TO AC020754.2; EXPRESSED IN LUNG, SIGNAL = 2.5; EST_HUMAN HIT: AW362483.1, EVALUE 9.00e-23; SWISSPROT HIT: P25977, EVALUE 3.00e-18; NT HIT: X56687.1, EVALUE 6.00e-23
tgggaaaggggcagcagctgcaggaggagcagcctaggttcttggagatcgagctggcctgcacgctggcccgaaggtggagtgacttgtctgagaaggccaagtacaagacccgagagcaagccaggcagggagtgccaggaactcagcaagccgcccaagtcatcaagagagtacagatctggcaacagagcatcatcagcaactacctggcctgcttcaagaacgaccgggtgaaggcctcgaaagccatggatgtgacctggaatcccaaggaggagaacctgat

SEQ ID NO: 32432 - DNA, 284 bp, Homo sapiens
  MAP TO AC010473.3; EXPRESSED IN LUNG, SIGNAL =   2; SWISSPROT HIT: P47808, EVALUE 1.00e-04; EST_HUMAN HIT: AU133203.1, EVALUE 0.00e+00; NT HIT: AF132022.1, EVALUE 0.00e+00
tgctcaaagacaaaggctataccacccttcaggatgaggccatcaagatattcaattccctgcagcaactggagtccatgtctgacccaattccaataatccaggtcatcctacagacagggcatgacctgcgacctctgcgggacgagctgtactgccagcttatcaaacagaccaacaaagtgccccaccccggcagtgtgggcaacctgtacagctggcagatcctgacatgcctgagctgcaccttcctgccgagtcgagggattctcaagtatctcaag

SEQ ID NO: 32433 - DNA, 90 bp, Homo sapiens
  MAP TO AL139104.2; EXPRESSED IN LUNG, SIGNAL = 1.6; SWISSPROT HIT: P77334, EVALUE 5.60e+00; EST_HUMAN HIT: BF671153.1, EVALUE 1.10e+00; NT HIT: AL112699.1, EVALUE 7.40e-01
gtggcctggcactcctatgccagctgtcaagctgaagacgtggctggacagatactttagaagagctacgtatgatgttctgagtgagat

SEQ ID NO: 32434 - DNA, 389 bp, Homo sapiens
  MAP TO AC008543.4; EXPRESSED IN LUNG, SIGNAL = 3.2; NT HIT: X51760.1, EVALUE 0.00e+00; SWISSPROT HIT: P16415, EVALUE 2.00e-78; EST_HUMAN HIT: BE883574.1, EVALUE 0.00e+00
atttataaggtccatctccatggtgtgccgccatgtgtcttcggaggtttccaagagaactaaaggtttttgcacattctttacaatcgaagggtttctttccggtggggggcctttcatgtgtctggaaggagtgctgatgactgatggctttcccacgttgtttatgtgtatatggcttctctccatattcctgatgctcacatgatttgtgtccagtgtcaactctgatgttgcaattaagagacgaatgacccaagacgacttctccacactcaccactgtcacatggatttactcgaggagtgttcttgttcacaatactatctggaatctggccaaaagtttctccacattgactgtcatctttaatttcacatgtatgactt

SEQ ID NO: 32435 - DNA, 424 bp, Homo sapiens
  MAP TO AC008403.3; EXPRESSED IN LUNG, SIGNAL = 1.7; SWISSPROT HIT: P52188, EVALUE 5.00e-53; EST_HUMAN HIT: AW883916.1, EVALUE 0.00e+00; NT HIT: AF181988.1, EVALUE 0.00e+00
tagacttgaggctgtgggaagcctgctctgcccgttcatccagctccttagcactgcagaccggtgtccctgggacctcataagtgcgatggaagtggcgatagtcgacctcatactgggagccacgctggaagagaactggctcaaaacgatggccccagagcagttcaccagggaggtaggacgagcgacactgtgtggtcatggctgtggcctcaaccatcccctcgagaatgaccaccagctcaaagtcagccctggccagctcggcacgtcctagctcatacagaggactggcagagtcgatctcatggacgatggtgatgggggacacgaggaagatacgatcggtgcctccatcaaagcccacatccacatcctggtggtccagcgggatgtactcaccctctggggtcacacgggg

SEQ ID NO: 32436 - DNA, 178 bp, Homo sapiens; identical to SEQ ID NO: 21433
  MAP TO AL049871.3; EXPRESSED IN LUNG, SIGNAL = 2.1; SWISSPROT HIT: P17081, EVALUE 7.00e-14; EST_HUMAN HIT: AI167357.1, EVALUE 3.00e-49; NT HIT: AJ276567.1, EVALUE 8.00e-49

SEQ ID NO: 32437 - DNA, 129 bp, Homo sapiens
  MAP TO AC008723.3; EXPRESSED IN LUNG, SIGNAL = 1.8; SWISSPROT HIT: Q14031, EVALUE 3.60e-01; NT HIT: AJ006031.1, EVALUE 6.00e-21; EST_HUMAN HIT: BE564346.1, EVALUE 1.00e-66
cttgaggatctcgcggccgcccaccgacagcgccacatgccggctctggaggccgcactggatatcctgggcgcgcgtgcctggcggcacctgaacttcaatgaacacctcctccaaggtctggtacca

SEQ ID NO: 32438 - DNA, 123 bp, Homo sapiens
  MAP TO AC004832.3; EXPRESSED IN BONE MARROW, SIGNAL = 1.3; EXPRESSED IN LUNG, SIGNAL = 1.2; NT HIT: AJ132352.1, EVALUE 2.00e-29; EST_HUMAN HIT: BE327189.1, EVALUE 8.00e-55
ctagacaggggtgagctccttatcatatttctgcatgccctcgtcagggagcaggacctccactgtgaagctgaccttcttggcgtggacaaagctataggtgttgtcgaagcgtaggacatc

SEQ ID NO: 32439 - DNA, 193 bp, Homo sapiens
  MAP TO AC007363.3; EXPRESSED IN LUNG, SIGNAL = 1.5; EXPRESSED IN BONE MARROW, SIGNAL = 1.5; NT HIT: AJ132045.1, EVALUE 4.50e-01; EST_HUMAN HIT: AI524004.1, EVALUE 6.70e-01; SWISSPROT HIT: O76090, EVALUE 1.70e+00
acccttctccactttccccatccccatttttctccaacccatcaccatagctgtgatatttcttcctccaaacttttgggccttccttggtaacatctccataatttccttgctcagcacatacaggtagaaaaaatgagtttatatcatcaagaactttggattccttttcatgaacatgaaagagtacaat

SEQ ID NO: 32440 - DNA, 163 bp, Homo sapiens
  MAP TO AL049758.11; EXPRESSED IN PLACENTA, SIGNAL = 1.7; EXPRESSED IN LUNG, SIGNAL = 1.5; NT HIT: AF013383.1, EVALUE 3.70e-01; EST_HUMAN HIT: BE964835.2, EVALUE 1.40e-01; SWISSPROT HIT: P55160, EVALUE 6.80e+00
acctacagggagaatgagttcctgaatgccatgtcactgggagttcaggatcctcactagaagtcacacagaccatgggaatgcttgtgctaccaagaggggagaaaaaggcaggtacaaaattgtatgtatactatcatagcaaccagtcacaacaggaacg

SEQ ID NO: 32441 - DNA, 105 bp, Homo sapiens
  MAP TO AL022329.9; EXPRESSED IN LUNG, SIGNAL = 2.2; NT HIT: Z23080.1, EVALUE 1.40e-02; SWISSPROT HIT: P40097, EVALUE 7.20e+00
cgtcaataataaaaaaatgctattacataaaatgttataggaaatataaaattatgtatagacataataaaaatttgctttcttgaaacaaataaatgcagatac

SEQ ID NO: 32442 - DNA, 185 bp, Homo sapiens
  MAP TO AL021707.2; EXPRESSED IN PLACENTA, SIGNAL = 1.3; EXPRESSED IN HELA, SIGNAL = 1.5; EXPRESSED IN LUNG, SIGNAL = 1.2; NT HIT: gi11418123, EVALUE 1.00e-100; EST_HUMAN HIT: AL039248.1, EVALUE 1.00e-100; SWISSPROT HIT: Q15040, EVALUE 2.00e-31
ctctggaaaatctcttgcagcgtatcccgggtgaaggcattgctgtcctggaagacgttattgagggcgtggagggcacaaagctccctgcgctgtttctcatggtagatttgtgggggtgctgcctggggcagctccaatgattcagatttggccttgtctcctttccatggcacacaactcat

SEQ ID NO: 32443 - DNA, 468 bp, Homo sapiens
  MAP TO AP000353.1; EXPRESSED IN LUNG, SIGNAL = 1.3; SWISSPROT HIT: P31902, EVALUE 9.70e-01; NT HIT: AF180355.1, EVALUE 7.40e-02; EST_HUMAN HIT: BF591071.1, EVALUE 4.40e-01
ctatggttcccttctgattttccatggactcactgcctgatttgtttggtcttccatcctttctgaaatcagcagtgttatgttacaaaaggaaacggaaaggagatagggatccaaactgtgctggtgtgtgtgatgcaaactagacccgtcctcacgggtgtgtctgttggtgtctatgtgccctgggaggtgcagggatgggagggtcttcagcgggacgtactgctgcagcacagcggatggagacccaggagacagtgtctgcccattctggtgcctactgtagatagaccctgtctgttggaaagcaggtgtcttttcataagctgcttcaggatccacatctgcatggtaggaagatgcagcattgatgtttgctgccctggatgtggatagcctcagtaccctggttttgtccttttcaggcactgccaggaagtagaaggtggctgctggcctccacat

SEQ ID NO: 32444 - DNA, 189 bp, Homo sapiens
  MAP TO AB016897.1; EXPRESSED IN LUNG, SIGNAL = 1.3; EXPRESSED IN PLACENTA, SIGNAL = 1.3; SWISSPROT HIT: P55196, EVALUE 1.00e-32; NT HIT: gi11419159, EVALUE 1.00e-102; EST_HUMAN HIT: AU130212.1, EVALUE 1.00e-102
atcgtcgtggctcaggtaaaccccgaccaaagagtgaaggctttgagctctataataattcaactcaaaatgggtctcctgagagtcctcagctgccttgggcagaatatagtgaaccaaagaaattgcctggtgatgacagactgatgaaaaatagagctgatcaccgttccagccccaacgtagcaa

SEQ ID NO: 32445 - DNA, 160 bp, Homo sapiens
  MAP TO AL078474.2; EXPRESSED IN LUNG, SIGNAL = 1.4; EST_HUMAN HIT: AA993698.1, EVALUE 1.40e-01; NT HIT: AL163280.2, EVALUE 2.00e-03; SWISSPROT HIT: P19793, EVALUE 4.60e-01
gcaggcaccaggatcacctggagggcttggtgaaatacagatagccggaccctaccctagagcaggcctaagactactggctaagtcggcctcgagtgagggtggagaatttgcctttggacctatgttctctcctgaggctggtgctgcttgtctggaa

SEQ ID NO: 32446 - DNA, 129 bp, Homo sapiens
  MAP TO AP000354.1; EXPRESSED IN LUNG, SIGNAL = 1.3; SWISSPROT HIT: P32799, EVALUE 9.20e+00; NT HIT: AB019788.1, EVALUE 1.10e+00; EST_HUMAN HIT: BE966888.2, EVALUE 1.10e-01
acaatttgaattcctttaactgtcatggagcattgatgattaaccagatgaatgaagtgtttggcttaattattgagacagcatgtgcacacacccattcatttatggacacccacacctgtgtgtctg

SEQ ID NO: 32447 - DNA, 212 bp, Homo sapiens
  MAP TO AC005300.10; EXPRESSED IN LUNG, SIGNAL = 1.5; EXPRESSED IN PLACENTA, SIGNAL = 1.5; NT HIT: gi11526293, EVALUE 1.00e-116; EST_HUMAN HIT: BE397675.1, EVALUE 1.90e-01; SWISSPROT HIT: P15287, EVALUE 2.00e-09
cggcagcagcctggctctgatctccatgtagagcacgttgtcctcgtagaactcctgcatgctccggaagacatagtctctgaacactggtgcgtaatggatgagaccagagatggtgaagaagatggtttcaaatttcgaccagacaacattttggtttgtgtaaatcacctccgggtgctgggtcaccagagtgaaattcctcagcaagc

SEQ ID NO: 32448 - DNA, 157 bp, Homo sapiens
  MAP TO AC008022.1; EXPRESSED IN HELA, SIGNAL = 1.5; EXPRESSED IN BONE MARROW, SIGNAL = 1.6; EXPRESSED IN LUNG, SIGNAL = 1.2; EST_HUMAN HIT: BF314369.1, EVALUE 5.30e-01; SWISSPROT HIT: Q63627, EVALUE 2.70e-01; NT HIT: gi11440538, EVALUE 3.60e-01
  unsure 139
aggacaagcccacccagcctgcagctatcaccacttctgaaaacttcctggatgtgccacctgggggcctgggtcctggaatagccagcctgctgcagccaccaccaccagtgtgtgctgcctgggagtccgaaggtanggtccaccactgggccac

SEQ ID NO: 32449 - DNA, 91 bp, Homo sapiens
  MAP TO Z98884.11; EXPRESSED IN LUNG, SIGNAL = 2.8; EST_HUMAN HIT: AI244697.1, EVALUE 2.80e-01; NT HIT: gi8567387, EVALUE 2.00e-44; SWISSPROT HIT: O70361, EVALUE 2.00e-04
ggggagcagcgggtcgcaggagcagcttgtcagcatcgcctcctccagtgaggccagtgggcaccgtgtggaggagacgaaggcggagcag

SEQ ID NO: 32450 - DNA, 187 bp, Homo sapiens
  MAP TO AL022318.2; EXPRESSED IN PLACENTA, SIGNAL = 1.8; EXPRESSED IN HELA, SIGNAL = 1.7; EXPRESSED IN LUNG, SIGNAL = 1.3; EST_HUMAN HIT: AI274981.1, EVALUE 8.00e-13; NT HIT: X87579.1, EVALUE 1.00e-13; SWISSPROT HIT: O43603, EVALUE 1.30e+00
agcttctgtgcaggaacgggcgctgctgcaccccctaccacccacgcagcctcctccctatctgccttcaggtggtagccagaggagttcagagcctctacagagagcacaacttctccagctggaactgaagggggcctgcccctccacaccggcgggtatttctcgaaaggtggagatgagagac

SEQ ID NO: 32451 - DNA, 440 bp, Homo sapiens
  MAP TO AC002472.3; EXPRESSED IN LUNG, SIGNAL = 1.2; EXPRESSED IN BONE MARROW, SIGNAL = 1.5; NT HIT: gi6753813, EVALUE 7.00e-02; SWISSPROT HIT: P54830, EVALUE 1.50e+00; EST_HUMAN HIT: AA629056.1, EVALUE 4.00e-63
tcacttcgcatgggattcctggacacctgagaaacacgcacacaaagctgcgagaagccaggtccgggaaggccagagagcaatgtgaaagggaaggaggggctcctcatctctgaggacacagccactatggccacactgtttcggctcagaaggtgtctccatcagatagtcagacagaatgctctggtgaggctgctgggtcagggaagaaaggaagggagaggcctccgattgatatagacacacaagacacacccttgcctttaagaacttgcctgctggggagaggggagggaaaggaagcatcatgaaatgtggtgtgatcagcgcagtgagtgagtgtgcaccagctcccctgggagggaaaggctgggaggggaggtgtatctgggcagggctcagcggagcttcccaggtgaggtggccggagctggaca

SEQ ID NO: 32452 - DNA, 119 bp, Homo sapiens
  MAP TO AP000356.1; EXPRESSED IN PLACENTA, SIGNAL = 1.4; EXPRESSED IN LUNG, SIGNAL = 1.6; NT HIT: U07000.1, EVALUE 6.00e-61; SWISSPROT HIT: P11274, EVALUE 5.00e-14; EST_HUMAN HIT: AA778637.1, EVALUE 8.00e-61
atcgaagtaaagctctcggtcaagttcaacagcagggagttcagcttgaagaggatgccgtcccgaaaacagacaggggtcttcggagtcaagattgctgtggtcaccaagtgagtggg

SEQ ID NO: 32453 - DNA, 120 bp, Homo sapiens
  MAP TO AC007092.4; EXPRESSED IN LUNG, SIGNAL =  18; NT HIT: AF213884.1, EVALUE 2.00e-08; EST_HUMAN HIT: AV757997.1, EVALUE 2.00e-09; SWISSPROT HIT: P11369, EVALUE 1.00e-05
tgcaaactgacgcagccagtatggaaaatagtatggagatgtctcaaaaagttaaacgtatcactaacaaccatatgatacagcaatcccacttctgggtgtatatccagaggaaatgaa

SEQ ID NO: 32454 - DNA, 577 bp, Homo sapiens; identical to SEQ ID NO: 15961
  MAP TO AL079295.1; EXPRESSED IN LUNG, SIGNAL = 1.3; EXPRESSED IN BONE MARROW, SIGNAL = 1.4; SWISSPROT HIT: Q12074, EVALUE 3.80e+00; NT HIT: gi7657624, EVALUE 1.40e+00; EST_HUMAN HIT: AV758243.1, EVALUE 2.20e+00

SEQ ID NO: 32455 - DNA, 151 bp, Homo sapiens
  MAP TO AL022238.1; EXPRESSED IN LUNG, SIGNAL = 1.2; NT HIT: AF106656.1, EVALUE 6.00e-80; EST_HUMAN HIT: AW812483.1, EVALUE 3.00e-73; SWISSPROT HIT: P24328, EVALUE 5.20e+00
gccatttactgaggcaggagctacaagggaggaatggcaggtatgtaatggtgagtaggaggaatgagaaagtggctgagttcagtttggggattgaggtacccatagatcaaccaggtggacgtctcactcagtaggtatgaggtctggc

SEQ ID NO: 32456 - DNA, 451 bp, Homo sapiens
  MAP TO AL008582.11; EXPRESSED IN LUNG, SIGNAL = 1.7; EXPRESSED IN BONE MARROW, SIGNAL = 1.4; NT HIT: Y07893.1, EVALUE 1.10e+00; EST_HUMAN HIT: AI392837.1, EVALUE 4.20e-01; SWISSPROT HIT: P00759, EVALUE 6.10e+00
acggctctgccttcatctgtttcatcagtaagtctttcttgaacttcttctatgtgttggacattgtcctaggttctgaatatattgtgaccagaatagaccattttttgtccccatggagcttatattttagtggactttactttcccatctggtccaagtctctgtcttctcatgtaaacaagggacagaatgacctgtagtaatcccacttggcacaattgttagggtaagagagctgttgtcatctcgccagcagcatcctttcttcccttgtcttgcctagccgtgtggtgcctggctccccggtgggggtctgctgtggggatgccccttccctcagcgtttgcccactgttctgtgttggtagatgcaggatcagcagagcctcccttactccctggaagccctggagatttgtggctcatccagctagactcagcaaaggcac

SEQ ID NO: 32457 - DNA, 313 bp, Homo sapiens
  MAP TO AL031587.3; EXPRESSED IN PLACENTA, SIGNAL = 1.2; EXPRESSED IN LUNG, SIGNAL = 1.3; NT HIT: gi11418099, EVALUE 2.00e-32; EST_HUMAN HIT: BE798189.1, EVALUE 1.00e-107; SWISSPROT HIT: P50406, EVALUE 3.90e-01
atggcggcggcggcagggcaaagggcggggttagacgctgtcagcctgtccagaccgttcctctgttttcgcttgttcctactaacagcgagcttccgccaatacttgttctcgttcttggttccgagcgtcccgggagccgggaagggaaggattgtctgcagggattggagcaaatatccagtggggggaaagccgggacttccgcgtcttgccggaagtgacgtgacaatcgcggccaccgccaggtggaacggcaggtgggttcaggtaccagcctggccgggacccggctgtgggaccaacgcttccg

SEQ ID NO: 32458 - DNA, 100 bp, Homo sapiens
  MAP TO AB016897.1; EXPRESSED IN LUNG, SIGNAL = 1.4; EST_HUMAN HIT: AV723006.1, EVALUE 1.20e+00; NT HIT: AB011399.1, EVALUE 1.00e-49
caggatttagaacaaaagaggaacatgatgaaactgacattttaggaggcttcatctgggtctggtgtgcaggatggattagaagaacctgggacgaaag

SEQ ID NO: 32459 - DNA, 164 bp, Homo sapiens
  MAP TO AC004624.6; EXPRESSED IN BONE MARROW, SIGNAL = 1.3; EXPRESSED IN LUNG, SIGNAL = 1.3; NT HIT: AF169912.1, EVALUE 5.90e+00; EST_HUMAN HIT: AA663881.1, EVALUE 5.60e-01; SWISSPROT HIT: P32942, EVALUE 2.30e+00
cccaggccctgatctgcagcctgaatcccaccatatcagatgccttaatggcttggcagagttggcctgaatatagtattcctggtgacagtgaagtcctcgcctcaacattttgctatgtggataacatctgtggaagctgaagtgcctggtaagtaatcagg

SEQ ID NO: 32460 - DNA, 141 bp, Homo sapiens
  MAP TO AC004832.3; EXPRESSED IN LUNG, SIGNAL = 1.2; NT HIT: AJ132352.1, EVALUE 2.00e-33; EST_HUMAN HIT: AV718961.1, EVALUE 7.40e+00; SWISSPROT HIT: P23881, EVALUE 6.00e-05
ctgagaacgcagcctggaaataggatctcgtattccacttggtgtgatgagccgcggttgatctgcaccgagtgctcgtactgagtcttcacctggtcccgcacgtacatggacttggggatctccccgccatagttaatc

SEQ ID NO: 32461 - DNA, 106 bp, Homo sapiens
  MAP TO AC007564.9; EXPRESSED IN LUNG, SIGNAL = 1.9; NT HIT: AL161535.2, EVALUE 2.30e-01; SWISSPROT HIT: P42955, EVALUE 2.40e+00
cctgagttttgatcatttttcaggcttagttgtatagcttcatataaactctcaagttgaaaacttggagatttctcttccattagtatttgacgttctattttgc

SEQ ID NO: 32462 - DNA, 199 bp, Homo sapiens
  MAP TO AC007106.6; EXPRESSED IN LUNG, SIGNAL = 1.2; NT HIT: AF227507.1, EVALUE 4.70e-01; EST_HUMAN HIT: BF669781.1, EVALUE 2.80e+00; SWISSPROT HIT: Q09886, EVALUE 9.90e-01
aattacattccatatctcttataattcccctttaatttccagtgcaacaacaaaattaaatgcttcttgcttcctgaggataatttctttgtgtcatctcagtatctttgtgtatactatcccgtccacacacacacacacaaaaatgaagaataaaaaatccctttctattacttctgaaataatctctgataatatg

SEQ ID NO: 32463 - DNA, 294 bp, Homo sapiens
  MAP TO AL022319.2; EXPRESSED IN LUNG, SIGNAL = 1.2; NT HIT: X95450.1, EVALUE 1.20e-02; EST_HUMAN HIT: BF679431.1, EVALUE 1.10e+00; SWISSPROT HIT: Q61083, EVALUE 2.30e+00
ggagatgaaagacttaaacaaacaaaaactagactcgtatgtaacagataaagatttgggaagtatactggctgagcttccccctcccctcatgcccacccctccatataagcttctagcccagactgagaatcctgaggatagagatctgcagcaagagtcagatcctggcaagggcaccaaggatgtccctggcgagggaggccttgcatctcgagtctgtcaagggctaagtcttgggagctggggagaccagggaggggctggtcatccatctatccaacaagtatttct

SEQ ID NO: 32464 - DNA, 117 bp, Homo sapiens
  MAP TO AC005668.1; EXPRESSED IN LUNG, SIGNAL = 0.41; EST_HUMAN HIT: AA037751.1, EVALUE 5.90e+00
ggaaaaattttccaagcacaaagcaatgggtaaaatagtaaagaagaagacctacagatctgatgagaacattttcaaacttctgtacctcaagagaatcataagcaaaactgaaag

SEQ ID NO: 32465 - DNA, 82 bp, Homo sapiens
  MAP TO AL020993.1; EXPRESSED IN HELA, SIGNAL = 1.4; EXPRESSED IN LUNG, SIGNAL = 1.5; NT HIT: U72330.1, EVALUE 6.60e-01; EST_HUMAN HIT: AV692543.1, EVALUE 2.50e-01
ctgccttcagggcgagggcttgttcctcactgactcctgctgctcccagcaagacccacttccgggtctgcagggagaggcc

SEQ ID NO: 32466 - DNA, 78 bp, Homo sapiens
  MAP TO AL035682.16; EXPRESSED IN LUNG, SIGNAL = 1.3; NT HIT: AF275948.1, EVALUE 2.40e+00
cactgcggttaggggaagaagagtgatcagcaactactgaaccctcaccgtgcgcgtctggtactgggcaaagagctt

SEQ ID NO: 32467 - DNA, 97 bp, Homo sapiens
  MAP TO AP000344.1; EXPRESSED IN LUNG, SIGNAL = 2.4; NT HIT: AB044625.1, EVALUE 2.10e-01; SWISSPROT HIT: Q29550, EVALUE 6.00e-03; EST_HUMAN HIT: AW197698.1, EVALUE 1.00e-40
aatcatgggccttcaggtaaaggatgatggccaccccactctccatgacggctttgtggaataagccttcggccatgggagacagaatctggagaga

SEQ ID NO: 32468 - DNA, 224 bp, Homo sapiens
  MAP TO Z95114.19; EXPRESSED IN LUNG, SIGNAL = 1.3; NT HIT: AF278706.1, EVALUE 5.30e-01; EST_HUMAN HIT: BF239683.1, EVALUE 7.90e-01; SWISSPROT HIT: P42841, EVALUE 1.70e+00
gggaactcaggccacagcagcctacattagacagcatgaaggctctgggcttttgtgctaagagtaataggaagccattgaagacatggaagccggtgtttgatgaaatctgtgtttttatgggtcaacttggcccaatgtggaggaagagctggcctagcggcaagggctgtgtatcagcgaagaccattttggaagcttttgcaggagtctgggcgaagtga

SEQ ID NO: 32469 - DNA, 118 bp, Homo sapiens
  MAP TO Z97055.1; EXPRESSED IN PLACENTA, SIGNAL = 1.3; EXPRESSED IN HELA, SIGNAL = 1.3; EXPRESSED IN BONE MARROW, SIGNAL = 1.5; EXPRESSED IN LUNG, SIGNAL = 1.5; NT HIT: AF167163.1, EVALUE 6.60e-02; EST_HUMAN HIT: BF671185.1, EVALUE 6.00e-03; SWISSPROT HIT: O00093, EVALUE 9.30e+00
ttcatacaataattatttactgagtgtatatccggctctaggaactgttcaaggcactgaagttaccacagtggacaggacagaaaaggtgcctgctcccacagaacacagatcccag

SEQ ID NO: 32470 - DNA, 595 bp, Homo sapiens; identical to SEQ ID NO: 15946
  MAP TO AP000111.1; EXPRESSED IN BONE MARROW, SIGNAL = 1.5; EXPRESSED IN LUNG, SIGNAL = 1.2; NT HIT: U00690.1, EVALUE 2.40e-02; SWISSPROT HIT: P35168, EVALUE 4.00e+00; EST_HUMAN HIT: AW301637.1, EVALUE 2.00e-09

SEQ ID NO: 32471 - DNA, 169 bp, Homo sapiens
  MAP TO AC004832.3; EXPRESSED IN LUNG, SIGNAL = 1.2; EST_HUMAN HIT: BE836452.1, EVALUE 4.00e-39; SWISSPROT HIT: P49193, EVALUE 1.40e-02; NT HIT: AJ132352.1, EVALUE 4.00e-41
gacgccggcctctgagcaggtgaggttcccatcctcgggcaccatgtgggcgttatagcgctggctgggtagaacatctgtcatctcccctgcccgctgtcgctcccccatcttggtcttcaggaaaactccgaagccgatgtccgcaccatcagatgagaactgccac

SEQ ID NO: 32472 - DNA, 144 bp, Homo sapiens
  MAP TO AL022312.7; EXPRESSED IN HELA, SIGNAL = 1.4; EXPRESSED IN LUNG, SIGNAL = 1.6; SWISSPROT HIT: Q39017, EVALUE 5.30e+00; EST_HUMAN HIT: BE899260.1, EVALUE 1.00e-75; NT HIT: AL365515.1, EVALUE 8.00e-76
atggcaggcgctggtgagcgcaaaggcaagaaggatgacaatggcattggcacggccattgactttgtgctctccaatgcccggctggtgctgggggtgggtggagcggccatgctgggcatcgccacgctggcagttaagcgg

SEQ ID NO: 32473 - DNA, 106 bp, Homo sapiens
  MAP TO Z95114.19; EXPRESSED IN HELA, SIGNAL = 1.3; EXPRESSED IN LUNG, SIGNAL = 1.2; NT HIT: M60675.1, EVALUE 2.30e-01; EST_HUMAN HIT: AI934554.1, EVALUE 3.40e-01
atggggtcttcattgtcttccttgtccctgctggcacctgctcaggtatcttcctctgggtccctgtcctgctgtcagtatcgatccgcactgggctccacccagc

SEQ ID NO: 32474 - DNA, 134 bp, Homo sapiens; identical to SEQ ID NO: 31452
  MAP TO AC006548.19; EXPRESSED IN LUNG, SIGNAL = 6.3; EXPRESSED IN BONE MARROW, SIGNAL =  14; NT HIT: Z00040.1, EVALUE 7.00e-70; EST_HUMAN HIT: BF681319.1, EVALUE 1.00e-16; SWISSPROT HIT: O05407, EVALUE 2.40e+00

SEQ ID NO: 32475 - DNA, 99 bp, Homo sapiens
  MAP TO AC009290.1; EXPRESSED IN LUNG, SIGNAL = 1.3; SWISSPROT HIT: Q10441, EVALUE 3.20e+00; NT HIT: AL161556.2, EVALUE 3.30e+00; EST_HUMAN HIT: BF362936.1, EVALUE 4.80e+00
  unsure 34
ctttacatagatactgttcctcacccttatgatngaggtcttcttgacaaccccacacacattctcaagtttaggacattgtagcaatacttcaacatt

SEQ ID NO: 32476 - DNA, 172 bp, Homo sapiens
  MAP TO AL008723.8; EXPRESSED IN PLACENTA, SIGNAL = 1.4; EXPRESSED IN LUNG, SIGNAL = 1.2; SWISSPROT HIT: P11099, EVALUE 5.10e+00; EST_HUMAN HIT: AW295536.1, EVALUE 5.90e-01; NT HIT: Z49301.1, EVALUE 4.00e-01
atgtgtgccaaggacactgatactggaggctggggcatggcagtctgtactattaatggtaacacacttgttaaatggcatacttgcattaagaaggctaagaaagaaggctattgtaagcatatcttggctgttgtcttcattcaacaaagccttacaagaaataagtggc

SEQ ID NO: 32477 - DNA, 172 bp, Homo sapiens
  MAP TO AL022238.1; EXPRESSED IN LUNG, SIGNAL = 1.2; EXPRESSED IN HELA, SIGNAL = 1.5; NT HIT: AF106656.1, EVALUE 2.00e-92; EST_HUMAN HIT: AV705907.1, EVALUE 2.30e+00; SWISSPROT HIT: Q09137, EVALUE 5.10e+00
taaggtattctgaaagtgacctgcaggacacagaaactcaatggtggagcctaagagacaaggctgcctttgaggatgataggagagattgactgtgggatgggtggggtctttcgactagaaggaagttgtgggggttagggagcgagacctgggtaggatgacaggttga

SEQ ID NO: 32478 - DNA, 190 bp, Homo sapiens
  MAP TO AB003151.1; EXPRESSED IN LUNG, SIGNAL = 0.44; EST_HUMAN HIT: AA777071.1, EVALUE 8.00e-93; SWISSPROT HIT: P03359, EVALUE 2.00e-06; NT HIT: U91328.1, EVALUE 6.00e-28
aaacagaggtcttttagcacaggtgctgcctttggactttccagtgcctcagcatcagcctggggatcacgttctcatcaaagaggggaaagaagggaaactcgagccagcccgggaaggaccctaccttgtgctgctaaccactgagactgctgttcgtaaggttggaaagagatggacacatcacaca

SEQ ID NO: 32479 - DNA, 107 bp, Homo sapiens
  MAP TO AL049775.2; EXPRESSED IN BONE MARROW, SIGNAL = 4.5; NT HIT: Z24754.1, EVALUE 5.90e-02; EST_HUMAN HIT: AA809682.1, EVALUE 3.40e-01
ctacttcagctgtccgagattttcctgatttgttttgtttgtgcatttgatgtataatcttgtggtttggccctcctcaccacctaaaacagaaaaagcatattcag

SEQ ID NO: 32480 - DNA, 448 bp, Homo sapiens
  MAP TO AC007239.2; EXPRESSED IN BT474, SIGNAL = 2.4; EXPRESSED IN BONE MARROW, SIGNAL = 0.64; EXPRESSED IN HBL100, SIGNAL =   1; NT HIT: AF073299.1, EVALUE 0.00e+00; SWISSPROT HIT: P50482, EVALUE 4.00e-73; EST_HUMAN HIT: BE905509.1, EVALUE 7.00e-03
cactgttactgcatcattcagcagggactctccaaagaccaggatgtagagctgctcattgacgtgaatgttctcaaagacagcaagcacagccacaggatcgacagctgagattaagctgccaaagagcaggttctggagcaaagtgatgtcgctgaggccgaatgcttcgatctggcagataccaaacaaagacaccccaatgccaatggaattccaaagtgtccctaccacagcataccagaaaatcgtgccaatgttctcaaagaatgggcgagtgggcatgaaatagccggcatccagcacgatgggtgggaggaggtacaagaaaaatacatcagtcttcattgcagggggagacttctcatcaacaccaaaaataatcccacctagtagaagtccaaccattataagaaggcagctctcaggcactattgtgggcaacttg

SEQ ID NO: 32481 - DNA, 152 bp, Homo sapiens
  MAP TO AC006449.13; EXPRESSED IN PLACENTA, SIGNAL = 0.61; EXPRESSED IN BONE MARROW, SIGNAL = 0.75; EXPRESSED IN HBL100, SIGNAL = 0.67; EXPRESSED IN BT474, SIGNAL = 5.9; EST_HUMAN HIT: AW381634.1, EVALUE 5.00e-59; SWISSPROT HIT: P53807, EVALUE 8.00e-11; NT HIT: gi4505818, EVALUE 4.00e-59
ctcaacgtcccgcttcagtttctccaggaagttctttttactctcctctcccacatgcagcttctgcccttcattgaggaagtcattgtctttgaatgttggcaagtccttggcctaggagagcaacagcagttaggctgggtaagcctgat

SEQ ID NO: 32482 - DNA, 135 bp, Homo sapiens
  MAP TO AL049868.10; EXPRESSED IN HBL100, SIGNAL = 1.2; EXPRESSED IN HELA, SIGNAL = 0.93; EXPRESSED IN PLACENTA, SIGNAL = 1.1; EXPRESSED IN BONE MARROW, SIGNAL = 1.5; SWISSPROT HIT: P21359, EVALUE 4.10e+00; EST_HUMAN HIT: AA180093.1, EVALUE 2.00e-70; NT HIT: AL163202.2, EVALUE 3.00e-01
gtgtgcacctacattgtttatcagtgtagtcggccagctcctttacactccagggatctgcactccatgatagtggcagcttttcagtgtctctgtgtctggctgacagagcaccctgatatgcttgatgaaaag

SEQ ID NO: 32483 - DNA, 133 bp, Homo sapiens
  MAP TO AC005948.6; EXPRESSED IN HBL100, SIGNAL = 0.96; EXPRESSED IN BONE MARROW, SIGNAL = 0.93; EXPRESSED IN BT474, SIGNAL =   1; EXPRESSED IN PLACENTA, SIGNAL = 0.99; NT HIT: M55976.1, EVALUE 7.50e-02; EST_HUMAN HIT: D60428.1, EVALUE 1.70e+00; SWISSPROT HIT: P87073, EVALUE 8.90e+00
gaactgtccccaccaccactggctaaggggtctgatggatatcatggagagcccccagagatgtgaggttgtttttcagatcctagaattggagatagaaggaagacaagagaagaccaatgagcttgacctg

SEQ ID NO: 32484 - DNA, 150 bp, Homo sapiens
  MAP TO AC007970.3; EXPRESSED IN BONE MARROW, SIGNAL = 0.92; EXPRESSED IN HELA, SIGNAL = 1.7; EXPRESSED IN PLACENTA, SIGNAL = 0.94; NT HIT: AJ249895.1, EVALUE 2.90e-01; EST_HUMAN HIT: AI660357.1, EVALUE 5.40e+00; SWISSPROT HIT: Q13609, EVALUE 8.70e+00
tataatggcctgggtctgacatataattacgatatgaaattagaaacggtggctaacagttaccaaaggtataaaactctaattttggatgaccgtttggttggccagttcaaactacagcatagccataagagttttgacaaaattatt

SEQ ID NO: 32485 - DNA, 82 bp, Homo sapiens
  MAP TO AC010143.2; EXPRESSED IN BONE MARROW, SIGNAL = 1.6; SWISSPROT HIT: P42781, EVALUE 4.10e+00; NT HIT: AF097732.1, EVALUE 5.60e-01
cttggtgctcagaaccttccagtttcctctcatcccgtgcttctcgtctgatgattccctggtcttccccgtgaaccctcat

SEQ ID NO: 32486 - DNA, 169 bp, Homo sapiens
  MAP TO AC010970.1; EXPRESSED IN PLACENTA, SIGNAL = 1.4; EXPRESSED IN HBL100, SIGNAL = 1.1; EXPRESSED IN BONE MARROW, SIGNAL = 1.1; EST_HUMAN HIT: AA211295.1, EVALUE 4.00e-51; SWISSPROT HIT: P10643, EVALUE 9.90e-01
tctcctgaaagttgcttttcccttcaacaatatcttccagatgaatctagaattctgcatttctggtgaccagaggatgggcgaccccccctgcaacccccaccccaaggtgatgctgatgttctggtccaaggcctgcacatagcctggtgaagcttggggtcttggg

SEQ ID NO: 32487 - DNA, 285 bp, Homo sapiens
  MAP TO AL109935.13; EXPRESSED IN PLACENTA, SIGNAL = 1.1; EXPRESSED IN BONE MARROW, SIGNAL = 1.2; EST_HUMAN HIT: AA309318.1, EVALUE 1.00e-11; SWISSPROT HIT: P07575, EVALUE 7.00e-10; NT HIT: AJ251465.1, EVALUE 6.90e-01
tatttcctttgtgagttggctatagatcaaggagacttttgtgattccagcaattctgatttccatacagggtataatgccatgttccacaagaagcagaattaattggatagccctcttcaccttgggcaagataggatgcctgtagattggtgctggaagagagagattgccagggactatgaaggcgtctggggatacatagcctatggtacaagtttcattccagttagtggggaggcattggtgaactgattggccacaaatatagatggctccttgggt

SEQ ID NO: 32488 - DNA, 75 bp, Homo sapiens
  MAP TO AL035411.25; EXPRESSED IN BONE MARROW, SIGNAL = 0.91; EXPRESSED IN PLACENTA, SIGNAL = 1.6; NT HIT: AL161533.2, EVALUE 5.00e-01
agtgctgttgaggttgatctgtgggttcaggtgtttcagctgtaatgatggtattataaagttactcatcaattt

SEQ ID NO: 32489 - DNA, 192 bp, Homo sapiens
  MAP TO AC008013.8; EXPRESSED IN BONE MARROW, SIGNAL = 1.6; EXPRESSED IN BT474, SIGNAL =  17; SWISSPROT HIT: P05790, EVALUE 3.30e-01; NT HIT: AF218255.2, EVALUE 4.50e-01; EST_HUMAN HIT: BE670071.1, EVALUE 1.70e-01
gcaaatgatgctgaggctttgcaggtgcctgtcccattgcagcctgctctggcacctgtgcaggctcccatggaggccccagctgcagtaccagcacagtaccctgagttgccccatctctgccccctccaccagaggattatccagataatacagacttacagggtgtggtggcccctcctcattttaaag

SEQ ID NO: 32490 - DNA, 490 bp, Homo sapiens; identical to SEQ ID NO: 15987
  MAP TO Z92542.2; EXPRESSED IN HELA, SIGNAL = 6.8; EXPRESSED IN BONE MARROW, SIGNAL = 0.95; EST_HUMAN HIT: T07515.1, EVALUE 1.00e-116; SWISSPROT HIT: P11369, EVALUE 4.90e-02; NT HIT: AJ271735.1, EVALUE 1.00e-06

SEQ ID NO: 32491 - DNA, 155 bp, Homo sapiens
  MAP TO AC008127.10; EXPRESSED IN BONE MARROW, SIGNAL = 1.2; EXPRESSED IN HBL100, SIGNAL = 2.5; EXPRESSED IN HELA, SIGNAL = 2.1; EXPRESSED IN BT474, SIGNAL = 0.97; NT HIT: gi11440366, EVALUE 1.00e-62; EST_HUMAN HIT: AI147437.1, EVALUE 1.00e-62; SWISSPROT HIT: P40809, EVALUE 5.10e-02
aggcctgtataggatcttgggctgtgacagcacagtaaaagctgaaagagaaattcctcagagtgaaaactgtacccctcgtcagcaaagtggatgatatccatgctatctgtagccttcttaaagactttcttcgaaacttcaaagaacctctt

SEQ ID NO: 32492 - DNA, 248 bp, Homo sapiens
  MAP TO AL049539.19; EXPRESSED IN BONE MARROW, SIGNAL = 0.94; NT HIT: M83242.1, EVALUE 3.00e-08; EST_HUMAN HIT: BE393032.1, EVALUE 1.00e-05; SWISSPROT HIT: P27508, EVALUE 3.30e-01
atgagcctggtccagctttcacagctctctgagatggggcatgttgggaattttagccgatttaataaaagttgcagcatgagacctgtgaatcccaccctgctgcttcctggatcctgccacaccccatccagcagcaaccaagccagtctcgcccctgactgggacagagtggctgagaggggctctggagccagctgcctggatttgaatcccagctgtgccacttaccagctgtgtgactgtag

SEQ ID NO: 32493 - DNA, 99 bp, Homo sapiens
  MAP TO AL096704.6; EXPRESSED IN PLACENTA, SIGNAL = 6.1; EXPRESSED IN BONE MARROW, SIGNAL = 0.92; EST_HUMAN HIT: AA639482.1, EVALUE 2.10e-01
attcagactgtgaaaaactctatggctcaaaaagcatggattcttcaacagataaacagcaaagaaaagaaacagatgaaggaggagtcagcgtattaa

SEQ ID NO: 32494 - DNA, 340 bp, Homo sapiens
  MAP TO AC009481.1; EXPRESSED IN BONE MARROW, SIGNAL = 0.95; NT HIT: AL163247.2, EVALUE 5.00e-14; EST_HUMAN HIT: AI269746.1, EVALUE 9.00e-14; SWISSPROT HIT: P06565, EVALUE 1.70e+00
tattatcaatgttaaaacatcttcaatatctacttcttccaacttactgacagcctctgaagatatattttttgcgtatgtaaggaggtcaaatatcttttttttctcaattgacaggtggaatccttcaaagtcaccacctggttcatcatcattactgaacatcattgcaggccagaggttgtgccagaaatatacaactgtgtatttagtcactggattccaagcattggcaacagcacacacagcatcgttcatcctgaacttcttttggaaagcttccatacttacacctctgttcactgctgccagcatgctgttccaaaaaaaagttttgtat

SEQ ID NO: 32495 - DNA, 86 bp, Homo sapiens
  MAP TO AL109758.1; EXPRESSED IN PLACENTA, SIGNAL = 0.69; EXPRESSED IN BT474, SIGNAL = 0.81; EXPRESSED IN BONE MARROW, SIGNAL = 0.9; EXPRESSED IN HBL100, SIGNAL = 0.8; NT HIT: gi5032106, EVALUE 2.00e-41; EST_HUMAN HIT: AI768612.1, EVALUE 3.00e-41; SWISSPROT HIT: Q07890, EVALUE 2.00e-09
aattttaaaatatcagctgagatatactctagtacagccacaatatatagggatacatggtagtccactttgtaccctaatacttc

SEQ ID NO: 32496 - DNA, 143 bp, Homo sapiens
  MAP TO AC009297.2; EXPRESSED IN BONE MARROW, SIGNAL = 3.8; SWISSPROT HIT: Q07537, EVALUE 8.00e-18; NT HIT: AF208045.1, EVALUE 1.10e+00
agatgacctctgagagtagatagtgtggggaacgatttatcacactgtaaacagttctaaggagagtgctccaagcttcattatgaaacacaatgactacacttgtgtttggaagttcatcagggtagacttttgtcttacat

SEQ ID NO: 32497 - DNA, 127 bp, Homo sapiens
  MAP TO AP000244.1; EXPRESSED IN PLACENTA, SIGNAL = 0.61; EXPRESSED IN BONE MARROW, SIGNAL = 0.81; EST_HUMAN HIT: AI769472.1, EVALUE 2.90e-01; SWISSPROT HIT: P49367, EVALUE 4.00e+00
gagactgagacagacaaagaattagagagagagaaagctgtagacagagagagacaggcactaaacaagactgcggaagtcctggaaggcttcctagagtcggacccaggtgagctgattctgaaag

SEQ ID NO: 32498 - DNA, 134 bp, Homo sapiens
  MAP TO AC009299.1; EXPRESSED IN BONE MARROW, SIGNAL = 0.77; EXPRESSED IN HELA, SIGNAL = 0.96; NT HIT: AJ012174.2, EVALUE 2.60e-01; EST_HUMAN HIT: N86966.1, EVALUE 3.00e-01; SWISSPROT HIT: Q62730, EVALUE 3.90e+00
gtttttctaatccactctccctgtggttgagcaaaatcgaattgcctctcacatttgcagacagctctgtgaaggtgataatagagctgctccctgctgtcatgaggcaggaaataggaaaatggcatatgggg

SEQ ID NO: 32499 - DNA, 159 bp, Homo sapiens
  MAP TO AL035703.19; EXPRESSED IN BT474, SIGNAL = 0.96; EXPRESSED IN BONE MARROW, SIGNAL = 2.3; EXPRESSED IN HBL100, SIGNAL = 1.7; NT HIT: M31834.1, EVALUE 1.40e+00; EST_HUMAN HIT: AW821707.1, EVALUE 9.00e-36; SWISSPROT HIT: P35869, EVALUE 2.20e+00
cctgtctaatagtgctgtttttactgcaggattagaatattggtacagcctcaacagggacacaacagtttgaacatccaggctttcctctcttactttacccaggattctctggaatgctgaatgtcctccttcaccctcgaaacatttcactatcat

SEQ ID NO: 32500 - DNA, 102 bp, Homo sapiens
  MAP TO AL049633.3; EXPRESSED IN BONE MARROW, SIGNAL = 0.97; EST_HUMAN HIT: BF203457.1, EVALUE 2.10e-02; NT HIT: X76873.1, EVALUE 1.90e-01
accatggagacagcctgcctgaaaatgaagcttgcaccaaggaaagcaaagcagaggcatggagagcctggtacagatggccctgttggggcgatttgttct

SEQ ID NO: 32501 - DNA, 397 bp, Homo sapiens
  MAP TO AL031656.10; EXPRESSED IN PLACENTA, SIGNAL = 0.67; EXPRESSED IN BONE MARROW, SIGNAL = 1.2; NT HIT: AE001793.1, EVALUE 2.10e-01; EST_HUMAN HIT: AI903458.1, EVALUE 1.00e+00; SWISSPROT HIT: Q90703, EVALUE 2.20e+00
acagaacctccttgagtacttacttgctcaatgctggaccatgctgggcactgaggtaccagagcttagaagacactgtgatcactaccctgaggaatgtgctgagggatggtgcacgaagcagggtgttgtaactttccagcctgcatctggttatgattgctgtggctctctggattctttctgccactggttgctgatttcctgtttccctctcagagcatccccctccccttcactcatgagtcccagagctcctagaaactccaatctgtgctgtcagaaccaatcctactcatcacattcctttctttgctgctgggaggctactgaagacattgatgcctatggtgcctctgatagcaggccaaatcaagggcctgatggttgccaaggg

SEQ ID NO: 32502 - DNA, 154 bp, Homo sapiens
  MAP TO AP000095.1; EXPRESSED IN BONE MARROW, SIGNAL = 0.62; EXPRESSED IN PLACENTA, SIGNAL = 0.74; EST_HUMAN HIT: W26913.1, EVALUE 2.00e-49; SWISSPROT HIT: P39086, EVALUE 8.00e-26; NT HIT: U16125.1, EVALUE 1.00e-81
tgacagatttgaaggatattgcctagacctgttgaaagaattgtcaaacatcctgggtttcatttatgatgttaaactagttcccgatggcaaatatggggcccagaatgacaaaggggagtggaacgggatggttaaagaactcatagatcac

SEQ ID NO: 32503 - DNA, 326 bp, Homo sapiens
  MAP TO AL035447.3; EXPRESSED IN BONE MARROW, SIGNAL = 1.1; NT HIT: gi11420835, EVALUE 0.00e+00; SWISSPROT HIT: Q24323, EVALUE 1.20e+00; EST_HUMAN HIT: AL449556.1, EVALUE 0.00e+00
agtctgggggcctgcccccgagggcactggaggagtgttgcaggcatcacccacgccctctgcacccacgctggaggacggggaggttgtcaggggctatgatgagatgagtgggggccgcttcgactttgatgatggaggggcgtactgcgggggctgggaggggggaaaggcccatgggcatggactgtgcacaggccccaagggccagggcgaatactctggctcctggaactttggctttgaggtggcaggtgtctacacctggcccagcggaaacacctttgagggatactggagccagggcaaacggcatgggctgggca

SEQ ID NO: 32504 - DNA, 132 bp, Homo sapiens
  MAP TO AL049796.19; EXPRESSED IN BONE MARROW, SIGNAL =   1; EXPRESSED IN PLACENTA, SIGNAL = 0.89; SWISSPROT HIT: P48507, EVALUE 3.00e-19; NT HIT: gi11421341, EVALUE 1.00e-68; EST_HUMAN HIT: H59953.1, EVALUE 2.00e-68
gaaagcattcctgacattcaagcgcacgagtgggtgccgctgtggctactgcggtattcggtcattgtgaaaagtagaggaattatcaaatcaaaaggctacattttacaagctaaaagaaggggttcttaa

SEQ ID NO: 32505 - DNA, 82 bp, Homo sapiens
  MAP TO AC007327.1; EXPRESSED IN BONE MARROW, SIGNAL = 1.4; NT HIT: AF210842.1, EVALUE 2.00e-06; EST_HUMAN HIT: AI873563.1, EVALUE 2.00e-07
tatgttcccagaagattataatggaactggaaaattcctgttgcctggtgacatcttcatgatcctgatcccatgtaagcct

SEQ ID NO: 32506 - DNA, 432 bp, Homo sapiens; identical to SEQ ID NO: 16003
  MAP TO AL121749.7; EXPRESSED IN BONE MARROW, SIGNAL = 0.92; NT HIT: J03267.1, EVALUE 2.30e-01; SWISSPROT HIT: P49622, EVALUE 1.40e+00

SEQ ID NO: 32507 - DNA, 135 bp, Homo sapiens
  MAP TO L78810.1; EXPRESSED IN HBL100, SIGNAL =   1; EXPRESSED IN BT474, SIGNAL = 0.9; EXPRESSED IN BONE MARROW, SIGNAL = 0.96; SWISSPROT HIT: Q01888, EVALUE 7.80e-01; EST_HUMAN HIT: BE621144.1, EVALUE 1.00e-63; NT HIT: L78810.1, EVALUE 2.00e-70
atgaacctggagaaaatctggaacggaccccgagatcagttctctctcccacagaactttgctaatgtctgtctggctgctgcagtgacccagaccctctcctttccctttgagaccgtgaagagaaagatgcag

SEQ ID NO: 32508 - DNA, 87 bp, Homo sapiens
  MAP TO AC007564.9; EXPRESSED IN BONE MARROW, SIGNAL = 0.99; NT HIT: AB025319.1, EVALUE 6.00e-01; EST_HUMAN HIT: BE408808.1, EVALUE 2.90e+00
tcatttgaggtaatttcaggagctgctggcaatgatagttcagctatttgagcaagattagataatttctcatgaattgcaataacc

SEQ ID NO: 32509 - DNA, 117 bp, Homo sapiens
  MAP TO AC006474.3; EXPRESSED IN HELA, SIGNAL = 0.62; EXPRESSED IN BT474, SIGNAL = 0.84; EXPRESSED IN BONE MARROW, SIGNAL = 0.72; EXPRESSED IN PLACENTA, SIGNAL = 0.91; EST_HUMAN HIT: AA904457.1, EVALUE 9.00e-60; NT HIT: gi10864040, EVALUE 8.00e-60; SWISSPROT HIT: O58667, EVALUE 6.90e+00
tctaaatttccattcctgttcatgttctgattctctttgctttaaaggatctttaaaaagctccgaatcaatacgagagctgggatcaatgctatcttgctgttgctgccttttcat

SEQ ID NO: 32510 - DNA, 364 bp, Homo sapiens
  MAP TO L78810.1; EXPRESSED IN BT474, SIGNAL = 0.91; EXPRESSED IN BONE MARROW, SIGNAL =   1; EXPRESSED IN HBL100, SIGNAL = 0.94; EXPRESSED IN HELA, SIGNAL =   1; NT HIT: L78810.1, EVALUE 0.00e+00; EST_HUMAN HIT: BE439838.1, EVALUE 0.00e+00; SWISSPROT HIT: O66439, EVALUE 1.00e-05
atgtccatagttcgtttatccgtccatgccaaatggattatggggaaggtgactgggacaaaaatgcaaaagactgctaaagtgagagtgatcaggcttgttctggatccccatttattaaagtattataataagcaaaaaacgtactttgctcacaatgcccttcagcagtgcacaattggggatatcgtgcttctcaaagctttacctgttccacgaacaaagcatgtgaaacatgaactggctgagattgttttcaaagttggaaaactcgtagatcctgtgacaggaaaacctcgtgcaggaactacctatctggagagtccattgagttcggaaaccacccaggtaagcaaaaatctga

SEQ ID NO: 32511 - DNA, 147 bp, Homo sapiens
  MAP TO AL031297.4; EXPRESSED IN PLACENTA, SIGNAL = 0.61; EXPRESSED IN BT474, SIGNAL = 1.6; EXPRESSED IN BONE MARROW, SIGNAL = 0.72; EXPRESSED IN HELA, SIGNAL =   1; EXPRESSED IN HBL100, SIGNAL = 0.74; NT HIT: AE000430.1, EVALUE 1.10e+00; EST_HUMAN HIT: AI273014.1, EVALUE 1.00e-77; SWISSPROT HIT: P38830, EVALUE 3.90e+00
attctcctatgtgtgtcgtctgcagccatcacagtcagatctcgccaatcttggagaaccccttctctagcatattccctaaatgtttcttttctggcagcacgcccatcaacagcaagaagcacatacagcgagattactacaata

SEQ ID NO: 32512 - DNA, 214 bp, Homo sapiens
  MAP TO AC010888.2; EXPRESSED IN BONE MARROW, SIGNAL = 0.99; EST_HUMAN HIT: N24942.1, EVALUE 7.00e-35; NT HIT: Z78636.1, EVALUE 1.00e-13; SWISSPROT HIT: Q9Z1X9, EVALUE 3.30e+00
actgacagtagaacttcttttgaaattgaagtcaatcctctcaaactctgccattgctttcttaactaagtttatgtacaagtttatatctgttattgtcatttcaacaatgttcatagcatcttcaccagaagtagattccatctcaataaaccatttcctttgctcatccataaaaagcaactccacatccattgaaatattattacaagat

SEQ ID NO: 32513 - DNA, 367 bp, Homo sapiens
  MAP TO AC007773.1; EXPRESSED IN HELA, SIGNAL = 0.61; EXPRESSED IN PLACENTA, SIGNAL =   1; EXPRESSED IN BT474, SIGNAL = 0.73; EXPRESSED IN HBL100, SIGNAL = 0.68; EXPRESSED IN BONE MARROW, SIGNAL =  25; NT HIT: gi11426010, EVALUE 0.00e+00; SWISSPROT HIT: P52517, EVALUE 2.90e+00
gccatgttggtgccagatattggggaacaggaagctatactgactgctgaaagtatcatcagtccttcattggaaattgatgaacaaagaaaaactaaaccagatccattaatccatgttatccagaagttaagcaagatagtggaaaatgaaaagtcacaaaaatgtcttttaattgggaagaaacgcccacgttcaagtgctgcaacacactctcttgaaacccaagaactttgtgagattccggctaaagtaatccagtcacctgctgctgatactagaagggctgagatgtcacaaacaaattttacccctgacactcttgcccagaatgaagggaaggctatgtcttatcagtgtagccttt

SEQ ID NO: 32514 - DNA, 127 bp, Homo sapiens; identical to SEQ ID NO: 19384
  MAP TO AL121759.5; EXPRESSED IN BONE MARROW, SIGNAL = 3.7; NT HIT: L33797.1, EVALUE 7.20e-02; EST_HUMAN HIT: BE710396.1, EVALUE 7.00e-03

SEQ ID NO: 32515 - DNA, 142 bp, Homo sapiens
  MAP TO AP000083.1; EXPRESSED IN BONE MARROW, SIGNAL = 1.1; SWISSPROT HIT: P10272, EVALUE 1.00e-06; EST_HUMAN HIT: AW299272.1, EVALUE 7.00e-34; NT HIT: M10976.1, EVALUE 4.00e-37
cccttggcactcccgactgctgtgggttgtcccagcaggaggtcatcaatgtactggagcagcacacagcctaggtatctggcaggaaacttctggaggtctcgagccattgcctctccaaagatggtgggggagttcttga

SEQ ID NO: 32516 - DNA, 425 bp, Homo sapiens
  MAP TO AL132708.1; EXPRESSED IN BONE MARROW, SIGNAL = 1.1; NT HIT: U32770.1, EVALUE 2.30e-01; EST_HUMAN HIT: W52857.1, EVALUE 2.70e-01; SWISSPROT HIT: P50447, EVALUE 9.00e-28
ctttctccatgctgtgcctgggtgcccaggacagcaccctggacgagatcaagcaggggttcaacttcagaaagatgccagaaaaagatcttcatgagggcttccattacatcatccacgagctgacccagaagacccaggacctcaaactgagcattgggaacacgctgttcattgaccagaggctgcagccacagcgtaagtttttggaagatgccaagaacttttacagtgccgaaaccatccttaccaactttcagaatttggaaatggctcagaagcagatcaatgactttatcagtcaaaaaacccatgggaaaattaacaacctgatcgagaatatagaccccggcactgtgatgcttcttgcaaattatattttctttcgaggtaaggcttttggcatgttggtgtggaaagaatag

SEQ ID NO: 32517 - DNA, 162 bp, Homo sapiens
  MAP TO AC011561.2; EXPRESSED IN BONE MARROW, SIGNAL = 0.99; SWISSPROT HIT: P25945, EVALUE 1.70e+00; NT HIT: AF116556.1, EVALUE 8.00e-02
gtgtcaagagagaagacaaagaattctcgttgcttgtcatagggcttctgggtgaagagacaggtctcagcatattcccagaagatgtccatggcccagttactattctttgggggttaaatggttatttattccagaacttacttacttcagtactctcag

SEQ ID NO: 32518 - DNA, 237 bp, Homo sapiens
  MAP TO AC012545.1; EXPRESSED IN BONE MARROW, SIGNAL = 0.98; EST_HUMAN HIT: AA776175.1, EVALUE 3.30e+00; SWISSPROT HIT: P56300, EVALUE 4.30e+00
atgaagacagacgcagcacgccagcccaccaagccaaaaggtgagtcattgggcaaagttgttataacagacttgcttctgtcctgatcaatagtagcacctttgtatgagtcctcaaccccttctgtggtgatacgggtgagggttacaatcacaacctctgataactctggtatattatcagcaagaatagttagagtgattgttgacagtacctggccttcagtaaataaaatc

SEQ ID NO: 32519 - DNA, 214 bp, Homo sapiens
  MAP TO AC007786.1; EXPRESSED IN HELA, SIGNAL = 0.65; EXPRESSED IN BT474, SIGNAL = 0.63; EXPRESSED IN BONE MARROW, SIGNAL = 0.66; EST_HUMAN HIT: AW275696.1, EVALUE 3.30e-02; SWISSPROT HIT: Q89730, EVALUE 8.70e-01
gttcccctccatggcccacatgaccatgcaacccaggccctcctcggcctcatacatgctaccctcccctccacagtgtgttccagccacacagagctccttgtcctgctctgcaccacttgccccctttccacaccgaggccttgtcacactcagtgctgtatcgttcactaaaacgtcaccgccttgatgagctggatgcacagaggcattg

SEQ ID NO: 32520 - DNA, 586 bp, Homo sapiens
  MAP TO AC003029.1; EXPRESSED IN BONE MARROW, SIGNAL = 1.3; EXPRESSED IN BT474, SIGNAL = 0.9; SWISSPROT HIT: P20164, EVALUE 5.00e-34; NT HIT: Y09232.1, EVALUE 0.00e+00
atggcccatgagctcgggcacaacctgggtattcagcacgaccactcggcctgcttttgtaaagataagcacttttgcctcatgcatgaaaatatcacaaaagaaagtggcttcagcagctgcagctctgactacttctaccagttccttcgagaacacaaaggggcctgcctatttaacaagccacggcccaggggccgcaagcgtagggattctgcctgtggaaatggtgtggtggaggacacggagcagtgtgactgtggttctctatgtcagcatcatgcatgctgtgatgaaaactgtatactgaaggcgaaagcagagtgcagtgatggtccatgttgtcataagtgtaaatttcaccgtaagggatatccttgctgtccttctagtcgttcctgtgatctcccagaattttgcaatggtacatctgcattatgccccaacaacaggcataagcaagatggctcaaaatgtcatacaatttacgagtgccttaaagttcattgtatggaccctaataatcagtgcttacaattatatggatatggtgcaaaatcagcctcacaagagtgttacaattcaa

SEQ ID NO: 32521 - DNA, 195 bp, Homo sapiens
  MAP TO AC008417.2; EXPRESSED IN BONE MARROW, SIGNAL = 0.92; EXPRESSED IN HBL100, SIGNAL = 1.4; EXPRESSED IN HELA, SIGNAL = 1.5; EST_HUMAN HIT: AA883564.1, EVALUE 2.00e-96; SWISSPROT HIT: Q16706, EVALUE 6.00e-32; NT HIT: gi11417146, EVALUE 1.00e-106
ctttgactgtattgttctcaaattaaccagatgaatgtcacaaggcaaagatgactgtaatggagagaattcaccttgcagctcaagggtaggtgaggagaacttatttgccattggaatgactggatgattcatgagagaagaagttatgtggctaaggagagaaggataactgaccgacttcttttcttcttc

SEQ ID NO: 32522 - DNA, 586 bp, Homo sapiens
  MAP TO AL021026.1; EXPRESSED IN BONE MARROW, SIGNAL = 0.91; EST_HUMAN HIT: AI052149.1, EVALUE 0.00e+00; NT HIT: U39965.1, EVALUE 0.00e+00; SWISSPROT HIT: P31513, EVALUE 2.00e-63
acaacttctcttacttcccaatgttgcctcccatcaattttgttcttcagccatattggagatactctatgcctcagaaaaaaaaaatcttgggtcattttttccttccttatcaatttatatatggaccaataaaacaagagggaaatattacacttccaataattgtctctgttttccatacagagtcctgaggaaagagcctgtatttaacgatgagctcccagcaagcattctgtgtggcattgtgtccgtaaagcctaacgtgaaggaattcacagagacctcggccatttttgaggatgggaccatatttgagggcattgactgtgtaatctttgcaacagggtatagttttgcctaccccttccttgatgagtctatcatcaaaagcagaaacaatgagatcattttatttaaaggagtatttcctcctctacttgagaagtcaaccatagcagtgattggctttgtccagtcccttggggctgccattcccacagttgacctccagtcccgctgggcagcacaagtaataaagggtaagtcaataaagaggctcatggattgcgaagatgaatgccag

SEQ ID NO: 32523 - DNA, 81 bp, Homo sapiens
  MAP TO AL117353.2; EXPRESSED IN HELA, SIGNAL = 0.91; EXPRESSED IN BONE MARROW, SIGNAL =   1; NT HIT: AL163208.2, EVALUE 1.00e-08; EST_HUMAN HIT: AI168625.1, EVALUE 1.00e-11
aaccagaaagcgggacttaccatctaccaaatctgccaacatcttgatcttggatttcccagcttccagaactgtgagaaa

SEQ ID NO: 32524 - DNA, 120 bp, Homo sapiens
  MAP TO AL034347.15; EXPRESSED IN BONE MARROW, SIGNAL = 0.94; SWISSPROT HIT: P57210, EVALUE 3.10e+00; NT HIT: gi11418715, EVALUE 1.00e-61; EST_HUMAN HIT: BE566615.1, EVALUE 2.00e-61
gtccagtgggatagatttttatcaaaaagtagatgtatttattgttgggaagaactggttccttgaactctgagagtaaggaaccagatacaggtgtatatggctttactatttctgtac

SEQ ID NO: 32525 - DNA, 89 bp, Homo sapiens
  MAP TO AC012460.2; EXPRESSED IN BONE MARROW, SIGNAL = 0.98; EST_HUMAN HIT: BF374005.1, EVALUE 5.00e-43; NT HIT: AB037856.1, EVALUE 3.00e-43
tttcgttggtgattattctgggcagatcaccctgctgaagcttgaacagaacacgtgttcagtcatcacaaccctcaaaggacatgaag

SEQ ID NO: 32526 - DNA, 93 bp, Homo sapiens
  MAP TO AC006459.2; EXPRESSED IN BT474, SIGNAL = 0.7; EXPRESSED IN BONE MARROW, SIGNAL = 0.94; EXPRESSED IN PLACENTA, SIGNAL = 0.64; NT HIT: Z18943.1, EVALUE 1.00e-05; SWISSPROT HIT: P08548, EVALUE 9.40e-02; EST_HUMAN HIT: AA804240.1, EVALUE 2.00e-05
gtattcaattgacccagcaccatttattgaaaaggctatcctcttactgaaatgcagcaaagttgttgtcttaaatcaggtcatcaaacattt

SEQ ID NO: 32527 - DNA, 104 bp, Homo sapiens
  MAP TO AL031585.1; EXPRESSED IN BONE MARROW, SIGNAL = 1.2; NT HIT: X66401.1, EVALUE 1.40e-02; EST_HUMAN HIT: H85683.1, EVALUE 2.00e-04
gagaatgtccactcacatcactcttattcatgtagtgctggtagttctagctagttcaataaaacaagaaaaggaaataacagttgcacaaattataaaggaag

SEQ ID NO: 32528 - DNA, 113 bp, Homo sapiens
  MAP TO AF130358.1; EXPRESSED IN BONE MARROW, SIGNAL = 1.7; NT HIT: AL163206.2, EVALUE 2.00e-57; EST_HUMAN HIT: AW572801.1, EVALUE 1.60e-02; SWISSPROT HIT: Q92887, EVALUE 1.00e-04
ccctggctgcctctcgaaccatgtatgttcaactgttaaataatgtactgcacctccccatccagttttttgaaacaaattccacaggccagatcatcagtcgtttcaccaag

SEQ ID NO: 32529 - DNA, 190 bp, Homo sapiens
  MAP TO AC004859.2; EXPRESSED IN BONE MARROW, SIGNAL = 0.77; EST_HUMAN HIT: AA077526.1, EVALUE 1.00e-38; SWISSPROT HIT: P77886, EVALUE 4.90e+00; NT HIT: AF071787.1, EVALUE 4.40e-01
gcactctcctaggtaccaggcagagcaccggtgtgctccctatcatcacagaccttatagtttagtgcagggtcagggggctcatagacagtgccatgaagtgggtgtgggaggtgttctgcaagatactgggttagtcagcagacaagtcactgaggatttgacatttaaatggaaacttcaaggtcag

SEQ ID NO: 32530 - DNA, 178 bp, Homo sapiens
  MAP TO AC007021.2; EXPRESSED IN PLACENTA, SIGNAL =   3; EXPRESSED IN BONE MARROW, SIGNAL = 1.6; EST_HUMAN HIT: AW968823.1, EVALUE 7.00e-37; SWISSPROT HIT: P24720, EVALUE 5.70e-01
cttgtgctgtttctaccgtctcctttttttcttgaactaaactgtcggtgttgatctgaataatctttttcaaagttatcaaccattcctccatttcctgctcagtttcagcagccagataatggctatatttatctaacatcttgagttcaaaagcatgacggcgcattttggggca

SEQ ID NO: 32531 - DNA, 106 bp, Homo sapiens
  MAP TO AC007043.3; EXPRESSED IN BONE MARROW, SIGNAL = 0.84; EXPRESSED IN BT474, SIGNAL =  11; EST_HUMAN HIT: T60216.1, EVALUE 1.00e-09; SWISSPROT HIT: Q93591, EVALUE 1.80e+00; NT HIT: D14547.1, EVALUE 2.00e-07
catttacagatgagacagcaaaacaaatccctcctcttcttccttctcaatttggagatgatgaagatgaagacctttatgataatccagttcctcttaatgaaca

SEQ ID NO: 32532 - DNA, 175 bp, Homo sapiens
  MAP TO AL031430.1; EXPRESSED IN BONE MARROW, SIGNAL = 0.97; NT HIT: gi6563384, EVALUE 8.70e-02; SWISSPROT HIT: P01719, EVALUE 1.70e+00; EST_HUMAN HIT: N24191.1, EVALUE 1.50e-01
ccagttttggtttattgtagaagtggagcatgaaacagtgggagggccagcccctcagggtcaggaacacccaggtgacggtgcagacactgcagtggaggaagacacggggagaccgtctgagctcttttcaggtaatagtgctgggaatgtctctgaggacctgcaggagtgg

SEQ ID NO: 32533 - DNA, 162 bp, Homo sapiens
  MAP TO AL031599.1; EXPRESSED IN BONE MARROW, SIGNAL = 1.2; NT HIT: gi11428077, EVALUE 7.00e-83; SWISSPROT HIT: P25003, EVALUE 1.30e+00; EST_HUMAN HIT: AI636075.1, EVALUE 9.60e-02
atgtgtttgagccacttggaaaatatgcctttaagccattcaagaactcaaggagctcagagatcatcctggaagctgtggctcttttgctcaatagttatgttgctatttctttgctccttcagttggctaatctttatttttctccaattagaggtaagg

SEQ ID NO: 32534 - DNA, 90 bp, Homo sapiens
  MAP TO AF111168.2; EXPRESSED IN BT474, SIGNAL = 0.81; EXPRESSED IN BONE MARROW, SIGNAL =   1; EST_HUMAN HIT: AA579669.1, EVALUE 1.00e-43; NT HIT: Y08686.1, EVALUE 8.00e-44; SWISSPROT HIT: O15270, EVALUE 6.00e-10
aacctggctctggactcaataattggggtggcaggaaatccaaccacaacgacaccgatgttccgcttcagcatctcccgtccaaaggcg

SEQ ID NO: 32535 - DNA, 268 bp, Homo sapiens
  MAP TO AP000106.1; EXPRESSED IN BONE MARROW, SIGNAL = 0.93; NT HIT: gi4507334, EVALUE 1.00e-121; SWISSPROT HIT: O43426, EVALUE 1.00e-35
taagactcaaatctaaactgatgccagatgcagaccatgcaaaataaaagtttcctgaattcaaaactttccgcacttctgaaatgcgatcctcatctgaagaatcgattcgcagtgatataaactcagtggaagtaactcggaaaacttcagattcttgaatttttccaacagacatacatccagtgactaggaccagataatgtaacatagtatcacctgcaaaacccaaagattttactggatgaaaaatcccaacattttcaag

SEQ ID NO: 32536 - DNA, 172 bp, Homo sapiens
  MAP TO AP000216.1; EXPRESSED IN BONE MARROW, SIGNAL = 0.92; EST_HUMAN HIT: BF475284.1, EVALUE 3.00e-24; SWISSPROT HIT: P09754, EVALUE 6.50e+00; NT HIT: AJ289880.1, EVALUE 1.00e-16
atatgaaaatccaaaatccaaaatgctctaaaatctgaaactgcttgaagctgacatgatgctcaaagaaaatgctcattggagcattttggatttctgatttttggacttgtgatgcgatgctcaactgggaaataaatataatgcaaatattccaaaatctaaaaaaaaa

SEQ ID NO: 32537 - DNA, 168 bp, Homo sapiens
  MAP TO AC008277.1; EXPRESSED IN PLACENTA, SIGNAL = 0.65; EXPRESSED IN BONE MARROW, SIGNAL = 0.81; EST_HUMAN HIT: BF670714.1, EVALUE 4.00e-88; SWISSPROT HIT: P53049, EVALUE 2.90e+00; NT HIT: U27184.1, EVALUE 6.00e+00
gtgcagaatggtggcgaacaactgatgctcatactcgtacaggagcaaccttctttccaccattactgggaattccaccactatttgctcccccagcccagaatcatgattcttcttcattccattcaaggacttcgggaaaaagtaatcgaaatggtcccgaaaaag

SEQ ID NO: 32538 - DNA, 96 bp, Homo sapiens
  MAP TO AC008177.1; EXPRESSED IN PLACENTA, SIGNAL = 0.71; EXPRESSED IN HELA, SIGNAL = 0.76; EXPRESSED IN BONE MARROW, SIGNAL = 0.7; EST_HUMAN HIT: AI041126.1, EVALUE 2.00e-47; SWISSPROT HIT: Q90404, EVALUE 7.00e+00; NT HIT: AF240698.1, EVALUE 9.00e-25
gccagggtggcacaactcttccttccccgtgcacagcaggaaagctgccatcagctgagcaagtccaccaacagtttctgtgtcccacttcatctt

SEQ ID NO: 32539 - DNA, 367 bp, Homo sapiens
  MAP TO AC007910.1; EXPRESSED IN BONE MARROW, SIGNAL = 1.2; NT HIT: AF166127.1, EVALUE 2.00e-50; SWISSPROT HIT: P10265, EVALUE 2.00e-12; EST_HUMAN HIT: BE146928.1, EVALUE 2.00e-63
  unsure 172
  unsure 356
gcagtcccaacgcagcccccaccacaaacaaatttacctacagtcaacccagatgggtcccagcctcttcttctcagtacaatgcttgtccacctccacgttaggggttggggcggtcgatctctgtagcactattcctctaaatttactacctaactctttgcctttaatntgtccccacaggggtcactggccctttacctcaaggtttggtgagcctggtgttaggtagggcatccacctctgctaaaggaatcaccattcatactggtctcattaattctgattcagttgacgagattaaactaatcgtgtctgccaagcttcctgtttccattccggccggtgactcaatntgctcaattgc

SEQ ID NO: 32540 - DNA, 150 bp, Homo sapiens
  MAP TO AC007564.9; EXPRESSED IN BT474, SIGNAL = 0.67; EXPRESSED IN BONE MARROW, SIGNAL = 1.1; EXPRESSED IN HBL100, SIGNAL = 0.94; NT HIT: gi6679031, EVALUE 8.00e-42; SWISSPROT HIT: P33215, EVALUE 2.00e-21
tgagcactgatggtcttaactggtgatttcaacattcttaaatcatattgatatattttcccccgggaagatccaatagccaaagtggctccatcaggcatgaaatctaccgcagttagaggagtgtcagccactaaagttttcactagc

SEQ ID NO: 32541 - DNA, 184 bp, Homo sapiens
  MAP TO Z83851.17; EXPRESSED IN BT474, SIGNAL = 0.78; EXPRESSED IN HBL100, SIGNAL = 0.77; EXPRESSED IN HELA, SIGNAL = 0.65; EXPRESSED IN PLACENTA, SIGNAL = 0.62; EXPRESSED IN BONE MARROW, SIGNAL = 1.2; SWISSPROT HIT: Q09752, EVALUE 4.30e-01; NT HIT: gi11693167, EVALUE 2.70e-02
gcagaggatcttcagtgcgcaaagagtactccttacattcctgccccatgcgcagcctgcttctcacccacacacctctgctcgcacctctgctctcctgtgggagaaggatattcttactacccaacgccaatcacaggggatcacactgggttctgagttccccaggaatgtcctcaatcca

SEQ ID NO: 32542 - DNA, 163 bp, Homo sapiens
  MAP TO AL096819.2; EXPRESSED IN BONE MARROW, SIGNAL = 0.93; EST_HUMAN HIT: BF032377.1, EVALUE 5.60e-01; SWISSPROT HIT: P05468, EVALUE 5.20e+00; NT HIT: U18671.1, EVALUE 5.80e+00
gtttatcactcttcttccacttcttaaatgttagagatccccagtgtttctccctgaaacgtgtcttttcacacttattctgagccttttttctggagacatgaacctcctggagaatgtgataaaattcaggaatcttctggagggagggcatgttccatct

SEQ ID NO: 32543 - DNA, 100 bp, Homo sapiens
  MAP TO AC005487.2; EXPRESSED IN BONE MARROW, SIGNAL = 2.6; EST_HUMAN HIT: BE147430.1, EVALUE 1.20e+00
cacccctggaagcagaaggttcccgggggttaggagagctgcttcagtatcattgctcttcaatctcagacaatagcaaacacccttcagatcttaccag

SEQ ID NO: 32544 - DNA, 83 bp, Homo sapiens
  MAP TO AC011192.1; EXPRESSED IN BONE MARROW, SIGNAL =  11; NT HIT: Z29084.1, EVALUE 6.70e-01
tagagtccttctacatctccccaaaaatcattcataagaactcacaggaggaggcacacttctccactaaagcctggtttgtt

SEQ ID NO: 32545 - DNA, 100 bp, Homo sapiens
  MAP TO AC006427.10; EXPRESSED IN BONE MARROW, SIGNAL = 0.73; NT HIT: U66150.1, EVALUE 1.80e-01; EST_HUMAN HIT: W03126.1, EVALUE 2.20e-01
tattttgatgaaggacatgccaggtttctcaacatcaatgccaggtgatttcttaattaactcacaggtactgtccataggaaagtccagcgttgattat

SEQ ID NO: 32546 - DNA, 1131 bp, Homo sapiens
  MAP TO AC007554.1; EXPRESSED IN BONE MARROW, SIGNAL = 1.1; EXPRESSED IN HELA, SIGNAL =   2; NT HIT: U26555.1, EVALUE 0.00e+00; SWISSPROT HIT: P13611, EVALUE 0.00e+00; EST_HUMAN HIT: AW380628.1, EVALUE 0.00e+00
  unsure 65
atgctacggattcatgggatggtgtcgtggaagataaacaaacacaagaatcggttacacagatntgaacaaatagaagtgggtcctttggtaacatctatggaaatcttaaagcacattccttccaaggaattccctgtaactgaaacaccattggtaactgcaagaatgatcctggaatccaaaactgaaaagaaaatggtaagcactgtttctgaattggtaaccacaggtcactatggattcaccttgggagaagaggatgatgaagacagaacacttacagttggatctgatgagagcaccttgatctttgaccaaattcctgaagtcattacggtgtcaaagacttcagaagacaccatccacactcatttagaagacttggagtcagtctcagcatccacaactgtttcccctttaattatgcctgataataatggatcatccatggatgactgggaagagagacaaactagtggtaggataacggaagagtttcttggcaaatatctgtctactacaccttttccatcacagcatcgtacagaaatagaattgtttccttattctggtgataaaatattagtagagggaatttccacagttatttatccttctctacaaacagaaatgacacatagaagagaaagaacagaaacactaataccagagatgagaacagatacttatacagatgaaatacaagaagagatcactaaaagtccatttatgggaaaaacagaagaagaagtcttctctgggatgaaactctctacatctctctcagagccaattcatgttacagagtcttctgtggaaatgaccaagtcttttgatttcccaacattgataacaaagttaagtgcagagccaacagaagtaagagatatggaggaagactttacagcaactccaggtactacaaaatatgatgaaaatattacaacagtgcttttggcccatggtactttaagtgttgaagcagccactgtatcaaaatggtcatgggatgaagataatacaacatccaagcctttagagtctacagaaccttcagcctcttcaaaattgccccctgccttactcacaactgtggggatgaatggaaaggataaagacatcccaagt

SEQ ID NO: 32547 - DNA, 286 bp, Homo sapiens
  MAP TO AP000012.2; EXPRESSED IN BT474, SIGNAL = 0.95; EXPRESSED IN BONE MARROW, SIGNAL =   1; EXPRESSED IN HBL100, SIGNAL = 1.1; EST_HUMAN HIT: AI279144.1, EVALUE 0.00e+00; SWISSPROT HIT: Q63470, EVALUE 2.00e-30; NT HIT: gi4503424, EVALUE 0.00e+00
cgtaaacttcataacattcttggagtggaaacaggaggacctggtgggcgacgtgctggggagtcaggtcatacggtcgctgactacttgaagttcaaagacctcattttaaggatgcttgattatgaccccaaaactcgaattcaaccttattatgctctgcagcacagtttcttcaagaaaacagctgatgaaggtacaaatacaagtaatagtgtatctacaagccccgccatggagcagtctcagtcttcgggcaccacctccagtacatcgtcaagctcag

SEQ ID NO: 32548 - DNA, 158 bp, Homo sapiens
  MAP TO AC008168.2; EXPRESSED IN BONE MARROW, SIGNAL = 1.7; SWISSPROT HIT: P06126, EVALUE 5.00e+00; NT HIT: AF160355.1, EVALUE 6.00e-03
tctcttaagctccacacagcccagctggcccattacacatgaacttgtgtaggatttcttcttcctgcatctcatgtcattgagcatgatccacaccatcctgaagcccttgtcttccttaagatcttctgaatttccttctccttgaccattgttca

SEQ ID NO: 32549 - DNA, 369 bp, Homo sapiens
  MAP TO AC008069.2; EXPRESSED IN BONE MARROW, SIGNAL = 0.64; SWISSPROT HIT: P18055, EVALUE 5.70e+00; NT HIT: AF153715.1, EVALUE 3.00e-22; EST_HUMAN HIT: AW886252.1, EVALUE 4.00e-34
tgcagcctctgtatctgccgatttgaacacagttgtcatttttccttgcagggacagattgagtttattgagcaagttgaatatgtcacacaagtcaggaagttttgtgacccattctgtgtcactgaaatgtgctgccagtgatgacaggttttctaagagaaatctctggagttcttgtgactcaaaatccctggccagtgatatacctttagaaagccatttcacttctgtatataagagaagatgtatgtgctctgcgaccatctcctcacagagctgcgcaaacagatgtgagttaagggcatgcactttaaagtggttgataatttttttaatcacatcctgcaaaatgttaagttcaagtga

SEQ ID NO: 32550 - DNA, 136 bp, Homo sapiens
  MAP TO AC007364.2; EXPRESSED IN BONE MARROW, SIGNAL = 1.4; EST_HUMAN HIT: AV724419.1, EVALUE 7.00e-03; NT HIT: AE000679.1, EVALUE 1.70e-02; SWISSPROT HIT: P36381, EVALUE 5.20e-02
accactgcatacctcttttgacacactttcttcttcagcctcaatgacaccacagtcttctggttgtttcttctgctttactggttggtcatgctcagtgtcttttgctggcttctcttcctctgctgaacttctg

SEQ ID NO: 32551 - DNA, 143 bp, Homo sapiens
  MAP TO AC007381.2; EXPRESSED IN BONE MARROW, SIGNAL = 0.81; NT HIT: AJ295233.1, EVALUE 1.30e+00; EST_HUMAN HIT: BE974502.1, EVALUE 1.20e-01
gtaaacatggaaatcacaccaacaacaaagccagaagcaataatgataacagtaaccacaacagtgaccatgtgtggaatgctcctgtatgccctgtgctttacatagctgatttcatgtcactctctcaacacaccttcgag

SEQ ID NO: 32552 - DNA, 160 bp, Homo sapiens
  MAP TO AC004480.7; EXPRESSED IN BONE MARROW, SIGNAL = 0.79; SWISSPROT HIT: P52189, EVALUE 3.80e+00; NT HIT: AJ400877.1, EVALUE 5.70e+00; EST_HUMAN HIT: BE541423.1, EVALUE 5.50e-01
gcctggggctttggctgtaagttggagtctggctttacccactgtgggcacccaaggccaaggtgggtctgattcaccactgtttcctcagccctgccaggctctgaatatgcctttaggaatcattctggaagatttctttcttcactggactatataa

SEQ ID NO: 32553 - DNA, 141 bp, Homo sapiens
  MAP TO AC009363.3; EXPRESSED IN BT474, SIGNAL = 0.99; EXPRESSED IN HBL100, SIGNAL =   1; EXPRESSED IN BONE MARROW, SIGNAL = 0.99; EST_HUMAN HIT: BE385111.1, EVALUE 4.00e-53; NT HIT: AF016898.1, EVALUE 6.00e-67; SWISSPROT HIT: P49245, EVALUE 1.50e-01
gactcatctgatgatgtgagaagagttcagaggagggagaaaaatcgtattgccgcccagaagagccgacagaggcagacacagaaggccgacaccctgcacctggtaagtgttcagatcaatcttcatcctcgtgagctt

SEQ ID NO: 32554 - DNA, 113 bp, Homo sapiens
  MAP TO AC005227.2; EXPRESSED IN BONE MARROW, SIGNAL = 0.96; NT HIT: U67515.1, EVALUE 9.80e-01; EST_HUMAN HIT: BE905848.1, EVALUE 3.60e-01; SWISSPROT HIT: P33924, EVALUE 4.00e+00
aggaacttaaatatggcactgagaacaataaatctgcaattcctgtaagtcagaacaatgcaaaagcagttgatgtggcctataacacagagattgctatgaaacatgaaaga

SEQ ID NO: 32555 - DNA, 108 bp, Homo sapiens
  MAP TO AC009640.2; EXPRESSED IN BONE MARROW, SIGNAL =   1; EXPRESSED IN BT474, SIGNAL = 1.3; NT HIT: AF095703.1, EVALUE 9.20e-01
gtggtgtcagtgcctattggcagaggcattgatatcttcctggaatacttctgttgcataatgttggtcatagtgccaggctccacagcctccaagctcagttctcca

SEQ ID NO: 32556 - DNA, 156 bp, Homo sapiens
  MAP TO AC005018.2; EXPRESSED IN BONE MARROW, SIGNAL = 0.93; NT HIT: gi4505802, EVALUE 5.00e-83; SWISSPROT HIT: P48736, EVALUE 2.00e-23; EST_HUMAN HIT: AW500032.1, EVALUE 6.00e-83
catctgtgttaaggcttatctagcccttcgtcatcacacaaacctactgatcatcctgttctccatgatgctgatgacaggaatgccccagttaacaagcaaagaagacattgaatatatccgggatgccctcacagtggggaaaaatgaggagga

SEQ ID NO: 32557 - DNA, 157 bp, Homo sapiens
  MAP TO AC011236.1; EXPRESSED IN BONE MARROW, SIGNAL =   1; NT HIT: AJ271735.1, EVALUE 3.00e-04; SWISSPROT HIT: P21139, EVALUE 3.90e+00; EST_HUMAN HIT: W86352.1, EVALUE 5.30e-01
tcacagagtgatctaccggtatggaattctgaatagcattgcctctgaccaagaaacccaacttacagcaagagagtgtggcaatggccacatgacaatgggatccaccagtcccatcatataccacatcactcagaagcttctggactcaataaag

SEQ ID NO: 32558 - DNA, 198 bp, Homo sapiens
  MAP TO AC010104.1; EXPRESSED IN BONE MARROW, SIGNAL = 0.92; EST_HUMAN HIT: AV714502.1, EVALUE 6.90e-01; NT HIT: U64512.1, EVALUE 7.30e+00; SWISSPROT HIT: P23176, EVALUE 4.80e+00
atcagactgtgaaacaccaaaatcaggtggtgaaacgtggcgctgccctgaagacctttgaaaggcagaacggatggggtttcctaagttttcctcagttatgattctacttcttctaggaccctctggcttgtgacagtcaaagcaccagctcagaatctgtatcagcatgcaatgcttcaggaaaattccagaaac

SEQ ID NO: 32559 - DNA, 279 bp, Homo sapiens
  MAP TO AC011363.1; EXPRESSED IN BONE MARROW, SIGNAL = 0.99; NT HIT: L29568.1, EVALUE 3.70e-02; EST_HUMAN HIT: BF368125.1, EVALUE 2.50e-01; SWISSPROT HIT: O54827, EVALUE 2.00e-29
ctgctgtagatgaggcactctcggttattgatgactttatccgatttgtacctccggaggtcttcccaagcgtccttgatggcagtgactgccaggataacacagattggtatcatgctcacctcaggctggaaagcattgaccacagggataaaattcagaaccgcaatgcccacaaaatagagattggcaaaccggtgtagctgctcaaaaatgtttttggggacgaaggacaacacggtgtacttgctggtcttgatttgattcccacgatgatgt

SEQ ID NO: 32560 - DNA, 191 bp, Homo sapiens
  MAP TO AC007460.1; EXPRESSED IN BONE MARROW, SIGNAL =   1; EST_HUMAN HIT: AU136922.1, EVALUE 1.00e-103; NT HIT: gi4885570, EVALUE 1.00e-104; SWISSPROT HIT: P06440, EVALUE 6.40e+00
agtgcgtcagtttatagaaatggtgaatggtacagatagtgaagtacgatgtttgggaggccgaagtccaaagtctcaagacagttatcctgttagtcctcgaccttttagtagtccaagtatgagccccagccatggaatgaatatccacaatttagcatcaggcaaaggaagcaccgcacatttttcag

SEQ ID NO: 32561 - DNA, 102 bp, Homo sapiens
  MAP TO AC007544.4; EXPRESSED IN BONE MARROW, SIGNAL = 1.1; EXPRESSED IN PLACENTA, SIGNAL = 0.91; EST_HUMAN HIT: BF026405.1, EVALUE 2.10e-02; NT HIT: U08016.1, EVALUE 1.90e-01
gtcatcagagtttactgtttgtaaccaagtatgcaatctaaaattcttatacgcaatataggggtaaacagtgacaatctctttatgtgctttctatgttga

SEQ ID NO: 32562 - DNA, 428 bp, Homo sapiens; identical to SEQ ID NO: 16063
  MAP TO L05367.1; EXPRESSED IN BONE MARROW, SIGNAL = 1.3; NT HIT: L05367.1, EVALUE 0.00e+00; EST_HUMAN HIT: AW007704.1, EVALUE 0.00e+00; SWISSPROT HIT: P34910, EVALUE 1.00e-05

SEQ ID NO: 32563 - DNA, 105 bp, Homo sapiens
  MAP TO AL023583.13; EXPRESSED IN BONE MARROW, SIGNAL =   1; EXPRESSED IN HBL100, SIGNAL = 1.3; NT HIT: gi9790132, EVALUE 1.40e-02; SWISSPROT HIT: P40379, EVALUE 2.40e+00
caaggcatcacagaggaataatagtaaaatgggggccaagaaaccattgattttgactccaagtccagtgatcttcccattataccatacaacaaattatttcaa

SEQ ID NO: 32564 - DNA, 261 bp, Homo sapiens
  MAP TO AL109627.8; EXPRESSED IN BONE MARROW, SIGNAL = 0.95; EXPRESSED IN HBL100, SIGNAL = 0.98; SWISSPROT HIT: O88307, EVALUE 1.10e+00; NT HIT: gi6753521, EVALUE 9.00e-03
ctcctggtcctggaagtcgctgcagtcccagtggtggagggctgaactgggcatcacctcctggtcctggaagtcgctgcagtcccagtggtggggggctgaactgggcattgcctcctggtcctggaagtcactgcagtcccagtggtgggccaaggtggcactccctgcttccagtgctccaggaaggccatggccccagaaggacatgaagatgctgaagaacacggttcctgggtggtcaaagaggcagctcagctg

SEQ ID NO: 32565 - DNA, 117 bp, Homo sapiens
  MAP TO AF127019.2; EXPRESSED IN BONE MARROW, SIGNAL = 1.1; SWISSPROT HIT: P14742, EVALUE 6.90e+00; EST_HUMAN HIT: BF346738.1, EVALUE 3.80e-01; NT HIT: AL163206.2, EVALUE 2.20e-01
catgccagcctttgtgcttgcatccattcttcttgagatgatgcagccagacgtccatcctgcttggctccttcatggtagaagctctcagattaaatgtcaggccccaaggtcttc

SEQ ID NO: 32566 - DNA, 259 bp, Homo sapiens
  MAP TO AF057177.1; EXPRESSED IN BONE MARROW, SIGNAL = 1.1; EST_HUMAN HIT: AA279429.1, EVALUE 2.40e-01; SWISSPROT HIT: P04942, EVALUE 2.70e-01; NT HIT: X07208.1, EVALUE 0.00e+00
tctccctgacagctggctggtggctcatcaggccggagcagctggcccatgtcctggggcactagggaagcttggtcatcctgcagtgcgtggtccgcaccaggatcagctacacccactggtaccagcagaagggccaggtccctgaggcactccaccagctggccatgtccaagttggatgtgcagtgggattccatcctgaaagcagataaaatcatagccaaggatggcagcagctctatcttggcagtactgaa

SEQ ID NO: 32567 - DNA, 169 bp, Homo sapiens
  MAP TO AC012513.2; EXPRESSED IN BONE MARROW, SIGNAL = 1.7; EXPRESSED IN HELA, SIGNAL = 1.3; EST_HUMAN HIT: AW954545.1, EVALUE 1.00e-28; SWISSPROT HIT: P26414, EVALUE 2.30e+00; NT HIT: AB037820.1, EVALUE 1.00e-90
attgagaaggttcaggttgcagccgccatcctgggctccctcttcctcatcgccagtatttcttggctcatctggtcaactttcagcccctcggcaagatggcagcgccaagaccttctcttccagatctgctacgggatgtatggcttcatggacgtggtgtgcatag

SEQ ID NO: 32568 - DNA, 183 bp, Homo sapiens
  MAP TO AC012528.1; EXPRESSED IN BONE MARROW, SIGNAL = 0.91; EST_HUMAN HIT: AL133821.1, EVALUE 4.30e-01; SWISSPROT HIT: P34627, EVALUE 4.90e+00; NT HIT: AF287263.1, EVALUE 4.30e-01
agttgccactggaggtcttgcttttgctacagtccccagcagtagagatttgctgtcctgtgttcttggataagaaatttattggtggattatcacaaaaagaagaatcatcgaaacaagaaaaaaacagcacagtgaatatcaggatggcgattttagtgaaattgtggtttatcatcacga

SEQ ID NO: 32569 - DNA, 149 bp, Homo sapiens
  MAP TO AL021328.1; EXPRESSED IN BONE MARROW, SIGNAL = 3.3; NT HIT: AJ131017.1, EVALUE 2.90e-01; EST_HUMAN HIT: AL119728.1, EVALUE 3.40e-01
ggtgaacaatctaattttttccagtagcttccactctcttctgtggataaatgttagtttgatgatgataatgatagtcataagttttattatcatcattactgttcttattcttcttctctggacctctgtgtttcctatcagtaaaa

SEQ ID NO: 32570 - DNA, 172 bp, Homo sapiens
  MAP TO AL022165.1; EXPRESSED IN BONE MARROW, SIGNAL = 1.1; EXPRESSED IN PLACENTA, SIGNAL =   1; SWISSPROT HIT: P48915, EVALUE 1.00e+00; NT HIT: AB011163.1, EVALUE 8.60e-02; EST_HUMAN HIT: BE169748.1, EVALUE 4.00e-01
aaaggctcaagttgaagatctggttcttccttctcctcatcatggaccaaaaagctttgtaacaaaacagagagccaggaatgttacggataatccaggagtttggaaggatttctctccacaaggtcaagacaagtcagggaatcaacaaccatgtcaggacaaggatggc

SEQ ID NO: 32571 - DNA, 95 bp, Homo sapiens
  MAP TO AC010812.2; EXPRESSED IN BONE MARROW, SIGNAL = 1.1; EST_HUMAN HIT: BE741380.1, EVALUE 2.90e-01; NT HIT: AJ296924.1, EVALUE 3.10e+00
cctgacttgatgaaggcaaagcctccctgaaattcaggtcttctgcttcagagtcatttccctcataatcgtttactgaacaaaggcggggggaa

SEQ ID NO: 32572 - DNA, 108 bp, Homo sapiens
  MAP TO AC011299.1; EXPRESSED IN HBL100, SIGNAL = 0.92; EXPRESSED IN BONE MARROW, SIGNAL = 1.1; EST_HUMAN HIT: AW504489.1, EVALUE 3.00e-54; SWISSPROT HIT: P36728, EVALUE 1.00e+00; NT HIT: AB014486.1, EVALUE 2.00e-54
gtgatgcagaagatggggaagaatatgatgacccttttgctgggcctccagacactatttcattagcctcagaacgatatgataaagacgatgaagccccctctgatg

SEQ ID NO: 32573 - DNA, 84 bp, Homo sapiens
  MAP TO AP000169.1; EXPRESSED IN BONE MARROW, SIGNAL = 0.76; NT HIT: AF168106.1, EVALUE 3.70e-02
gactcgggtgtgtgtttgagggattccagagggtagaggttgaggaagaggagttgggagagtgagaaggtaggatgttgcaca

SEQ ID NO: 32574 - DNA, 498 bp, Homo sapiens
  MAP TO AL096755.1; EXPRESSED IN BONE MARROW, SIGNAL = 4.2; SWISSPROT HIT: P10387, EVALUE 4.60e-01
gagagatgtgttatttttaaagatggtgttggctctaagaagagtatttctccttgacctccagaaccccctgtccccagagtcctacccttttcccagggtgagcgttttaagaggagattcttctcatggacttgtttttcacaggggtgatggggcagcatggggcgtgtccaaacacagccctgacctcacttatggctgttctgacaccctgatgctgccacccccaggtggcctgtgcattgtggggccgcaccacaggaactggacactcttccctgtgtactgcacagcagaagccatgctccccaaccccatgcaccaggctgccctggggaagggccaggcaaggcatccccccgactccatgtaccaggttgccctggggaagggccaggtgaggcatctccccgactccatgcaccaggctgccctggggaagggccaggtgaggcatccccccgactccatgtgttaggctgccctggggacagg

SEQ ID NO: 32575 - DNA, 84 bp, Homo sapiens
  MAP TO AF130342.1; EXPRESSED IN BONE MARROW, SIGNAL = 2.3; NT HIT: D85606.1, EVALUE 2.00e-03; EST_HUMAN HIT: AA486723.1, EVALUE 4.00e-03
gaccagatgaagaagtgattaagaccatagttctggacttagacaagcctggctttgtgactttggacaaattatttgataact

SEQ ID NO: 32576 - DNA, 94 bp, Homo sapiens
  MAP TO AB020872.1; EXPRESSED IN BONE MARROW, SIGNAL = 0.95; SWISSPROT HIT: Q03804, EVALUE 9.20e+00
tgtaatggaagagaacaccagaggaacttcagctatggttttaggaaatgtcagagtggaaatagggggaatactgggagttgaggcaggacag

SEQ ID NO: 32577 - DNA, 120 bp, Homo sapiens
  MAP TO AC009304.1; EXPRESSED IN BONE MARROW, SIGNAL = 0.76; EST_HUMAN HIT: T03013.1, EVALUE 6.80e-02; NT HIT: AB033235.1, EVALUE 2.30e-01; SWISSPROT HIT: P50077, EVALUE 5.20e+00
tcagcatctttcctgcagcagtgattgcttatgtcctgcacatgctggctgacagcagcattcaaatcatcagagaaatcaggaagttggagttaggtattctcattacatatataaaga

SEQ ID NO: 32578 - DNA, 166 bp, Homo sapiens
  MAP TO AF176315.1; EXPRESSED IN BONE MARROW, SIGNAL = 0.9; SWISSPROT HIT: P06177, EVALUE 2.20e+00
aggggcctctctggcctaaaggcagctgggcattgtgtagtccccacaaacagctgcccagtgtgtctagagaagggatggacaccactaacatccaaatgaggccccaggcagcagggaactgagagtcagtgccaagctcctctgagcctgcataattcagagt

SEQ ID NO: 32579 - DNA, 210 bp, Homo sapiens
  MAP TO AC007632.4; EXPRESSED IN BONE MARROW, SIGNAL = 0.72; EST_HUMAN HIT: AI392964.1, EVALUE 8.00e-10; NT HIT: D14547.1, EVALUE 5.00e-22
agctagacaaaaaagatgttatttagaaaattataagaaaaagaaaacatatttactatgtattaagtggaagtggatcattctcattctcatcgtcttcatgttgagtaggctgaggaggagaaggaagagaaggcgttggtcttgctgcctcaggggtggtagaggtggaagaaaatctacatgtaaatggacccacacaattcaagc

SEQ ID NO: 32580 - DNA, 122 bp, Homo sapiens
  MAP TO AC007951.1; EXPRESSED IN BONE MARROW, SIGNAL = 0.63; NT HIT: Z99109.1, EVALUE 3.60e+00; SWISSPROT HIT: P48841, EVALUE 4.00e+00
taatagtgttgttatcttgttcacggataccactggcagtgtatgtagcatagtccataagcgcacaggccatagaccgaatggcctgaaggtaaacccaagctttaccatttacatgtcac

SEQ ID NO: 32581 - DNA, 148 bp, Homo sapiens
  MAP TO AC008041.5; EXPRESSED IN BONE MARROW, SIGNAL = 0.68; EST_HUMAN HIT: AW860946.1, EVALUE 5.00e-01; SWISSPROT HIT: P32926, EVALUE 5.10e+00; NT HIT: AF255711.1, EVALUE 1.80e-02
tgtcccataatcatcattgcaatggtttgcttcatccacgaggtctgtttccagtgttgtgcttctctgcatgttctttgggatctccatcttctgatttgaagatatggtgaggatgatgatgatgacagtgcaataaaaatgtctg

SEQ ID NO: 32582 - DNA, 87 bp, Homo sapiens
  MAP TO AL049911.2; EXPRESSED IN BONE MARROW, SIGNAL =   1; NT HIT: AL163203.2, EVALUE 4.00e-42; EST_HUMAN HIT: AA009608.1, EVALUE 1.00e-30; SWISSPROT HIT: P21781, EVALUE 3.00e-08
cttcctcattcattgcaagatagaattcactttccacccctttgattgccacaatcccaactgccactgtcctgatttccatgatat

SEQ ID NO: 32583 - DNA, 130 bp, Homo sapiens
  MAP TO AC012354.2; EXPRESSED IN BONE MARROW, SIGNAL = 1.2; NT HIT: Y16754.1, EVALUE 4.50e+00; EST_HUMAN HIT: BE780162.1, EVALUE 4.30e-01
aacagcatgcaatgggaaatgaggcgctgcaccttcttggctaagcccattcattgccttaggctgtactttcaactgagtcatataatttttctgtccgtttttgaagtaagaatggtcagacttaata

SEQ ID NO: 32584 - DNA, 191 bp, Homo sapiens
  MAP TO AF053356.1; EXPRESSED IN BONE MARROW, SIGNAL = 0.93; NT HIT: AF202314.1, EVALUE 1.00e-104; EST_HUMAN HIT: AA662379.1, EVALUE 4.00e-57; SWISSPROT HIT: P01588, EVALUE 1.00e-27
ctgggctcccagagcccgaagcagagtggtgaggctgcgaaggccactgacggctttatccacatgcagctgcaggggctcccacggctgggaagagttgaccaacagggcctggccccgcaggacagcttccgacagcagggccaggccctgccagacttctacggcctgctgcccgacctacagggagt

SEQ ID NO: 32585 - DNA, 220 bp, Homo sapiens
  MAP TO AC009965.2; EXPRESSED IN BONE MARROW, SIGNAL = 0.93; EST_HUMAN HIT: AW856023.1, EVALUE 1.30e-01; SWISSPROT HIT: P50654, EVALUE 2.40e-01; NT HIT: M58493.1, EVALUE 2.80e-02
gaccaatctgtcttctgtcttcattttgcactttgtaattagtgttctcctcagtcctgattcctctgatggggcagcttgggctctggtgaatgtggagtccctgatttctgctttgattctggtgtcatttgtttccttggtgccaaggccctttgtgattctgagcactctcatctctcctttcctcccctctcttaggcttctcgtcccacttcca

SEQ ID NO: 32586 - DNA, 153 bp, Homo sapiens
  MAP TO AC009976.1; EXPRESSED IN BONE MARROW, SIGNAL = 1.5; EST_HUMAN HIT: BE222256.1, EVALUE 3.00e-17; SWISSPROT HIT: P53135, EVALUE 8.70e+00; NT HIT: AF003528.1, EVALUE 1.00e-22
ccacagtgatagcctcccctgagtcagttgccaggtatgataatgttgattcttctcagaggccacccccaacatctctgtttggttctaagcctataactaaactaaagtactggcgggctctttacggtgatattgagagtgcaacccatg

SEQ ID NO: 32587 - DNA, 92 bp, Homo sapiens
  MAP TO AL117672.1; EXPRESSED IN BONE MARROW, SIGNAL = 0.93; EST_HUMAN HIT: BF210798.1, EVALUE 4.40e+00; NT HIT: D26067.1, EVALUE 6.50e-01
gtcagcagatattcttctggcttcttttgtagccattacagcattctgatgtagcattctgaagatccttctggtctttctttctactgcta

SEQ ID NO: 32588 - DNA, 372 bp, Homo sapiens
  MAP TO AL121757.2; EXPRESSED IN BONE MARROW, SIGNAL = 0.93; SWISSPROT HIT: P97295, EVALUE 5.00e-09; NT HIT: gi10946717, EVALUE 3.00e-68
ttatggtgattatgacctccctatggatgaggatgaggacatgaccaagacccggaccttcttcgcagccaagatcgtcattggcattgcactggcaggcatcatgctggtctgcggcatcggtaactttgtctttatcgctgccctcacccgctataagaagttgcgcaacctcaccaatctgctcattgccaacctggccatctccgacttcctggtggccatcatctgctgccccttcgagatggactactacgtggtacggcagctctcctgggagcatggccacgtgctctgtgcctccgtcaactacctgcgcaccgtctccctctacgtctccaccaatgccttgctggccattgccattgacag

SEQ ID NO: 32589 - DNA, 156 bp, Homo sapiens
  MAP TO Z86090.10; EXPRESSED IN BONE MARROW, SIGNAL = 0.68; SWISSPROT HIT: Q56693, EVALUE 1.00e+00; EST_HUMAN HIT: AV702981.1, EVALUE 3.00e-76; NT HIT: gi8923266, EVALUE 7.70e-02
ccacctcacccccgggagatgactgcttttcaacagtaaaactgcgtaagtgacatttggagttttgggggtcttctgaagtaaaacatgtaggtctaacttcttactgacaataagtcttaacgttacaggcttcggcttgatgtagaaaggacc

SEQ ID NO: 32590 - DNA, 312 bp, Homo sapiens
  MAP TO AL049836.2; EXPRESSED IN BONE MARROW, SIGNAL = 0.62; EST_HUMAN HIT: BE727436.1, EVALUE 7.20e-02; SWISSPROT HIT: P02718, EVALUE 1.20e-01
agggctgtgggtaaacagcttggtacagaggctgccaccggcacccaggagagggttccagcttcccccggggctggggacacacgttgctcctgggctctgtctccaagtgagaggttatataaccatggccgttgcagcagccccgctggctgggcccttgctcctcgcacgagggctagaaacaaccctcctgcccccttttcaccattttctaatttggtcctctctgagctaccaggatctgcaaataaaacgtcacactccttttctaaagtggcttcccgattatctccttttacaggtaggaaa

SEQ ID NO: 32591 - DNA, 76 bp, Homo sapiens
  MAP TO AP000014.2; EXPRESSED IN BONE MARROW, SIGNAL = 1.3; NT HIT: X63909.1, EVALUE 2.40e+00; EST_HUMAN HIT: AW946054.1, EVALUE 1.50e-01
agcatacaaggcactaatgatgacaacaattatgaaaattatgatgatgaggaacatgatgatagcaacatgcctc

SEQ ID NO: 32592 - DNA, 181 bp, Homo sapiens
  MAP TO AC007733.1; EXPRESSED IN BONE MARROW, SIGNAL = 0.98; SWISSPROT HIT: Q39565, EVALUE 6.50e+00
gcctgtaactcatgtacttaaagctgtgttcatcgtctctagttgtagtaccacatccaatataacagctgcaattggagctacaaatggtcgaattaatagtagcctacagaaattccccagaatccaaccattactgcaggggacaaactggataattaaacaaaaatataatgggaac

SEQ ID NO: 32593 - DNA, 1366 bp, Homo sapiens
  MAP TO AC007732.1; EXPRESSED IN BONE MARROW, SIGNAL = 2.1; EST_HUMAN HIT: AL040249.1, EVALUE 0.00e+00; SWISSPROT HIT: O10341, EVALUE 5.00e-04
  unsure 204
  unsure 283
  unsure 782
  unsure 823
tgtgaagaccaaagtcttgagaagggcttggattctggcagagataagaatcttggggaaggcctgggaactcatgtaggccttgatttggagcaagacctgggttctcgtggaggcctggatcttgggtaaggcctgggttcttgtagaggtctgggttttgggcaaggtccagattcctgggaactctggagtcttttgaangggcctggggtcctttgaaggccagaatcttgggtaaggcctagactctcatgacattcagggcattggggttggatcnaggggttgggaaatggtggcgaacagggaagggatggggaattgggaagtgaggatggactgaggagacttggaggttggaagaacagtaggggtttgtattaaggtggaaggcctctgatggttggtgggttgaggagggacaaaggatctgggaggaacgagaggcagggaaagagtgaacggtggaggaagggtgcacactgagctctgggcagtggttgcagaatgaaagcaagtcttggcacatgcagtatcccgggagtaggcaaggaatttggggtagaatggagcctgggagtctgtgttcttctcagaactgcaaggatggaagctgcagtaaggggaagtcttggtctgggggaacttatctttggcatcatctgagttcttccattccatattcctcaactccaggtagcccagtatggatcctgcaggaagcttggcactatccccactgcattgctttgtttgctcagatatgccagaactcaccnaggtcctgaccctcttggggcctgaagagggtagccaagtncttttcttgaatactcagggttctgggggctggacatatggaagaaattctgcttttccctgcgggcatcatagaccacatggccagtggagaggtcatggctgaaggcaggtggggtagagggtataggagttatgataggggcaggggtggtggcagggacaggatcagggacaggagtggtagtcagggccatgaccagtgctggagcagggctgggggcagaggctgggacaggggctggtgttggagctaggacaggagtagtggctggggcaagagttccgggaggagctggggcagaggttgggacaggaacggagctgcggactagatgagagtggtctgggatatacgctggggcatgggctgaggtgtactcaggggcatgggcctgggggtgggctgggacaggcataggagcctgggctggggagtgggctgaggtgtgttcagggctgtgggcctgggagtgagtatactcaggggtgtggggcggagagtgggtttgggcctgggctgacgtatgggctttagtgtgag

SEQ ID NO: 32594 - DNA, 422 bp, Homo sapiens; identical to SEQ ID NO: 16101
  MAP TO AL049873.2; EXPRESSED IN BONE MARROW, SIGNAL = 1.2; NT HIT: gi6754525, EVALUE 5.70e-02; SWISSPROT HIT: Q9Z7N9, EVALUE 3.70e-01

SEQ ID NO: 32595 - DNA, 163 bp, Homo sapiens
  MAP TO AF088219.1; EXPRESSED IN BONE MARROW, SIGNAL = 0.98; SWISSPROT HIT: O15467, EVALUE 5.00e-27; EST_HUMAN HIT: AW827147.1, EVALUE 1.00e-38; NT HIT: AB007454.1, EVALUE 4.00e-87
cttcgtcaccaagaggaaccgagaagtctgcaccaaccccaatgacgactgggtccaagagtacatcaaggatcccaacctacctttgctgcctaccaggaacttgtccacggttaaaattattacagcaaagaatggtcaaccccagctcctcaactcccag

SEQ ID NO: 32596 - DNA, 161 bp, Homo sapiens
  MAP TO AC007461.8; EXPRESSED IN BONE MARROW, SIGNAL = 2.6; EST_HUMAN HIT: AA071074.1, EVALUE 2.20e+00; NT HIT: AL163203.2, EVALUE 3.10e-01; SWISSPROT HIT: P22086, EVALUE 6.60e+00
ttggtggccacggccccaatgccaaggatgagagacctgctccgtgcagcagtgtttccttctactttgctacagaaataatctgtagactctatgattcatgccagtgccctcagccactgacaagcatgttcacttggccattttgctatttgcccctg

SEQ ID NO: 32597 - DNA, 104 bp, Homo sapiens
  MAP TO AC005832.1; EXPRESSED IN BONE MARROW, SIGNAL = 0.56; EST_HUMAN HIT: AA356154.1, EVALUE 6.00e-52; NT HIT: gi11525731, EVALUE 4.00e-52; SWISSPROT HIT: Q01603, EVALUE 5.50e+00
ctggtgggacccatttaggtttcttgctttcagctgaaggactgcgtatttctaatggtttcctagtggtatctgaagacagagaaaccttttttggcaaggac

SEQ ID NO: 32598 - DNA, 96 bp, Homo sapiens
  MAP TO AC005195.1; EXPRESSED IN BONE MARROW, SIGNAL = 0.55; SWISSPROT HIT: P17588, EVALUE 2.50e+00
cctgtgattgagggaagacctcagccccgcaggccactcacactcattcttcacctctgccaagagcacacactcctggcaggagtaaaacaaggc

SEQ ID NO: 32599 - DNA, 143 bp, Homo sapiens
  MAP TO AC004067.1; EXPRESSED IN BONE MARROW, SIGNAL = 0.9; SWISSPROT HIT: P34885, EVALUE 3.10e+00; NT HIT: AB001328.1, EVALUE 5.00e+00; EST_HUMAN HIT: BF680613.1, EVALUE 1.20e-01
atggacaattgtgagtgatattctaagtgctactcataggtactggcagaatgagtcccctgttgtctctagcagtcacctcagtaatgctcttacattagctctttttccttcctgtatcatgcctcccattctctttctcc

SEQ ID NO: 32600 - DNA, 371 bp, Homo sapiens
  MAP TO AC004974.1; EXPRESSED IN BONE MARROW, SIGNAL = 0.5; NT HIT: AE000974.1, EVALUE 3.60e+00; SWISSPROT HIT: P97608, EVALUE 3.50e+00
tcaggctgctaacattggcgatttgagacagtcactgtcagtgacacagggcgccatctctatcctcaagtctctattatctaactggaaaaagaagacaagtatgtaggaaacgggaaggggctcagtaggaaggaacaccacaaatggctttattaaggatagtgcagttttcttatttgaatatttatgttccaaaaagaatttaagaaactgcacttgaaaaaacacgtttaaatttagctgaggaaaaaagtagaaaggagcataagaacaatgggtgaacataatatccaaactattattaatcatgattgatatcaacagtaagcatatttcccttagcagattttgaaataccacccaagaac

SEQ ID NO: 32601 - DNA, 270 bp, Homo sapiens
  MAP TO AC005828.1; EXPRESSED IN BONE MARROW, SIGNAL = 0.49; SWISSPROT HIT: Q16099, EVALUE 2.30e-01; EST_HUMAN HIT: BE009356.1, EVALUE 1.00e-123; NT HIT: AB046856.1, EVALUE 1.00e-128
gtggttgcctatcactattgtcaagcagataatgcctacacttgcttggtgccagaatttgtccacaatgttgctgccttgctctgccgctcacctcagctgacagcctatcgggagcagcttcttcgggaacctcacctgcagagcatgctgagccttcgttcctgtgttcaagaccccatggcctccttccggaggggagttctggagccactagaaaatctccataaaggtacagataaggcccaaaggaggggaaagatggaggtt

SEQ ID NO: 32602 - DNA, 171 bp, Homo sapiens
  MAP TO AC006345.2; EXPRESSED IN BONE MARROW, SIGNAL = 1.2; NT HIT: AF251025.2, EVALUE 8.00e-92; SWISSPROT HIT: P34905, EVALUE 2.30e+00; EST_HUMAN HIT: AW277011.1, EVALUE 1.00e-88
actgatgggtttctgaaggacaacaacaatgctgcccagcgcctgttggacgggatgaacttcatggctcagtcggtgtccgagcttagccttggacccaccaaggctgtgacttcctggctgacagaccagatcgcccctgcctactggaggcccaactcccagattctg

SEQ ID NO: 32603 - DNA, 173 bp, Homo sapiens
  MAP TO AL050320.19; EXPRESSED IN PLACENTA, SIGNAL = 2.2; EXPRESSED IN BONE MARROW, SIGNAL = 0.45; SWISSPROT HIT: P22534, EVALUE 8.80e+00; NT HIT: AF260225.1, EVALUE 1.00e-01
ccacttactcctcatggggcagaattgtgtcatatggtcgcactcagatgaagtggatgctgggaaatgtagtttttgccaggtccacagccacctgaaacaaacaccaagtaagaaaaagaggggactagacattgggcaggcaattgcaatgtctgccacagtactgccat

SEQ ID NO: 32604 - DNA, 113 bp, Homo sapiens
  MAP TO AC011299.3; EXPRESSED IN BONE MARROW, SIGNAL = 0.49; EXPRESSED IN PLACENTA, SIGNAL = 0.49; SWISSPROT HIT: P36728, EVALUE 1.10e+00; EST_HUMAN HIT: BE311576.1, EVALUE 2.00e-55; NT HIT: gi11421649, EVALUE 1.00e-55
catcagagggggcttcatcgtctttatcatatcgttctgaggctaatgaaatagtgtctggaggcccagcaaaagggtcatcatattcttccccatcttctgcatcacctgtt

SEQ ID NO: 32605 - DNA, 155 bp, Homo sapiens
  MAP TO AC007595.3; EXPRESSED IN BONE MARROW, SIGNAL = 0.48; EST_HUMAN HIT: W68838.1, EVALUE 4.00e-82; NT HIT: gi11431845, EVALUE 2.00e-82; SWISSPROT HIT: P53384, EVALUE 2.00e-24
ctggggagtggtgatgatcactgctccatcgatgtgtgctgtggccaggtaccggacgaccgagaggtgttcatccgacgtcccaggtggggtgtccacaatgaggtagtcgacctctccccagtccacatctcggaggaactgcttgatcatgc

SEQ ID NO: 32606 - DNA, 231 bp, Homo sapiens
  MAP TO AC018796.3; EXPRESSED IN BONE MARROW, SIGNAL = 0.43; NT HIT: AB042297.1, EVALUE 2.00e-06; SWISSPROT HIT: O35625, EVALUE 5.40e+00; EST_HUMAN HIT: AA448276.1, EVALUE 9.00e-07
aacaacagaaatggattctctcgcaattctggaagctagaagttcaagatcaaggcatatgcaaggttgtgctccctctgaaggtgcaagagaagggtctgttgaggcctttctcctgacttctggtagacctttggcttgtggcagcagaactccagtcttcacatggctttcttcttgtacatgctcttctatgcccaaatttgtccttttcataaggacaccagtcat

SEQ ID NO: 32607 - DNA, 180 bp, Homo sapiens; identical to SEQ ID NO: 19548
  MAP TO AC018731.3; EXPRESSED IN PLACENTA, SIGNAL = 0.51; EXPRESSED IN BONE MARROW, SIGNAL = 0.49; EST_HUMAN HIT: AW473941.1, EVALUE 5.00e-97; NT HIT: gi11431060, EVALUE 4.00e-97; SWISSPROT HIT: P80217, EVALUE 8.00e-03

SEQ ID NO: 32608 - DNA, 208 bp, Homo sapiens
  MAP TO AL161747.1; EXPRESSED IN BONE MARROW, SIGNAL = 0.42; NT HIT: AB046784.1, EVALUE 1.00e-114; SWISSPROT HIT: O08811, EVALUE 2.20e+00; EST_HUMAN HIT: BE208526.1, EVALUE 1.00e-113
cgttgttgtttctcccgccgtgcaatttctttcagcttgaaggctgcttcacaacgccgccttcgccggtccccacgttctgcagcctctatcttcatttgttctctcttgtagctgcgctgatacgctgttactagacgccgaagcctagctgttagggcagagcccggaggccagaataaatggcctggctgttgggtcacctggg

SEQ ID NO: 32609 - DNA, 306 bp, Homo sapiens
  MAP TO AL121827.9; EXPRESSED IN PLACENTA, SIGNAL = 0.53; EXPRESSED IN BONE MARROW, SIGNAL = 0.5; SWISSPROT HIT: P87498, EVALUE 2.90e-01; EST_HUMAN HIT: AU127096.1, EVALUE 0.00e+00; NT HIT: gi11420416, EVALUE 0.00e+00
cccctcggagggccacagttatcagaacagcggtctggaccacttccaaaacagcaacatagaccagagcttctgggagacctttggaagtgctgagcccaccaagacccgcaagtccccgagcagcgacagctggacgtgcgcggacacctccaccgagaggaggagctcggacagctgggaggtgtggggctcggcctccaccaacaggaacagcaacagcgacggcggggagggcggggagggcaccaagaaggcagtgccgccggccgtgcccactgatgatggctgggacaaccagaactg

SEQ ID NO: 32610 - DNA, 151 bp, Homo sapiens
  MAP TO AC025226.2; EXPRESSED IN BONE MARROW, SIGNAL = 0.47; EST_HUMAN HIT: BF216585.1, EVALUE 5.10e-01; NT HIT: AJ271735.1, EVALUE 6.00e-80; SWISSPROT HIT: P37196, EVALUE 2.30e+00
gacacatcccaaatccatttgagagcctgaaagttcctataggaggccagctctatccatattctattgaagtcagcaggagctctttagaagtgccagataaaaagctgatctgtggacatcctgattcagcagtggtgacaccagcatt

SEQ ID NO: 32611 - DNA, 266 bp, Homo sapiens
  MAP TO AC019222.3; EXPRESSED IN BONE MARROW, SIGNAL = 0.42; SWISSPROT HIT: Q14721, EVALUE 6.00e-10; EST_HUMAN HIT: W27668.1, EVALUE 5.00e-92; NT HIT: gi4826789, EVALUE 1.00e-02
acaattccatcctgctttccttcctctacaggtgagcatctccaccgtgggctacggagacatgtacccagagacccacctgggcaggttttttgccttcctctgcattgcttttgggatcattctcaacgggatgcccatttccatcctctacaacaagttttctgattactacagcaagctgaaggcttatgagtataccaccatacgcagggagaggggagaggtgaacttcatgcagagagccagaaagaagatagctgagt

SEQ ID NO: 32612 - DNA, 385 bp, Homo sapiens; identical to SEQ ID NO: 29724
  MAP TO AP001440.1; EXPRESSED IN PLACENTA, SIGNAL = 0.58; EXPRESSED IN BONE MARROW, SIGNAL = 0.44; SWISSPROT HIT: P23004, EVALUE 1.20e+00; NT HIT: D87675.1, EVALUE 0.00e+00; EST_HUMAN HIT: BE165330.1, EVALUE 8.00e-98

SEQ ID NO: 32613 - DNA, 84 bp, Homo sapiens
  MAP TO AC007923.2; EXPRESSED IN BONE MARROW, SIGNAL = 0.45; EXPRESSED IN PLACENTA, SIGNAL = 0.47; SWISSPROT HIT: Q9QWV9, EVALUE 7.30e+00; NT HIT: AF277988.1, EVALUE 1.70e-01; EST_HUMAN HIT: AI247482.1, EVALUE 1.00e-03
atgcttgtgttcagtcagtacctagcaattattatcatcatcatcttcttcatctcgggaggtgggaacatcgaaagctctcat

SEQ ID NO: 32614 - DNA, 105 bp, Homo sapiens
  MAP TO AC017073.3; EXPRESSED IN BONE MARROW, SIGNAL = 0.47; EXPRESSED IN PLACENTA, SIGNAL = 0.56; SWISSPROT HIT: P13983, EVALUE 5.50e+00
atgtttttgagggatagggacaactgggtttatagcggattggatgtgggatatacaataaagaaggaggccgaggaggacttcaagcattttggccagagcaaa

SEQ ID NO: 32615 - DNA, 106 bp, Homo sapiens
  MAP TO AC009467.3; EXPRESSED IN BONE MARROW, SIGNAL = 0.44; EST_HUMAN HIT: AI140618.1, EVALUE 8.50e-02; NT HIT: S77868.1, EVALUE 2.30e-01; SWISSPROT HIT: Q07573, EVALUE 7.20e+00
cagctgctctcatgtttgcttccttgcttaaagatctcacaactatactcaaagccttcagaatctagcatcctttgcttgcccttctgggctacagtaacaaact

SEQ ID NO: 32616 - DNA, 224 bp, Homo sapiens
  MAP TO AC013596.3; EXPRESSED IN BONE MARROW, SIGNAL = 0.44; EST_HUMAN HIT: AW072210.1, EVALUE 2.00e-01; SWISSPROT HIT: P10962, EVALUE 7.60e-01; NT HIT: gi4504806, EVALUE 1.00e-123
gcctggttcagtactgtctacttcaagccatttttcaaggttctcagtagtcacattttccaatcctttggtgtgttgtaaaatggcagccacagtagccacagaaatatcttcaacatcaaagtccaggctctctttctcctctaccatagggagaatcttcttccatgctctgctaatggtaactggttttactaagttccatgccattgctatttcataaa

SEQ ID NO: 32617 - DNA, 161 bp, Homo sapiens
  MAP TO AL121586.28; EXPRESSED IN BONE MARROW, SIGNAL = 0.53; EXPRESSED IN PLACENTA, SIGNAL = 0.76; NT HIT: AF183183.1, EVALUE 1.00e-04; SWISSPROT HIT: Q15427, EVALUE 2.30e+00; EST_HUMAN HIT: AW813525.1, EVALUE 1.00e-85
tgacggtcgccgtatttgatcatgacctcgtgggttctgacgacctcatcggggagacccacattgatctggaaaaccgattctatagccaccacagagcaaactgtgggctggcctcccagtatgaagtgtgggtccagcagggcccacaggagccattc

SEQ ID NO: 32618 - DNA, 451 bp, Homo sapiens
  MAP TO AL133344.19; EXPRESSED IN BONE MARROW, SIGNAL = 0.44; EST_HUMAN HIT: BE697125.1, EVALUE 1.00e-47; NT HIT: gi11434837, EVALUE 4.00e-62; SWISSPROT HIT: Q93075, EVALUE 1.00e-67
actgagtaactcccagtgaagcaatggcgatgtatcttgtggtcagagggcacgtaatttttcaagatgtgcagtaggtcttcatcggcttctcggcagtggatcatcatgggcttctttagagagacggccagccgcagcagtctcttaaatactttctgctgctctgggatatgcgtggtgcacttactggagtaatccaagcccatttcgccgaatgccacagccttggggtgtcgtaaggcttttaaaatacttctttcttgatagttgttataataatgggcaaaatgagggcgacagccaaagaccccccaaaccagatcatctttcaactgatcctcccacaggttatcacttaggttttgaggattgcagaagcaagaaatgcagccctgaaactccttggggaaggtgttgctataaatttttctgaatttggtaaaggtgc

SEQ ID NO: 32619 - DNA, 128 bp, Homo sapiens
  MAP TO AC010486.5; EXPRESSED IN PLACENTA, SIGNAL = 0.47; EXPRESSED IN BONE MARROW, SIGNAL = 0.46; EST_HUMAN HIT: BF434650.1, EVALUE 7.00e-03; SWISSPROT HIT: Q9R1C8, EVALUE 1.80e+00; NT HIT: AL163203.2, EVALUE 1.00e-21
tgcttcacccttggctgaacattcccattggcagtggctctgtgtctctctggggtggaagtcccataggcaattgacagcccgtatgccattgccattgtgatggtattgctcttgctgcccttgga

SEQ ID NO: 32620 - DNA, 120 bp, Homo sapiens
  MAP TO AC012571.3; EXPRESSED IN BONE MARROW, SIGNAL = 0.45; EXPRESSED IN PLACENTA, SIGNAL = 0.49; NT HIT: Z36088.1, EVALUE 1.00e+00; EST_HUMAN HIT: BF367386.1, EVALUE 2.00e-03
aaaatttcaagatacgaagtcatggagtacttaggcaatggaactgtgacctggatacttaccctcaacaacaaaatgagtaacaataccaattgcaattcctatgattgctacaattgc

SEQ ID NO: 32621 - DNA, 112 bp, Homo sapiens
  MAP TO AL161781.2; EXPRESSED IN BONE MARROW, SIGNAL = 0.44; NT HIT: gi11428710, EVALUE 8.00e-57; SWISSPROT HIT: Q02548, EVALUE 3.00e-15; EST_HUMAN HIT: AW843846.1, EVALUE 1.40e+00
atggcctcgctggctggtgggctggacgacatgaaggccaatctggccagccccacccctgctgacatcgggagcagtgtgccaggcccgcagtcctaccccattgtgacag

SEQ ID NO: 32622 - DNA, 207 bp, Homo sapiens
  MAP TO AC022843.3; EXPRESSED IN BONE MARROW, SIGNAL = 0.46; EST_HUMAN HIT: W92331.1, EVALUE 6.00e-17; NT HIT: AL163302.2, EVALUE 1.00e-13
agattgaatactaggatagtcaaaagcaactacatatacaagaaaaatttgaaagtcattgtgcatgcccagggaaaggcacaggctcagaaaagacctgagaagaccttaagtttacagttcagcctaatcttcagaaaagaggcagcctacaacaactacaaacaaataaacaacaacaacaacaacaaagcaaacagcaagcac

SEQ ID NO: 32623 - DNA, 105 bp, Homo sapiens
  MAP TO AC018421.3; EXPRESSED IN BONE MARROW, SIGNAL = 0.49; NT HIT: Z49963.1, EVALUE 5.70e-02
atggcagggatgggggtagagaaggcgaagaaggtggaggggaggtgggaagtgaggtccgcatgcagaaggaagccacggagggcccagcagtgccgcagctgg

SEQ ID NO: 32624 - DNA, 103 bp, Homo sapiens
  MAP TO AC021846.3; EXPRESSED IN PLACENTA, SIGNAL = 0.54; EXPRESSED IN BONE MARROW, SIGNAL = 0.45; SWISSPROT HIT: P22807, EVALUE 4.20e+00; NT HIT: AJ277546.2, EVALUE 4.00e-09; EST_HUMAN HIT: BE169208.1, EVALUE 4.00e-10
attgttgtgcgaccatcagcaccatccatctccagaaagttttcatcttcaccagctgcaacattgtacccattaaataccaactccccattcctaacttgcc

SEQ ID NO: 32625 - DNA, 145 bp, Homo sapiens
  MAP TO AL137026.10; EXPRESSED IN BONE MARROW, SIGNAL = 0.45; EST_HUMAN HIT: AI347165.1, EVALUE 7.60e+00; SWISSPROT HIT: P02461, EVALUE 2.30e+00; NT HIT: M90464.1, EVALUE 5.10e+00
cctccccttctcctccaggaaagcctggagaagccccaggttcttgctgtacttcctccctggatgtctcttctcttcacccaaacttggagctgctttctggagcatctgaatccctggcctggcctggggctcctcatactcc

SEQ ID NO: 32626 - DNA, 96 bp, Homo sapiens
  MAP TO AC008919.4; EXPRESSED IN BONE MARROW, SIGNAL = 0.82; SWISSPROT HIT: P49335, EVALUE 9.50e+00; EST_HUMAN HIT: AW834834.1, EVALUE 2.00e-42; NT HIT: gi5835876, EVALUE 2.00e-01
acaattgagtttgctgaacagcggatccctgtattaaatgaatattgtgtggtttgtgatgagccacatgtgtttcaaaatggccctatgcttagg

SEQ ID NO: 32627 - DNA, 122 bp, Homo sapiens
  MAP TO AC011938.3; EXPRESSED IN BONE MARROW, SIGNAL = 0.44; SWISSPROT HIT: P74180, EVALUE 9.20e+00; NT HIT: AL163249.2, EVALUE 7.00e-05; EST_HUMAN HIT: AI161054.1, EVALUE 4.00e-04
ttgactttgtttctctggagaaccctgacggatatagaggttttcccaggactgaaaagcactgcaagaatgctgagcacatagatccacttgacacacagatcatgaaaagcagaaacagc

SEQ ID NO: 32628 - DNA, 130 bp, Homo sapiens
  MAP TO AL136112.9; EXPRESSED IN PLACENTA, SIGNAL = 0.53; EXPRESSED IN BONE MARROW, SIGNAL = 0.44; NT HIT: AJ248283.1, EVALUE 4.50e+00; EST_HUMAN HIT: AA928089.1, EVALUE 2.00e-67
gaagctgttgataactcttcctgagctggtggaatgtaccagtgccaaagcattctatatcccagagactgaaactcttgaaatcactatgactatgaaaagagagttagatattgctaatttcttctga

SEQ ID NO: 32629 - DNA, 228 bp, Homo sapiens
  MAP TO AL158842.2; EXPRESSED IN BONE MARROW, SIGNAL = 0.44; EST_HUMAN HIT: AA707741.1, EVALUE 1.30e-02; NT HIT: AJ271753.1, EVALUE 8.50e+00; SWISSPROT HIT: P75864, EVALUE 7.30e-01
gcatctgagctgggaacatcaatatcgtctttaatgtctcgctatccaacagcttccacattcagtgagttcccgagacctgaatatctggctgcgaagagccctcctcttcatagtcccacagcttctgtccagctcaggcccttgaccccctcacatgggctcttgccaccacatccagcatgcccaacaacctcccctcctttttcctttctctccccactctga

SEQ ID NO: 32630 - DNA, 307 bp, Homo sapiens
  MAP TO AC008919.4; EXPRESSED IN BONE MARROW, SIGNAL = 0.63; EST_HUMAN HIT: BF343644.1, EVALUE 1.10e+00; SWISSPROT HIT: P30414, EVALUE 6.90e+00
ggttggagaaagaaaagagacgacgaacaagacgagcacgcacgagacgcaacgagaagaacgaaccagacaggacaacaacggaaaaaagaaacgacgaacacgaaaaccaaacgaacacggaacgcggaaccggacacggacacggacgcggacgggacgcggacgctacggaacgggacgacaacgaggacacagaaagacaaagaaagaaatacgaaagaaagcaagcaaagaaagaaaggagagagaaagaaaacgaaggaaagaaagagaaagaaaagaaaagatggatgcggcagagact

SEQ ID NO: 32631 - DNA, 169 bp, Homo sapiens
  MAP TO AC009298.2; EXPRESSED IN BONE MARROW, SIGNAL = 0.53; SWISSPROT HIT: Q01147, EVALUE 6.00e-26; EST_HUMAN HIT: AU138559.1, EVALUE 2.00e-90; NT HIT: X55545.1, EVALUE 1.00e-90
gaacaacaacttggttgctgggcactaagatctgctgtccatcagtggtctgtgcatactgtagaatggtagtacccggctgagtggctgctgcattggtcatggttaatgtttgcaggccctgtaccccatcggtaccattgttagccagctgtattgctcctccctg

SEQ ID NO: 32632 - DNA, 181 bp, Homo sapiens
  MAP TO AL136320.7; EXPRESSED IN BONE MARROW, SIGNAL = 0.55; NT HIT: U73162.1, EVALUE 1.70e+00; EST_HUMAN HIT: R15209.1, EVALUE 2.00e-22; SWISSPROT HIT: P19556, EVALUE 1.30e+00
tccagaggaattccagcaccagcgatggtatgcaaacctttagtggcacacgttgactcagatacagcccagattccttggccatgctttccaggtcttccataaaccattctgttctttctcctctcattcccttcattaccttcatttccattcctacagatttgttaactggaatttc

SEQ ID NO: 32633 - DNA, 274 bp, Homo sapiens
  MAP TO AC018780.3; EXPRESSED IN BONE MARROW, SIGNAL = 0.45; SWISSPROT HIT: Q50360, EVALUE 3.20e-01; EST_HUMAN HIT: AI934721.1, EVALUE 2.50e-01; NT HIT: AF255589.1, EVALUE 6.60e-01
atgtgcttgcagaagggcagcaggttcagtggtaccagcaagcagctgcccagcccgtgctgttcccgggagtgtgctggtggcagcttatgcactgggtacagcaccacccaggaggggcgaggctgcaccacccaggaggggcgaggctgcaccacccaggaggggcgaggctgcaccacccaggaggggtgaggctgcaccacccgggcctccaagacagggtggcatgtgtaggcagatggggcggtgggggggggggtgcagagaagca

SEQ ID NO: 32634 - DNA, 244 bp, Homo sapiens
  MAP TO AL161747.1; EXPRESSED IN BONE MARROW, SIGNAL = 0.46; SWISSPROT HIT: O14646, EVALUE 1.00e-18; EST_HUMAN HIT: AW342141.1, EVALUE 0.00e+00; NT HIT: S68108.1, EVALUE 9.00e-03
ccgtgaatctttgcagtacatttcatactgttgaatcatctgcctgctggccagactgccatggtacacaatagtgttcatttctgtccatgtattaaattctcgctcccagttagtaattgtggacagtggggcaatgaccaagaagggaccatggatgcccacattatatacttcctgcaagaaggcaatggactgaatagttttgcccaatcccatctcatcagccaggatgcagttctgc

SEQ ID NO: 32635 - DNA, 330 bp, Homo sapiens
  MAP TO AL132801.1; EXPRESSED IN BONE MARROW, SIGNAL = 1.6; NT HIT: gi11433623, EVALUE 6.00e-54; EST_HUMAN HIT: AA769448.1, EVALUE 9.00e-54; SWISSPROT HIT: P49657, EVALUE 4.90e+00
gttccccctactgagacagttcctcaggtcaaaaaagaaaaacatagcacacaagctaaaaatagagcaaaaaggaaacctccaaaaggaatgtttctttctcaagaagatgtggaggctgtttctgccaatgccactgctgctaccacggtgctgagacaactagacatggaattggtttcagtcaaacgacaggtactcataagcctggtcttggatgtaaaagaattaattagcactttagaggtgtttctgttattcatatatgtgaatgttctctttccgcaaatctcaaaggagcattttgtttcgaaggaattggacagatct

SEQ ID NO: 32636 - DNA, 97 bp, Homo sapiens
  MAP TO AC012177.2; EXPRESSED IN BONE MARROW, SIGNAL = 3.7; NT HIT: AF294296.1, EVALUE 2.10e-01; EST_HUMAN HIT: BE151679.1, EVALUE 3.00e-01; SWISSPROT HIT: O63848, EVALUE 7.20e+00
gtggtttctttcctctctcttatttagcttgttatggtaataactggaatattcatccagtatcacttctgcttcagtaagttcccttggtttttcc

SEQ ID NO: 32637 - DNA, 80 bp, Homo sapiens
  MAP TO AL158075.2; EXPRESSED IN BONE MARROW, SIGNAL = 1.8; EST_HUMAN HIT: BF686746.1, EVALUE 9.50e-01; NT HIT: Z28073.1, EVALUE 1.60e-01; SWISSPROT HIT: P39429, EVALUE 3.30e+00
atgtgcaccactgttgatatgctcatgcaaaccaagcacttctggggacaactggagaacaatggagtgagacagaagat

SEQ ID NO: 32638 - DNA, 308 bp, Homo sapiens
  MAP TO AP001242.1; EXPRESSED IN BONE MARROW, SIGNAL = 2.4; SWISSPROT HIT: P01605, EVALUE 2.00e-27; NT HIT: M27751.1, EVALUE 0.00e+00; EST_HUMAN HIT: AW378342.1, EVALUE 2.00e-67
ggggtattgttcagtttctctgttccgccaggctgagctaatttttgttttgggttgtagcacagtgtgagggtgcttattgccctgctgacagtaatatgttgcagcatcttcagcttccaggctactgatggtaaaggtgaaatctgtcccagatccactgccactgaacctcgaggggacccctgagatggactgggaagcatacttgatgaggagctttggggcttgatctggtttctgctggtaccagtataagtagttgccaatgccttcactggcctggcaggtgatggtgactttctccc

SEQ ID NO: 32639 - DNA, 81 bp, Homo sapiens
  MAP TO AC020897.3; EXPRESSED IN BONE MARROW, SIGNAL = 1.7; EST_HUMAN HIT: AW513635.1, EVALUE 4.00e-03
attcacaggaagttgaagaaaaacttatgagaaaagctccatatgccctttgcccagttttccccaacagtaacatcttgc

SEQ ID NO: 32640 - DNA, 433 bp, Homo sapiens
  MAP TO AL138831.2; EXPRESSED IN BONE MARROW, SIGNAL = 1.5; NT HIT: AB011108.1, EVALUE 0.00e+00; EST_HUMAN HIT: AU132437.1, EVALUE 0.00e+00; SWISSPROT HIT: P38682, EVALUE 6.70e+00
atggaaggaaaggtccagtctggtatggggctcattttgcaaggttatgagtctggctctgaagaagagggggaaattcatgaaaaggcaagaaatggaaataggtctagtactagatcttcaagtacaaaggggaaacttgaacttgtggacaataaaattactacaaagaaacgaagtaaaagcagatccaaagaacggactagacataggtctgataaaaagaaaagtaaggggggtattgaaatcgttaaagagaaaacaactaggagcaagtcaaaggagaggaaaaaatctaaaagcccatccaaaagaagtaagtctcaagatcaagcaaggaaatcaaaatcccctacccttagaaggcgatctcaagagaaaattggtaaggccagatctcctactgatgataaggttaaaattgaagataaaa

SEQ ID NO: 32641 - DNA, 152 bp, Homo sapiens
  MAP TO AC005323.1; EXPRESSED IN BONE MARROW, SIGNAL = 1.7; EST_HUMAN HIT: BF575306.1, EVALUE 4.00e-54; SWISSPROT HIT: P13535, EVALUE 8.00e-22; NT HIT: gi8923939, EVALUE 1.00e-80
atcaaaaatctcaaaaccagcaatgtccaagaccccgatgaagtactgcctgggctgcttggtgtccagctgctggttgatgcgggcaaccatccacaggaacatcttctcgtagacggctttggccagagcacctactgcgttggacacct

SEQ ID NO: 32642 - DNA, 138 bp, Homo sapiens
  MAP TO AC010361.3; EXPRESSED IN BONE MARROW, SIGNAL = 3.9; EST_HUMAN HIT: BE272325.1, EVALUE 4.60e-01; SWISSPROT HIT: P13462, EVALUE 5.30e+00
ttagcatgtaagaaaccggactatcctgaagattccatgctggagaaatcacacagatcacagagatggagcaagaggcccaagcagccccagatgtttcagtcccagctgtttgaatttttgcagatgatataccag

SEQ ID NO: 32643 - DNA, 186 bp, Homo sapiens
  MAP TO AC008636.4; EXPRESSED IN BONE MARROW, SIGNAL = 2.2; EST_HUMAN HIT: BF359679.1, EVALUE 9.00e-99; SWISSPROT HIT: Q10473, EVALUE 4.00e-13
agcacctgaagaagcctcttgaagactacatggcccttttccccagtgtgaggattcttcgaaccaagaaacgggaagggctgataaggacccgaatgctgggggcctcagtggcaactggggatgtcatcacattcttggattcacactgtgaagccaatgtcaactggcttccccccttgcttg

SEQ ID NO: 32644 - DNA, 237 bp, Homo sapiens
  MAP TO AC023890.3; EXPRESSED IN BONE MARROW, SIGNAL = 2.1; SWISSPROT HIT: O95067, EVALUE 7.00e-39; NT HIT: gi10938017, EVALUE 0.00e+00; EST_HUMAN HIT: BE122764.1, EVALUE 0.00e+00
ctccccggcttttgatgctcgccttaagaagtgtagtggcaagggtcgacccaactcaaatttcaattctttcaaaattagagtttccatttctcggatttgggaactggtataagcattgtctgtgatgtaaacaaagtcttcaatatttggagaaaacatctcctcatacttggaagccaagagcagagcagtaatcccaactaattgaagcttcttccgggaaactggctgaac

SEQ ID NO: 32645 - DNA, 205 bp, Homo sapiens
  MAP TO AC012178.2; EXPRESSED IN BONE MARROW, SIGNAL = 1.6; EXPRESSED IN PLACENTA, SIGNAL = 1.4; EST_HUMAN HIT: AW275728.1, EVALUE 1.80e-01; SWISSPROT HIT: P09081, EVALUE 3.80e+00
aatgcagaaaactgtttctgaagctcctgtttctgaaacacagaagcaagtttcaaaagcttgtcttgaaactcaaaatcatggaactgattctcctcctctttctgaatttcttatgtaacattctttccctgaagcagagaacaaagaaagtcctggcatcccaggctggcagaagcatcattaggaaattagggagaggatt

SEQ ID NO: 32646 - DNA, 148 bp, Homo sapiens
  MAP TO AC018552.2; EXPRESSED IN BONE MARROW, SIGNAL = 1.6; SWISSPROT HIT: P14770, EVALUE 2.30e+00; NT HIT: AB004097.1, EVALUE 1.30e+00; EST_HUMAN HIT: BE241639.1, EVALUE 5.00e-78
gtcaggaaaagcccaccgaagggccaagaaacacctgcctggggagcaacaacatgtacgacatcttcaacttgaatgacaaggctttgtgcttcaccaagtgcaggcagtcgggcagcgactcctgcaatgtggaaaacttgcagag

SEQ ID NO: 32647 - DNA, 158 bp, Homo sapiens
  MAP TO AL049831.2; EXPRESSED IN BONE MARROW, SIGNAL = 1.8; SWISSPROT HIT: P75310, EVALUE 6.80e+00; NT HIT: AF134569.1, EVALUE 5.60e+00; EST_HUMAN HIT: AW373694.1, EVALUE 5.40e-01
ccatgtcaagaattacttctttgataaaacttgtttgtttgttccttgcctgattagtctggctgtcattgatctttttctacaaacaaacatttaatttaatattcaatgattttataatgttattatttgcactgattttatttgtgttagtctta

SEQ ID NO: 32648 - DNA, 267 bp, Homo sapiens
  MAP TO AC023078.2; EXPRESSED IN BONE MARROW, SIGNAL = 3.6; EST_HUMAN HIT: BE439409.1, EVALUE 1.00e-61; SWISSPROT HIT: P30554, EVALUE 3.00e-08; NT HIT: AF123535.1, EVALUE 6.40e-01
atgacaggaaatgcagtcgtgctctggctcctgggcttccgcatgcgcaggaacgccttctccatctacatcttcaacctgtccatggccgacttcctctttctcagaagccacattatacgttttccgttaagcctcatcaatatcctccatcccatcttcaaaatcctcagccctgtgatgatgttttcctaccttgcaagcctgagctttctaagcgccatgagcaccgagcgctgcctgtacgtcctgtggcccatctggtag

SEQ ID NO: 32649 - DNA, 279 bp, Homo sapiens; identical to SEQ ID NO: 28564
  MAP TO AC013533.3; EXPRESSED IN BONE MARROW, SIGNAL = 6.2; SWISSPROT HIT: P56117, EVALUE 4.10e-01; NT HIT: AJ277557.1, EVALUE 1.70e-01; EST_HUMAN HIT: AA122270.1, EVALUE 1.00e-03

SEQ ID NO: 32650 - DNA, 150 bp, Homo sapiens
  MAP TO AP001328.1; EXPRESSED IN BONE MARROW, SIGNAL = 2.6; NT HIT: AB036532.1, EVALUE 2.00e-79; SWISSPROT HIT: P79733, EVALUE 7.00e-19
gtttttcaggcagaaaatccttttgattttatggaaaacatttctttagaaggaaaaacaaatttctttgagaaacgagtttcagagtatcagcgttttgcagttatggcagaaaccacagataacgtcttcaccttggatgcagatttt

SEQ ID NO: 32651 - DNA, 147 bp, Homo sapiens
  MAP TO AC006548.20; EXPRESSED IN BONE MARROW, SIGNAL = 1.8; SWISSPROT HIT: P21917, EVALUE 7.90e-01; EST_HUMAN HIT: AW082636.1, EVALUE 1.30e-01
tggcttggcaactgtgctgttgatgggcctgggcctcctgctgagtccctccctgccccacgcctgccccatgcaggcttggaagactcagtggagaaggctaggacagcctcaggtgcctgctgagtatgtgatcctcagagacag

SEQ ID NO: 32652 - DNA, 353 bp, Homo sapiens
  MAP TO AC009399.5; EXPRESSED IN BONE MARROW, SIGNAL = 2.3; NT HIT: AB023215.1, EVALUE 0.00e+00; EST_HUMAN HIT: BF082504.1, EVALUE 0.00e+00
tgattacccaaccagctgaaatgaatgttaaaactgagacagagagtgaagaggaggaagaagtcgcattagataatgaagatgaagaacaggaggcttcccaggaggagtctgcaggatttcttagagaaaatcaagccaaatatacaccctcattgacagctttggtagaaaatacacccaaagaaaattccatgaaagttcgtgaatggaataataaaggtggacactgctgcaaacttgagactcaggagctagagcctaaatttaacctgatgcagattcttcaagataatggcaatcttaggtatgtatcttttataattatattagtaaaactgataacagctaac

SEQ ID NO: 32653 - DNA, 227 bp, Homo sapiens
  MAP TO AC023851.2; EXPRESSED IN BONE MARROW, SIGNAL = 5.4; SWISSPROT HIT: O73673, EVALUE 1.00e+00; NT HIT: L10347.1, EVALUE 1.40e-01; EST_HUMAN HIT: F32386.1, EVALUE 5.20e-02
ctccgtggcagctgtgggggatggggaggcagagaatagagagcgcaggaatggtgcagtactccccaggagagcccagtccttgctgagcccattctgcaagccacattccttcccaaatgatccacaccgtgtccagaccctctcaaagagccattccaagctttgtgaacactctgcaactgtgcagaaggccagatcagaggcttttgtgcactaccagggag

SEQ ID NO: 32654 - DNA, 172 bp, Homo sapiens
  MAP TO AL159141.1; EXPRESSED IN BONE MARROW, SIGNAL = 1.6; SWISSPROT HIT: P45931, EVALUE 2.30e+00
gcgatgttcctcctggaagaactgcattcctttctggcacagacaagaccttctctcctgggagagtttgatctcaggcacgaggaggaagtggagaagggaggtttccatttgggaagccaacagcagttcagattcatctatcagcacttacttcctagagaacaggatt

SEQ ID NO: 32655 - DNA, 351 bp, Homo sapiens
  MAP TO AL132655.5; EXPRESSED IN BONE MARROW, SIGNAL = 4.8; SWISSPROT HIT: P06106, EVALUE 7.10e+00
aaaatcagccatttgggcggaaaggggagagggaagatgagcaaaggacagaacagtccaaaaggaagtgaagcagggtctgtccaaactggaactgaccccttccatccagagacgcgacccatgctaggctctggcctggggttcttggcttctcctgtcttccatgcagctatccctgaggacaaaatccatgaacccgaagagaaggaagagggagtcctttgggaggctaagtgtttcactgttctgcaagtccagcgacagagcttcctgagttattcccacctgtatgtggtcgccaatccggaggccaccaaagcctcagcgtacaggcaccaggagacctag

SEQ ID NO: 32656 - DNA, 200 bp, Homo sapiens
  MAP TO AL138717.2; EXPRESSED IN PLACENTA, SIGNAL = 1.6; EXPRESSED IN BONE MARROW, SIGNAL = 1.6; EST_HUMAN HIT: BE045560.1, EVALUE 1.00e-109; NT HIT: gi11034846, EVALUE 1.00e-109; SWISSPROT HIT: P53290, EVALUE 6.00e-14
gatgattacatggaagccctggccaggctccacctcacggtgaccagggcctacaaagtgaatactgacatcaacttcgaggtgtttattcataaagtggatggtctgtcagatgaccacaaaattgaaacccaaagagatattcaccagagggcaaacgatgaccttgcagatgctggattagaaaaaattcacctcag

SEQ ID NO: 32657 - DNA, 104 bp, Homo sapiens
  MAP TO AC008638.4; EXPRESSED IN BONE MARROW, SIGNAL = 2.4; SWISSPROT HIT: O99825, EVALUE 9.40e+00
agccacctcttaaggatgactttgggggccatgaacagacaactaactatgcccaggaaaatcatgagttcgtctgggtcaatagaataaatggcacacagaat

SEQ ID NO: 32658 - DNA, 119 bp, Homo sapiens
  MAP TO AC023404.2; EXPRESSED IN BONE MARROW, SIGNAL = 1.5; SWISSPROT HIT: Q03571, EVALUE 2.00e-04; NT HIT: gi11431873, EVALUE 1.00e-15; EST_HUMAN HIT: H71225.1, EVALUE 8.00e-61
tggcttatccttgatagtgggacttgatacacaaaggtagagttttccatcttcttcaatgcatgcatcaatgagagcctgcacagagctttcatcttgaaacagcaggaatgcatagc

SEQ ID NO: 32659 - DNA, 284 bp, Homo sapiens
  MAP TO AC018552.2; EXPRESSED IN BONE MARROW, SIGNAL = 1.7; NT HIT: D21877.1, EVALUE 1.70e-01; EST_HUMAN HIT: AW592568.1, EVALUE 8.00e-54; SWISSPROT HIT: Q91062, EVALUE 1.70e+00
atgctggttccgtgaagggacaaccatgtacgccctctatatcaccgtccacggctacttcctcatcaccttcctctttggcatggtggtcctggccctggtggtctggaagatcttcaccctgtcccgtgctacagcggtcaaggagcgggggaagaaccggaagaaggtgctcaccctgctgggcctctcgagcctggtgggtgtgacatgggggttggccatcttcaccccgttgggcctctccaccgtctacatctttgcacttttcaactccttgcaag

SEQ ID NO: 32660 - DNA, 81 bp, Homo sapiens
  MAP TO AL133467.1; EXPRESSED IN BONE MARROW, SIGNAL = 1.5; NT HIT: AF146687.1, EVALUE 6.50e-01
tcacagattcgattcccagccagtggactctgaaagggaggttgcgtgcaggaagcatattggggctattgtgagcaacac

SEQ ID NO: 32661 - DNA, 141 bp, Homo sapiens
  MAP TO AC022311.3; EXPRESSED IN PLACENTA, SIGNAL = 1.3; EXPRESSED IN BONE MARROW, SIGNAL = 1.5; NT HIT: L31891.1, EVALUE 1.30e+00; SWISSPROT HIT: P23955, EVALUE 9.10e+00; EST_HUMAN HIT: BE567127.1, EVALUE 1.90e+00
atgaacgatggacacaatgaaggtataagaacattagaaatcagaagaattgggttctcccaagttgaaccactgaaacagactagagtgacaactctggacaatctcattatcctcagtgatgaggacacctttattcat

SEQ ID NO: 32662 - DNA, 100 bp, Homo sapiens
  MAP TO AC009242.2; EXPRESSED IN BONE MARROW, SIGNAL = 1.5; NT HIT: M55584.1, EVALUE 8.40e-01
agctcttcacaccactggccttgaccctgtttctcacccaagtctcccaagccctggccttctcccaaggtctctcggccctgcccgcaccccatgacat

SEQ ID NO: 32663 - DNA, 362 bp, Homo sapiens
  MAP TO AC018711.2; EXPRESSED IN BONE MARROW, SIGNAL = 1.5; SWISSPROT HIT: P91943, EVALUE 6.60e-01; NT HIT: gi5174454, EVALUE 2.30e-01; EST_HUMAN HIT: BE892690.1, EVALUE 0.00e+00
ctccagttccgctaaaacatgagcagcatcctcattgttctcttggacctccagatcctcctcagggatggtctcccagttgccctgatgagcaaccagcgtgtgcactagttcatactgtccagggagcgccaggctgacccgagtctgagtcccataggtgaagcggaggcgccgaagcttacagctctcctcactgcccagcttggtggtgggaagcacctgcacccccaacagcagattcaacagctggcacttgacgttacaatcctggccgaggatcagtatgcaagggaggcagtccacaatctgctggaggtacttctcttccttaggtgggaaggaaatgcagctcagttggc

SEQ ID NO: 32664 - DNA, 208 bp, Homo sapiens
  MAP TO AL109658.5; EXPRESSED IN BONE MARROW, SIGNAL = 1.5; SWISSPROT HIT: P01641, EVALUE 3.80e-02; NT HIT: AF104900.1, EVALUE 4.90e-01; EST_HUMAN HIT: N86466.1, EVALUE 1.90e-01
ttgggtttcctctgaaactttacacagtaataggtgcctgcatcctcactggagacgttttgcagaagaatgctgaagtcattgttggaggcctgcaccgctgtctccttggggtgggagatgcctccaaagttgtaaatggcctcccggctcagaccagctccctggaaccacctgatgggtccagggggaccgtctccaagcactg

SEQ ID NO: 32665 - DNA, 139 bp, Homo sapiens
  MAP TO AC020714.2; EXPRESSED IN PLACENTA, SIGNAL = 1.5; EXPRESSED IN BONE MARROW, SIGNAL = 3.5; EST_HUMAN HIT: AU131774.1, EVALUE 1.00e-72; NT HIT: AF084520.1, EVALUE 8.00e-73; SWISSPROT HIT: P14351, EVALUE 3.60e-01
gcatgtgggattgtggttttgaagatatccagtgtgcagttgcaagttttatcccagatttctagggtaaatttttcaccattcagaataacaacattctctaaacagtttgtaccagatcgcgctaactgctcattgt

SEQ ID NO: 32666 - DNA, 245 bp, Homo sapiens
  MAP TO AC013557.3; EXPRESSED IN BONE MARROW, SIGNAL = 1.6; EXPRESSED IN HELA, SIGNAL =   2; SWISSPROT HIT: P39748, EVALUE 2.00e-38; EST_HUMAN HIT: BF035768.1, EVALUE 1.00e-117; NT HIT: gi6325465, EVALUE 1.00e-118
atgggcttgatgccgttctccatcacgcgaatagtgcggtagaacatgcctatcaggtggctggtggtctcaccctcctcgttctgcagcacatccccaccctggcgaacagcaatcaggaactgataagtgctcatagaggcatcaatggccaccttacggccaaagtagctcttgatgtcattctcccgggtggcactgggggccacatcagcaattagtttggccaggccttgaatacccat

SEQ ID NO: 32667 - DNA, 187 bp, Homo sapiens
  MAP TO AL035705.22; EXPRESSED IN BONE MARROW, SIGNAL = 1.7; NT HIT: gi5453965, EVALUE 2.00e-74; SWISSPROT HIT: Q28948, EVALUE 5.00e-21; EST_HUMAN HIT: BF340888.1, EVALUE 2.60e+00
agtttgataatatgaggatgacgaaagagttttagattttgaatttctcgttttatttttccaacaacatctaaactgcgaatcttctgtctatttaagattttaactgccactttatggcctgttaattgatgttctccaactaaagaaaagaaaaaggaaaaaaaatgtgctatcatatcaacat

SEQ ID NO: 32668 - DNA, 117 bp, Homo sapiens
  MAP TO AL138688.11; EXPRESSED IN BONE MARROW, SIGNAL = 1.7; EST_HUMAN HIT: C05789.1, EVALUE 6.60e-02; NT HIT: AF184110.1, EVALUE 2.20e-01
atggttattcttgtattttttaataaaattgacacgaataaatccttaaatttacaaaagaaaaatagcaagccagcatctttctcatttatcctggatttcttcggctctggacaa

SEQ ID NO: 32669 - DNA, 224 bp, Homo sapiens
  MAP TO AC025289.1; EXPRESSED IN BONE MARROW, SIGNAL = 1.8; SWISSPROT HIT: P35177, EVALUE 2.60e-01; NT HIT: AE000530.1, EVALUE 3.40e-02; EST_HUMAN HIT: BF371302.1, EVALUE 4.00e-95
ttgaccagcgttgagtttaaggaaagtaaagtatgcactgcaagagagtttgtacaggctgaatattctatctacaactttcctccacactttaataactccttcagttgcactttcatcaagttctgaaagccatgggcagcttgatatcaactgacgccagataacatcaaccatgtcatcttcttcgttgtcttcactctcagttatctgaagtgttatat

SEQ ID NO: 32670 - DNA, 88 bp, Homo sapiens
  MAP TO AL078590.27; EXPRESSED IN BONE MARROW, SIGNAL = 2.1; NT HIT: AE005164.1, EVALUE 7.20e-01; EST_HUMAN HIT: BE141035.1, EVALUE 2.70e-01
aggggatgagattgcccaggaagatgttatgcatgtgggtcaaatactgaatcctgaagaacatcaaatatgagtggcagatgaaagt

SEQ ID NO: 32671 - DNA, 282 bp, Homo sapiens
  MAP TO AC021876.2; EXPRESSED IN BONE MARROW, SIGNAL = 6.5; EXPRESSED IN PLACENTA, SIGNAL = 2.8; SWISSPROT HIT: Q29125, EVALUE 3.20e-01; NT HIT: U76705.1, EVALUE 0.00e+00; EST_HUMAN HIT: BE545535.1, EVALUE 0.00e+00
agcactagacaaactgaatggatttcagttagagaatttcaccttgaaagtagcctatatccctgatgaaatggccgcccagcaaaaccccttgcagcagccccgaggtcgccgggggcttgggcagaggggctcctcaaggcaggggtctccaggatccgtatccaagcagaaaccatgtgatttgcctctgcgcctgctggttcccacccaatttgttggagccatcataggaaaagaaggtgccaccattcggaacatcaccaaacagacccagtctaa

SEQ ID NO: 32672 - DNA, 138 bp, Homo sapiens
  MAP TO AC022211.2; EXPRESSED IN BONE MARROW, SIGNAL = 3.6; EST_HUMAN HIT: AW849909.1, EVALUE 4.00e-72; NT HIT: AF190864.1, EVALUE 3.00e-72; SWISSPROT HIT: P57257, EVALUE 3.10e+00
cttcatcagctctctgtccccgtccgaagagtcctcctggctgtaatgaagcagcatctcactgagcagtctcacgttgttgttaacttcctctaacgtgtgcagacgcttggtcaccttctggatccgtgcctcgtc

SEQ ID NO: 32673 - DNA, 246 bp, Homo sapiens
  MAP TO AL118518.13; EXPRESSED IN PLACENTA, SIGNAL = 7.6; EXPRESSED IN BONE MARROW, SIGNAL = 6.5; EST_HUMAN HIT: AA808055.1, EVALUE 8.80e-01; SWISSPROT HIT: P26535, EVALUE 3.90e+00
accccgattctcatactgcagtttctaacacgtgactatggtggtgatgtgtcatttactgagacaagcagccttctttcctcatggaaggacacccccatttttggagagatcaaacatctgagctcaagagctcaagaggacagcaaacatctccttaaagtcctacacagctgcaaagcaaacactgctccatcctggggacgaggggaggggagaacacattgtccacctttagacttgcat

SEQ ID NO: 32674 - DNA, 165 bp, Homo sapiens
  MAP TO AC019248.3; EXPRESSED IN BONE MARROW, SIGNAL = 3.7; SWISSPROT HIT: P98070, EVALUE 8.00e-09; EST_HUMAN HIT: BF105067.1, EVALUE 4.00e-73; NT HIT: gi4557502, EVALUE 3.00e-88
aatctgtcttgaacaccaggagcatactattattgctgctcttcacatttggtgggcgcttggaaccgcagaatttgccaagaaggggatcgctggtattggcaccatcgtaaattgccaggtagtcatgggagcaggaggtggagggaaccacatcaaaatcac

SEQ ID NO: 32675 - DNA, 78 bp, Homo sapiens
  MAP TO AC023851.2; EXPRESSED IN BONE MARROW, SIGNAL = 1.5; NT HIT: AL163282.2, EVALUE 1.00e-02; EST_HUMAN HIT: R12027.1, EVALUE 9.20e-01
atgggtggtatttttaatatcattattgccattgcaaacccaagcaaaatgaatatgatcatttcagcaaaatccctg

SEQ ID NO: 32676 - DNA, 99 bp, Homo sapiens
  MAP TO AC011024.3; EXPRESSED IN BONE MARROW, SIGNAL = 2.1; SWISSPROT HIT: P76262, EVALUE 7.20e+00; EST_HUMAN HIT: AI051939.1, EVALUE 4.80e+00; NT HIT: X66435.1, EVALUE 5.30e-02
gtggaggagctgcagaagacagcagatgtcgttgaggtggggccttcccaggctacagcagcagaacctgattccatcagaatagacttatgcttgtga

SEQ ID NO: 32677 - DNA, 149 bp, Homo sapiens
  MAP TO AC008384.2; EXPRESSED IN BONE MARROW, SIGNAL = 2.3; SWISSPROT HIT: P04514, EVALUE 9.00e+00; EST_HUMAN HIT: BF183921.1, EVALUE 7.90e+00; NT HIT: Z72663.1, EVALUE 5.30e+00
tgttaaaaattccttggtttctgtgacactggacacatctatttccttttttcctctcttcagcctgctgtctttgcatctcaagcaaaagaggcaagaagataggtaccccaaaatgaccaccttagtctcctctgtattatggttct

SEQ ID NO: 32678 - DNA, 321 bp, Homo sapiens
  MAP TO AC010618.4; EXPRESSED IN BONE MARROW, SIGNAL = 4.9; SWISSPROT HIT: P06600, EVALUE 2.40e-01; EST_HUMAN HIT: BF030666.1, EVALUE 1.20e+00
ctcatggctgacgccgtggccaccttcctgcagctggctgaccagtgtctgacgacggccctcaactgtgaccaggctgcccagaggctggagagagtcagggggcgcgtgctgaaggtgtgttctgtgggtacggggtggcatggggtggcagtgggcctgggtgctcagatggttgctggacgcaccgctgggtgtgttgtgcagaaattcaaatcggacagcgggttggcgcagaggaggttcatccgaggctggggtctctgcatctttttaccttttgtgctgagccaactcgagccaggctgcaaaaaggtgagt

SEQ ID NO: 32679 - DNA, 292 bp, Homo sapiens
  MAP TO AC017005.3; EXPRESSED IN BONE MARROW, SIGNAL = 1.6; SWISSPROT HIT: P26808, EVALUE 6.00e-22; EST_HUMAN HIT: C18429.1, EVALUE 2.70e-01; NT HIT: M32788.1, EVALUE 2.00e-26
tgtttaaatccagtaactttactcccatatccagacttcaacacacatgtccatgactgccaacaactgttagagaccagagaaattggccgacatgatctccaagatgtgcccttaaaggaggcagacaccactgtggatacagagagtagcagcctccttgagtggggagttcaaaagactggtgcagccatcaccatggagatggatatcctgtgggcccaagttctgccggctggcacctcagctcagagagctgagttggttgccctgacacaggctctccgattgg

SEQ ID NO: 32680 - DNA, 108 bp, Homo sapiens
  MAP TO AC019219.2; EXPRESSED IN BONE MARROW, SIGNAL = 1.5; EST_HUMAN HIT: R27615.1, EVALUE 1.40e+00; NT HIT: AE004668.1, EVALUE 2.30e-01
acaaatgaatcaggctctgtggctccggggaactggaaatcttcacacaaaggcagagaaagcccttccagaatatttctacactatttcctacactaatcactcaag

SEQ ID NO: 32681 - DNA, 107 bp, Homo sapiens
  MAP TO AC004254.1; EXPRESSED IN BONE MARROW, SIGNAL = 1.9; EST_HUMAN HIT: AI559986.1, EVALUE 3.40e-01
caggcctggagctgaggctcaacatcaggaccatcctggaaaaggcggaccacagccactctcacttcttaggaagctccagggtccaaatgttagtcttgtgtctg

SEQ ID NO: 32682 - DNA, 142 bp, Homo sapiens
  MAP TO AC018711.2; EXPRESSED IN BONE MARROW, SIGNAL = 1.5; EST_HUMAN HIT: BE252310.1, EVALUE 2.00e-74; SWISSPROT HIT: P04048, EVALUE 1.40e-02; NT HIT: AB007941.1, EVALUE 1.00e-74
gggctcgcccagaacgtcttcctgtgtttgatgaggagtgctggcagttgatggaagcctgttgggatggcgaccccttgaagaggcctctcttgggcattgtccagcccatgctccagggcatcatgaatcggctctgcaa

SEQ ID NO: 32683 - DNA, 253 bp, Homo sapiens
  MAP TO AC008891.4; EXPRESSED IN BONE MARROW, SIGNAL =   2; EST_HUMAN HIT: BF032938.1, EVALUE 1.50e-02; NT HIT: gi6754553, EVALUE 6.10e-01; SWISSPROT HIT: Q28039, EVALUE 5.00e-06
ctcctccgttccggtgacacaggtaaggagaacgccacacgctgcccagcccgacagagaaggcaatctggatcaagatgctctcagtgtttttaggttgaacgaagtagttttgggtcttggtggcctggatctccttggtcttgagcctccaggacagggagttgggggtctggaatttcttagaagactctttctctgtcagataattcctcaagggactccgtggctcttctttcaggcccggtaaatc

SEQ ID NO: 32684 - DNA, 410 bp, Homo sapiens
  MAP TO AL049872.3; EXPRESSED IN BONE MARROW, SIGNAL = 1.5; NT HIT: gi11434816, EVALUE 1.00e-122; SWISSPROT HIT: Q14149, EVALUE 6.00e-05; EST_HUMAN HIT: BE874505.1, EVALUE 4.00e-44
ctatgcaatgaaacagcaatctgaaataagttccaaagactgtataccagacagtgcttgttgtagtctgaacacttcttccactgatgcactctgggcaagaattctttccttttctgtcatagtatcactttgcttcacagcagaaggctgcaatttactacattccaatttcaagttttcacattcttccattatttgtctcttttccacatttagctgttcttgttctctcctcaaaatatctctgtcattttctgcagaagataattttttatttatatcttttattttatcctcaagttgttccatttttttggtagactccactttttctatttgtagaacttgaatagttttttgcatctcatagattttagagagatcagtttctataactccagagccac

SEQ ID NO: 32685 - DNA, 133 bp, Homo sapiens
  MAP TO AC007225.2; EXPRESSED IN BONE MARROW, SIGNAL = 1.6; SWISSPROT HIT: Q9Y5N6, EVALUE 9.00e-17; NT HIT: gi7657426, EVALUE 4.00e-59; EST_HUMAN HIT: AU118020.1, EVALUE 6.00e-59
gccttttgagcactggcagcattttccaaaatttttcttttccattcttcataatcctgtgtcagatcttcatctttctgtggtttatgtggcatctcctctaccttctccatttctgacagaaaattatcaa

SEQ ID NO: 32686 - DNA, 176 bp, Homo sapiens; identical to SEQ ID NO: 28731
  MAP TO AC018835.3; EXPRESSED IN BONE MARROW, SIGNAL = 1.6; NT HIT: gi11432889, EVALUE 3.00e-82; SWISSPROT HIT: P14781, EVALUE 2.00e-10; EST_HUMAN HIT: T78768.1, EVALUE 4.00e-08

SEQ ID NO: 32687 - DNA, 93 bp, Homo sapiens
  MAP TO AC022013.2; EXPRESSED IN BONE MARROW, SIGNAL = 2.1; EST_HUMAN HIT: AW294742.1, EVALUE 2.90e-01; NT HIT: gi11693133, EVALUE 3.00e+00
cttgagattctgctccttcttctgtacgtggccagaggttggagcgatgctctctagaggcgataatgcaaaggatatctgtcctggggactc

SEQ ID NO: 32688 - DNA, 127 bp, Homo sapiens
  MAP TO AC008770.3; EXPRESSED IN BONE MARROW, SIGNAL = 1.5; EST_HUMAN HIT: BE729270.1, EVALUE 5.00e-53; NT HIT: U09367.1, EVALUE 4.00e-37; SWISSPROT HIT: P52737, EVALUE 1.00e-08
gactcagtggtctttgaggatgtagatgtgagcttcacccaggaggagtgggctttgctggatccttcccagaagaatctctacagagatgtgatgcaggaaaccttcgggaacctgtcctctatag

SEQ ID NO: 32689 - DNA, 282 bp, Homo sapiens
  MAP TO AC008753.5; EXPRESSED IN BONE MARROW, SIGNAL = 2.2; EST_HUMAN HIT: BE959455.2, EVALUE 6.50e-02; NT HIT: M14966.1, EVALUE 1.70e-01; SWISSPROT HIT: O15553, EVALUE 2.00e-06
atgctacgaaccgcaggcagggacggcctctgtcgcctgtccacctacttggaagaactcgaggctgtggaactgaagaagttcaagttatacctggggaccgcgacagagctgggagaaggcaagatcccctggggaagcatggagaaggccggtcccctggaaatggcccagctgctcatcacccacttcgggccagaggaggcctggaggttggctctcagcacctttgagcggataaacaggaaggacctgtgggagagaggacagagagaggacctg

SEQ ID NO: 32690 - DNA, 114 bp, Homo sapiens
  MAP TO AC018814.3; EXPRESSED IN BONE MARROW, SIGNAL = 1.5; EST_HUMAN HIT: BE257552.1, EVALUE 1.50e+00; NT HIT: gi11416258, EVALUE 3.90e+00
ttacgcctttttgttgtgcagagcaagcacatgattcatcagtttttgttttttatctttagcatgcttgtttttctttttctgtatgtggtgctgtggcttgttgttagacat

SEQ ID NO: 32691 - DNA, 110 bp, Homo sapiens
  MAP TO AC010369.3; EXPRESSED IN BONE MARROW, SIGNAL = 1.5; EST_HUMAN HIT: BE886059.1, EVALUE 2.00e-55; SWISSPROT HIT: P51251, EVALUE 4.80e-01; NT HIT: AF076925.1, EVALUE 3.70e+00
caccttgtccttcagagatccagacagagcctcgtgaaacgttagaatacaaagcagcacttgagctagaaatgtggaaggagatgcaagaagatatatttgaaaatcag

SEQ ID NO: 32692 - DNA, 99 bp, Homo sapiens
  MAP TO AC009818.4; EXPRESSED IN BONE MARROW, SIGNAL = 1.6; EST_HUMAN HIT: BF025981.1, EVALUE 7.80e-02; SWISSPROT HIT: Q13753, EVALUE 9.50e+00
ctttgtcacccttgtccttgccacttctctcgcctttgtcctatctatattcaaactcaggttctttttcttgtacttctgtggcttggaacaaaccat

SEQ ID NO: 32693 - DNA, 149 bp, Homo sapiens
  MAP TO AL157882.1; EXPRESSED IN BONE MARROW, SIGNAL = 2.7; NT HIT: gi7662451, EVALUE 9.00e-79; SWISSPROT HIT: Q09296, EVALUE 4.00e-04; EST_HUMAN HIT: BF096163.1, EVALUE 1.00e-78
aaatgaatatgatcttattctgaactcagacataaacagcaatcattatcatcagtggttttactttgaagtcagtggaatgcgaccaggtgttgcttacaggtttaacatcattaactgtgaaaagtccaacagtcagtttaattatg

SEQ ID NO: 32694 - DNA, 100 bp, Homo sapiens
  MAP TO AC011352.2; EXPRESSED IN PLACENTA, SIGNAL = 1.4; EXPRESSED IN BONE MARROW, SIGNAL = 3.5; EST_HUMAN HIT: AW994941.1, EVALUE 3.00e-41; NT HIT: U57326.1, EVALUE 2.10e-01; SWISSPROT HIT: P31916, EVALUE 4.20e+00
aatggcaactttggcttttgatgtttttgaatttctgaaggaatttgtaacttcaccagttttggatatttcactttctctaatgtccagggacaggtat

SEQ ID NO: 32695 - DNA, 112 bp, Homo sapiens
  MAP TO AC020722.2; EXPRESSED IN BONE MARROW, SIGNAL = 2.3; NT HIT: U87514.1, EVALUE 9.70e-01
ttaaatctctacttggatgttgtagtaagctttcttattattttcattactattattgccaccattattgtcatcatcatcatcatcatcatcatcataattggctttctcc

SEQ ID NO: 32696 - DNA, 112 bp, Homo sapiens
  MAP TO AL121654.1; EXPRESSED IN PLACENTA, SIGNAL =  12; EXPRESSED IN BONE MARROW, SIGNAL =  15; NT HIT: gi9631294, EVALUE 3.80e+00
cattcttgtctgtaacctaagggcattcttgttcattttctttatttacaacaaagtttactttaaaagaaagaaaatgttttttcaatatattccattgttcagatttttt

SEQ ID NO: 32697 - DNA, 115 bp, Homo sapiens
  MAP TO AC022008.2; EXPRESSED IN BONE MARROW, SIGNAL = 2.3; NT HIT: AE000711.1, EVALUE 2.50e-01; EST_HUMAN HIT: AI267293.1, EVALUE 1.50e+00
tcaatatttctgtactcgccaatataacatcacaggtacaattggttccattgttagtttgacaatattggctgcttcccttcttcctatctgatccttttcatttatctcctct

SEQ ID NO: 32698 - DNA, 103 bp, Homo sapiens
  MAP TO AL135905.2; EXPRESSED IN BONE MARROW, SIGNAL = 2.3; NT HIT: gi11417529, EVALUE 5.60e-02; SWISSPROT HIT: Q09729, EVALUE 9.40e+00; EST_HUMAN HIT: AA011698.1, EVALUE 2.00e-51
ctgattgttaggcttgtggtcagaatcccagcacatgaactggcactgctgctgggaattatgagtcaccctttcatgttcttcctggtgttgaagcaagtct

SEQ ID NO: 32699 - DNA, 151 bp, Homo sapiens
  MAP TO AC018388.4; EXPRESSED IN BONE MARROW, SIGNAL = 1.9; EST_HUMAN HIT: AI818592.1, EVALUE 8.00e+00; NT HIT: Z74060.1, EVALUE 8.70e-02; SWISSPROT HIT: P50229, EVALUE 6.00e-01
ctgaagctcctggctttaaccaaaggtcctgtgtccctttctctactggaatgagcattttgggtctccatatcttgtgggagctgaaagccctgtccactgcgtcagaatctggaaccaagcaggtcctgccatgctcatctttggaggt

SEQ ID NO: 32700 - DNA, 469 bp, Homo sapiens
  MAP TO AC012664.3; EXPRESSED IN BONE MARROW, SIGNAL = 2.3; SWISSPROT HIT: P34384, EVALUE 2.00e-08; NT HIT: AE002179.2, EVALUE 1.20e+00; EST_HUMAN HIT: BE264998.1, EVALUE 0.00e+00
cctgatgaaaagtgcagtcctctcaggtccactgctctgtaacagggctccaataactgcaaagaaagtctgctgtaacacagctgggggcactgggaattcttcactcagtgttaactgctccacagccaagtttctagccacgtgacacacgacttcctcaccagtgagaaagtcaacaagattttttatgccttcagtgggcatgtctgggtactcgtcttcaagaaactgtgtaaggcaagtctgtgaaaaagatgtcccttgttcggatagttcttgattacttttaagattcagaagaacagcttctttctctatcccaagttgttggcgtttggcctcctcacttttaatatagcagctattaacaaatgcagttttgagaagatctaaggaaaagttttcctgtaaccgatgtccaaaagcttgtatttctgcatggtaatcccagttcggcttctctgaa

SEQ ID NO: 32701 - DNA, 155 bp, Homo sapiens
  MAP TO AC005323.1; EXPRESSED IN BONE MARROW, SIGNAL = 2.4; EST_HUMAN HIT: AL042514.2, EVALUE 2.00e-68; SWISSPROT HIT: P13535, EVALUE 2.00e-23; NT HIT: gi11024711, EVALUE 4.00e-78
atcaaagatctcaaagccagcaatgtccaagaccccgatgaagtactgcctgggctgcttggtgtccagctgctggttgatgcgggtgaccatccacaggaacatcttctcgtagatggctttggccagagcacccactgcattgtacaccttca

SEQ ID NO: 32702 - DNA, 185 bp, Homo sapiens
  MAP TO AC008865.3; EXPRESSED IN PLACENTA, SIGNAL = 1.9; EXPRESSED IN BONE MARROW, SIGNAL =   3; SWISSPROT HIT: P15541, EVALUE 8.00e-07; NT HIT: AJ131034.1, EVALUE 1.00e-100; EST_HUMAN HIT: AL080029.1, EVALUE 8.00e-90
gtgtcatcaatcttacagaagaagtgctgtgggtcaaagtgaatataaacatgaatggttattatattgtacactatgcagatgatgattgggaagcactaatccatcagttgaaaataaatccttatgttctgagtgacaaagaccgagccaaccttatcaacaacatctttgaacttgcaggg

SEQ ID NO: 32703 - DNA, 217 bp, Homo sapiens
  MAP TO AC008569.3; EXPRESSED IN BONE MARROW, SIGNAL = 1.6; SWISSPROT HIT: Q29024, EVALUE 1.00e-26; EST_HUMAN HIT: BE791491.1, EVALUE 1.00e-100; NT HIT: gi11424480, EVALUE 2.00e-99
gtgtctgtgttcttcggtggtctctccatcaagaaggatgaagaagtgttgaagaagaactgtccccatgtcgtggtggggaccccgggccgcatcctggcgctcgtgcggaataggagcttcagcctaaagaatgtgaagcactttgtgctggacgagtgtgacaagatgctggagcagctgggtgagtcctctgcccttgcagccccagctgaga

SEQ ID NO: 32704 - DNA, 171 bp, Homo sapiens
  MAP TO AC008753.5; EXPRESSED IN BONE MARROW, SIGNAL = 1.5; EST_HUMAN HIT: AA430427.1, EVALUE 5.90e-01; SWISSPROT HIT: P29315, EVALUE 1.00e-08; NT HIT: M19969.1, EVALUE 3.90e-01
cacagtttctggagtctgcaggcgggatgttgcagcccctcagccagcaaccacaggccccagtctcccaggtcgttgaaactcaagtccagctcccggaggttgtggttggcctggagcaccacagaaagaccctcacaggcggcagagcccagccggcagatgcccaac

SEQ ID NO: 32705 - DNA, 271 bp, Homo sapiens
  MAP TO AL157883.2; EXPRESSED IN BONE MARROW, SIGNAL = 1.6; NT HIT: AL161580.2, EVALUE 6.50e-01; SWISSPROT HIT: P29351, EVALUE 5.80e+00
gctaaagattaacatccagcccaccaggttctccatgatctgcctcacctacctgtctagccctatattatttcctgttgtccccaacattatgcactttaaccatctggccttctttctgtccttccaaaatgtcatgttctttcttgtctacggatctttgaacagactcctttcgcctggtaccatcatctccccacaaactcacccagaaaactcttatttatctggaagatgcagagcaaatgaaattttatcatgcaagtcttcc

SEQ ID NO: 32706 - DNA, 200 bp, Homo sapiens
  MAP TO AC007345.2; EXPRESSED IN BONE MARROW, SIGNAL = 1.7; EST_HUMAN HIT: AA490558.1, EVALUE 1.00e-109; NT HIT: AL161547.2, EVALUE 2.00e-03; SWISSPROT HIT: P24394, EVALUE 4.40e-01
gtggggccgatggagagagattctatctcatggccgtttcaaaaggcagctaaatgaacacgatgtagagataatttgccgagctctcttagcatattgccttgttcactaccgaggagatgagaagattaaaggtttcatatgggatctcattactccaactgaagatggacagacacgagagctacagaatcatctag

SEQ ID NO: 32707 - DNA, 138 bp, Homo sapiens
  MAP TO AC020912.3; EXPRESSED IN BONE MARROW, SIGNAL = 1.7; NT HIT: AF048693.1, EVALUE 3.10e-01
atgcgtgaatgggaatattgcagtcctcacatcttgcagaagatgctgcagaagtccatcctctgcttgttctccatgctgattcgggctagaaagagcttggtcaccaagacatgggaagatcatgcaagagcgtaa

SEQ ID NO: 32708 - DNA, 345 bp, Homo sapiens
  MAP TO AC011469.3; EXPRESSED IN BONE MARROW, SIGNAL = 1.8; EST_HUMAN HIT: D31124.1, EVALUE 4.00e-90; NT HIT: U78170.1, EVALUE 1.00e-05; SWISSPROT HIT: O15211, EVALUE 8.00e-03
tcacacacccaggaccctatatctcagtacccttggaagcccagcctgggcggggccaggggggctcaccgtgagcaggtgcagcagatcctcattggcgctgcagggtggatgctgcccttggagggccaccagctcctgcagccgcaggtagaggttgttcagcttgggtaggtgcaggcggccgtcaggcaacctgtcgggctgtgcctcatgcagggacaccaggtccttgaggtgcacgcccagtacaggcagccggaaacccgcgcagccagcccaggtgcggcggtagcgggcgtagttgttgtgggaggcaaggagctcagtgagctccaggagggc

SEQ ID NO: 32709 - DNA, 111 bp, Homo sapiens
  MAP TO AC008895.4; EXPRESSED IN BONE MARROW, SIGNAL = 1.8; SWISSPROT HIT: P41697, EVALUE 9.30e+00; EST_HUMAN HIT: H48714.1, EVALUE 7.00e-55; NT HIT: U14159.1, EVALUE 6.10e-02
atgatatttaaggctgagactttggaagctgaggcagacaaagtcagtgaggatggaagcttcatggagctgaaagaacttcatgtgttcaaagagttgaaagaagcttag

SEQ ID NO: 32710 - DNA, 151 bp, Homo sapiens
  MAP TO AC007539.8; EXPRESSED IN BONE MARROW, SIGNAL = 2.1; NT HIT: AB037815.1, EVALUE 1.40e+00; EST_HUMAN HIT: BF540777.1, EVALUE 5.10e-01; SWISSPROT HIT: P09401, EVALUE 7.90e-01
aaagcccagacatagagcctggggtacagcagcccttatgtgcgggactagatcttggtgtccagtcatgggctggggcaatgccacttatcattgcctgctgcctggaagccctgtcccccaacctgtcttcaggatggagcccaactaa

SEQ ID NO: 32711 - DNA, 128 bp, Homo sapiens
  MAP TO AC004624.6; EXPRESSED IN BONE MARROW, SIGNAL = 1.4; SWISSPROT HIT: P13605, EVALUE 3.10e+00; NT HIT: AF268477.1, EVALUE 2.80e-01; EST_HUMAN HIT: AL157665.1, EVALUE 4.20e-01
gttgagactgaggttcccatggaggcggacggccagcgaccagcatgcatgcctggcacagagcaggtcaccacagcagactttaccaatggactgcgtgggggaatgtgagtgcccagccctctgga

SEQ ID NO: 32712 - DNA, 164 bp, Homo sapiens
  MAP TO AC008166.1; EXPRESSED IN BONE MARROW, SIGNAL = 1.5; SWISSPROT HIT: O18638, EVALUE 4.50e-01; EST_HUMAN HIT: BF574346.1, EVALUE 2.20e+00; NT HIT: AL163278.2, EVALUE 1.50e+00
cctccatcagatacgagatcataggtgaacaatcacggccctactggaaagctgagggcagagtgccaaaaccagttggaaaacccacaagaagcatctgtggtgcagaaaaggagggtagcaagaatatggcagactgatccgcaaggaacctggagtccctc

SEQ ID NO: 32713 - DNA, 97 bp, Homo sapiens
  MAP TO AB016897.1; EXPRESSED IN BONE MARROW, SIGNAL = 1.3; NT HIT: AF213884.1, EVALUE 2.00e-17; EST_HUMAN HIT: AA451815.1, EVALUE 6.00e-15; SWISSPROT HIT: P56821, EVALUE 3.20e+00
acaagggcccttgccagatgctggcaacttgatattggacttgtcagcctccagaactgtgagaaatacatttctgttcattgtagattacccagtc

SEQ ID NO: 32714 - DNA, 123 bp, Homo sapiens
  MAP TO AL022329.9; EXPRESSED IN BONE MARROW, SIGNAL = 1.4; EST_HUMAN HIT: BE812373.1, EVALUE 4.00e-01; NT HIT: AL163281.2, EVALUE 2.70e-01
tacgctggatgtccagtacctgaaatccctgactacagtggctttgggacaagtcatctttccatattttcatgtttcccattgtaattggtgggcacacgtccactggatttgagactatag

SEQ ID NO: 32715 - DNA, 271 bp, Homo sapiens
  MAP TO AC009266.1; EXPRESSED IN PLACENTA, SIGNAL = 1.2; EXPRESSED IN BONE MARROW, SIGNAL = 1.4; NT HIT: gi11426756, EVALUE 1.70e-01; EST_HUMAN HIT: BE793085.1, EVALUE 6.20e-02; SWISSPROT HIT: P73179, EVALUE 1.10e+00
  unsure 233
aattatatgtgtaccaagatctaattcttctcagtcctctggttatggggcagagccagaggcagctcaatctcctgggaggtcacctgcagcatcaagtagccttgtccaggttgtatggtttgtcacaacatctccacatgaacagacatactgtgtaaaattagtgcccgttatgccatttcatgaagcagaatgcagcccaaaaggggttctgccacctagacacatanctttagtagccagtgacaaaatgcttaatagtacttca

SEQ ID NO: 32716 - DNA, 147 bp, Homo sapiens
  MAP TO AC007463.3; EXPRESSED IN BONE MARROW, SIGNAL = 1.4; NT HIT: gi9055167, EVALUE 3.30e-01; EST_HUMAN HIT: BF572303.1, EVALUE 1.30e-01; SWISSPROT HIT: Q01850, EVALUE 6.90e+00
gcctcctctgcacgggagagcaatgaggctgtccctgaagatacttcagaagctcaagaacaacgtgcgtgtaaacaatgtgtcctgctggctccaaaccagcatggaaataaatcacagccactttgaacattgttatcaaatacc

SEQ ID NO: 32717 - DNA, 130 bp, Homo sapiens
  MAP TO AL034406.1; EXPRESSED IN BONE MARROW, SIGNAL = 1.3; NT HIT: Z73597.1, EVALUE 7.30e-02; EST_HUMAN HIT: BF526042.1, EVALUE 6.70e+00; SWISSPROT HIT: P19967, EVALUE 5.40e+00
gaggtctgctatgttcattgaaaacatgcaatacttctatgattaccacttgttctctcttttcatccagatgttggctgttgtacagcatgtgcttaagagcagggaggtaatttatggtttggtgcat

SEQ ID NO: 32718 - DNA, 500 bp, Homo sapiens
  MAP TO AL022320.23; EXPRESSED IN BONE MARROW, SIGNAL = 1.4; NT HIT: gi6754245, EVALUE 1.20e+00; EST_HUMAN HIT: BF679515.1, EVALUE 4.70e-01; SWISSPROT HIT: Q33568, EVALUE 7.10e+00
tggagatgaatgcccatttgggggaggaactggatagtggtgaaaggctttcgctctgaggcctcacctaaataattatgggaacttttgagcaactcgttaggtgaagacatcaacagtctacagaagagctgcaaagagcacagcaagatgatttagggaaatataacatatgtagtttggtgtagtgacagctgggagagagaaatgttcataatatttgaaggttgtgtgcagtacacttaaaaaaactaaaatgagctgggtaatgacaaattcatgaagggaggagaaaaatcttatctgggtatcatatcgatggttagagacaacttttaagatatttaaaacaacaacaaactctaggacagttaaaaagtgcacatgaagactttccactaaaatcggaaccaaaaaaattgtctttcgtatcatacaaaaactctgaatatcatgaaggtggcatttcacatcagtggagaaatgatgaattcagtgaa

SEQ ID NO: 32719 - DNA, 91 bp, Homo sapiens
  MAP TO AP000111.1; EXPRESSED IN BONE MARROW, SIGNAL = 1.6; NT HIT: AF036959.1, EVALUE 1.90e-01; EST_HUMAN HIT: BE891349.1, EVALUE 2.80e-01; SWISSPROT HIT: P48829, EVALUE 7.30e+00
atgctgaatgtgggacattctccaagacaatcgacctggtctctgcaacaaaccaagggaagggggattaaaagagaaaataatggagact

SEQ ID NO: 32720 - DNA, 184 bp, Homo sapiens
  MAP TO AC009313.2; EXPRESSED IN BONE MARROW, SIGNAL = 1.9; EXPRESSED IN PLACENTA, SIGNAL = 1.4; NT HIT: AB018268.1, EVALUE 1.70e+00; EST_HUMAN HIT: BE267894.1, EVALUE 1.60e-01; SWISSPROT HIT: P07224, EVALUE 1.00e+00
tagttcctgtatgcattgcagactttgacccctgcaagtgaagatttatcttcatctacttttacacactcagctttggcagaggtctttaaagtccatcttctagaacaaccgtccatttgataattagattctctaatacatttctggctagctttttgcacgtcagaaacaccagaagaac

SEQ ID NO: 32721 - DNA, 271 bp, Homo sapiens
  MAP TO AC009313.2; EXPRESSED IN PLACENTA, SIGNAL = 1.2; EXPRESSED IN BONE MARROW, SIGNAL = 1.7; NT HIT: D14711.1, EVALUE 4.20e-02; EST_HUMAN HIT: BE536093.1, EVALUE 2.50e-01; SWISSPROT HIT: P51675, EVALUE 5.80e+00
aggagagaatagatattgaggaacaaataacatatcttatatatatggtctcactgaagttttacttaatttttactgtatatatggtctcaatttttattgtaaccctacaactatgtatgatgtgaaaagtgatgttcagagttcagtaaatggctaggaaattgcagatctggggtctgaatttaaaggctgtattttttttcagtctatttagtaaagtgtttaggagggaatatataaatgttattgaataaacaaaagtcacagt

SEQ ID NO: 32722 - DNA, 114 bp, Homo sapiens
  MAP TO AL035682.16; EXPRESSED IN PLACENTA, SIGNAL = 1.2; EXPRESSED IN BONE MARROW, SIGNAL = 1.8; NT HIT: AF288403.1, EVALUE 2.50e-01; EST_HUMAN HIT: BF110298.1, EVALUE 6.00e-03; SWISSPROT HIT: O73689, EVALUE 1.40e+00
cttttcaggctgttgtgaggatgctaagcattcacataggtaacagtgcccagcacagtgcctggtgttcaatagctggtggttatgatggttagtaaaatccccatgcttcat

SEQ ID NO: 32723 - DNA, 165 bp, Homo sapiens
  MAP TO AC006427.13; EXPRESSED IN BONE MARROW, SIGNAL = 1.4; NT HIT: X58743.1, EVALUE 2.00e-03; EST_HUMAN HIT: BE700353.1, EVALUE 1.00e-04; SWISSPROT HIT: P09594, EVALUE 1.80e+00
aatgtagcatcatccaggagaatgagaaaggtcaccaaggagcatgcagaaagaaaaaaaaggaaaacagctacagactatggggcctgaggtatgcagaagaagtccacattgtaattcctggaatctgtgactatgttacctcacgtggcaaaagggactgag

SEQ ID NO: 32724 - DNA, 141 bp, Homo sapiens
  MAP TO AL022329.9; EXPRESSED IN BONE MARROW, SIGNAL = 1.4; NT HIT: AF106860.2, EVALUE 8.00e-02; EST_HUMAN HIT: AA777965.1, EVALUE 1.20e-01; SWISSPROT HIT: P04797, EVALUE 2.00e-03
tgtgcccagattcattgccattccaggaaatgagcttaccacattgactgttgaagtcacgccagccccagcatcaaaagcgaaggagtggatgtttcagttaaaattgcgggaggggacttggtccttcctgttgcttct

SEQ ID NO: 32725 - DNA, 81 bp, Homo sapiens
  MAP TO AC006992.2; EXPRESSED IN BONE MARROW, SIGNAL = 1.3; EXPRESSED IN HELA, SIGNAL = 1.3; NT HIT: AF254822.1, EVALUE 4.10e-02; EST_HUMAN HIT: AI273815.1, EVALUE 2.40e-01
atgttctggaaccaaagagaagaccagtgtggctggaatactgggggaaggggaaggctgggaggacacgaggctggggag

SEQ ID NO: 32726 - DNA, 89 bp, Homo sapiens
  MAP TO AP000346.1; EXPRESSED IN BONE MARROW, SIGNAL = 1.3; NT HIT: AF256212.1, EVALUE 7.30e-01; EST_HUMAN HIT: R40255.1, EVALUE 1.80e-02
atggatggtgtccattggccaatcattaagagacaaaaactctgcaagaagttattccagagagcaactcgcccagcctcctactgcag

SEQ ID NO: 32727 - DNA, 153 bp, Homo sapiens
  MAP TO AL079300.11; EXPRESSED IN BONE MARROW, SIGNAL = 1.6; NT HIT: gi4758297, EVALUE 3.50e-01; EST_HUMAN HIT: BF108852.1, EVALUE 5.20e-01; SWISSPROT HIT: P32018, EVALUE 7.90e-01
tgtgctctggtttttctcagacactttggcctggatctctatctctgcctcagtctttccaggtcctcttgggccctggaccccagcacagaggctggatactgaaacagactcccctggtgcccccttctctgatctcttcggtgccctgcc

SEQ ID NO: 32728 - DNA, 101 bp, Homo sapiens
  MAP TO AP000041.1; EXPRESSED IN BONE MARROW, SIGNAL = 1.4; EST_HUMAN HIT: AI745111.1, EVALUE 3.20e-01
acatagagaccctaaagcactctctcatctcaccgttcagaatatgtggatcacccccttggagagttctggccctcaggaaacttacacctaccatctaa

SEQ ID NO: 32729 - DNA, 157 bp, Homo sapiens
  MAP TO AP000352.2; EXPRESSED IN BONE MARROW, SIGNAL = 1.4; NT HIT: gi11417862, EVALUE 3.00e-66; SWISSPROT HIT: Q9Y6J0, EVALUE 2.00e-18; EST_HUMAN HIT: BE729765.1, EVALUE 5.00e-66
gctggaccctgaggaggaagatgattcctttaataactatgaagtccagtcagaagccaaactggaaagcttcccaagcattgggcctcaaaggctgtcatttgactcagccacattcatggaatctggtaggaatcgagcagtgtgaccattcact

SEQ ID NO: 32730 - DNA, 88 bp, Homo sapiens
  MAP TO AC007286.18; EXPRESSED IN BONE MARROW, SIGNAL = 3.7; NT HIT: AJ009776.1, EVALUE 1.80e-01; EST_HUMAN HIT: BF352899.1, EVALUE 6.90e-02
aaaaataatggttattataaacaaggaacagtaaaggtttctgggagaaaatataatagaaaagttgtcctggcaccctttggagaag

SEQ ID NO: 32731 - DNA, 103 bp, Homo sapiens
  MAP TO AC004032.7; EXPRESSED IN BONE MARROW, SIGNAL = 1.6; NT HIT: AB018272.1, EVALUE 8.70e-01; EST_HUMAN HIT: BE312920.1, EVALUE 3.30e-01; SWISSPROT HIT: Q03696, EVALUE 1.10e+00
gatgaaggagcaactccctggatggcatgggaaaacaaaagggactgctgtcccacagcccagtggcagcctcgccacccagagctggaaggtatggaaatga

SEQ ID NO: 32732 - DNA, 105 bp, Homo sapiens
  MAP TO AB016897.1; EXPRESSED IN BONE MARROW, SIGNAL = 1.3; NT HIT: AB011399.1, EVALUE 1.00e-52; EST_HUMAN HIT: BE255856.1, EVALUE 5.20e+00
tttaaaagtacaaagcgaatagcagtcagcgtggactggttacgtaagagcctgaatattgcattggttctaggtcgtgttgataaatgccatacagggtcatag

SEQ ID NO: 32733 - DNA, 194 bp, Homo sapiens
  MAP TO AL022319.2; EXPRESSED IN BONE MARROW, SIGNAL = 1.6; NT HIT: M35586.1, EVALUE 4.50e-01; EST_HUMAN HIT: AA847421.1, EVALUE 1.70e-01; SWISSPROT HIT: P42487, EVALUE 6.60e+00
agaaggagaaggggtgggagaggaagtcagaaagacagttgacagtcagatcaaagatgtccttgtgtgagatgagaagtccctgggaggtgcttaagcaaaggaatggcatggtatgtcttctttttcataaaatcactttggcttttatgtgaagagggctccatggagcacagggagaagcagggtcacag

SEQ ID NO: 32734 - DNA, 197 bp, Homo sapiens
  MAP TO AL031588.1; EXPRESSED IN HELA, SIGNAL = 1.5; EXPRESSED IN BONE MARROW, SIGNAL = 1.5; SWISSPROT HIT: Q62656, EVALUE 1.30e-02; NT HIT: gi11418318, EVALUE 1.00e-107; EST_HUMAN HIT: BF589388.1, EVALUE 1.00e-107
taggggctgcatctccacccggcttggcttcctcccgagctacttctgtggcagtacttttggagaaagtagaatcgctttcctctggagaaaagttaagtgcctgaggcacacgggaaggaggagaacccctgtcaggggacacatccaccagcctggaatctgtctttctgttgctctcccttgttggttcagtt

SEQ ID NO: 32735 - DNA, 570 bp, Homo sapiens; identical to SEQ ID NO: 16231
  MAP TO AL008723.8; EXPRESSED IN BONE MARROW, SIGNAL = 1.6; NT HIT: Z00015.1, EVALUE 1.00e-40; EST_HUMAN HIT: AI565496.1, EVALUE 5.00e-29; SWISSPROT HIT: P31636, EVALUE 1.70e-02

SEQ ID NO: 32736 - DNA, 575 bp, Homo sapiens; identical to SEQ ID NO: 16243
  MAP TO AL035701.13; EXPRESSED IN BONE MARROW, SIGNAL = 1.6; NT HIT: AF029308.1, EVALUE 1.00e-16; EST_HUMAN HIT: BE221470.1, EVALUE 1.00e-17; SWISSPROT HIT: P24937, EVALUE 2.20e+00

SEQ ID NO: 32737 - DNA, 91 bp, Homo sapiens
  MAP TO AC007567.1; EXPRESSED IN PLACENTA, SIGNAL = 1.6; EXPRESSED IN BONE MARROW, SIGNAL = 1.3; NT HIT: gi4826863, EVALUE 2.00e-44; EST_HUMAN HIT: BF364440.1, EVALUE 3.00e-44; SWISSPROT HIT: P35331, EVALUE 9.00e-05
gatcaagaggtacttccagtgcactaatcatctggcacaggaagagaatcaggggcactctgcccgcagataagcgcttctttttcggcat

SEQ ID NO: 32738 - DNA, 193 bp, Homo sapiens
  MAP TO AC009313.2; EXPRESSED IN BONE MARROW, SIGNAL = 1.3; SWISSPROT HIT: P14400, EVALUE 1.10e-01; NT HIT: AF071080.3, EVALUE 1.80e+00; EST_HUMAN HIT: BF665493.1, EVALUE 2.70e+00
agaagaaatgaagtattctcatctctctcattgtctggcttccccccagttttctgtttcttcaggagcctcgataccatcttcttcggattcccctttgttttcagtttttgctttttttgtatcacgcccagcattagtcactatttttctcttgttcttcttttcttttttgatttcgaatctagagact

SEQ ID NO: 32739 - DNA, 103 bp, Homo sapiens
  MAP TO AL035682.16; EXPRESSED IN BONE MARROW, SIGNAL = 1.4; NT HIT: AF271265.1, EVALUE 2.20e-01; EST_HUMAN HIT: H46216.1, EVALUE 5.10e+00
attctgtgccctgagctggcagggctttgtgtgaaattgctttacgtgttttctgaaatacacggagcagagaggcccatctgctgggcagggagaaagccat

SEQ ID NO: 32740 - DNA, 214 bp, Homo sapiens
  MAP TO Z95114.19; EXPRESSED IN BONE MARROW, SIGNAL = 1.4; EST_HUMAN HIT: BF185575.1, EVALUE 3.00e+00; SWISSPROT HIT: O68008, EVALUE 2.60e+00; NT HIT: V00574.1, EVALUE 3.20e-02
aaacaagttgcatcaagaaaattacgatggggatatcaaggagtttgaagaatcccaactcgtagccatgtctaagggcttttctgaggtacaggccccgctagaggaagctgctccaactctgttcctgtctgctcctgccccactctctgtttctagacagcctgcgttcaagtcattgtggcccaagactgaactgcagaatggaaaggag

SEQ ID NO: 32741 - DNA, 269 bp, Homo sapiens
  MAP TO AC004916.2; EXPRESSED IN PLACENTA, SIGNAL = 1.6; NT HIT: gi7106446, EVALUE 1.00e-63; EST_HUMAN HIT: AI472003.1, EVALUE 2.00e-32; SWISSPROT HIT: P27467, EVALUE 1.00e-46
ctggcgcccagcctcgttgttgtggcggttcatggctgagcgggcatctggccggttctcccgggcgtcggcgaactcccgagacaccatcccaccaaactcgatgtcctcgctacagccaccccacttccagcccttgcctggtgagccctggtggcggctgctgcagccacagatggcggccgtgccttctgcacatgagcgtgtcactgcaaaggccacaccggctgaggcaatggcgtggacaaaggccgactccctggtagctg

SEQ ID NO: 32742 - DNA, 365 bp, Homo sapiens
  MAP TO AP000344.1; EXPRESSED IN PLACENTA, SIGNAL = 0.96; EST_HUMAN HIT: AI904151.1, EVALUE 3.00e-13; SWISSPROT HIT: P39275, EVALUE 1.10e+00; NT HIT: U59254.1, EVALUE 1.20e-02
cttggtagcatcttttttacagaggtatcgtacagcatcctcattagtgatgtcgtatacagtgtcctcataagaaatgtcttctatagtgtcctcattagagatgtcatgtacagcagcctcattacagatgtctacagcgtcattagagatgtcacgtacagcagcctcattagagatgtttacggcatcgttagagatgtcacatacagcagcctcattagagatgtcatgtacagaagcctcattagagatatctacagtgtcctcatcagagatgtctacagcatcctcattacagatgtcatatacagtgtcttctttagagatgtcttgtacagcgtacccacaaagagctaggagaa

SEQ ID NO: 32743 - DNA, 153 bp, Homo sapiens
  MAP TO AP000426.1; EXPRESSED IN PLACENTA, SIGNAL = 1.3; EXPRESSED IN BT474, SIGNAL =   4; NT HIT: gi11428822, EVALUE 1.40e+00; SWISSPROT HIT: P13002, EVALUE 1.00e-08; EST_HUMAN HIT: BF355293.1, EVALUE 2.00e+00
caatgtcaaggaccctctgcttcgccgtatgctgccgagagtgccagtatttccagtatttgagctgttcatctctgtttttgtcttcactgaagaccaccatcaccacactctgcagaggggagaatcgtggagcttactttttgttcagtg

SEQ ID NO: 32744 - DNA, 169 bp, Homo sapiens
  MAP TO AL050320.16; EXPRESSED IN PLACENTA, SIGNAL = 1.4; SWISSPROT HIT: Q9VG17, EVALUE 1.70e+00; EST_HUMAN HIT: BE147450.1, EVALUE 4.00e-01
acctgcggcacctacagccaacctggccatcccggtctccttcttggtctttttggtgcccaagacatgtcctccatatattcctatttttaagaattacatgtttatcagaataatttcattctcagtgctcaagttgaagcagatgatcacagagaatttaactaca

SEQ ID NO: 32745 - DNA, 134 bp, Homo sapiens
  MAP TO AL035106.25; EXPRESSED IN HELA, SIGNAL =  11; EXPRESSED IN PLACENTA, SIGNAL =   1; SWISSPROT HIT: P55945, EVALUE 6.80e+00; NT HIT: U03642.1, EVALUE 1.20e+00; EST_HUMAN HIT: BF330124.1, EVALUE 1.00e-69
atgctgggcagcctgtactacatgctgggcagcctgtactatgtgctgggtatgtactctgtgttagccatcagcactgacctgggcactttgtggctcagggtgtctgctcagatgatgcacacagagccccc

SEQ ID NO: 32746 - DNA, 108 bp, Homo sapiens
  MAP TO AB020878.1; EXPRESSED IN PLACENTA, SIGNAL = 7.2; NT HIT: AF305085.1, EVALUE 9.20e-01; EST_HUMAN HIT: AU136024.1, EVALUE 1.00e-34
ctttgaacaggaaggattataagaaagggaagctcagctctaaggcattcaccattcactttgccctgggctagtcctttagaaagatgtgtgttcctattacttcaa

SEQ ID NO: 32747 - DNA, 244 bp, Homo sapiens; identical to SEQ ID NO: 18433
  MAP TO AC010091.1; EXPRESSED IN PLACENTA, SIGNAL = 2.5; NT HIT: M75980.1, EVALUE 0.00e+00; SWISSPROT HIT: P14210, EVALUE 1.00e-24; EST_HUMAN HIT: AA815465.1, EVALUE 1.50e-01

SEQ ID NO: 32748 - DNA, 105 bp, Homo sapiens
  MAP TO AC009310.1; EXPRESSED IN PLACENTA, SIGNAL = 0.98; NT HIT: AF157623.1, EVALUE 1.40e-02; EST_HUMAN HIT: AI740607.1, EVALUE 6.00e-06; SWISSPROT HIT: P36992, EVALUE 7.00e+00
cttctgccaggtgaggacacagcattcctccttctgcaggatgccgcccttgccagacagctgcacctgctggtgctttgatcttagacttctcagcctccaaca

SEQ ID NO: 32749 - DNA, 283 bp, Homo sapiens
  MAP TO AL035454.16; EXPRESSED IN BT474, SIGNAL = 1.4; EXPRESSED IN HBL100, SIGNAL = 1.8; EXPRESSED IN PLACENTA, SIGNAL =   1; SWISSPROT HIT: P17886, EVALUE 9.00e-20; EST_HUMAN HIT: AU132316.1, EVALUE 3.00e-96; NT HIT: gi11421891, EVALUE 2.00e-96
aatttttggagtttccaggctttggtatggttttggtgtttacttacttactatttttttaagccatgctgttttgcctgggatttccttaattcccttgcacttgtcctcgtgcaccctgatgttaagaactggatcaagtatgcccgctttgaagaaaaacatgcttattttgcccatgcacggaaagtgtatgagagagctgtggaattctttggagatgaacatatggatgagcacctttatgttgcctttgccaagtttgaagaaaatcagaaagagg

SEQ ID NO: 32750 - DNA, 154 bp, Homo sapiens
  MAP TO AL049868.10; EXPRESSED IN HBL100, SIGNAL =   1; EXPRESSED IN PLACENTA, SIGNAL = 1.2; NT HIT: X99082.1, EVALUE 3.00e-01; EST_HUMAN HIT: C16648.1, EVALUE 3.60e-01; SWISSPROT HIT: P28986, EVALUE 3.90e+00
aaaaaaaattatatcggggattcctgtcatgggccgaagctgtgttcctgcttctcctctgggattatcagccttgactatgctgaaattccttgtactctggccggccacacttttgttccctataagaagaggaactaaagtgaaagtccca

SEQ ID NO: 32751 - DNA, 92 bp, Homo sapiens
  MAP TO AC007378.2; EXPRESSED IN PLACENTA, SIGNAL = 1.3; EST_HUMAN HIT: BF110564.1, EVALUE 2.80e-01; NT HIT: AJ235272.1, EVALUE 1.60e-01
cgtttagcaatttttgcagcagcatcgaagttaggggtgagagccagcacagccagcttgcagctcatggaacacccccattcatgcgtgca

SEQ ID NO: 32752 - DNA, 264 bp, Homo sapiens
  MAP TO AL121773.1; EXPRESSED IN BT474, SIGNAL = 2.2; EXPRESSED IN HELA, SIGNAL = 7.1; EXPRESSED IN PLACENTA, SIGNAL = 1.3; EXPRESSED IN HBL100, SIGNAL = 1.9; NT HIT: AB037788.1, EVALUE 0.00e+00; SWISSPROT HIT: Q10568, EVALUE 2.00e-35; EST_HUMAN HIT: AL040352.1, EVALUE 0.00e+00
ttttgtaaggcaaaagatgctgaattagcttggatagatggtgtcttagatatgagagtttccaaagtggacacaggggttattttagaagaaggagaactaaaggatgatggagaagactcagagatgcaagtggaagctccctcagattctagcgttatagcacaacaaaaggccatgaaaagtctgttcggagatgatgaaaaagaaacaggtgaagaaagtgagatcattcctactttggaacccttgccacctcatgag

SEQ ID NO: 32753 - DNA, 291 bp, Homo sapiens
  MAP TO AL117352.3; EXPRESSED IN PLACENTA, SIGNAL = 1.3; EXPRESSED IN HBL100, SIGNAL =   4; EXPRESSED IN HELA, SIGNAL = 1.3; EXPRESSED IN BT474, SIGNAL =   1; NT HIT: AB022922.1, EVALUE 1.50e-01; EST_HUMAN HIT: BE018066.1, EVALUE 0.00e+00; SWISSPROT HIT: Q04958, EVALUE 7.50e-01
atgatactctaggaaagtagttgcttagaacattttggtgactgttactaacagcaggggagaccagatgagaatttttacttgaaccattctgttcaaatttcaccttgattttagaattaggtcttacagcatttgctgaatggttttgatttaaaagatcttgggttttattaatggcatgtgaagtgatcagtttcccaggtgaaggtaaattgcttgtttctcctagaacatatcctttcccactaaaagggattactagctgggcctcacctctgttgggtttat

SEQ ID NO: 32754 - DNA, 149 bp, Homo sapiens
  MAP TO AB020878.1; EXPRESSED IN PLACENTA, SIGNAL = 2.7; NT HIT: AF137273.1, EVALUE 1.10e+00; SWISSPROT HIT: P10253, EVALUE 5.10e+00; EST_HUMAN HIT: BF351333.1, EVALUE 2.00e+00
aaactaagcaggaggatcaagtccagattgttagggcccttgggataaagaacaaaattcaggtttttgtactggtcacagcttggagaaagcttgttatttggaacaaggatatggatgcaataaacattctgaggtttatcttgctt

SEQ ID NO: 32755 - DNA, 251 bp, Homo sapiens
  MAP TO AL096763.9; EXPRESSED IN PLACENTA, SIGNAL = 0.94; SWISSPROT HIT: Q69154, EVALUE 6.60e-02; NT HIT: gi11422479, EVALUE 1.00e-123; EST_HUMAN HIT: AW367998.1, EVALUE 1.00e-104
cttttttcctgagtttggaccttttttccttggtgtgatatttttaacagaactgctccttttggggactgcagtaggtccaggtggtttaattcgacttgatctcctgacctgctgtgttggtaatattagagtagttttctgtggagactgcattgaatgctggcttgcttcggaaggagaagactctgtttttgctatattctttacaataggaactgaggaaaaaaatacaaaaaatattaaagtaa

SEQ ID NO: 32756 - DNA, 499 bp, Homo sapiens
  MAP TO AP000404.1; EXPRESSED IN PLACENTA, SIGNAL = 1.5; NT HIT: gi11526138, EVALUE 0.00e+00; SWISSPROT HIT: P10180, EVALUE 1.30e+00; EST_HUMAN HIT: AU140704.1, EVALUE 0.00e+00
aggggccataaagactgctttgaaaaataccatttaattgcaaaccagggttgtcctcgatctaagctttcaaaaagtacttatgaagaagttaaaaccattttgagtaagaagataaactggattgtgcagtatgcacaaaataaggatctggattcagattctgaatgttctaaaaacccccagcatcatctgtttaatttcaggcataagccagaagaaaaattactcccacagtttgactcccaagtaccaaaatattctgcaaaatggatagatggaagtgcaggtggcatctctaactgtacacaaagaattttggagcagagggaaaatacagactttggactttctatgttacaagattcaggtgccactttatgtcgtaacagtgtattgtggcctcatagtcacaaccaggcacagaaaaaagaagagacaatctctagtccagaggctaatgtccagacccagcatccacattacagcagagaggaat

SEQ ID NO: 32757 - DNA, 244 bp, Homo sapiens
  MAP TO AL121773.1; EXPRESSED IN PLACENTA, SIGNAL = 0.96; SWISSPROT HIT: P54252, EVALUE 2.00e-25; EST_HUMAN HIT: BE537913.1, EVALUE 4.00e-92; NT HIT: gi11434814, EVALUE 3.00e-92
ttcttcagcaatgaatacaacacacatcagaatgtctttaccttgcatacttagctgaatagccctgcggagatctgcttcctcatcttccatgtcaatttcttggcgacttagtgccagagccctctgcaaatcctcctcatcttcgtctaacattcctgagccatcatttgcttctaacactcgttccaggtctgttttatggactctaaagaacaaaagcactggtaataactgcaaccaa

SEQ ID NO: 32758 - DNA, 120 bp, Homo sapiens
  MAP TO AL109953.6; EXPRESSED IN PLACENTA, SIGNAL = 0.94; NT HIT: AF281139.1, EVALUE 4.10e+00; EST_HUMAN HIT: AI372772.1, EVALUE 2.70e-01
tcagtactcccctctgggaaagtccttccacgtctccatggctggaggcttaaattcaaatcgaagtagcaaagcagagtagcaacttctcatgttcccaccatcagctccccagaacca

SEQ ID NO: 32759 - DNA, 246 bp, Homo sapiens
  MAP TO AL049647.7; EXPRESSED IN HBL100, SIGNAL =   1; EXPRESSED IN PLACENTA, SIGNAL = 1.9; EXPRESSED IN BT474, SIGNAL = 0.96; SWISSPROT HIT: P34240, EVALUE 8.30e+00; EST_HUMAN HIT: BE904308.1, EVALUE 5.60e-02; NT HIT: AF007560.1, EVALUE 5.00e-01
cagccccaggcaccacgctcctctctccccagagccttccccaagaactgaatccccatgtggaaaatcagccacccaccttgattcagatgactatgatcttcattcatctcctgagcatgattccagtattccccacgaccactggaggtttccacctgaatgttcttacactcgttactcagagtggctgaaatgtagataatcaaatatcttccagtgaaatatagctcccttttaaacgta

SEQ ID NO: 32760 - DNA, 148 bp, Homo sapiens
  MAP TO AL035634.7; EXPRESSED IN BT474, SIGNAL = 1.4; EXPRESSED IN PLACENTA, SIGNAL =   1; EXPRESSED IN HELA, SIGNAL = 1.2; SWISSPROT HIT: P49880, EVALUE 6.70e+00; NT HIT: gi11417536, EVALUE 4.00e-78; EST_HUMAN HIT: AI693971.1, EVALUE 4.00e-78
ttgttaaggggaattttcatggatgaggaactagcacgactgtttcctcgctgagcgccgcctgcatcagctgactctgaatccttaaagtaggaagaggatttgggcccatcccagtcttcatcccagtcatcatcatcaccagttg

SEQ ID NO: 32761 - DNA, 89 bp, Homo sapiens
  MAP TO AC010908.1; EXPRESSED IN PLACENTA, SIGNAL = 1.1; EST_HUMAN HIT: R83422.1, EVALUE 3.00e-43; NT HIT: L03811.1, EVALUE 7.30e-01
gttgtctgttggtccaacagatgcaggtcttcttaagggtggaggaaaagagggcaatggcttttctattaggggaggaaaagagggca

SEQ ID NO: 32762 - DNA, 168 bp, Homo sapiens; identical to SEQ ID NO: 26849
  MAP TO AC007556.2; EXPRESSED IN PLACENTA, SIGNAL = 0.74; EXPRESSED IN BT474, SIGNAL = 0.63; EXPRESSED IN HELA, SIGNAL = 1.1; NT HIT: gi11430460, EVALUE 5.00e-90; SWISSPROT HIT: P98164, EVALUE 4.00e-13; EST_HUMAN HIT: BF196002.1, EVALUE 7.00e-90

SEQ ID NO: 32763 - DNA, 599 bp, Homo sapiens
  MAP TO AC010766.2; EXPRESSED IN PLACENTA, SIGNAL = 1.2; NT HIT: AB000540.1, EVALUE 1.50e+00; EST_HUMAN HIT: AW188146.1, EVALUE 0.00e+00; SWISSPROT HIT: P00673, EVALUE 2.00e-05
tggagacctttcctctgctgctgctcagcctgggcctggttcttgcagaagcatcagaaagcacaatgaagataattaaagaagaatttacagacgaagagatgcaatatgacatggcaaaaagtggccaagaaaaacagaccattgagatattaatgaacccgatcctgttagttaaaaataccagcctcagcatgtccaaggatgatatgtcttccacattactgacattcagaagtttacattataatgaccccaagggaaacagttcgggtaatgacaaagagtgttgcaatgacatgacagtctggagaaaagtttcagaagcaaacggatcgtgcaagtggagcaataacttcatccgcagctccacagaagtgatgcgcagggtccacagggcccccagctgcaagtttgtacagaatcctggcataagctgctgtgagagcctagaactggaaaatacagtgtgccagttcactacaggcaaacaattccccaggtgccaataccatagtgttacctcattagagaagatattgacagtgctgacaggtcattctctgatgagctggttagtttgtggctctaagttgtaa

SEQ ID NO: 32764 - DNA, 195 bp, Homo sapiens
  MAP TO AP000317.1; EXPRESSED IN PLACENTA, SIGNAL = 0.64; NT HIT: AF003529.1, EVALUE 5.00e-04; EST_HUMAN HIT: AA167525.1, EVALUE 1.10e-02; SWISSPROT HIT: P70213, EVALUE 2.00e-11
ctacgtaaatgactcaagagcttcttggtgtgccctaaaaaagaccctgatcatgtgtagccacagagctgaaattgctgaaaatcaaacacagaaccttatctttcagctgactgaattacaacgcaaattgagctcccagcctcacagggtaaaagtgagggcattgattaagaaagaatgggatcctgtaaa

SEQ ID NO: 32765 - DNA, 109 bp, Homo sapiens
  MAP TO AC006155.2; EXPRESSED IN BT474, SIGNAL = 0.71; EXPRESSED IN PLACENTA, SIGNAL = 0.6; EXPRESSED IN HELA, SIGNAL = 0.65; EST_HUMAN HIT: AA112513.1, EVALUE 1.40e+00; NT HIT: U73520.1, EVALUE 2.40e-01; SWISSPROT HIT: Q01373, EVALUE 5.30e+00
acctcggatggcagcttcctgcagaccagcttcatcccctgatgccatagagaacttctccaccacccagcaatcctcagccacactgtatcctatggggtctcaatat

SEQ ID NO: 32766 - DNA, 159 bp, Homo sapiens; identical to SEQ ID NO: 17729
  MAP TO AJ006997.1; EXPRESSED IN PLACENTA, SIGNAL = 0.8; SWISSPROT HIT: P09439, EVALUE 4.40e-01; NT HIT: AL163209.2, EVALUE 9.00e-85; EST_HUMAN HIT: AW407696.1, EVALUE 9.40e-02

SEQ ID NO: 32767 - DNA, 213 bp, Homo sapiens
  MAP TO AJ006997.1; EXPRESSED IN PLACENTA, SIGNAL = 0.63; EXPRESSED IN HELA, SIGNAL = 0.69; NT HIT: AL163209.2, EVALUE 1.00e-117; SWISSPROT HIT: Q07652, EVALUE 5.70e+00
agtttgcaacgcagagtggccaacagaatcatcttgtccacctccacactagccaacccataaagaatgtaaaccctatgtctatcatacaaagaataattaaaatggtatttggaaaaggaggtgatcaagtggaaaggagggatagaagaagaaatcatggactgaattggcttcaagctagaccttcaaatatgagtaggagaagaatag

SEQ ID NO: 32768 - DNA, 225 bp, Homo sapiens; identical to SEQ ID NO: 20094
  MAP TO AP000239.1; EXPRESSED IN PLACENTA, SIGNAL = 0.69; EXPRESSED IN HELA, SIGNAL = 0.6; SWISSPROT HIT: P22756, EVALUE 1.00e-38; EST_HUMAN HIT: R13319.1, EVALUE 5.00e-66; NT HIT: gi11526170, EVALUE 1.00e-124

SEQ ID NO: 32769 - DNA, 121 bp, Homo sapiens
  MAP TO AL049594.4; EXPRESSED IN PLACENTA, SIGNAL = 0.68; SWISSPROT HIT: P24834, EVALUE 5.20e+00; EST_HUMAN HIT: AU120493.1, EVALUE 1.60e+00
gtgcggcacaggggatgggggctcacaggcatccatggaaaaggagaggcacttgtcaatttcgtgtggaaatatcaggatagccctgaaacagcagctttcaaggaaccagatggagcag

SEQ ID NO: 32770 - DNA, 205 bp, Homo sapiens
  MAP TO AL031734.9; EXPRESSED IN PLACENTA, SIGNAL = 0.9; SWISSPROT HIT: O95863, EVALUE 6.30e+00; NT HIT: X95373.1, EVALUE 1.00e-01; EST_HUMAN HIT: BF369469.1, EVALUE 4.00e-24
accattccttaagtggctgagtaaaaaacaacaacatgtctcagaggagagctttctaatggttttcctgtggtccattgcccctggggtgcttccatcacagcgagtcaccgtggtgatgccacagtttgagccttcctctgaaccttttgcaatagtgacactgatatcatttataaaattaatgcaccctggttcagtggca

SEQ ID NO: 32771 - DNA, 129 bp, Homo sapiens
  MAP TO AC012553.2; EXPRESSED IN PLACENTA, SIGNAL = 1.2; SWISSPROT HIT: P26676, EVALUE 8.90e+00; NT HIT: AY008372.1, EVALUE 1.10e+00; EST_HUMAN HIT: BE148546.1, EVALUE 3.00e-04
accttcatctaccagtcaaccaaggaaaccacctatgacttagtggtaggccagtatgatagagaactatatttgccctttgagggtagaattgatattgctgatgtgattgggaaaatactgccattc

SEQ ID NO: 32772 - DNA, 169 bp, Homo sapiens
  MAP TO AC007102.4; EXPRESSED IN PLACENTA, SIGNAL =   1; NT HIT: M24461.1, EVALUE 3.30e-01; SWISSPROT HIT: Q08043, EVALUE 3.80e+00
ctgggcaggacttggtaaggaccagaagcaaatcatgatgcagctcctgaagcagctaagccactccctagacagatcttttctcagaaacacaaccaagcataacttcagctctgaacatgtcatagaggtgctggccatgacctggtcccagccagcagggtaccag

SEQ ID NO: 32773 - DNA, 103 bp, Homo sapiens
  MAP TO AF111168.2; EXPRESSED IN PLACENTA, SIGNAL = 0.82; NT HIT: gi11545778, EVALUE 2.00e-51; EST_HUMAN HIT: AA780270.1, EVALUE 2.00e-51; SWISSPROT HIT: P55457, EVALUE 7.00e+00
ctgaagaggtctaaaagcaacttttgatcccctatttccttaaggaagtgaataagatgtctcagggcaacctgtcgcacctccagctctcggaagaggatct

SEQ ID NO: 32774 - DNA, 229 bp, Homo sapiens
  MAP TO AL109807.6; EXPRESSED IN PLACENTA, SIGNAL = 1.9; SWISSPROT HIT: P04512, EVALUE 1.70e+00; NT HIT: AF012825.1, EVALUE 8.50e+00
accactttcaaataactttctctgcctgctttggcctatatatcgtttccaaaatagcatgaaaaacttttctcattgtatttcaaaacgaaaaatgttccatctacatctggaaatactaaaaaatgtgctttcttacagtattttttttttactaggtatggacaaggttctgacccttattattggaactcaaatccagatggagtttggtaaggttctaatcatt

SEQ ID NO: 32775 - DNA, 403 bp, Homo sapiens
  MAP TO AL121907.2; EXPRESSED IN PLACENTA, SIGNAL = 1.1; SWISSPROT HIT: P11000, EVALUE 2.00e-03
atacgataccccttcacccttcacccttcaccctttaccccatcacttcaaggtgtgtttcctcagaacgtggaagctgtctgttacaaagtcaggaagctgacgtggatacaataatattactaatactcagcccgtgtgagcgtgttgttggccgtgtgctgtgtgtacgtggaactctctcccgtggtctcacactcagcccgtgtgagcgtgttgttggccgtgtgctgtgtgtacgtggaactctgtcccgtggtctcacactcagcccgtgtgagcgtgttgttggccgtgtgctgtgtgtacgtggaactctgtcccgtggtgtcacactcagcccgtgtgagcgtgttggccgtgtgctgtgtgtacgtggaactctctcccgtggtctcacact

SEQ ID NO: 32776 - DNA, 154 bp, Homo sapiens
  MAP TO AL121965.5; EXPRESSED IN PLACENTA, SIGNAL = 2.5e+02; EST_HUMAN HIT: AI421540.1, EVALUE 6.00e-43; SWISSPROT HIT: P53327, EVALUE 4.00e-16; NT HIT: gi11466980, EVALUE 1.40e+00
cccagatggttttagtattcatcatgcaggaatgcttcggcaggacagaaatttagttgaaaacttgttttctaatgggcatatcaaagtcctagtgtgtacagctacgttagcctggggtgtcaatcttcccgcccatgctgttattattaag

SEQ ID NO: 32777 - DNA, 253 bp, Homo sapiens
  MAP TO AL122018.4; EXPRESSED IN PLACENTA, SIGNAL =   2; SWISSPROT HIT: P14543, EVALUE 2.00e-44; NT HIT: gi11427239, EVALUE 0.00e+00; EST_HUMAN HIT: BF088023.1, EVALUE 0.00e+00
cggtgatgctgaacccattcttgaatccgtcctgctccactgcaaacatccatccaatgatgcctccaactggggccagtggaagcagagaatatccaacggtctcgggaatggtgctgatggctgtgtaggagcgcccgtggttcattactacgtaagagtggaggtcagtgttctcaaagacaatggggacctggctgctccccacaaagatccttcctttcaccttgccattgactcgctggggggaacc

SEQ ID NO: 32778 - DNA, 95 bp, Homo sapiens
  MAP TO AP000197.1; EXPRESSED IN HELA, SIGNAL = 0.63; EXPRESSED IN PLACENTA, SIGNAL = 0.83; EST_HUMAN HIT: AA055118.1, EVALUE 3.00e-40; NT HIT: AL161558.2, EVALUE 2.00e-01
aaatgaggatcagatcgtgttatccctgtacttaacgtccttcagcgtgctgccattggccttagaatgaggtacaaacttcttgatatggtttt

SEQ ID NO: 32779 - DNA, 131 bp, Homo sapiens
  MAP TO AP000176.1; EXPRESSED IN PLACENTA, SIGNAL = 0.61; EXPRESSED IN HBL100, SIGNAL = 0.8; NT HIT: U83656.1, EVALUE 2.50e-01; SWISSPROT HIT: P28799, EVALUE 6.80e+00
gttgagctgggtaagggcagagccagttgatgggagagagtgcccaggcacaactgggtgtgaaccaaaggacaaatggctatgtctggtgctcttaggcaaaggctgattgtccaaggttcttgttctct

SEQ ID NO: 32780 - DNA, 211 bp, Homo sapiens
  MAP TO AC007101.1; EXPRESSED IN PLACENTA, SIGNAL =   1; EST_HUMAN HIT: BE787156.1, EVALUE 7.00e-38; NT HIT: Y19215.1, EVALUE 1.00e-115; SWISSPROT HIT: P25691, EVALUE 7.00e-10
ctggcacttggcattctccaccttggccatcagcctctggatcatgtgggtcagctccttgatctcctccttggtgcagcccacagtctccccgtgccagatcaccgtggccttcatctccccgaaatgggggaagcagagatgctcctgaggctcagtgtgggatatcccttcctttagggatgattgtgcaggttgtgcagtgctcagc

SEQ ID NO: 32781 - DNA, 147 bp, Homo sapiens
  MAP TO AL109823.11; EXPRESSED IN PLACENTA, SIGNAL = 1.6; EXPRESSED IN HELA, SIGNAL = 1.1; NT HIT: gi11034844, EVALUE 1.00e-65; EST_HUMAN HIT: AW238282.1, EVALUE 1.00e-65; SWISSPROT HIT: P26662, EVALUE 2.30e+00
actgaggaactaatcaaagctttgcaggatctggaaaatgccgcatcaggggatgctactgtccgacagaaaattgcttctctgccccaggaagtgcaagatgtttctctattggaaaaaataacaggtgagaaggtagagtttggg

SEQ ID NO: 32782 - DNA, 179 bp, Homo sapiens
  MAP TO AC009532.2; EXPRESSED IN PLACENTA, SIGNAL = 3.1; EST_HUMAN HIT: AA688372.1, EVALUE 3.00e-76; SWISSPROT HIT: Q28969, EVALUE 1.70e+00; NT HIT: AF081250.1, EVALUE 3.00e-76
cagaggggccacagctgcggcttgaattctgatttgcaagctttttaaactccatgagctccgcatggtccttctcatacgtcctctttagattctccacatactgcatcatcacttccgttgctttcgacatgcgcttttcctgcggggaaggagcgcatgagtgcatgaggccattg

SEQ ID NO: 32783 - DNA, 560 bp, Homo sapiens
  MAP TO AC007326.22; EXPRESSED IN HELA, SIGNAL = 0.66; EXPRESSED IN BT474, SIGNAL = 0.72; EXPRESSED IN PLACENTA, SIGNAL = 0.61; NT HIT: X72791.1, EVALUE 0.00e+00; SWISSPROT HIT: P10264, EVALUE 7.00e-96; EST_HUMAN HIT: AU119631.1, EVALUE 6.00e-47
atgaaaacgccaatcctgagtgtcaatcagccattaagccattaaaaggaaaggttcctgcaggatcagatgtaatctcagaatatgtaaaagcctgtgatggaatcggaggagctatgcataaagctatgcttatggctcaagcaataacaggagttgttttaggaggacaagttagaacatttggaggaaaatgttataattgtggtcaaattggtcacttaaaaaagaattgcccagtcttaaacaaacagaatataactattcaagcaactacaacaggtagagagccacctgacttatgtccaagatgtaaaaaaggaaaacattgggctagtcaatgtcgttctaaatttgataaaaatgggcaaccattgtcgggaaacgagcaaaggggccagcctcaggccccacaacaaactggggcattcccaattcagccatttgttcctcagggttttcagggacaacaacccccactgtcccaagtgtttcagggaataagccagttaccacaatacaacaattgtcccctgccacaagcagcagtgcagcagtag

SEQ ID NO: 32784 - DNA, 177 bp, Homo sapiens
  MAP TO AF109907.1; EXPRESSED IN PLACENTA, SIGNAL = 0.99; EST_HUMAN HIT: AW959654.1, EVALUE 4.00e-75; SWISSPROT HIT: P16554, EVALUE 2.00e-18; NT HIT: AF109907.1, EVALUE 2.00e-95
tgtgtccttgacagccatgaagcagtgacagatccagcgacgagtggtgccatcacggcatatgtaagaaaaggctctatcaaagttcctgtctggggcacagaaagaaactttctctatcgtctggtcaactatgaggtcctagaaaatacgacacacaaagaaagagaagactta

SEQ ID NO: 32785 - DNA, 202 bp, Homo sapiens
  MAP TO AC009965.3; EXPRESSED IN PLACENTA, SIGNAL = 0.93; NT HIT: D83393.1, EVALUE 4.80e-01; EST_HUMAN HIT: AI267928.1, EVALUE 6.00e-13; SWISSPROT HIT: O43555, EVALUE 1.30e+00
gtgtctccaaaagcaggtgaggatgaggcttctctttgtccaggtggggacacggtctctcccgcccctccggcggccttgtagaagatagccactagagggcgcctttcgcccagccatggctccaagcgctaaacctgcttcataggagagcacattaagctgagaaggaggcaagtcagtgacgtggggaattattatg

SEQ ID NO: 32786 - DNA, 214 bp, Homo sapiens
  MAP TO AC007382.2; EXPRESSED IN PLACENTA, SIGNAL = 0.6; EXPRESSED IN HELA, SIGNAL = 0.73; EST_HUMAN HIT: BE612554.1, EVALUE 1.00e-101; NT HIT: U94178.1, EVALUE 2.00e+00
acccatctcctggctcctgtggcccactgattgtggtctggggatgctggtggtagaagcagcagaaggggatggccttggcaaggtggtgggggtggccacagctacagtgacagccagaagctgcatcagagtgaccggctgtgcagttgtccctggaataggtggcctctgataggcttttgtggtctcacctgtaagaaaatggaattat

SEQ ID NO: 32787 - DNA, 81 bp, Homo sapiens
  MAP TO AC011059.2; EXPRESSED IN PLACENTA, SIGNAL =   1; EXPRESSED IN HELA, SIGNAL =   1; NT HIT: AF063866.1, EVALUE 5.50e-01; EST_HUMAN HIT: BE170800.1, EVALUE 2.60e+00
atgttgataatggtattgataatgaatgtgacaatgatgattatggggattatacacatttaccaaatgttcttatatgtc

SEQ ID NO: 32788 - DNA, 109 bp, Homo sapiens
  MAP TO AC011257.2; EXPRESSED IN PLACENTA, SIGNAL = 0.96; SWISSPROT HIT: Q05738, EVALUE 5.30e+00; NT HIT: AF257460.1, EVALUE 6.00e-02
ttactgcttgtggcattgttggttttggtggcagtcgtaccagggctgttgtttttagtagtgatggcgatgctgtgtcatttaaccttgcagaagtttaaattctacc

SEQ ID NO: 32789 - DNA, 443 bp, Homo sapiens
  MAP TO AL109613.11; EXPRESSED IN BT474, SIGNAL =   1; EXPRESSED IN HBL100, SIGNAL = 0.92; EXPRESSED IN PLACENTA, SIGNAL = 1.9; EXPRESSED IN HELA, SIGNAL = 1.5; EST_HUMAN HIT: BE747365.1, EVALUE 0.00e+00; SWISSPROT HIT: P16591, EVALUE 5.00e-07; NT HIT: gi4502370, EVALUE 0.00e+00
ctgaggaggtttcccctgggcaaattctgctctcgggcctggacgccacccatggtgaggctcagcctcttggccacatccggccttcccttggtgaggctgccctcccgggcctggcctggggaggtgccataatgctcctccaggcaccgcagaggcaccgtcctgttgatgggctggaagatgatggcgccactctgctgggagatgggccggcggttgcccacgtagcagcgcaccaggccggggatggagtcgaagctctccatctcgaactggtactgcacgcggctgtaggcctcgctgagtcgcagaactgtccggttgattttgaagtgctgagcgaggttcttccactgacaggtcaggacaaagttcccagggctggacagagagtcacgaactaggaagtcaccatctcgctgcacaaggttttcagacac

SEQ ID NO: 32790 - DNA, 98 bp, Homo sapiens
  MAP TO AF097649.1; EXPRESSED IN PLACENTA, SIGNAL = 1.7; EST_HUMAN HIT: AI193860.1, EVALUE 3.00e-03; NT HIT: gi11038642, EVALUE 8.20e-01
gatgtttcaactacccccaaaactgccaaaacccaaaatttatcctggagtacaacaaatatttccacaatgtcttctacatcctactattgtgactg

SEQ ID NO: 32791 - DNA, 462 bp, Homo sapiens; identical to SEQ ID NO: 16304
  MAP TO AL035551.6; EXPRESSED IN PLACENTA, SIGNAL = 0.98; SWISSPROT HIT: P16752, EVALUE 2.70e+00; EST_HUMAN HIT: AU121327.1, EVALUE 1.00e-04; NT HIT: Z74127.1, EVALUE 1.60e-02

SEQ ID NO: 32792 - DNA, 81 bp, Homo sapiens
  MAP TO AF121782.1; EXPRESSED IN PLACENTA, SIGNAL = 1.9; NT HIT: AL163280.2, EVALUE 1.00e-38; SWISSPROT HIT: O28076, EVALUE 4.10e+00
cacctgatctgccagggagagctggtgttcggattcaaaagacacagtctgagtcactggatggacaacctgggggttacc

SEQ ID NO: 32793 - DNA, 1560 bp, Homo sapiens
  MAP TO AF067845.1; EXPRESSED IN PLACENTA, SIGNAL = 1.1; SWISSPROT HIT: Q27409, EVALUE 7.00e-36
ctacttcatgctcttgtggcgtggaaaggccgcgcgggtcctgagtgtgcgtggaaaggccgtgcgggtcctgagtgtgcgtggaaaggccgtgcgggtcctgagcatgtgtggaacggccgtgcgggtcctgagcgtgcgtggaaaggccgtgcgggtcctgagcgtgcgtggaaaggccgtgcgggtcctgacagtgtgtggaaaggccgcgtgggtcctgactgtgcgtggaaaggccgcgcgggtcctgactgtgcgtggaaaggccgcgcgggtcctgagtgtgcgtggaaaggccgtgcgggtcctgactgtgcgtggaaaggccgcgcgggtcctgactgtgcgtggaaaggccgtgcgggtcctgacagtgcgtggaaaggccgtgcgggtcctgagtgtgcgtggaaaggccgcgcgggtcctgactgtgcgtggaaaggccgcgcgggtcctgactgtgcgtggaaaggccgtgcgggtcctgactgtgcgtggaaaggccgtgcgggtcctgagtgtgcgtggaaaggccgtgcgggtcctgagtgtgcgtggaaaggccgtgcgggtcctgagtgtgtgtggaaaggccgcgcgggtcctgagcgtgcgtggaaaggccgtgcgggtcctgagtgtgcgtggaaaggccatgcgggtcctgagtgtgcgtggaaaggccgtgcgggtcctgacagtgtgtggaaaggccgcgcgggtcctgactgtgcgtggaaaggccgtgcgggtcctgactgtgtgtggaaaggccgtgcgggtcctgagtgtgtgtggaaaggccgtgcgggtcctgagtgtgcgtggaaaggccgtgcgggtcctgactgtgtgtggaacggccgtgcgggtcctgactgtgtgtggaaaggccgtgcagatcctgagtgtgtgtggaaacaccgtgcgggtcctgactgtgtgtggaaaggccgtgcagatcctgagtgtgtgtggaaacaccgtgcgggtcctgactgtgtgtggaaaggccgtgcagatcctgagtgtgtgtggaaacaccgtgcgggtcctgactgtgtgtggaaaggccgtgcgggtcctgactgtgtgtggaacggccgtgcgggtcctgactgtgtgtggaaaggccgtgcgggtcctgagtgtgtgtggaaaggccgtgcgggtcctgagtgtggaacggccgtgcgggtcctgactgtgtgtggaaaggccgtgcgggtcctgagtgtgtgtggataggctgtgcgggtcctgactgtgtgtggaaaggccgtgtgggtcctgactgtgtgtggaaaggccgtgcgggtcctgagtgtgtgtggataggctgtgcgggtcctgactgtgtgtggaaaggccgtgtgggtcctgactgtgtgtggaaaggacgtgcgggtcctgactgtgtgtggaaaggacgtgcgcgtcctgcgtgtggcgtggaaaggccgtgcgggtcctgagtgtgcgtggaaaggccgtgcgggtcctgactgtgtgtggaacggccgtgtgggtcctgactgtgcgtggaaaggccat

SEQ ID NO: 32794 - DNA, 1152 bp, Homo sapiens
  MAP TO AF129408.1; EXPRESSED IN PLACENTA, SIGNAL = 1.9; NT HIT: AL163279.2, EVALUE 0.00e+00; EST_HUMAN HIT: AI640519.1, EVALUE 0.00e+00; SWISSPROT HIT: P53749, EVALUE 5.80e-01
ccattgaaatctaacacattttctaaacttctgtcatcatccccatcatggtatctcacagtccttctaccctgatttctcgtttttatttttgaacgtcgaagaactcttttagattttgcatagtccaaatcctcccagtcattatcatccacacttaacctagggcgtttgctttgtctttgacgtctcacagttttagatatgttagctgtaaaagttttaccttttctaactacttttgcttttcctttcgttttcctccttttggtttttgtattatcagtacagtcaatatctgattcagttacagatcccaaatctgatgatttggaactagtatcaggtctaaactttgaattcccagttgtttcagagattttcacattttccaattcaggatgcgatctcttcctttttacttccttctctgctgtttcctgtgaatcatgaatcacttttgtcttactaaaaggagcctttccataggtcctgagtcttctgccattccacctgcgcagcccataattcagttccacttcaaaattattctctgcagtagctttttgtgccaaggttgactctgaagaaaatgtcctatcagtctcactccctggaatatgactttttgaatcttctcctgaagatgtaacagaggaactttttcttttagaaggtgcatctattttgtgaatattggtatgcctgtgcttgtgttctgaattcaacatatcttcagagtctgagtctccatttagagcctgactaagcacttttgtactaccttcggagtcaggatcaggtggcttgccttcacaggcatactgttcacttggtacttcacaatgtacacttccttcacaatcactcaatttcttcttagctgtagtacaagcaagatggagaggttttttccttccatttttgcttctagtgtgcacattttctaaactgacatcttctacatcactcatgagcttgatcttattggcagccgtagctgcacatcttcgagtaatcctcaggagacctgttctggcttttgatgatttcttaaccacctgtaaactactgtctgagtcactggaacagacccttttcctggaaatttttctgcttagtccattgtcttgtgatgcagaatctaaaagt

SEQ ID NO: 32795 - DNA, 338 bp, Homo sapiens
  MAP TO AC007099.3; EXPRESSED IN PLACENTA, SIGNAL =   1; SWISSPROT HIT: O08791, EVALUE 3.00e+00; EST_HUMAN HIT: AA425183.1, EVALUE 0.00e+00; NT HIT: gi11426348, EVALUE 6.00e-11
agcagctctgtactttgtttctggcgtgtgcatcgggctggtgctgaccctggctgctctggtgataaggatctcttgccacacagactgcaggcggcgtcccgggaagaagttcctgcaggacagagagagcagcagcgacagcagcgacagcgaggatggcagtgaggacaccgtgtccgatctctccgtgcggagacaccgccgcttcgagaggactttgaacaagaatgtgttcacctctgcggaggagctggagcgcgcccagcggctggaggagcgcgagcgcatcatcagggagatctggatgaatggccagcctgaggtgcccgggacca

SEQ ID NO: 32796 - DNA, 160 bp, Homo sapiens
  MAP TO AP000239.1; EXPRESSED IN PLACENTA, SIGNAL = 0.74; NT HIT: gi8922641, EVALUE 1.20e+00; SWISSPROT HIT: P47319, EVALUE 6.60e+00
taaacagtgggaaaatgtggcatcttttctccactatacatatctgtgtagccccaacaagcctctgacctttagacttctccagaatgatttagaggtcaatgtctatgtctccaaaactctggcagatacaagcaattctttcccaacaactaactag

SEQ ID NO: 32797 - DNA, 151 bp, Homo sapiens
  MAP TO AL049828.2; EXPRESSED IN PLACENTA, SIGNAL = 1.9; NT HIT: gi4758747, EVALUE 5.00e-03
gtatttatccctgatgtctagaacctcctacccagacattcctaaattgaagcttttggcaaagctgttatgtgagaacaagatgggaaaggaggaggcagcaaaggtacacagagaggaggaggataagaagaagaaaaagagcaaagaa

SEQ ID NO: 32798 - DNA, 2493 bp, Homo sapiens
  MAP TO AC004388.1; EXPRESSED IN PLACENTA, SIGNAL = 0.93; SWISSPROT HIT: Q14517, EVALUE 4.00e-65; EST_HUMAN HIT: AA224524.1, EVALUE 0.00e+00; NT HIT: gi11422681, EVALUE 0.00e+00
agtcaaaacatttttggcctcgatgtcattgaaacaccagaaggagacaagatgccacaactgattgttcaaaaggagttagatagggaagagaaggatacctacgtgatgaaagtaaaggttgaagatggtggctttcctcaaagatccagtactgctattttgcaagtgagtgttactgatacaaatgacaaccacccagtctttaaggagacagagattgaagtcagtataccagaaaatgctcctgtaggcacttcagtgacacagctccatgccacagatgctgacataggtgaaaatgccaagatccacttctctttcagcaatctagtctccaacattgccaggagattatttcacctcaatgccaccactggacttatcacaatcaaagaaccactggatagggaagaaacaccaaaccacaagttactggttttggcaagtgatggtggattgatgccagcaagagcaatggtgctggtaaatgttacagatgtcaatgataatgtcccatccattgacataagatacatcgtcaatcctgtcaatgacacagttgttctttcagaaaatattccactcaacaccaaaattgctctcataactgtgacggataaggatgcggaccataatggcagggtgacatgcttcacagatcatgaaatccctttcagattaaggccagtattcagtaatcagttcctcctggagactgcagcatatcttgactatgagtccacaaaagaatatgccattaaattactggctgcagatgctggcaaacctcctttgaatcagtcagcaatgctcttcatcaaagtgaaagatgaaaatgacaatgctccagttttcacccagtctttcgtaactgtttctattcctgagaataactctcctggcatccagttgacgaaagtaagtgcaatggatgcagacagtgggcctaatgctaagatcaattacctgctaggccctgatgctccacctgaattcagcctggattgtcgtacaggcatgctgactgtagtgaagaaactagatagagaaaaagaggataaatatttattcacaattctggcaaaagataacggggtaccacccttaaccagcaatgtcacagtctttgtaagcattattgatcagaatgacaatagcccagttttcactcacaatgaatacaacttctatgtcccagaaaaccttccaaggcatggtacagtaggactaatcactgtaactgatcctgattatggagacaattctgcagttacgctctccattttagatgagaatgatgacttcaccattgattcacaaactggtgtcatccgaccaaatatttcatttgatagagaaaaacaagaatcttacactttctatgtaaaggctgaggatggtggtagagtatcacgttcttcaagtgccaaagtaaccataaatgtggttgatgtcaatgacaacaaaccagttttcattgtccctccttccaactgttcttatgaattggttctaccgtccactaatccaggcacagtggtctttcaggtaattgctgttgacaatgacactggcatgaatgcagaggttcgttacagcattgtaggaggaaacacaagagatctgtttgcaatcgaccaagaaacaggcaacataacattgatggagaaatgtgatgttacagaccttggtttacacagagtgttggtcaaagctaatgacttaggacagcctgattctctcttcagtgttgtaattgtcaatctgttcgtgaatgagtcggtgaccaatgctacactgattaatgaactggtgcgcaaaagcactgaagcaccagtgaccccaaatactgagatagctgatgtatcctcaccaactagtgactatgtcaagatcctggttgcagctgttgctggcaccataactgtcgttgtagttattttcatcactgctgtagtaagatgtcgccaggcaccacaccttaaggctgctcagaaaaacaagcagaattctgaatgggctaccccaaacccagaaaacaggcagatgataatgatgaagaaaaagaaaaagaagaagaagcattcccctaagaacttgctgcttaattttgtcactattgaagaaactaaggcagatgatgttgacagtgatggaaacagagtcacactagaccttcctattgatctagaagagcaaacaatgggaaagtacaattgggtaactacacctactactttcaagcccgacagccctgatttggcccgacactacaaatctgcctctccacagcctgccttccaaattcagcctgaaactcccctgaattcgaagcaccacatcatccaagaactgcctctcgataacacctttgtggcctgtgactctatctccaagtgttcctcaagcagttcagatccctacagcgtttctgactgtggctatccagtgacgaccttcgaggtacctgtgtccgtacacaccagaccg

SEQ ID NO: 32799 - DNA, 101 bp, Homo sapiens
  MAP TO AL031734.9; EXPRESSED IN PLACENTA, SIGNAL = 1.2; NT HIT: Y08310.1, EVALUE 1.80e-01
aattcctatctgttctattcctaccatatttatagagactcttccttgaccttccgcaaaaaccaggaaaaaatttccgttagtaaaatgagctttttcat

SEQ ID NO: 32800 - DNA, 526 bp, Homo sapiens
  MAP TO AC007304.11; EXPRESSED IN PLACENTA, SIGNAL = 0.66; NT HIT: AE004329.1, EVALUE 3.30e-01; EST_HUMAN HIT: N76915.1, EVALUE 8.50e-02; SWISSPROT HIT: P22711, EVALUE 1.10e+00
aagccactgtctcagtgtcaggcacatagtgggcttgttctttgtgccccaaagctgcagtgttatcttcttcctgtgttggaaggaaagcaggatccctatttcctcttccaatccattgaacataaccctggttcttgggcatatggctatgtgggacagcatactagagagaaattgtggcgtctctgagacaaccactgaaaataagttcctaagaaaacccacatcaaatggaagccccaaagccatcacatgtcctgtggcagccccggatcctaagataccagcaacaacagcatcttgccttcaaagagcacattttctttcgcaaagcattttccaacacagcatctcattttatggtcaaagcaaacctgtgcacgtcaggcaggtgacagtatgcccacccgatgaagacaaaaaaggggtaagaataagtggaattctatccacagtgctgaaggccttggtaaatactgctaagtcatcctgtaggttgaaaattggcacagctatcataaaa

SEQ ID NO: 32801 - DNA, 195 bp, Homo sapiens
  MAP TO AC007842.1; EXPRESSED IN PLACENTA, SIGNAL = 1.2; NT HIT: gi11427704, EVALUE 2.00e-25; EST_HUMAN HIT: AV686758.1, EVALUE 2.00e-25; SWISSPROT HIT: Q9Y2G7, EVALUE 2.00e-12
gtatctttggcatttagggatgtgtccatagacctctcccaagaggagtgggagtgcctggacgctgtgcagagggacttgtacaaggatgtgatgttggagaactacagcaacctggtctcactgggtaaggtatctttcgaaatcgtttacaatctgttttctggagtatcagctttctccactgtcaaactt

SEQ ID NO: 32802 - DNA, 481 bp, Homo sapiens
  MAP TO AC007480.1; EXPRESSED IN PLACENTA, SIGNAL = 0.94; NT HIT: S69002.1, EVALUE 0.00e+00; EST_HUMAN HIT: AA132806.1, EVALUE 2.00e-48; SWISSPROT HIT: Q03112, EVALUE 2.00e-89
tttttcccccaaacacgtggttttttcgaggctcagtcagctttgtcccactggctctactcctactgcccatacttagatccaggggctggtcttggcttgtggcaggtgtcactggaggcttggaggggactggagtcaagggcttctcatcctttcgcttagtggtgagatcaaagggggactcagagctgcccttctgcagtttctttacttcacctggtgattggggttccattttcaaaggtaacgatctcaagtctctatcaggaaatgggtacattgattgagagaatgctggaaaaaatgggaggggaaacatggaagggtaaggtaaagctccaacttttttgtcttgcagccccaccagtcctgttgaaccaaagtatttttcagcaatagaagcaatagcctttatagaatcattcacagctcctgacaccgcagtctgctcctctaaagatggtgagaaaatggaatg

SEQ ID NO: 32803 - DNA, 491 bp, Homo sapiens
  MAP TO AL122001.5; EXPRESSED IN PLACENTA, SIGNAL = 1.9; SWISSPROT HIT: P31792, EVALUE 4.00e-26; EST_HUMAN HIT: AU134310.1, EVALUE 0.00e+00; NT HIT: AF009668.1, EVALUE 0.00e+00
agcttgccaacggggcaagacttttctttatatgtcacagaaaaaaacaggaataactctaggagtccttacacaggtccaaggaacgagcttgcaacccgtggcagacctgagtaaggaaattgatgtagtggcaaagggttggcctcattgtttatgggtaatggtggcagtagcaatcttagtatctgaagcagttaaaataatacaggaaagagatcttactgtgtggacatctcatgatgtgaacagcatactcactgctaaaggagacctgtggctgtcagacagccatttacttaaataccagggtctattacttgaagggccagtgctgcaactgtgcacttgggcaactcttaacccagccacatttcttccagacattgaaaaaaagatagaacgtaactgtcaacaggtgattgctcaaacctatgccgctcgaggaaaccttctagaggttcctttgactgatcctgacctcaacttgt

SEQ ID NO: 32804 - DNA, 141 bp, Homo sapiens
  MAP TO AC010872.3; EXPRESSED IN PLACENTA, SIGNAL = 4.1; NT HIT: Z79163.1, EVALUE 6.90e-02; EST_HUMAN HIT: AI150636.1, EVALUE 8.20e-02; SWISSPROT HIT: P40560, EVALUE 8.80e+00
agattttggaaaatattctagttctacttgaaaatattctgcatatccagcttgtaacataagagagataacatcaatattttctgaggcttcaacactttgaatatttacagtgtacttgtcatctttttttgctataac

SEQ ID NO: 32805 - DNA, 1332 bp, Homo sapiens
  MAP TO AL049796.19; EXPRESSED IN HELA, SIGNAL = 1.7; EXPRESSED IN PLACENTA, SIGNAL = 1.1; EXPRESSED IN HBL100, SIGNAL = 1.3; NT HIT: gi11421343, EVALUE 0.00e+00; EST_HUMAN HIT: AU130849.1, EVALUE 0.00e+00; SWISSPROT HIT: P32583, EVALUE 2.00e-04
agttttgctgctaatgggattcaagcgcatccagaaagtagtactggatctgatgcccgaactactgctgaatcacagaccactgggaagcaaagtttaatccctagaactcctaaagctagaaagaggaagagcagaactacaggctcactaccaaaggggactgaaccatctacggatggagaaacctctgaggcagagtcaaattattctgtgtctgagcaccatgataccattttaagggtaactaggagaaggcagatcttaattgcatgctccccagtgtccagtgttaggaaaaagccgaaagtaactccaacaaaggagtcttacactgaagaaatagtgtctgaagcagaatctcatgtttcaggtatttctagaattgtgcttcctacagaaaaaactacaggagccagaagaagtaaggctaaatctctgacagatccaagccaagaatctcatacagaagctatatctgatgctgagacatcaagctcagacatttcattctctggaattgcaactagaagaaccaggagtatgcagaggaaattaaaggcacaaactgaaaagaaagatagtaagattgtaccaggaaatgagaaacagatcgtgggtacacctgtgaattcagaggattcagataccagacaaacttcccatttacaagcaagatctctttctgagataaataagccaaatttctataataatgactttgatgatgatttctcccacagaagttcagaaaatatattaacagtgcacgaacaggccaatgttgaatctcttaaagaaacaaaacagaattgtaaggatttggatgaagatgccaatggaataacagatgaggggaaagaaattaatgagaaaagttctcagctgaagaatctttctgaacttcaggacactagccttcaacagttagtttctcagagacattcaaccccccaaaataaaaatgctgtatcagtgcactctaatctgaactctgaggctgtaatgaaatcattaactcaaacatttgcaactgtggaagtaggcagatggaataacaacaaaaagagccccataaaagcaagtgacttgacaaagtttggtgattgtggtggtagtgatgatgaagaagagtccacagttataagtgtcagtgaagacatgaacagtgaagggaatgtagattttgaatgtgataccaaactatacacgtctgcgcccaacacatctcagggtaaagataattctgtcttactagttctcagcagtgatgaaagccaacagtctgaaaacagtgagaatgaagaggatactttatgttttgttgaaaat

SEQ ID NO: 32806 - DNA, 210 bp, Homo sapiens
  MAP TO AC007317.3; EXPRESSED IN PLACENTA, SIGNAL = 0.93; SWISSPROT HIT: P37128, EVALUE 7.20e-01; NT HIT: AL163206.2, EVALUE 2.00e+00; EST_HUMAN HIT: AW850159.1, EVALUE 3.20e-02
ctcttcactgcttccaggatgccaaattttgatgtcaactattgttttctttctgttaccatagtgaatgatagaatggattgctaaagtcccttggagaaagatttctttctttttaaaacaaacgttatttttttttcttctgaagaacaatgctatgcgcacaatgtagtactttgaagtctttaggattttgatcattataatttc

SEQ ID NO: 32807 - DNA, 197 bp, Homo sapiens
  MAP TO AC007567.1; EXPRESSED IN PLACENTA, SIGNAL =  97; EXPRESSED IN HELA, SIGNAL = 0.62; SWISSPROT HIT: O08357, EVALUE 1.60e+00; EST_HUMAN HIT: BE782751.1, EVALUE 6.90e-01
atacttcctgccccgcagccatctctggtgccaagttgtctgccccattcttgttcagtttcctgttcattaacttctggctcattattacattagtatccctaaagtccacatttgcatcaccacacatgaaaaacgttttgtctatagcaaaaaggggcacagtgatgacatatatgatttggtacagaactact

SEQ ID NO: 32808 - DNA, 142 bp, Homo sapiens
  MAP TO AL035695.17; EXPRESSED IN PLACENTA, SIGNAL = 0.83; NT HIT: M34956.1, EVALUE 6.90e-02; EST_HUMAN HIT: BF676776.1, EVALUE 1.20e-01
tagtaacagacggtggggaggaggggaagaaggaggaagaggaggaaaaggagatgactcagctatagttcccctaaccctcttggtttatgaagcagctcagaaacttattagaacaaattccagcatccgagaccactga

SEQ ID NO: 32809 - DNA, 157 bp, Homo sapiens
  MAP TO AL096792.5; EXPRESSED IN PLACENTA, SIGNAL = 4.7; NT HIT: X69786.1, EVALUE 3.00e-01; EST_HUMAN HIT: BE219340.1, EVALUE 1.00e-03
ctgaagtttcagaaactcacatttcttctacagtccttgtttttgtctctcctgctatctttggatttccctagaaactacctcttaaatagagtctgtgtcttgcaactcttgcaatttcagtccactcttattatcctggagccccaatttgttg

SEQ ID NO: 32810 - DNA, 221 bp, Homo sapiens
  MAP TO AL034452.8; EXPRESSED IN PLACENTA, SIGNAL = 0.63; NT HIT: L02917.1, EVALUE 2.10e+00; EST_HUMAN HIT: AA451616.1, EVALUE 1.00e-103; SWISSPROT HIT: O53653, EVALUE 2.10e+00
aatttttaaaaaaagactttttaaaattcattttcttgttgaaactaactgcataccttttaatcctctgacacctggacgtccagggacacccactaatccaggaacaccatctcttcctggcaaaccaggtaatcctctgggaccctctgggcctatcggaccaggtggcccaggaatacccggggagccatgttgggacaggcaatgatcacaatttc

SEQ ID NO: 32811 - DNA, 101 bp, Homo sapiens
  MAP TO AL132776.1; EXPRESSED IN PLACENTA, SIGNAL = 1.4; NT HIT: AB018319.1, EVALUE 2.00e-50; EST_HUMAN HIT: AA325564.1, EVALUE 4.00e-50
tgtaaagcagctagtcagtcaaagtaagaagactgggcagggagattatcccttgaataatgaattagacaaagaacaagaagatgttgccagtactactc

SEQ ID NO: 32812 - DNA, 114 bp, Homo sapiens
  MAP TO AC008269.1; EXPRESSED IN PLACENTA, SIGNAL = 0.62; NT HIT: AF111167.2, EVALUE 1.00e-03; EST_HUMAN HIT: T65891.1, EVALUE 7.00e-08
ttgagggtgtcacatctgatgagggccttcttgctcatggagactctctgcagaattccaaggcagtacacggtgtcacatggcaagggggtaaggcagctgagcttgctggct

SEQ ID NO: 32813 - DNA, 320 bp, Homo sapiens
  MAP TO AF130358.1; EXPRESSED IN PLACENTA, SIGNAL = 0.96; EST_HUMAN HIT: AW300367.1, EVALUE 2.00e-01; SWISSPROT HIT: Q63120, EVALUE 9.00e-16; NT HIT: AL163206.2, EVALUE 0.00e+00
cgaaaaacaaaaattctcatcttggatgaagcaacagcctccattgactttgagatggacaagttggtgcagaccacaatcaggaaggagttttctgattgcatcatcctgaccattgctcacagactgcaatctatcattgattcagacaagtgtgctttctttcttttcagaaataaaatcatttctgccaagataaatattgggcatatgaaacacactgattacatgccggtcataaataattatatctgtgctgagagatacaaaattttccctaatgatataaaaggtattttccaaaatcactggaagaaaaa

SEQ ID NO: 32814 - DNA, 125 bp, Homo sapiens
  MAP TO AF067845.1; EXPRESSED IN PLACENTA, SIGNAL = 1.9; SWISSPROT HIT: P29652, EVALUE 9.20e+00
gaaggagagctgcttcttgcagcagggtttgtaggaatgaaagatggaaaatgaacgcgagtgtccatctgtaggaaaacagccacttcactgtgcatctgtgcagggagcaccatgaagcccat

SEQ ID NO: 32815 - DNA, 127 bp, Homo sapiens
  MAP TO AL008710.1; EXPRESSED IN PLACENTA, SIGNAL = 1.5; NT HIT: D85244.1, EVALUE 1.10e+00
gaagacaaaacccagctactgtatcagtatgatgataaggcaagctcatcttctagcatcaaggagaggattgttgaagatgcaggtgagcatatctctatgcattatgtttatatgtgtgtggtat

SEQ ID NO: 32816 - DNA, 527 bp, Homo sapiens
  MAP TO AC010904.2; EXPRESSED IN PLACENTA, SIGNAL = 5.1; NT HIT: AB007546.1, EVALUE 3.00e-10; SWISSPROT HIT: P40889, EVALUE 7.50e-02; EST_HUMAN HIT: AI459161.1, EVALUE 6.00e-12
ctaactctgttgttcagagcaatgtcccctatcctattggtacttcctgttccattgacaaactctgtcctattagtatttactgttctgctggttatttcctgttctcttggcatctcctgtcctgttagcatttcctgttttataacagtggcatcacctgtcctgttagtattgtctgtcctattagccatccctgctctattttctgttctgttaacatcccctgtcctattagtatttcctgtcctattagtattttctgtcctgttgacatcacctctcctgttagtactttcagtcctattagcatcccctgttctattagtattttctattcttttaacatcccctgtcctcttagtattttctgtcctattggcatcatctgtcctattagtattagaatgtcctgttgacattctctgtcctgttagtatttcttcttctattggcatcctctgtgtatttttctgttgttgcattgctataaataaatacccaagactgggcaatttataaagaaa

SEQ ID NO: 32817 - DNA, 396 bp, Homo sapiens; identical to SEQ ID NO: 16335
  MAP TO AL034410.8; EXPRESSED IN PLACENTA, SIGNAL = 1.1; SWISSPROT HIT: O84457, EVALUE 6.40e+00; EST_HUMAN HIT: R58924.1, EVALUE 5.70e+00

SEQ ID NO: 32818 - DNA, 110 bp, Homo sapiens
  MAP TO AC007751.3; EXPRESSED IN PLACENTA, SIGNAL = 0.98; EST_HUMAN HIT: AW500547.1, EVALUE 4.00e-03; SWISSPROT HIT: P22897, EVALUE 9.10e+00; NT HIT: AE004247.1, EVALUE 6.10e-02
agtaggaaccaaaatagagcttctagtgagccccaggagcattgggtaaccaagcaaagtacctgcctggccattgtgtccattgctgtcccagaaactggagactgtgg

SEQ ID NO: 32819 - DNA, 245 bp, Homo sapiens
  MAP TO AC012447.2; EXPRESSED IN PLACENTA, SIGNAL = 1.1; SWISSPROT HIT: P04929, EVALUE 1.80e-01; EST_HUMAN HIT: AV726632.1, EVALUE 0.00e+00; NT HIT: AB014522.1, EVALUE 1.00e-122
aagttctgcaggcccagaagcccttctttcctttctgaccagtttgaactagcacagtggttgagaacttctgctacatcctcagtctgccgcagataatggggaatgccaccattcctggagccatatgagcgctcagagcaaacacttgaggcatcactgttggcatcatcgtcagaatacatcccatacggctcatatctcctcctcacaggcttcttctgacaggtccaatgagggatggg

SEQ ID NO: 32820 - DNA, 122 bp, Homo sapiens
  MAP TO AP000116.1; EXPRESSED IN PLACENTA, SIGNAL = 0.6; NT HIT: Y10196.1, EVALUE 4.00e-09; EST_HUMAN HIT: AA921958.1, EVALUE 1.00e-09; SWISSPROT HIT: P32568, EVALUE 5.20e+00
tgagggccctctttgtggtgtgcagacagtcaccttcctgctggcagaaggagagatcatctctctgatgtctgttcttataagggtaccaatcccattcatgaaggctccactctcatgat

SEQ ID NO: 32821 - DNA, 120 bp, Homo sapiens
  MAP TO AC007597.2; EXPRESSED IN PLACENTA, SIGNAL = 0.72; NT HIT: AJ400877.1, EVALUE 1.00e-03; SWISSPROT HIT: P08548, EVALUE 9.10e-02; EST_HUMAN HIT: BE784819.1, EVALUE 3.00e-05
ccattctagtggtacagtggaatctctatatggttttaatttgctggtggctaatgatgttgagtatctttttcatgtgcttattggtcattttggcatcctctttgttgaagtacctgt

SEQ ID NO: 32822 - DNA, 176 bp, Homo sapiens
  MAP TO AC007366.2; EXPRESSED IN PLACENTA, SIGNAL = 3.3; SWISSPROT HIT: Q15051, EVALUE 1.70e+00; NT HIT: Y13932.1, EVALUE 1.00e-80; EST_HUMAN HIT: AA339493.1, EVALUE 2.70e-02
aaggataagaaatttgaaactacagtaatgctaactgatagacgcgttaaattcagatgtactggcttctgtttcatggaacctacgtttatttcttctgctgtcccacatttaattgataacgacatcactacaagtataagaaaaggaagcagagtgaggtttacggatgagca

SEQ ID NO: 32823 - DNA, 724 bp, Homo sapiens
  MAP TO AL032818.2; EXPRESSED IN PLACENTA, SIGNAL = 1.3; SWISSPROT HIT: O35245, EVALUE 8.00e-07; EST_HUMAN HIT: BF185609.1, EVALUE 1.10e-02; NT HIT: gi11418311, EVALUE 0.00e+00
gtttctggtcttcagccccagataacggtggctgttcttctctggctgcccatacagcatgtcaataaagaactcaggctcatctttggccttagattgcgaggtcagaaagctgaacatggttctcagcttacggcacaaataggtcattgcttccacttcatccgatggctcctcatacacgggctgcttcatttcctcatatgcagacagaattacagcctgaaataagttgatcaagacgcagatcatcaccagcatgaaagatgagaggaacaggacccccagaatcctgttattggaaaattcagtgttctggaaagctgagacacaataggaaaatactgtctgagtggaatgaatcaagttactgtagttccattcatgctgaccaaacaccaggtaaccaaaagccatgtatacgaagaaatacacggacacaacaaatgccatgtggcagatgccagggagggcagcctggatggccctctgagccaggcgcacatcgtagaagaatctggaatacctgagggtcttcaaaattgtcagaaataacaggaaacccaaaattatcctcataatgtgatctacctgagaaactgcatgaaagggaatgaagtcttctgggttcgacaagtaaaaccgaattatgccagtggccaggaaatgtttcctgagaaagagcacaatcaacacagtaaatatgcactttaaagcaaagttg

SEQ ID NO: 32824 - DNA, 89 bp, Homo sapiens
  MAP TO AL030997.1; EXPRESSED IN PLACENTA, SIGNAL = 0.93; NT HIT: M96655.1, EVALUE 1.80e-01
ttgaagatccttcagataagtctacgccttcgtcctcctccttttggattggattgatggagttctcttgggactgttcattctccagt

SEQ ID NO: 32825 - DNA, 506 bp, Homo sapiens
  MAP TO AC007256.1; EXPRESSED IN PLACENTA, SIGNAL = 1.2; EST_HUMAN HIT: BE271526.1, EVALUE 0.00e+00; SWISSPROT HIT: Q14790, EVALUE 3.00e-99; NT HIT: gi11429899, EVALUE 0.00e+00
gggctttgaccacgacctttgaagagcttcattttgagatcaagccccacgatgactgcacagtagagcaaatctatgagattttgaaaatctaccaactcatggaccacagtaacatggactgcttcatctgctgtatcctctcccatggagacaagggcatcatctatggcactgatggacaggaggcccccatctatgagctgacatctcagttcactggtttgaagtgcccttcccttgctggaaaacccaaagtgttttttattcaggcttgtcagggggataactaccagaaaggtatacctgttgagactgattcagaggagcaaccctatttagaaatggatttatcatcacctcaaacgagatatatcccggatgaggctgactttctgctggggatggccactgtgaataactgtgtttcctaccgaaaccctgcagagggaacctggtacatccagtcactttgccagagcctgagagagcgatgtcctcggtaa

SEQ ID NO: 32826 - DNA, 218 bp, Homo sapiens
  MAP TO AC007511.1; EXPRESSED IN PLACENTA, SIGNAL = 0.92; NT HIT: AB018311.1, EVALUE 1.00e-115; EST_HUMAN HIT: T10303.1, EVALUE 1.00e-115; SWISSPROT HIT: P07245, EVALUE 1.60e+00
  unsure 217
cggcgaaatacctgagcaactgtgtgcaaatcatagaccgtggctataaccataacgagaccgccctagagaaaaagattctgaaggaactcacttccaactatatcccttcttacctgaacaaccatgagcgctccagtgaacagaacaggaatctgatgaacaagctggtgaataaccttggcagtggaagggaagatgatgccattgtcctggna

SEQ ID NO: 32827 - DNA, 174 bp, Homo sapiens
  MAP TO AL078582.7; EXPRESSED IN PLACENTA, SIGNAL = 0.92; EST_HUMAN HIT: BF576354.1, EVALUE 2.40e+00; SWISSPROT HIT: P49886, EVALUE 2.00e-12; NT HIT: AF123498.1, EVALUE 1.00e-93
ttcgacatgctgctggctacatcatctcggttccgcatgatgaatctgcagggagaggagtttgtgtgcctcaaatctattattttgcttaattctggtgagttgataacacaagataactcaatgctggatgaaatgtttatttgtagttttcaaccagatacgatctaccca

SEQ ID NO: 32828 - DNA, 110 bp, Homo sapiens
  MAP TO AC007744.1; EXPRESSED IN PLACENTA, SIGNAL = 0.74; NT HIT: M76714.1, EVALUE 6.10e-02; EST_HUMAN HIT: BE169546.1, EVALUE 9.60e-01; SWISSPROT HIT: P27711, EVALUE 8.00e-01
acagggcacaatacaatatggagacccagtgtgtcatcagttccaacctggtgctttgtttctgtctcaagcactaaccacatcctgagtatcagctggagtcctggata

SEQ ID NO: 32829 - DNA, 156 bp, Homo sapiens
  MAP TO AC007735.2; EXPRESSED IN PLACENTA, SIGNAL = 0.89; NT HIT: L34079.1, EVALUE 3.00e-10; EST_HUMAN HIT: AA177019.1, EVALUE 2.00e-06; SWISSPROT HIT: P08547, EVALUE 6.00e-05
ggaggaaaagcttcatccttacctcctcatgccatacacagaaaagaactcaaaatgcattacagacctaaatgtaaaatccaataatagaaagcttctaaaagaaaacacaggagaaaatctatatgaccttgagttaaacaaagagttttagac

SEQ ID NO: 32830 - DNA, 287 bp, Homo sapiens
  MAP TO AC008249.14; EXPRESSED IN HELA, SIGNAL =   1; EXPRESSED IN PLACENTA, SIGNAL = 1.8; EST_HUMAN HIT: BE892231.1, EVALUE 0.00e+00; NT HIT: AF167336.1, EVALUE 0.00e+00; SWISSPROT HIT: Q02955, EVALUE 7.00e-03
aacgctgcgatgactggggactagacaccatgaggcaaatccaagtgtttgaagatgagccagctcgcatcaagtgcccactctttgaacacttcttgaaattcaactacagcacagcccattcagctggccttactctgatctggtattggactaggcaggaccgggaccttgaggagccaattaacttccgcctccccgagaaccgcattagtaaggagaaagatgtgctgtggttccggcccactctcctcaatgacactggcaactatacctgcatgttaagg

SEQ ID NO: 32831 - DNA, 145 bp, Homo sapiens
  MAP TO AC006155.2; EXPRESSED IN PLACENTA, SIGNAL = 0.61; SWISSPROT HIT: P75608, EVALUE 2.30e+00; EST_HUMAN HIT: H28991.1, EVALUE 7.60e+00
cccaaagtctactctggaaacactcaaatatccttcaggagtggaagaggaaaagaaattccatggacagtcagaaccaacttttaaaggtaaaggtggggatgagaaagaaactcaaaacattgatgattttggtcttgttcca

SEQ ID NO: 32832 - DNA, 138 bp, Homo sapiens
  MAP TO AC006389.2; EXPRESSED IN PLACENTA, SIGNAL = 2.8; EST_HUMAN HIT: AA284847.1, EVALUE 8.00e-06; SWISSPROT HIT: P15772, EVALUE 9.10e+00; NT HIT: AF195953.1, EVALUE 1.00e-03
tgaagaggttgaacggagcagccttgcccccttctgccatgtgaggatgcagcaagaaagtgtcatctataaggaacaggccctcatcagacacagagtctactgttgctttgatcttggatttctcagcctccagaa

SEQ ID NO: 32833 - DNA, 291 bp, Homo sapiens
  MAP TO AC005017.1; EXPRESSED IN PLACENTA, SIGNAL = 0.66; EST_HUMAN HIT: W57759.1, EVALUE 6.70e-02; SWISSPROT HIT: P16342, EVALUE 7.70e-01; NT HIT: AF130875.1, EVALUE 1.80e-01
aatgcagtgaaccagacagacaccatccctagcctcatagagcttgcaattaaaaaccatactccaatggaaataaggaaagaaagaggcaaatgcccagacctctacttgctcttctggtcttccattgccttctcagctgttaaaccaactctttgtgtcatttcctttttgaacaatgaagggcctgctactggcctaacttataaggaaaagctcataaaattgatttgccagattgactcacaacccaaatgcatctcatttttatggcataaaacgaagatgtag

SEQ ID NO: 32834 - DNA, 347 bp, Homo sapiens
  MAP TO AC004080.1; EXPRESSED IN PLACENTA, SIGNAL = 3.9; EST_HUMAN HIT: AI346148.1, EVALUE 0.00e+00; SWISSPROT HIT: P49640, EVALUE 2.00e-36; NT HIT: U68782.1, EVALUE 0.00e+00
gcctacagccccacttcaatggcgtttgtgtgtctgtgtctgtacacgcctgtgctctggactcgctgtgcagggtccggctccgaggcgctggtcggcagtccgaacggagggagcgagacccccaagagcaacggcggcagtggtgggggcggctcgcaaggcaccctggcgtgcagcgccagtgaccagatgcgtcgttaccgcaccgccttcacccgagagcagattgcgcggctggagaaggaattctaccgggagaactacgtatccaggccgcggagatgtgagctggcggccgccctaaacctgccggaaaccaccatcaaggtatgcggggtccaggc

SEQ ID NO: 32835 - DNA, 396 bp, Homo sapiens
  MAP TO AC006372.2; EXPRESSED IN PLACENTA, SIGNAL = 0.8; EST_HUMAN HIT: AI205021.1, EVALUE 2.00e-12; NT HIT: AJ295844.1, EVALUE 4.00e-12; SWISSPROT HIT: P11369, EVALUE 3.00e-22
gtggctctccagctgtcccagcaccatttgttgcaagactgccctttccctattgaatggtcacagcacccttgttggaaatcagttgaccatagatgtgagggtttatttccagactgtcaattctatcccataatgaagaaagtaccacactattttgattactgttgctttttagtaagacttggaatcagagaatgtgagtcttccagctctgttctccttttccaagattgtcttggctattctgggcttcttgcaattctgtgtgacttccagaatcagcttcttaatttccacagagacatcagttgggattctgatagtgagtgcattgaatcggcagatcagtttggggaggactgctgttgtggcaatgtcaagtctttcaatcca

SEQ ID NO: 32836 - DNA, 181 bp, Homo sapiens
  MAP TO AC006270.1; EXPRESSED IN PLACENTA, SIGNAL = 4.1; NT HIT: AB046856.1, EVALUE 9.00e-98; EST_HUMAN HIT: BF379385.1, EVALUE 3.00e-95; SWISSPROT HIT: Q95323, EVALUE 3.90e+00
caatgatgccactatctctgctttcaagggtagaggttggactagtaacagccccatagctgcagtccttggcagttgcatttgtactgatgggtgggagtgtagagcaggggctactggctggtggagaggcagtgctgctagtcagagtggaacaaggacttatccgctgggtgattgc

SEQ ID NO: 32837 - DNA, 160 bp, Homo sapiens
  MAP TO AC005033.1; EXPRESSED IN PLACENTA, SIGNAL = 3.4; NT HIT: AF084363.1, EVALUE 7.00e-21; SWISSPROT HIT: O22469, EVALUE 4.00e+00; EST_HUMAN HIT: BE882304.1, EVALUE 4.00e-85
gtctgaaatgtgatctccaagagcgactgctctgcccatccctactcgctggcacagctgacggctccttgagaatggatgaccctaaaggagacttcatcacactctaccagatggcttcccagtcatcggcctctcattacaagctccaagtgatcaa

SEQ ID NO: 32838 - DNA, 144 bp, Homo sapiens
  MAP TO AC018787.3; EXPRESSED IN PLACENTA, SIGNAL = 0.58; SWISSPROT HIT: Q41066, EVALUE 3.10e+00; EST_HUMAN HIT: AV696098.1, EVALUE 3.10e-02
atgtgtggaagagaaaagggagctaagctggccaataaattaaaagctaaaggaaaggtgaaagaggaggttaatgaggagagcaaaggtgatgaagtcaaatcatgctgctgtgatctggcattagatgcccagtctgcataa

SEQ ID NO: 32839 - DNA, 243 bp, Homo sapiens
  MAP TO AL121894.14; EXPRESSED IN PLACENTA, SIGNAL = 0.49; SWISSPROT HIT: Q9Z0H6, EVALUE 2.00e-08; EST_HUMAN HIT: BE061586.1, EVALUE 1.00e-30; NT HIT: AB033763.2, EVALUE 5.80e-01
aaggacaggccagaagaggatgtggtcaccaacctttctgtccatgctatcctccctccatgaactcaggacgcgcaacagcctgtaggcatgctcctccttgctctgcacgttgaaagtgttcaaggcaaactccactgtggcgaggaacataggatcctggactattttattattaccacccatttcctcttcagaacaccaggcataagtcaccaggagctggaagcccatgagaagcag

SEQ ID NO: 32840 - DNA, 181 bp, Homo sapiens
  MAP TO AC022317.4; EXPRESSED IN PLACENTA, SIGNAL = 0.47; NT HIT: AF012097.1, EVALUE 7.00e-03; SWISSPROT HIT: Q42687, EVALUE 3.00e+00; EST_HUMAN HIT: AI866028.1, EVALUE 3.00e-03
gtatttctttgactatagtcatgtaatagacaaaagcacaaatgtggtgtctacttctaccactattaactgtaacaccttgaacaagttacttaacctcatgtgcctcaattttcttatttctaaaataagggtaataatgatacctgaaatcaaggaatgctgtgaagaatacataaac

SEQ ID NO: 32841 - DNA, 102 bp, Homo sapiens
  MAP TO AC008701.5; EXPRESSED IN PLACENTA, SIGNAL = 0.67; NT HIT: AF139827.1, EVALUE 4.00e-03
atggcctggagcgtgggtcttggagaagctgcagatttttatttagatttggatttttccactttctttcaggaagtcagtgtttggaaactggtggtcaag

SEQ ID NO: 32842 - DNA, 161 bp, Homo sapiens
  MAP TO AL137022.6; EXPRESSED IN PLACENTA, SIGNAL = 0.47; SWISSPROT HIT: Q64105, EVALUE 7.80e-01; EST_HUMAN HIT: BE163243.1, EVALUE 5.50e-01
aggcctggccagcttgtcttggcagaagctgcaggagcatgtgtgggagtgtgtgctgagggagctagaccaaggtggggggatggaagccttggtttgtccaaactcgttgccgtggatccttatccaggatttgggatttactgtgttggcctgagcac

SEQ ID NO: 32843 - DNA, 329 bp, Homo sapiens; identical to SEQ ID NO: 25657
  MAP TO AC009334.3; EXPRESSED IN PLACENTA, SIGNAL = 0.48; SWISSPROT HIT: Q99698, EVALUE 4.00e-58; NT HIT: U84744.1, EVALUE 0.00e+00; EST_HUMAN HIT: AA169312.1, EVALUE 1.90e-02

SEQ ID NO: 32844 - DNA, 105 bp, Homo sapiens
  MAP TO AC022036.3; EXPRESSED IN PLACENTA, SIGNAL = 0.51; SWISSPROT HIT: P08547, EVALUE 5.00e-03; EST_HUMAN HIT: AA191438.1, EVALUE 5.20e+00; NT HIT: Y12855.1, EVALUE 4.00e-03
attactaaagtcaacactacccaaatgtccatcaaaaataaagtggataaattcattgtggtgtattcatacactgaaataccattcatcagtaacatgaatcaa

SEQ ID NO: 32845 - DNA, 217 bp, Homo sapiens
  MAP TO AC013635.3; EXPRESSED IN PLACENTA, SIGNAL = 0.61; NT HIT: AE000348.1, EVALUE 1.30e-01; EST_HUMAN HIT: BE931532.1, EVALUE 4.90e-02
ctaattattgaggagattccacgtctggatatggttctgctcagagacctttagaaagtatatcttgtggatatacatgtgttttatacctgagcaaatgactgtactcaaagcagctgagaggagaattagtgcaggcaacagaacctgtacaaagttactgctgtggctcatatttttgttgaggtcatcgatgaagtcatggatgtcatgctgc

SEQ ID NO: 32846 - DNA, 144 bp, Homo sapiens
  MAP TO AC011229.2; EXPRESSED IN PLACENTA, SIGNAL = 0.46; NT HIT: U67578.1, EVALUE 8.20e-02; EST_HUMAN HIT: AI872302.1, EVALUE 3.10e-02
taccttgaagacaattctctgtcttgaaagattccctttcaagatgcaaattaacacaattatcttagttgaaaacatatttaggaggtatgcaatcaaaatattaaatcagttaaataaagccgacatgtgcaatcacatttg

SEQ ID NO: 32847 - DNA, 188 bp, Homo sapiens
  MAP TO AC019194.2; EXPRESSED IN PLACENTA, SIGNAL = 0.47; SWISSPROT HIT: Q14157, EVALUE 2.60e-01; NT HIT: J05109.1, EVALUE 2.80e-02; EST_HUMAN HIT: BF338393.1, EVALUE 6.50e-01
gttgccatggagtcgtggccccctcttctgatgacatcttcaagttggccgaagccaacgcctgctgggccctggaggacctgcggtgcatggaggaagacacattcatcaggaccgtggaactgctgggagctgtccagggtttcagccggcctcagctgatgaccctgaaggagaaagcaatacag

SEQ ID NO: 32848 - DNA, 113 bp, Homo sapiens
  MAP TO AC022474.3; EXPRESSED IN PLACENTA, SIGNAL = 0.47; NT HIT: AL163207.2, EVALUE 4.00e-03; EST_HUMAN HIT: AV710863.1, EVALUE 2.30e-02
gagacactgaagataaaggaaatggcctctatccttcttctggtgcccttaacgttaattcctggaactcctacaaccatctcataacaatcatggaggaaggcaaaccctag

SEQ ID NO: 32849 - DNA, 105 bp, Homo sapiens
  MAP TO AC012686.3; EXPRESSED IN PLACENTA, SIGNAL = 0.47; SWISSPROT HIT: Q01970, EVALUE 9.40e+00; EST_HUMAN HIT: AW024390.1, EVALUE 1.30e+00; NT HIT: AE001708.1, EVALUE 3.50e+00
ataccagaaagccactaaaggttttcaagaagaggatgatgtgaccatagctgttcctcttacagattcagacaccgatttgagagggacttcgaaggttaaagt

SEQ ID NO: 32850 - DNA, 264 bp, Homo sapiens
  MAP TO AL133414.3; EXPRESSED IN PLACENTA, SIGNAL = 0.46; SWISSPROT HIT: Q14953, EVALUE 2.00e-47; EST_HUMAN HIT: AW951147.1, EVALUE 4.00e-37; NT HIT: AF208054.1, EVALUE 0.00e+00
gtcccctggtgaaatcagaagagacagtcatcctgcaatgttggtcagatgtcatgtttgagcacttccttctgcacagagaggggacgtttaaccacactttgcgcctcattggagagcacattgatggggtctccaagggcaacttctccatcggtcgcatgacacaagacctggcagggacctacagatgctacggttctgttactcactccccctatcagttgtcagcgcccagtgaccctctggacatcgtgatcacag

SEQ ID NO: 32851 - DNA, 134 bp, Homo sapiens
  MAP TO AC009049.3; EXPRESSED IN PLACENTA, SIGNAL = 0.46; SWISSPROT HIT: P46300, EVALUE 5.30e+00; EST_HUMAN HIT: AW974590.1, EVALUE 4.50e-01; NT HIT: D90904.1, EVALUE 3.00e-01
gcacaagctatgttacttgctcgaagttgcatagcacagaaatagagaagtctggattcaaactcagtcgtatccaaagccagagtgttggcagtaataatttcccacatactgctagtagggcaaatgatcca

SEQ ID NO: 32852 - DNA, 149 bp, Homo sapiens
  MAP TO AC018578.3; EXPRESSED IN PLACENTA, SIGNAL = 0.47; EST_HUMAN HIT: AW063430.1, EVALUE 7.90e+00; SWISSPROT HIT: P06828, EVALUE 1.80e+00
cagatcagtgatggaagtgtagagcatatctctgcactgaaggctgaaatcacctctgagacaccagcaagacccagcatggagccaaaggaggactgatggagagtggccccaccattgtgaatgctggcattggagcccatcacaac

SEQ ID NO: 32853 - DNA, 139 bp, Homo sapiens
  MAP TO AL133352.10; EXPRESSED IN PLACENTA, SIGNAL = 0.51; SWISSPROT HIT: Q93098, EVALUE 3.00e-22; NT HIT: X91940.1, EVALUE 8.00e-73; EST_HUMAN HIT: AW408992.1, EVALUE 1.80e+00
gcttacctgatttactccagcagtgtggcagctggtgcccagagtggtattgaagaatgcaagtatcagtttgcctgggaccgctggaactgccctgagagagccctgcagctgtccagccatggtgggcttcgcagtg

SEQ ID NO: 32854 - DNA, 124 bp, Homo sapiens
  MAP TO AC019281.4; EXPRESSED IN PLACENTA, SIGNAL = 0.46; SWISSPROT HIT: Q06221, EVALUE 9.20e+00; NT HIT: AE001310.1, EVALUE 2.80e-01
atggatggttctaacatggcagagagtgactgaacttttagaggagtcaatgttcttggagcagatagtttcccaattggtccaattttccctggagttgcaggagaggacagcaaggatggtg

SEQ ID NO: 32855 - DNA, 168 bp, Homo sapiens
  MAP TO AL121713.24; EXPRESSED IN PLACENTA, SIGNAL = 0.46; NT HIT: AF095703.1, EVALUE 1.00e-04; EST_HUMAN HIT: AW273794.1, EVALUE 7.00e-90; SWISSPROT HIT: Q58425, EVALUE 3.00e+00
taatgctaatcgaggaaatggtcctcgaggaaatgacgctgcagcaacagcatcacctggggacttgttagcaacagaagttctcagactccgccatagaactactgaatcagaaattctggaataaggcccagcattccatgttctaacaaaccttccaggtgactg

SEQ ID NO: 32856 - DNA, 80 bp, Homo sapiens
  MAP TO AL096800.20; EXPRESSED IN PLACENTA, SIGNAL = 0.5; NT HIT: gi11418320, EVALUE 6.40e-01
caaatgttatgggtttgacagcccagaagatggcatcccctgggaggaatacagctctaactaagttgacaagttttgtg

SEQ ID NO: 32857 - DNA, 181 bp, Homo sapiens
  MAP TO AL139195.2; EXPRESSED IN PLACENTA, SIGNAL = 0.57; NT HIT: gi11434344, EVALUE 4.00e-72; EST_HUMAN HIT: BE694355.1, EVALUE 4.00e-11; SWISSPROT HIT: P33056, EVALUE 3.90e+00
gtttgatttcaaatacattttgaataagtttagccaggactgtttctggattactgaagatatctccaacttgtttgttcactctttgacagagtattccagcgtcttcaaatatatcatttctcaaataagcaccctaaacagcagagacattttatacagtgaacatataatttctaca

SEQ ID NO: 32858 - DNA, 94 bp, Homo sapiens
  MAP TO AC010767.3; EXPRESSED IN PLACENTA, SIGNAL = 0.46; NT HIT: AF245699.1, EVALUE 7.80e-01; EST_HUMAN HIT: AW294100.1, EVALUE 2.90e-01; SWISSPROT HIT: P13608, EVALUE 9.50e+00
gtgttcgtcagatacccctgacctatctggctatgaggtgtcaggcactgtatttggtgttgctgatatggtgtcaagtacaatgatagagcaa

SEQ ID NO: 32859 - DNA, 136 bp, Homo sapiens
  MAP TO AC013726.3; EXPRESSED IN PLACENTA, SIGNAL = 0.49; SWISSPROT HIT: P10523, EVALUE 3.00e-20; EST_HUMAN HIT: W28472.1, EVALUE 4.00e-69; NT HIT: U70968.1, EVALUE 5.00e-71
ctctttgttgagagagaccgcaaggtgcaggggcttgtcagacatgaagaactgccaggccgcctcagctcggggctggggacccatctcaagtggggcatgctgtactttgcggatcagtaatcgcacggagctc

SEQ ID NO: 32860 - DNA, 258 bp, Homo sapiens
  MAP TO AC022474.3; EXPRESSED IN PLACENTA, SIGNAL = 0.54; EST_HUMAN HIT: N66240.1, EVALUE 6.00e-08; SWISSPROT HIT: P08548, EVALUE 2.00e-07; NT HIT: AL163302.2, EVALUE 1.00e-11
atgagagaggttgatggcaatgtaatactagtaggaatcttcaacactctgctttcagcaatggacagatcatccatacagaaaatcaacaacaataacaaaaaagcattgaagttaaactatactgtagtcctaattgacctaacaaacatttacagagcattcattctatccaatagctacaaaatgcacattgttctcaacaacacatggaacattatccagaatagaccaaatgttaggtcacaaaacaagtct

SEQ ID NO: 32861 - DNA, 105 bp, Homo sapiens
  MAP TO AC018684.2; EXPRESSED IN PLACENTA, SIGNAL = 0.48; EST_HUMAN HIT: AV730682.1, EVALUE 8.40e-02; NT HIT: U29153.1, EVALUE 2.30e-01; SWISSPROT HIT: P37580, EVALUE 1.10e+00
tagctttgtcaggttttgatatcaagtttgtcatggtaaattatgtgagcatctctaccaaaatccctatcctgtacataaatgtcaccaccacaaccaccaaga

SEQ ID NO: 32862 - DNA, 225 bp, Homo sapiens
  MAP TO AC016113.4; EXPRESSED IN PLACENTA, SIGNAL = 0.48; EST_HUMAN HIT: BE833329.1, EVALUE 8.00e-01; SWISSPROT HIT: P10845, EVALUE 1.30e+00; NT HIT: AF090441.1, EVALUE 8.40e+00
atgagcacagtgtcctacttattcaagtgcagaactgagttgcagctggtgttcaacaaggaaaggaggtggtgtgagggcatagcaaactcaagcactattcaggaaaccatcattttgaagcaaataaaccagtggatagagcaggacaaagacaatgccacacccctgttcaattctgaacttgggcaagatggctggtgctggaagaccaggatccagtgc

SEQ ID NO: 32863 - DNA, 155 bp, Homo sapiens
  MAP TO AC016224.6; EXPRESSED IN PLACENTA, SIGNAL = 0.54; NT HIT: AF245505.1, EVALUE 6.00e-03; SWISSPROT HIT: O05209, EVALUE 5.20e+00; EST_HUMAN HIT: AW888221.1, EVALUE 9.00e-03
gattgcatttcattatgcttccgttcccctagaaaataaatgtgctccttttcccaacaattgtagaggagaaatacttctgacatctcaaatttcagcctctggaagacgtccctcttctggacatgaaagtcatttgtttcctggacattcat

SEQ ID NO: 32864 - DNA, 102 bp, Homo sapiens
  MAP TO AC012686.3; EXPRESSED IN PLACENTA, SIGNAL = 0.7; EST_HUMAN HIT: AW269778.1, EVALUE 8.10e-02; NT HIT: AF198490.1, EVALUE 8.60e-01
ctttcttcatcaccgaatgcctccttggaactgaagacatttgcccacgctacactcattgtctgtatcatatgccttttcatggtcgtccattcctctctc

SEQ ID NO: 32865 - DNA, 85 bp, Homo sapiens
  MAP TO AL160281.2; EXPRESSED IN PLACENTA, SIGNAL = 0.49; NT HIT: AF289667.1, EVALUE 2.70e+00; EST_HUMAN HIT: BF694659.1, EVALUE 6.60e-02
acacagactccccatcttgctgctgagccacatcaccttgacacataacgccttctccaattcccttctccaccaggagttccat

SEQ ID NO: 32866 - DNA, 225 bp, Homo sapiens
  MAP TO AC015493.4; EXPRESSED IN PLACENTA, SIGNAL = 0.54; NT HIT: gi11437907, EVALUE 5.40e-01; SWISSPROT HIT: P40190, EVALUE 1.00e-03; EST_HUMAN HIT: AA931321.1, EVALUE 1.00e-104
cttgcagatatcactccattgcccaggaccattatcattgatggctctaactttaaacacgtattctgtgttgggggtcaggttgtgcagctccagattttgctgcattatgtcccgaatttgtccacagagctccatttgtacgttgttaggaggagaagtaatgacttcatagaattccatctcaaaagagtccacgtcttctgctggacatgtccagtaaac

SEQ ID NO: 32867 - DNA, 120 bp, Homo sapiens
  MAP TO AC011957.2; EXPRESSED IN PLACENTA, SIGNAL = 0.58; NT HIT: AF281074.1, EVALUE 2.70e-01; EST_HUMAN HIT: BF214537.1, EVALUE 3.90e-01; SWISSPROT HIT: P24394, EVALUE 2.40e+00
acagccacagagcgctggagctgggaggaaccttccagatccctcaggggctggactgcttatctccacagcagcagccccgcacctctgaggcaacaaagctagaagctgtcatttcaa

SEQ ID NO: 32868 - DNA, 97 bp, Homo sapiens
  MAP TO AC021383.3; EXPRESSED IN PLACENTA, SIGNAL = 0.54; EST_HUMAN HIT: BE765244.1, EVALUE 4.70e+00; NT HIT: AE001226.1, EVALUE 8.10e-01
agacagcccattgaaaatcattgcaaaggaaagcagttatcaaactgctgacatgttctgccttccactttatcacctagcagtcttcaactacttg

SEQ ID NO: 32869 - DNA, 154 bp, Homo sapiens
  MAP TO AC015873.2; EXPRESSED IN PLACENTA, SIGNAL = 0.46; EST_HUMAN HIT: AA977090.1, EVALUE 2.10e+00; NT HIT: X52332.1, EVALUE 6.00e-03; SWISSPROT HIT: P51786, EVALUE 1.00e-04
gcacagtctgaaccacggtgtccttcaaaaagtcggtgcccttcaaggatctggttgtgaacatcaccagggaggagtgggcactactggacatagccctgaggaagcacagaggcatgatgctggagatcttgagtcctgtggcatctgtggc

SEQ ID NO: 32870 - DNA, 162 bp, Homo sapiens
  MAP TO AC018525.4; EXPRESSED IN PLACENTA, SIGNAL = 0.46; SWISSPROT HIT: P38994, EVALUE 2.30e+00; NT HIT: U08361.1, EVALUE 3.70e-01
gagcaggtggtatcattaataagaccagttatgtttctgttgatgaagatggaattggactggtatagaggcatgtagataagccaaatcccttttataccaaaaggagagagtccaagttccaggaaatatttagcagcatctggtgtcttacgggcacat

SEQ ID NO: 32871 - DNA, 87 bp, Homo sapiens
  MAP TO AC022015.2; EXPRESSED IN PLACENTA, SIGNAL = 1.2; NT HIT: AB011171.1, EVALUE 1.80e-01; EST_HUMAN HIT: BF314453.1, EVALUE 2.70e-01
ttagttgtcattattttgtacaaatctctcttttgcctcaagtggttttaagagttcatccttggtgttctgcattttcatcagcag

SEQ ID NO: 32872 - DNA, 300 bp, Homo sapiens
  MAP TO AL161756.1; EXPRESSED IN PLACENTA, SIGNAL = 0.46; SWISSPROT HIT: Q92731, EVALUE 6.00e-52; EST_HUMAN HIT: BE747838.1, EVALUE 6.90e-02; NT HIT: AB006590.1, EVALUE 0.00e+00
gctcccggagagagagatgtgggtaccgccttgtgcggagacagagaagtgccgacgagcagctgcactgtgccggcaaggccaagagaagtggcggccacgcgccccgagtgcgggagctgctgctggacgccctgagccccgagcagctagtgctcaccctcctggaggctgagccgccccatgtgctgatcagccgccccagtgcgcccttcaccgaggcctccatgatgatgtccctgaccaagttggccgacaaggagttggtacacatgatcagctgggccaagaagattcccg

SEQ ID NO: 32873 - DNA, 245 bp, Homo sapiens
  MAP TO AL160492.1; EXPRESSED IN PLACENTA, SIGNAL = 0.64; SWISSPROT HIT: Q64429, EVALUE 7.30e-01; EST_HUMAN HIT: AW577938.1, EVALUE 3.50e+00; NT HIT: gi7662563, EVALUE 3.80e-02
gtgaggtcacacatctgaattttggccaacaagatgccaacaggtatgttgtaaaggtaggtggcttgtccctcttcatcctgccctctgtcctgctggatgtgatggctggagctctagctgccaccttggacagtggggatgaggaagatgaggcctcatcagggaatggcagaggaggaactggcaaagcctctcacgactttgtggagtcggtacaaaaacagccctggactgccctcctc

SEQ ID NO: 32874 - DNA, 325 bp, Homo sapiens
  MAP TO AC025129.2; EXPRESSED IN PLACENTA, SIGNAL = 0.46; NT HIT: gi6678200, EVALUE 3.10e+00; SWISSPROT HIT: Q10940, EVALUE 3.00e-09; EST_HUMAN HIT: BF116141.1, EVALUE 1.20e+00
cacggtggagactgtcctgtttctcctctatgctgagcctgtctacctggtggagactgtcctgtttctcctctatgctgagcctgtctacatggtggagactgtcctgtttctcctctgtgctgagtctgtctacacggtggagaccatattgtttctcctctatgctgagtctgtctacatgatggagactgtcctgtttctcctctatgctgagtctgtctacacggtggagactgtcctgtttctcctgtatgctgagcctgtctgcatggtggaaactgtcctgtttctcctctatgctgagtctgtctacatggtgtag

SEQ ID NO: 32875 - DNA, 127 bp, Homo sapiens
  MAP TO AC015744.3; EXPRESSED IN PLACENTA, SIGNAL = 0.47; NT HIT: AE004076.1, EVALUE 1.10e+00; EST_HUMAN HIT: BE154643.1, EVALUE 7.00e-03
cattaagtattatatcagttgcaaataatttgtaggcaatatttgtcaagttaaggatgccaatcatatcaagttgattgatggtgcttttcaggttaactgtaacctcattttcggccttcttgat

SEQ ID NO: 32876 - DNA, 93 bp, Homo sapiens
  MAP TO AC026236.4; EXPRESSED IN PLACENTA, SIGNAL = 1.6; SWISSPROT HIT: P19191, EVALUE 7.30e+00; NT HIT: L41161.1, EVALUE 4.90e-02; EST_HUMAN HIT: AW238145.1, EVALUE 2.90e-01
atgttctccccttccctctctctgtttcctgactggccctggtgtatctccacgtgggcctgcgtgacatacttgcctcctgcttctcgaggt

SEQ ID NO: 32877 - DNA, 109 bp, Homo sapiens
  MAP TO AL137225.7; EXPRESSED IN PLACENTA, SIGNAL = 0.5; EST_HUMAN HIT: AI833239.1, EVALUE 2.20e-02; SWISSPROT HIT: O75949, EVALUE 1.90e+00; NT HIT: AE004762.1, EVALUE 1.00e-03
atggcttgggcaagtaggctgggcctgctgctggcactgctgctgcccgtggtcggtgcctccacgccaggcaccgtggtccgactcaacaaggcagcattgagctacg

SEQ ID NO: 32878 - DNA, 149 bp, Homo sapiens
  MAP TO AL121917.12; EXPRESSED IN PLACENTA, SIGNAL = 0.85; NT HIT: AF143675.1, EVALUE 2.20e-02; EST_HUMAN HIT: AV688642.1, EVALUE 2.00e-09
aagcctaaatgatatgatgcacatgttacccttcattgaagattctaggtggacacacaacttggatatcaacagggagcagaaaacaaacccactagcaggaccaaaaggcagacccatcagcagaacacaggcggcagcttccacaa

SEQ ID NO: 32879 - DNA, 257 bp, Homo sapiens
  MAP TO AL157405.2; EXPRESSED IN PLACENTA, SIGNAL = 0.5; NT HIT: gi11128016, EVALUE 1.60e-01; SWISSPROT HIT: Q05858, EVALUE 1.10e+00
gcctgggtacaagctcaagatgatgcagaaggaggagcaaagcatgggatccaagaaagttaagttccagctcaggtcgaagagaatcatgtctgtgatctgtgtctttggtttcttcatctacagctgtcatcttgtgggctggagcatggtggccaggaagtgtgcaaggggctctggtgtccatgcagccctcatagacctgaggaggtatgattgctctaagcccccagtggggttccagtttgatagctgcc

SEQ ID NO: 32880 - DNA, 96 bp, Homo sapiens
  MAP TO AC019159.3; EXPRESSED IN PLACENTA, SIGNAL = 0.48; NT HIT: AB045597.1, EVALUE 8.00e-01
tcaggaaacactcatgaccacggcagctgtgtcagtgattacaatgctgaaggatgctccattttgattgaaagatccttcagcggccaaagatat

SEQ ID NO: 32881 - DNA, 192 bp, Homo sapiens
  MAP TO AC015578.4; EXPRESSED IN PLACENTA, SIGNAL = 0.46; SWISSPROT HIT: P02716, EVALUE 4.40e-01; NT HIT: AJ131018.1, EVALUE 4.50e-01
ttgattgctgtaggctgattctggaactccatgaaaattaatccatggagtttcagtagctagtccaggcagagctgtcaatgcaaatgtccagaacaagccggcaaccgtggccctaaagactacccagagacacagcctttctgttatctgaccttccttctgccctgaaaatacatcagtgtcagtcat

SEQ ID NO: 32882 - DNA, 77 bp, Homo sapiens
  MAP TO AC018796.3; EXPRESSED IN PLACENTA, SIGNAL = 0.47; NT HIT: AF025993.1, EVALUE 6.10e-01
gtgatgagagatctttttaaaggcaaagacagcaatttcctggggatctatgagtacactgttcaactacagtacag

SEQ ID NO: 32883 - DNA, 170 bp, Homo sapiens
  MAP TO AC008270.3; EXPRESSED IN PLACENTA, SIGNAL = 0.47; SWISSPROT HIT: P75211, EVALUE 3.90e+00; EST_HUMAN HIT: AW876022.1, EVALUE 2.30e+00; NT HIT: AB037832.1, EVALUE 3.90e-01
aaattacttttttctttagtttcttaacttcttcacatgctaaagaactttttgtggtgttatggttgttaataaggccagtcttaataccaatgttttctggcatttctttgggaacaatgttcataatgctgttttgttcaacaacgctttcgtctgcttttcctgtc

SEQ ID NO: 32884 - DNA, 108 bp, Homo sapiens
  MAP TO AL136984.7; EXPRESSED IN PLACENTA, SIGNAL = 0.46; EST_HUMAN HIT: BF091698.1, EVALUE 3.00e-54; NT HIT: AB007931.1, EVALUE 2.00e-54
gtcattctaatgctcactacagatctggatggagaagatgagaaagacaagggggccctagacaacctgctctcccagcttattgctgagttgggtatggataaaaag

SEQ ID NO: 32885 - DNA, 129 bp, Homo sapiens
  MAP TO AC017086.3; EXPRESSED IN PLACENTA, SIGNAL = 0.47; SWISSPROT HIT: P03244, EVALUE 9.20e+00; EST_HUMAN HIT: H29330.1, EVALUE 6.60e+00
ctagaagagaatggctaattcatatgcgatgtattcttgtctctccttgggagaaagaaagtcagccctgggaggagcccggctgttcagcattttgctgctggtcaggattgattccagatgtgggag

SEQ ID NO: 32886 - DNA, 219 bp, Homo sapiens
  MAP TO AL135998.2; EXPRESSED IN PLACENTA, SIGNAL = 0.59; SWISSPROT HIT: P39952, EVALUE 2.00e-04; EST_HUMAN HIT: BE561967.1, EVALUE 1.00e-119; NT HIT: gi11437522, EVALUE 1.00e-119
atgcagcaatggccccccaccaaggtaggcccagatcaacatgcataaattccagtaaattctggatcagtcccactggggtgtatgaccccagccccagttcagcgaagctctgctctgcagcagtttggactacatctgcagtctctccagaagccacctcaggtactgctgtgggtgagggagttgcagcaacaacaggaggggcctgaacctgtg

SEQ ID NO: 32887 - DNA, 435 bp, Homo sapiens
  MAP TO AL136089.8; EXPRESSED IN PLACENTA, SIGNAL = 0.59; SWISSPROT HIT: Q39056, EVALUE 2.00e-25; NT HIT: AF034374.1, EVALUE 0.00e+00; EST_HUMAN HIT: BE392276.1, EVALUE 0.00e+00
ctaagcccgatggaagtccccccgctgaccaccagtcttgctaatgagcttgatctcctccaacacgatgtccctgctgacagccttgcacatgtcatacagggtgagggcggccactgcagcagaggtcagggcctccatctccaccccggtggggccccgagcccggcaagatgcctggatcttcacggcatggcgtgtgctgtccagctccagctgcacctggatgtggctcagggccacgtggtggcacagagggatcagctggctggtcaccttggctgcctggactccagccagctgggccaccactagggcatctcctttcttgagctggttctgctggacaagcttgaaggctaccggtcccaggaggaccacggctgaagccacagccacccgctctgtgtctggcttcctgcccacatctaccat

SEQ ID NO: 32888 - DNA, 134 bp, Homo sapiens
  MAP TO AC010634.2; EXPRESSED IN PLACENTA, SIGNAL = 1.2; SWISSPROT HIT: Q07283, EVALUE 1.40e+00; EST_HUMAN HIT: BF207065.1, EVALUE 1.80e+00
cttttaatagttttctgctcttctctgtcctctttctcatctgttgaacgcgaaatcctgcctcctctttctgggaagtatttcctggtcttattctctcctttatccttcttagtctctgttctcatcttctc

SEQ ID NO: 32889 - DNA, 144 bp, Homo sapiens
  MAP TO AC019250.3; EXPRESSED IN PLACENTA, SIGNAL = 0.46; NT HIT: gi7949159, EVALUE 1.30e+00
ctaatgcatgatgatatgaaaatcagtgttgatgatgtgacacgcagtgttttccaacaaagtaagaaagttcagtatgctgccaggcatcacagatgcgccacacgtgcatcgggtaccaagggtgttctgttcgtcaaagtt

SEQ ID NO: 32890 - DNA, 130 bp, Homo sapiens
  MAP TO AC018421.3; EXPRESSED IN PLACENTA, SIGNAL = 0.47; EST_HUMAN HIT: BE878260.1, EVALUE 1.70e+00
gtgttcgcatgagatgtattagtcaagatgctaaacatgccacagctatcagtggcctggtcctcgtctgcacaccagggcttgctagtgacatgtctgtcacaagtggcattggagccagcttgaccca

SEQ ID NO: 32891 - DNA, 102 bp, Homo sapiens
  MAP TO AC009234.3; EXPRESSED IN PLACENTA, SIGNAL = 0.47; EST_HUMAN HIT: AW450487.1, EVALUE 8.10e-02; NT HIT: U07553.1, EVALUE 8.60e-01
ctcaggtgatacaactaccaagtttaagggagccaagattggaatctgggagtgtctgattctaaagccattcatcttaactaatttaatgcaatgagttat

SEQ ID NO: 32892 - DNA, 173 bp, Homo sapiens
  MAP TO AC022015.2; EXPRESSED IN PLACENTA, SIGNAL = 0.94; NT HIT: AL161589.2, EVALUE 4.00e-04; EST_HUMAN HIT: BF367293.1, EVALUE 4.00e-11
gtggggtgatggtgagggctgtagtgatgacggtggcggcagtggcagtgatatggtgatgatggtcatgagagaaatggtgatgatgttgggtggaggaggtggtggtggcgattgtggagatggtgatgttagcaatggtggtcgtgattgtagcagtgatgtggctgctg

SEQ ID NO: 32893 - DNA, 78 bp, Homo sapiens
  MAP TO AC009410.3; EXPRESSED IN PLACENTA, SIGNAL = 0.46; EST_HUMAN HIT: T92196.1, EVALUE 1.50e-02; NT HIT: D28588.1, EVALUE 6.20e-01
atgaagtacagtggggagggtgggatgagcagagggaaaggagatgtcttgggagaatgcttcttaacattagtgctg

SEQ ID NO: 32894 - DNA, 149 bp, Homo sapiens
  MAP TO AL136132.15; EXPRESSED IN PLACENTA, SIGNAL = 0.69; SWISSPROT HIT: P32492, EVALUE 1.10e-02; NT HIT: AY004215.1, EVALUE 4.00e-13; EST_HUMAN HIT: BE550195.1, EVALUE 2.00e-53
agaaaaacagtgcaaaaggcaatttccagggcactcacatagatctgattgttcccaaagcgcttctgaatctcatagagcaggctgccatcattgagctcgctgagcgttgccaggtcatcgtttggggcaggaggcattagcttgac

SEQ ID NO: 32895 - DNA, 154 bp, Homo sapiens
  MAP TO AL161668.1; EXPRESSED IN PLACENTA, SIGNAL = 0.49; SWISSPROT HIT: Q38394, EVALUE 1.80e+00; NT HIT: AF056320.1, EVALUE 8.90e-02; EST_HUMAN HIT: AW250322.1, EVALUE 1.00e-81
gcgctcgccgccttagtacccggagtgacccaggtagataacaagtccggtttcctgcagaagaggcctcatcgccagcaccctggcatcctaaagctgccgcacgtgcggctgccacaggcactggctaacggtgcccagttattgctacttg

SEQ ID NO: 32896 - DNA, 146 bp, Homo sapiens
  MAP TO AC022015.2; EXPRESSED IN PLACENTA, SIGNAL = 0.74; SWISSPROT HIT: Q51506, EVALUE 3.10e+00; NT HIT: AE000631.1, EVALUE 3.30e-01
cttgagatgaaaactgagtctgtttgtaatggttgttcatttgctttgcaaggatgcgtgccaggcactcagcctcatccagaggtgcaggcagagatccccggcacccacagctgggtaggagcagcaggggaggtgctggatct

SEQ ID NO: 32897 - DNA, 126 bp, Homo sapiens
  MAP TO AP001417.1; EXPRESSED IN PLACENTA, SIGNAL = 0.53; EST_HUMAN HIT: AI337323.1, EVALUE 1.00e-01; NT HIT: AL163246.2, EVALUE 7.10e-02; SWISSPROT HIT: P08064, EVALUE 3.10e+00
ttagaagccgagaacgatgcccgcaaggaagcaagcaagggaatgcacccggaacgactttggaagcagatttattccccaaacctccaggaaggaacacagccccactaataccttgattttggc

SEQ ID NO: 32898 - DNA, 302 bp, Homo sapiens
  MAP TO AC007226.2; EXPRESSED IN PLACENTA, SIGNAL = 1.6; EST_HUMAN HIT: R17132.1, EVALUE 0.00e+00; NT HIT: AL161531.2, EVALUE 1.90e-01; SWISSPROT HIT: P43662, EVALUE 5.50e+00
atttattaactccaaggcaagaagcagttcctgttgtctctttaccggcacccagtttttctcatgaagttggaagtgagctggcctcagttcctgttatgcccttaacttctattttgccactacaagtggaagagagcgctctgccatctgcagtgctggcaaatggaggaaagatgcccttcactatgccagaagcttttctagatgatggagatatggtccttggagatgaactagatgacctgcttgattctgcacctgaaactaatgaaactgttatggtaagtttcagtgttact

SEQ ID NO: 32899 - DNA, 508 bp, Homo sapiens
  MAP TO AC010368.2; EXPRESSED IN PLACENTA, SIGNAL = 2.6; NT HIT: AF091870.1, EVALUE 0.00e+00; EST_HUMAN HIT: AW139414.1, EVALUE 0.00e+00; SWISSPROT HIT: P16471, EVALUE 1.00e-102
aagggcaagtctgaagaactactgagtgccttgggatgccaagactttcctcccacttctgactatgaggacttgctggtggagtatttagaagtagatgatagtgaggaccagcatctaatgtcagtccattcaaaagaacacccaagtcaaggtatgaaacccacatacctggatcctgacactgactcaggccgggggagctgtgacagcccttcccttttgtctgaaaagtgtgaggaaccccaggccaatccctccacattctatgatcctgaggtcattgagaagccagagaatcctgaaacaacccacacctgggacccccagtgcataagcatggaaggcaaaatcccctattttcatgctggtggatccaaatgttcaacatggcccttaccacagcccagccagcacaaccccagatcctcttaccacaatattactgatgtgtgtgagctggctgtgggccctgcaggtgcaccggccactctgttgaatgaagcag

SEQ ID NO: 32900 - DNA, 104 bp, Homo sapiens
  MAP TO AC010745.2; EXPRESSED IN PLACENTA, SIGNAL = 1.9; EST_HUMAN HIT: BE616026.1, EVALUE 1.00e-19; NT HIT: AL163246.2, EVALUE 3.00e-16
caatcaacaaccccttcttcaagcatcctaatgactttttgcaaataaaatgcttccacaaccagcagaatgcagaaaatgcttcccaagagttcatcgaatcc

SEQ ID NO: 32901 - DNA, 91 bp, Homo sapiens
  MAP TO AC010450.3; EXPRESSED IN PLACENTA, SIGNAL = 1.8; NT HIT: X61236.1, EVALUE 4.80e-02; EST_HUMAN HIT: AW850690.1, EVALUE 1.10e+00
cttatcctgtgtctggatcctagaaaggagcaggtatttgaaaatttcttcagacaataccgatgcattgtcgcctttgacaaccactgac

SEQ ID NO: 32902 - DNA, 192 bp, Homo sapiens
  MAP TO AC009028.3; EXPRESSED IN PLACENTA, SIGNAL = 2.2; SWISSPROT HIT: O15016, EVALUE 1.70e+00; NT HIT: gi11430799, EVALUE 4.50e-01
gtggcatgcgacccttctcagccaaagtatacaattgccggtgttcaattctccacccctctttacgcatcccatcaaatgccgatgtctgagtcatctgtgtccctgggtgtctatgctcatcagaatcctgctgctgacctgcatgcagcatgtggcacaggcaagaattaaacccttgttgtttgacat

SEQ ID NO: 32903 - DNA, 168 bp, Homo sapiens
  MAP TO AL078590.27; EXPRESSED IN PLACENTA, SIGNAL = 1.4; NT HIT: AL163278.2, EVALUE 1.00e-34; EST_HUMAN HIT: AI435225.1, EVALUE 4.00e-42; SWISSPROT HIT: O33280, EVALUE 3.00e+00
atttcggaaaaatcagtttcatcaaatgaatctacggccaacaactgcttgagaatgatgttaacatcacgcgtaggaatgctacgttttctaggatttgacattttcagcaatcgagaattactatattttgtaaatagaagtaccactactacaaacagaatacta

SEQ ID NO: 32904 - DNA, 297 bp, Homo sapiens
  MAP TO AC011453.2; EXPRESSED IN PLACENTA, SIGNAL = 2.3; EST_HUMAN HIT: AI905368.1, EVALUE 9.00e-26; SWISSPROT HIT: O83460, EVALUE 1.80e+00; NT HIT: gi11545756, EVALUE 2.00e-16
ctagacttgtttgtccgggaaagtggtagacaggaagttcctgtctgcacacgtctcctggctccagccctttcccctgtccatctgtcctacagactccgcctcaggcatgttgtcttggaggacgtgcagaaaggcagccatgcactttctaggtttcgatgccgtcttagagtcactggtcaccaggtctgggtcaaacgggagtctctggctgtcaagactggactgggaggaatcacatcgcttcttcaccatcagctttatctgctttgccttttccgacttcagctttct

SEQ ID NO: 32905 - DNA, 225 bp, Homo sapiens
  MAP TO AL136130.7; EXPRESSED IN PLACENTA, SIGNAL = 1.5; EST_HUMAN HIT: BE010038.1, EVALUE 1.00e-67; SWISSPROT HIT: P10266, EVALUE 4.00e-16; NT HIT: AB014607.1, EVALUE 1.00e-44
cctcagcgtcagtctcgacatggctgcaactagggggtcctcgggatcctcccagaatctcttcctcggcatctggctcatgataaggttttaggtgtcttgatggcatccaaatcggctgttgatttggtcctggagaagcacaagcataacctttaccccaagttattttacctatttcccaacgttttgttattggatctctccaccaaatcggttgttctg

SEQ ID NO: 32906 - DNA, 180 bp, Homo sapiens
  MAP TO AC023154.3; EXPRESSED IN PLACENTA, SIGNAL =   2; NT HIT: AB027305.1, EVALUE 5.60e+00; EST_HUMAN HIT: BE328671.1, EVALUE 6.60e+00
gcaggtatgcaagttgggggccagagcagagttgttggggacaataaaatggaagctgagctgctacgaatactccccattcttcctatttccctcaaatcactgtcagtgtctcctcacgtagcacagtctcctctgtatctaggtgtgcttgtgcgtctgagctctcaccacggagat

SEQ ID NO: 32907 - DNA, 433 bp, Homo sapiens
  MAP TO AC010289.2; EXPRESSED IN PLACENTA, SIGNAL = 1.5; EST_HUMAN HIT: BE260530.1, EVALUE 1.00e-01; SWISSPROT HIT: O95644, EVALUE 1.90e+00; NT HIT: S81752.1, EVALUE 6.90e-02
acacaaactggacgccatcctgggcaggctgggctacacggccaccttggagtctgagttctcactggtccaggccatcagcaaagagaatgtcaagcagatggtgttcaagatcttcctggtgagggtctcatgtgaagccgttctcagaaccgcgggcacacggatgcttgagccgggcacagagaaactcgctaggacccacagcaggcacagctcagagaaaaggctggtgaagccctgcagctgcctcgagggggttcagccaggcccaggttccgggggaccacagcaaggtccctcagaaggggtggggtccgagacggccctggcagagggcactgctggccagagatctctgcccatggctctgagcccatctgaggtctcaacagcccccaacagcctccccagtggctctccagtcctctag

SEQ ID NO: 32908 - DNA, 95 bp, Homo sapiens
  MAP TO AC009275.5; EXPRESSED IN PLACENTA, SIGNAL = 1.4; EST_HUMAN HIT: AV709245.1, EVALUE 1.00e-46; SWISSPROT HIT: P15121, EVALUE 1.00e-12; NT HIT: gi11432209, EVALUE 9.00e-47
ggagagccgagggggctgtaggcggtcaccacgatgcctttggactggcagtactggattaacttctcctgagtgagatatgggtggcactcaat

SEQ ID NO: 32909 - DNA, 133 bp, Homo sapiens
  MAP TO AC010653.3; EXPRESSED IN PLACENTA, SIGNAL = 1.7; SWISSPROT HIT: P55389, EVALUE 7.00e+00; NT HIT: M38686.1, EVALUE 1.20e+00
ttatttccttctcagtcaccttctgcctgaccttccacacacacagctcctctgtattccagtcatgagcagcatgatggttctcttcaataatttcagtttgagagtggttcctccttcctgtggggattcc

SEQ ID NO: 32910 - DNA, 378 bp, Homo sapiens
  MAP TO AL133371.2; EXPRESSED IN PLACENTA, SIGNAL = 1.7; NT HIT: gi11641278, EVALUE 0.00e+00; EST_HUMAN HIT: AI075915.1, EVALUE 0.00e+00; SWISSPROT HIT: Q14507, EVALUE 8.00e-31
cactcttggccctactttgcatcctatgcacactgcttgtacagagcaaagaagtttcttggagagaattcatgaaacagcactacttaagtccaagtcgagaattcagagagtacaaatgtgatgtcctcatgagagaaaatgaagctctgaaagacaagagctctcacatgtttatctatatctcatggtacaaaatcgagcatatatgcactagtgacaactggatggatcgcttccgaaatgcatatgtatgggtccagaatcctctcaaagtactcaagtgtcaccaggagaattccaaaaatagctacacagagagcaggagcttcaactacattgaattccattgtagcatggacgggtatgttgatagca

SEQ ID NO: 32911 - DNA, 233 bp, Homo sapiens
  MAP TO AL133304.2; EXPRESSED IN PLACENTA, SIGNAL = 1.4; NT HIT: X90761.1, EVALUE 1.00e-32; EST_HUMAN HIT: BE408611.1, EVALUE 1.00e-42; SWISSPROT HIT: P75072, EVALUE 4.30e+00
atgagagtttgaatcaatttcttccaaactcctgttaaagttgatattttgacctcctcccatgaatcacaaatgttaatgacatctagagggatgaatcctttccagaaggcttttaatttactttgcccagatccatcaagggaatcactatctatggcagccttatgaaatatatttcttaaataatatgatttgaaagttgaaattactcctggttccatgggctgcag

SEQ ID NO: 32912 - DNA, 335 bp, Homo sapiens
  MAP TO AC006111.2; EXPRESSED IN PLACENTA, SIGNAL = 1.6; EST_HUMAN HIT: AW074910.1, EVALUE 3.10e-01; NT HIT: L14270.1, EVALUE 8.20e-01; SWISSPROT HIT: Q64739, EVALUE 5.80e-01
aaaggtttggcgatggttcttgctggttacccgtctgggtgttttgtgctgtttcccggagcacaggtggatctggagcagaggcaagcacacccccctccccattcacagagtgggccggttcacttgcttgccatttggttaccctttgctttttagtcctaggggcctggctgccagacggaggtttcttctctgcagggccttgaagggttttggtcttggtagcagtttgtttggtccttttcaatttgcttcttatctgagtgccgtttgaggcagccttttgtgtcttcctttctcctgacacttccttgattccatgttttttcacc

SEQ ID NO: 32913 - DNA, 121 bp, Homo sapiens
  MAP TO AL138827.2; EXPRESSED IN PLACENTA, SIGNAL =  64; EXPRESSED IN HELA, SIGNAL =  22; EST_HUMAN HIT: BF107368.1, EVALUE 5.00e-62; NT HIT: S70584.1, EVALUE 4.00e-62; SWISSPROT HIT: P01215, EVALUE 5.00e-19
cctgttatatgatttagctacacagcaagtggactctgaggtgacgttcttttggaccaacatcgtcttcttggaccttagtggagtgggatatgctctagagaagcagcagcccatgcac

SEQ ID NO: 32914 - DNA, 112 bp, Homo sapiens
  MAP TO AL159165.1; EXPRESSED IN PLACENTA, SIGNAL = 1.3; SWISSPROT HIT: P36728, EVALUE 1.10e+00; NT HIT: gi11421649, EVALUE 5.00e-55; EST_HUMAN HIT: AW504489.1, EVALUE 7.00e-55
gtgatgcagaagatggggaagaatatgatgacccttttgctgggcctccagacactatttcattagcctcagaacgatatgataaagacgatgaagccccctctgatggtat

SEQ ID NO: 32915 - DNA, 131 bp, Homo sapiens
  MAP TO AL136384.2; EXPRESSED IN PLACENTA, SIGNAL = 1.7; NT HIT: M62882.1, EVALUE 1.10e+00; EST_HUMAN HIT: BE902974.1, EVALUE 1.10e-01
ctaatttctaggttcagaaagatgcttgtcctgttctattccacagtagtcaaccaacctgatgataatatattcagtttggggacttacacaaactaaagcatcttcaaaaacagtgatggtgaagggag

SEQ ID NO: 32916 - DNA, 189 bp, Homo sapiens
  MAP TO AL136527.7; EXPRESSED IN PLACENTA, SIGNAL = 1.6; EST_HUMAN HIT: AA935494.1, EVALUE 6.60e-01; SWISSPROT HIT: Q9UPW0, EVALUE 5.00e+00; NT HIT: gi6691408, EVALUE 4.40e-01
tcagcactcctgtgcaggtctctcggagagctgcagagtgctcaggctcagaaacacccctgactctggacactggatccttggggaagatagagcacacaaagccacagctctgtcattacaggacagactctgaaaataatgattctccaaattgccttggtccatgaccttttttacaccctcatc

SEQ ID NO: 32917 - DNA, 307 bp, Homo sapiens
  MAP TO AL135752.2; EXPRESSED IN PLACENTA, SIGNAL = 1.6; NT HIT: gi11434361, EVALUE 1.00e-125; SWISSPROT HIT: P14688, EVALUE 9.70e+00; EST_HUMAN HIT: R61450.1, EVALUE 1.00e-125
ctaaataaaatctctccttcagagatgggtttatctaaagtttcagtttcagtgacagtaacactcaatgtgctctccagtgttgatgaatcagaacctggcatctgtgagggggaaggggccttggtgccggcaggaaatggcataaagggaactggctctggaggtggaggctgagcagggaaatccatactctctggttcttcatccttagccacagacattacactaagaaaataaagacatatttggagcttgttaggtcactgaaggcctgtattcattttgatataaaaaacagactcga

SEQ ID NO: 32918 - DNA, 274 bp, Homo sapiens
  MAP TO Z97197.2; EXPRESSED IN PLACENTA, SIGNAL = 1.3; NT HIT: AL163209.2, EVALUE 8.00e-56; EST_HUMAN HIT: AA984295.1, EVALUE 7.00e-51; SWISSPROT HIT: P21414, EVALUE 3.00e-06
agctgctgtacctgtaccagatgtggttccattgcttgaacaaattaacacgtctcttggtacctggtatgcagccattgatttggcaagtgcctttgtctccattcctgtccataaggcccacgagaagcaatttgccttcagctggcaaggccagcaatataccttcactgtcctgcctcaggggtatatcaactctctggctttgtgtcattatttggttggcagagatcttgatcgtttttcccttccacaagatatcatactggtccat

SEQ ID NO: 32919 - DNA, 210 bp, Homo sapiens
  MAP TO AC018967.3; EXPRESSED IN PLACENTA, SIGNAL = 1.4; EXPRESSED IN HELA, SIGNAL = 1.7; NT HIT: AL163246.2, EVALUE 4.00e-26; EST_HUMAN HIT: AW262358.1, EVALUE 2.00e-19; SWISSPROT HIT: P11200, EVALUE 5.70e-01
atgttctgctggcccagaggtcttagttccaaaggaaggaacactgccaccagaatacacaacaatgattccattcaactggaagttatgattgccacctggacactttgggctcctcctgcctctagggctaagaagagagttacagtgttgactggagtgattaacccagactatcaagatgaaatcagactattacttgcaacggaa

SEQ ID NO: 32920 - DNA, 202 bp, Homo sapiens
  MAP TO AC010311.5; EXPRESSED IN PLACENTA, SIGNAL = 1.9; NT HIT: M10051.1, EVALUE 1.00e-110; SWISSPROT HIT: Q28516, EVALUE 3.00e-35; EST_HUMAN HIT: BE818284.1, EVALUE 1.00e-105
ggctgaagctgccctcgaggacctggtctccaccattcgagtctgaagattctcagaagcacaaccagagtgagtatgaggattcggccggcgaatgctgctcctgtccaaagacagactctcagatcctgaaggagctggaggagtcctcgtttaggaagacgtttgaggattacctgcacaacgtggttttcgtccccag

SEQ ID NO: 32921 - DNA, 164 bp, Homo sapiens
  MAP TO AC019043.2; EXPRESSED IN PLACENTA, SIGNAL = 1.6; SWISSPROT HIT: P22196, EVALUE 5.20e+00; EST_HUMAN HIT: BE714465.1, EVALUE 2.20e+00; NT HIT: U82671.2, EVALUE 3.80e-01
gaacacgatgcctctgtggccctgacagccactgccgattgtcctgggaggggccttcagggaaccgcacaggaaggagggtgcagctcagcccgttttcaaatccagcaggatgttcatgacctccctgcagacactaatggacagaacgtcacagcagtctg

SEQ ID NO: 32922 - DNA, 110 bp, Homo sapiens
  MAP TO AC010487.4; EXPRESSED IN PLACENTA, SIGNAL = 2.7; NT HIT: gi8922743, EVALUE 1.00e-55; SWISSPROT HIT: Q15928, EVALUE 7.00e-13; EST_HUMAN HIT: AU133444.1, EVALUE 2.00e-55
ccagggagaccaggttcctataattctccagcatcacgtctctgtatagagtcctctgagcagggtccaggcatttccactcctcctgagagaattctatggccacatcc

SEQ ID NO: 32923 - DNA, 182 bp, Homo sapiens
  MAP TO AC011508.3; EXPRESSED IN PLACENTA, SIGNAL = 2.2; NT HIT: AB029018.1, EVALUE 4.20e-01; SWISSPROT HIT: P27039, EVALUE 8.80e-02; EST_HUMAN HIT: AI159975.1, EVALUE 3.00e-98
gcaatttctcagtccctgtgtacatcagaacctgccaccggccctcctgcaccaccgagggcaccaccagcccctggacagccatcgacctccagggctcctgctgtgaggggtacctctgcaacaggaaatccatgacccagcccttcaccagtgcttcagccaccacccctccccgagca

SEQ ID NO: 32924 - DNA, 100 bp, Homo sapiens
  MAP TO AL158845.1; EXPRESSED IN PLACENTA, SIGNAL = 1.7; NT HIT: gi11465934, EVALUE 3.30e+00; EST_HUMAN HIT: R55735.1, EVALUE 3.10e-01
aattccatatcaatggtatggaattccaaattcagatttggaatttcaaattcaatttcaattcaaatatggaatttgaaatcaaatttccatatctatg

SEQ ID NO: 32925 - DNA, 128 bp, Homo sapiens
  MAP TO AC017093.2; EXPRESSED IN PLACENTA, SIGNAL = 1.6; EST_HUMAN HIT: AI266186.1, EVALUE 4.20e-01; NT HIT: AJ248285.1, EVALUE 2.80e-01
ttaaaagagacacttgaacttattgagaggaaagttggaaacacaagctaaaagacagaagatgggatccacggcatgggtggatggagagatgttggaattgagagggaccatgtcctccactgtac

SEQ ID NO: 32926 - DNA, 179 bp, Homo sapiens
  MAP TO AC017116.2; EXPRESSED IN PLACENTA, SIGNAL = 2.2; SWISSPROT HIT: P23468, EVALUE 1.00e-03; NT HIT: U57061.1, EVALUE 1.10e-01
ctctcttctcggtggtgatgacggtggcctccagtggctccccccagccctgcctcgtcttggcggacagcctgaagatgtatgcggactccggtgccaggtcggtggctgtgaactgcctcactgtggcgccgacctccacggtggtgaaggtgtgggggctgctgctggccaggcgg

SEQ ID NO: 32927 - DNA, 187 bp, Homo sapiens
  MAP TO AC013379.4; EXPRESSED IN PLACENTA, SIGNAL = 2.7; NT HIT: AJ131016.1, EVALUE 7.00e-03; EST_HUMAN HIT: BE065781.1, EVALUE 2.00e-04; SWISSPROT HIT: Q36518, EVALUE 1.30e+00
aatctatgttctgatttttttgtctgcctcttttattagttataaacagaggcatgttaaaatctctcactatgattgtggattttccgtttttctttttagtactttcaacttttgtttcatacattttcaggattgttttatagctcagaatatgacctatcttagtgaatattccataggtgct

SEQ ID NO: 32928 - DNA, 275 bp, Homo sapiens
  MAP TO AC010311.5; EXPRESSED IN PLACENTA, SIGNAL = 1.3; SWISSPROT HIT: P06213, EVALUE 1.00e-30; NT HIT: gi11424726, EVALUE 0.00e+00; EST_HUMAN HIT: C06264.1, EVALUE 0.00e+00
gccatctcggaaacgcaggtcccttggcgatgttgggaatgtgacggtggccgtgcccacggtggcagctttccccaacacttcctcgaccagcgtgcccacgagtccggaggagcacaggccttttgagaaggtggtgaacaaggagtcgctggtcatctccggcttgcgacacttcacgggctatcgcatcgagctgcaggcttgcaaccaggacacccctgaggaacggtgcagtgtggcagcctacgtcagtgcgaggaccatgcctgaag

SEQ ID NO: 32929 - DNA, 443 bp, Homo sapiens
  MAP TO AC016941.8; EXPRESSED IN PLACENTA, SIGNAL = 1.6; EST_HUMAN HIT: BE727811.1, EVALUE 0.00e+00; NT HIT: gi4885470, EVALUE 0.00e+00; SWISSPROT HIT: P43361, EVALUE 2.00e-56
aggcccaaggagaggcaccagggcttatggatgtgcagattcccacagctgaggagcagaaggctgcatcctcctcctctactctgatcatgggaacccttgaggaggtgactgattctgggtcaccaagtcctccccagagtcctgagggtgcctcctcttccctgactgtcaccgacagcactctgtggagccaatccgatgagggttccagcagcaatgaagaggaggggccaagcacctccccggacccagctcacctggagtccctgttccgggaagcacttgatgagaaagtggctgagttagttcgtttcctgctccgcaaatatcaaattaaggagccggtcacaaaggcagaaatgcttgagagtgtcatcaaaaattacaagaaccactttcctgatatcttcagcaaagcctctgagtgcatgcaggtgatc

SEQ ID NO: 32930 - DNA, 381 bp, Homo sapiens
  MAP TO AC010368.2; EXPRESSED IN PLACENTA, SIGNAL = 2.4; NT HIT: gi4506106, EVALUE 0.00e+00; SWISSPROT HIT: P16471, EVALUE 7.00e-71; EST_HUMAN HIT: AI472010.1, EVALUE 0.00e+00
gagaaaaccccctttggctccgctaaacccttggattatgtggagattcacaaggtcaacaaagatggtgcattatcattgctaccaaaacagagagagaacagcggcaagcccaagaagcccgggactcctgagaacaataaggagtatgccaaggtgtccggggtcatggataacaacatcctggtgttggtgccagatccacatgctaaaaacgtggcttgctttgaagaatcagccaaagaggccccaccatcacttgaacagaatcaagctgagaaagccctggccaacttcactgcaacatcaagcaagtgcaggctccagctgggtggtttggattacctggatcccgcatgttttacacactcctttcactga

SEQ ID NO: 32931 - DNA, 237 bp, Homo sapiens
  MAP TO AC019181.2; EXPRESSED IN PLACENTA, SIGNAL = 4.9; NT HIT: gi11429952, EVALUE 0.00e+00; SWISSPROT HIT: Q03497, EVALUE 6.70e-01; EST_HUMAN HIT: AW500056.1, EVALUE 0.00e+00
cttatctgtctcatccacgctcatggatttcactatacaagaagcaggcctctcctggatgtgtgcaaggtcttgggggacactctgagatgctggcatcgggggcagtggagcccgcctcttcttgggtgcatccgacggcagggtgttggaaatatatggtttggaaatggtattggaccttgtaaaagttgggcggtgcttatttactagaggggttgcaggggcacttgcagt

SEQ ID NO: 32932 - DNA, 121 bp, Homo sapiens
  MAP TO AL121716.16; EXPRESSED IN PLACENTA, SIGNAL = 1.3; NT HIT: U66059.1, EVALUE 4.20e+00; EST_HUMAN HIT: BE967557.1, EVALUE 4.00e-07
agatccaactctgctttgcattgagaatataatgttctaaacacttcaatcaggacatcttctagaattacaggtcctaaaattaatattcaaattaaagacagtaattaatcagcatgag

SEQ ID NO: 32933 - DNA, 157 bp, Homo sapiens
  MAP TO AP001207.1; EXPRESSED IN PLACENTA, SIGNAL = 1.5; EST_HUMAN HIT: AW151547.1, EVALUE 5.30e-01; SWISSPROT HIT: P13002, EVALUE 1.00e-03; NT HIT: AF121623.1, EVALUE 3.60e-01
tggcacatttcagtacaccctggaagccaccaaatctctccgtcagaagcagggggagggccccatgacctacctcaacaaaggacagttctatgccataacactcagcgagaccggagacaacaaatgcttccgacaccccatcagcaaagtcagg

SEQ ID NO: 32934 - DNA, 302 bp, Homo sapiens
  MAP TO AF233439.1; EXPRESSED IN PLACENTA, SIGNAL = 1.9; SWISSPROT HIT: O35188, EVALUE 2.50e+00; NT HIT: Y10196.1, EVALUE 5.00e-05; EST_HUMAN HIT: AA460142.1, EVALUE 5.00e-09
tcagtcagtgctgggacagttgtaagggaggcctacattagtgagacctggcccaccacaacagagcagcaagggaggcaggggagaaccaggtaaggtgaggctgagatggggggtcagtccccagccccatggtggacctctggtcctcctgcacctgggtgagctccagcgagagccaggtggctttcctctagagaagagcctgtaacccctcctgcaatgggagtctcctcctcctcttccaggtcttgtggaagatgaccagcggggtgatccccagtgggcaccagtgtatttgc

SEQ ID NO: 32935 - DNA, 200 bp, Homo sapiens
  MAP TO AL137862.1; EXPRESSED IN PLACENTA, SIGNAL = 1.5; SWISSPROT HIT: O00330, EVALUE 6.00e-11; NT HIT: Y13145.1, EVALUE 1.00e-109; EST_HUMAN HIT: AL119824.1, EVALUE 1.00e-109
cgtagtgtcccgggtatgtgttccttcttgacagggatggaaatctgtggttctggtgaggggcgaggctctgaaggttttgaaactggtggtggaggacctacgtctttgggaatttcaacatgtttccaatcttctccttcttctactatcaaaccaattagtgaacctagccgtatatttttacttccttcttcaac

SEQ ID NO: 32936 - DNA, 97 bp, Homo sapiens
  MAP TO AC008920.4; EXPRESSED IN PLACENTA, SIGNAL = 5.7; SWISSPROT HIT: Q62010, EVALUE 9.50e+00; EST_HUMAN HIT: AI912713.1, EVALUE 2.00e-05; NT HIT: AL163281.2, EVALUE 2.00e-04
tcaaggttcatccatgttgtagaatgtcttggaattttcttccttgtttctggctgaacagtattccatccacacacacgatggaacactgttcagc

SEQ ID NO: 32937 - DNA, 184 bp, Homo sapiens
  MAP TO AC008850.4; EXPRESSED IN PLACENTA, SIGNAL = 2.5; EST_HUMAN HIT: AL080029.1, EVALUE 8.00e-90; SWISSPROT HIT: P15541, EVALUE 8.00e-07; NT HIT: gi11417191, EVALUE 1.00e-99
gtgtcatcaatcttacagaagaagtgctgtgggtcaaagtgaatataaacatgaatggttattatattgtacactatgcagatgatgattgggaagcactaatccatcagttgaaaataaatccttatgttctgagtgacaaagaccgagccaaccttatcaacaacatctttgaacttgcagg

SEQ ID NO: 32938 - DNA, 216 bp, Homo sapiens
  MAP TO AC024167.1; EXPRESSED IN PLACENTA, SIGNAL = 1.4; SWISSPROT HIT: P40017, EVALUE 3.70e+00; NT HIT: AF012836.1, EVALUE 1.30e-01
attatgagaaaaactcccaaatttccctccaaccataacctcacttccaaactccagtcctatatttccaaatgcctgctggatattttcaccctgaaaatcccaacatcaccgaaggagcaagaggaagaggtggtttccaggatgcagagtgaactgtggctgtacaagaggagagagaacgtccttttgcagaggaacgaagcccctgcctat

SEQ ID NO: 32939 - DNA, 181 bp, Homo sapiens
  MAP TO AL133413.5; EXPRESSED IN PLACENTA, SIGNAL = 1.3; EST_HUMAN HIT: AW070665.1, EVALUE 7.00e-04; SWISSPROT HIT: Q96066, EVALUE 1.00e-08; NT HIT: AF091415.1, EVALUE 5.00e-10
aaaaatctgacccctatgaatgcggattcgacccaataacttccgcccacctccccttttccataaaattcttcctagtagccatcatgttcctcttgttcgacttagagatcactctactactaccgctgccatgagcccttcaaacaaccaacctgacactaataatcagcacagccct

SEQ ID NO: 32940 - DNA, 173 bp, Homo sapiens
  MAP TO AL158072.2; EXPRESSED IN PLACENTA, SIGNAL = 5.5; NT HIT: U57833.1, EVALUE 7.00e-06; SWISSPROT HIT: P39188, EVALUE 1.00e-04; EST_HUMAN HIT: BE242466.1, EVALUE 4.00e-14
agccagtatctcactatattgctggggctggtcttggactcctatgttcaagtgatcctcctgctttggcctcccaaaatactggattataggtgggagccactgttcctggtcaatctatgtctttttattgaagaatttaatccatttataatcaaggtaattactgatag

SEQ ID NO: 32941 - DNA, 78 bp, Homo sapiens
  MAP TO AL157789.1; EXPRESSED IN PLACENTA, SIGNAL =  11; NT HIT: gi11545901, EVALUE 1.00e-36; EST_HUMAN HIT: H08328.1, EVALUE 1.00e-27
atggtaagactccagcagaaagacattggcaagtgttagaggaaaagaggaaagtttatctgaaagcattatggaaat

SEQ ID NO: 32942 - DNA, 153 bp, Homo sapiens
  MAP TO AC011609.9; EXPRESSED IN PLACENTA, SIGNAL = 1.8; SWISSPROT HIT: P03360, EVALUE 4.60e-01; NT HIT: X89211.1, EVALUE 1.00e-43; EST_HUMAN HIT: BE064410.1, EVALUE 4.00e-48
gcatgagcccactgccgcacttctttagccataaggtgagtgccttggtcagaggcaatgctgtgtggaataccatgatggtggatgaggaattccatgagtccatggatggtagtcttggtagaagcatggcatgcgggataggcaaactca

SEQ ID NO: 32943 - DNA, 432 bp, Homo sapiens
  MAP TO AL109985.2; EXPRESSED IN PLACENTA, SIGNAL = 1.6
tgcacgtccatctccatctccatttccatctctatctgctctccatctccgtctccatctgcatctgcatctgcatctccatctccatctgcatctccatctgcatctgcatctctatctgcatctccgtctccatctgtaactccatctgcatctccatctgcatctccatctccatctccatctccatctgcatcatctccatctccatctccttctgcatttgcatctgcatctgcatctccatctgcatctccatctccatctctatctgcatctccatctccatctccatctgcatctgcatctccatctccatcagcatccccatctccatttccatccccatccctgtatccatctccatctgcacctccatttccatatctccatctccatatctccatctccatttccattttcatgtccatc

SEQ ID NO: 32944 - DNA, 144 bp, Homo sapiens
  MAP TO AL139348.3; EXPRESSED IN PLACENTA, SIGNAL = 2.4; EST_HUMAN HIT: AI341136.1, EVALUE 1.00e-07; SWISSPROT HIT: P87154, EVALUE 3.50e-01; NT HIT: AL163283.2, EVALUE 1.00e-03
atctgtgggtgccagaggtgtcaagtttctgaaatgtcctcagttttgtctctactggtggcttggtcttccctttggacttgtgcttagaaagaatctgcatcttgcagctctttcagctgtaattctcttatatcggatgcc

SEQ ID NO: 32945 - DNA, 263 bp, Homo sapiens
  MAP TO AL138831.2; EXPRESSED IN PLACENTA, SIGNAL = 1.5; SWISSPROT HIT: P36654, EVALUE 3.20e+00; NT HIT: gi9838361, EVALUE 6.30e-01
tttctggtgccaggaaaggtgtaacttgaagtccctttctggtcgtcagacccctcccacctcatttgttgtgaacagaacactttctttagaatgctttccttaaaaaacttggagctaatcttctctctgtgaacattactgaacaccttgccttctggaagccagctgatcttgtcacacccaccatggcgagggggaagaagaaggtattcaggagacacagcaaccctcttaggaacagaaaaaggaattgcatttac

SEQ ID NO: 32946 - DNA, 345 bp, Homo sapiens
  MAP TO AL133415.12; EXPRESSED IN PLACENTA, SIGNAL = 1.3; NT HIT: AF045888.1, EVALUE 0.00e+00; SWISSPROT HIT: P40999, EVALUE 4.10e-02; EST_HUMAN HIT: AA399001.1, EVALUE 0.00e+00
gtactgatggagttccccaaaattgaatctgtacatccacaaaaatatgcaatggatgtagaaaataaaattcaagaaaagaacgttgaaccaaatattagctttgatggcagcatacagtgttctggaaaagatgccattctttttaagcttgaaactgcagaagaaattcacaggaaaaatcaacaagatagtgatctctctgtgaaaatgctaaaagattttcttgaagatgacactgacgtgaaccagtatcttttaccaccaaagtcattgctgcgatatgctcttctgttagacattgttcagcccacttgtagaaggtccgtgtgctttaccaaaggg

SEQ ID NO: 32947 - DNA, 316 bp, Homo sapiens
  MAP TO AL132838.1; EXPRESSED IN PLACENTA, SIGNAL = 1.7; SWISSPROT HIT: P03079, EVALUE 4.00e-01; NT HIT: AB040958.1, EVALUE 0.00e+00; EST_HUMAN HIT: BE780453.1, EVALUE 0.00e+00
agctccatggcccagggactcactgtctgccagtcttctaccggatctctcttcgggagcttcagagctacatgcagaaagtgaaggtctgttaggagtcagcccaaaagtcaagtcagtttctactgcagttcgtcccctgacatgggctggaccggtactagcattttctggggctgccaaaggaaagtctgaccgctggggaggttgctcaacgacatccaggtgtatcggctcattcttttgtctgtgtagatgcccgtcaggggaaagtggatattctctcctagcttcttcctgttttttaggagacgtc

SEQ ID NO: 32948 - DNA, 135 bp, Homo sapiens
  MAP TO AL158148.1; EXPRESSED IN PLACENTA, SIGNAL = 2.1; EST_HUMAN HIT: AA872183.1, EVALUE 8.00e-49
atgcatctcctccccgactctgaggcctggcaggaggaggccacaccagcctcacctgccctgacccccgccccccaccctgtgaccctgtggctatggccgctggtcgcccttgtccccaaaatcaccatgcct

SEQ ID NO: 32949 - DNA, 180 bp, Homo sapiens
  MAP TO AL109658.5; EXPRESSED IN PLACENTA, SIGNAL = 2.5; SWISSPROT HIT: P10264, EVALUE 2.30e-02; NT HIT: AF114156.1, EVALUE 4.00e-35; EST_HUMAN HIT: BF126891.1, EVALUE 6.20e-01
atggcatcccccactgtcgggaaacgagaagggggcctggacctgggtccctcaaacaatgagggcattcccagttcagaccacaaccccatttcaggggcgggtcccaggagaaacattgattccctcattccaggaacacccagaagtgcaggattagatctcccagtcagagaacag

SEQ ID NO: 32950 - DNA, 135 bp, Homo sapiens
  MAP TO AP001208.1; EXPRESSED IN PLACENTA, SIGNAL = 1.7; SWISSPROT HIT: P46310, EVALUE 2.40e+00; NT HIT: M10408.1, EVALUE 1.20e+00; EST_HUMAN HIT: BF434359.1, EVALUE 1.80e+00
gtcttcagcactgtgacccagtcttgctcagattctgacgtctttctctttggtgtgtgggaaggtctgtggttgagtcaaggtcagagcttctttgccttgtttctaggccattcggagaaactacaccttaag

SEQ ID NO: 32951 - DNA, 177 bp, Homo sapiens
  MAP TO AC020749.2; EXPRESSED IN PLACENTA, SIGNAL = 1.6; EST_HUMAN HIT: Z44727.1, EVALUE 3.00e-95; SWISSPROT HIT: Q92076, EVALUE 2.30e+00; NT HIT: AF161420.1, EVALUE 2.00e-95
cagatctgtctttggaggatctggacactcagcagagaaataaggtgccgaacttctgcctccactgctgtcagaagatggctttggaggttgagcatgctgtctgtaagtagcacttttaggagtccaacaaaacaggttgatagattctctcacacagcgttcaatgtcaatttc

SEQ ID NO: 32952 - DNA, 163 bp, Homo sapiens
  MAP TO AC009680.5; EXPRESSED IN PLACENTA, SIGNAL = 1.8; NT HIT: gi7657416, EVALUE 9.50e-02; EST_HUMAN HIT: AW935618.1, EVALUE 1.40e-01
gagcaaaatgcgctgggtgggaagatgagccgcccatcttcagctgtttcacttctcattctaaatggaaacattggcattctgatctcacacattagttgtaagagtttcattaatatgagtccagttctggaggacagatgtgctctgaagctgctgacaa

SEQ ID NO: 32953 - DNA, 194 bp, Homo sapiens
  MAP TO AL157885.2; EXPRESSED IN PLACENTA, SIGNAL =  32; NT HIT: AF253323.1, EVALUE 2.90e-02; SWISSPROT HIT: P21733, EVALUE 2.00e-04
atgttcttaggaatcagatctctgaggatctcatggacatacatgtacttcttaggaatcagatctctgaggatctcatggatatacatgttctccttaggaatcagatctctgaggatctcatggacatacatgttctccttaggaatcagatctctcaggatctcatggacacatatgcagaaagtcagata

SEQ ID NO: 32954 - DNA, 186 bp, Homo sapiens
  MAP TO AL136298.1; EXPRESSED IN PLACENTA, SIGNAL = 1.6; SWISSPROT HIT: Q9Z9C9, EVALUE 7.60e-01; EST_HUMAN HIT: AW043751.1, EVALUE 3.00e-03; NT HIT: AF216650.1, EVALUE 2.00e-27
ttagttgtcagggcagggtagctctatgggttggtgaaagtggtatacagccaggtctaagggatacaggcaggattttgcctctgtcatgccactgatgggcagtctaggactcttctgtagaaagatgacttgaaaattgagaggacggtatccctcactgaggatcatctggagcttgatggc

SEQ ID NO: 32955 - DNA, 295 bp, Homo sapiens
  MAP TO AC011497.3; EXPRESSED IN PLACENTA, SIGNAL = 2.1; SWISSPROT HIT: Q05469, EVALUE 2.00e-54; NT HIT: L11706.1, EVALUE 0.00e+00; EST_HUMAN HIT: AW269990.1, EVALUE 0.00e+00
gacagtgaggagctcagcagcctgataaagtccaacggccaacggagcctggagctgtggccgcgcccccagcaggcaccccgctcgcggtccctgatagtgcacttccacggcggtggctttgtggcccagacctccagatcccacgagccctacctcaagagctgggcccaggagctgggcgcccccatcatctccatcgactactccctggcccctgaggcccccttcccccgtgcgctggaggagtgcttcttcgcctactgctgggccatcaagcactgcgccctccttg

SEQ ID NO: 32956 - DNA, 98 bp, Homo sapiens
  MAP TO AC010093.2; EXPRESSED IN PLACENTA, SIGNAL = 1.4; NT HIT: AL163227.2, EVALUE 1.30e-02; SWISSPROT HIT: P20261, EVALUE 9.50e+00; EST_HUMAN HIT: AW291799.1, EVALUE 2.00e-48
ggaccaatgcagtaggattttgcagttagggaaagagttgattgagctcaactccaaataccgcatggggaagtgggaatttatagccaaggaacagg

SEQ ID NO: 32957 - DNA, 183 bp, Homo sapiens
  MAP TO AC018760.4; EXPRESSED IN PLACENTA, SIGNAL = 1.6; EST_HUMAN HIT: BF693986.1, EVALUE 2.50e+00; SWISSPROT HIT: Q27546, EVALUE 3.40e-01
cagggtggctgcctggcccagggtgcccctcacagcccccctgtctttcacctcttgggtaatgggctgctcgtcttctctggtcacttgcagccccaggaacgagaccttccatggctctgtcagaaccagatgctgacctgtgggagagtcaacagctgccatctgagatccagggaagac

SEQ ID NO: 32958 - DNA, 133 bp, Homo sapiens
  MAP TO AC011497.3; EXPRESSED IN PLACENTA, SIGNAL = 1.8; NT HIT: AB011541.1, EVALUE 3.00e-69; SWISSPROT HIT: Q06561, EVALUE 3.00e-04; EST_HUMAN HIT: BE880306.1, EVALUE 8.00e-15
ctggtacttgtagcagtctcgacggtcactgggggagctgccctggcatgtgcccgtctctgtgttattctgacatggacagcccgtcccatcctgctcgttacatgtgtccgcgtggccattacactggcat

SEQ ID NO: 32959 - DNA, 106 bp, Homo sapiens
  MAP TO AC022212.2; EXPRESSED IN PLACENTA, SIGNAL = 1.4; NT HIT: AF146793.2, EVALUE 9.00e-01
aaatgtgcttctgctgctgtttgagtattctctgttcattaaagacatcatcatattccttgtttcttggctcttttgaccctccatatttagtttgacaccgatt

SEQ ID NO: 32960 - DNA, 224 bp, Homo sapiens
  MAP TO AC019181.2; EXPRESSED IN PLACENTA, SIGNAL = 2.7; SWISSPROT HIT: Q46638, EVALUE 7.60e-01; NT HIT: gi11429952, EVALUE 1.00e-102; EST_HUMAN HIT: AW450931.1, EVALUE 1.00e-123
ggggaggtcctgatatttcatttactccagcgtacctgccatgaacagtagtagatttgataatatccccaggtaggaccactgagagttcaacgtctttatctatcatgttttctttctgttccatgatgaaagcagtggattctacagaatcagcagctgaagagacatcagtatatttggtctcagctggaggaagtggtgccttggcttttggttttctc

SEQ ID NO: 32961 - DNA, 371 bp, Homo sapiens
  MAP TO AC011455.3; EXPRESSED IN PLACENTA, SIGNAL = 1.6; SWISSPROT HIT: P14137, EVALUE 4.60e-01; NT HIT: AF282902.1, EVALUE 2.30e-01; EST_HUMAN HIT: AA112438.1, EVALUE 9.00e-39
cccggaagtggaccatcctgggccggctctcgccagcctactggaagaggaggaggaagaccttgaaggaaaggaggaaggaagggaggacgaccctgaagaggaaggccctgaggacgtgctcaccattcacgtccagtctctggtcagggcccggagcagctacgtggccaggcagtaccgaagccttcgggtgcgcatcgcctcagattctgggggtccccacgggtctggggacccggccacggagctgcttcaggatgtgcggcacctccttactgacctccaggatcacctggcaaaggactcctacatcagggctgtctttggaagcaggggtcctgggctccccaagaaggacgaggatccag

SEQ ID NO: 32962 - DNA, 161 bp, Homo sapiens
  MAP TO AC023009.3; EXPRESSED IN PLACENTA, SIGNAL =   2; NT HIT: gi11418903, EVALUE 7.00e-86; SWISSPROT HIT: P00488, EVALUE 4.00e-23; EST_HUMAN HIT: R65984.1, EVALUE 1.00e-85
tcaagaaagaggcggtgctgatccaagccggcgagtacatgggtcagctgctggaacaagcgtccctgcacttctttgtcacagctcgcatcaatgagaccagggatgttctggccaagcaaaagtccaccgtgctaaccatccctgagatcatcatcaag

SEQ ID NO: 32963 - DNA, 99 bp, Homo sapiens
  MAP TO AL133388.2; EXPRESSED IN PLACENTA, SIGNAL = 2.1; EST_HUMAN HIT: AA361315.1, EVALUE 7.80e-02; NT HIT: L19248.1, EVALUE 2.00e-04
atggtttttattgttgatgaggatgatgatgaagaagatgaggttacagcagtaattggacttaagggatggcacacagaccccaaacccacaaaatga

SEQ ID NO: 32964 - DNA, 140 bp, Homo sapiens
  MAP TO AL133241.2; EXPRESSED IN PLACENTA, SIGNAL =  12; NT HIT: AL163278.2, EVALUE 2.00e-11; EST_HUMAN HIT: AA629929.1, EVALUE 3.00e-11
gctgatgaggaggcggaggaagaggaaaaggagttggttttgctgtctcaggagtggcagaggcagagaagagttgtcagggaggtagaagaggcaggcacactcaagtgtaacatttatggaaaaaagtctgcatgcat

SEQ ID NO: 32965 - DNA, 137 bp, Homo sapiens
  MAP TO AL135746.2; EXPRESSED IN PLACENTA, SIGNAL = 1.3; SWISSPROT HIT: P48319, EVALUE 4.00e+00; NT HIT: AF195953.1, EVALUE 3.10e-01
aagaccctaaaactgttgagtgggatacccaacgtttcgagtacccactcctctaccttcaattgagttgggaatgtatccctgatgtacaaattctgcaactgcaccgggcttctctggagccttccctctccaac

SEQ ID NO: 32966 - DNA, 199 bp, Homo sapiens
  MAP TO AC013568.3; EXPRESSED IN PLACENTA, SIGNAL = 1.8; NT HIT: gi6681030, EVALUE 4.70e-01; EST_HUMAN HIT: AA095094.1, EVALUE 1.80e-01; SWISSPROT HIT: Q56855, EVALUE 4.40e-01
tcgggaggccctccatgaacccattctgtctctcctggctggagatgccagcagacattttagggaatgcagaatcaatgagaagggaattgggccgagtgtgggacagcttgaaccagtggggttcgcctctgagggaaccgttggagaacacctggtccaaaatctcattctggaggcggcgaaaggcctttcccat

SEQ ID NO: 32967 - DNA, 273 bp, Homo sapiens
  MAP TO AC012568.3; EXPRESSED IN PLACENTA, SIGNAL =   3; EST_HUMAN HIT: R19623.1, EVALUE 7.00e-48; SWISSPROT HIT: P20485, EVALUE 2.00e+00; NT HIT: S77597.1, EVALUE 6.60e-01
ttattcttcttcctttttctgatagccactggcaaggctcacattcatgtgtggtatactaccaatttttttcccttctctgtgtttaaagtcaatttccccctcaacaatttctgcccagatacctattccaagttgcacaaagctctctcttggcagccaaaggaggaacttacccacaatgctatcaacctgggcatctgttgtgttagatgcaccaccccgatgatcagagagggattcagtactatctgctgctggcaaatggggttg

SEQ ID NO: 32968 - DNA, 140 bp, Homo sapiens
  MAP TO AC010093.2; EXPRESSED IN PLACENTA, SIGNAL = 1.7; NT HIT: gi4507608, EVALUE 8.00e-02; EST_HUMAN HIT: AV699944.1, EVALUE 1.90e+00
atgaccaattttagtcagatacagtcgccccaggaaatgcctattaggaagccgatagtgagagtgggcaaggagtgggtgaggagggcagcaccgcaggaggtggcaggggtccagtcgacctgccatgagacctggag

SEQ ID NO: 32969 - DNA, 117 bp, Homo sapiens
  MAP TO AC013568.3; EXPRESSED IN PLACENTA, SIGNAL = 1.5; EST_HUMAN HIT: AW242934.1, EVALUE 2.00e-12; SWISSPROT HIT: P30205, EVALUE 1.80e+00; NT HIT: U93050.1, EVALUE 4.00e+00
ctgcggagctccagggcagtgcagaatttggcacagtggttcttgtggtctatgtgaggaagcatggtcagtactgctaccttgcatagctccggggggcctcctttacattgccgt

SEQ ID NO: 32970 - DNA, 185 bp, Homo sapiens
  MAP TO AL031123.14; EXPRESSED IN PLACENTA, SIGNAL = 1.5; EST_HUMAN HIT: AV763053.1, EVALUE 1.00e-91; SWISSPROT HIT: Q05632, EVALUE 1.70e+00; NT HIT: M84761.1, EVALUE 1.70e+00
ccctcgtgctatcaactgctgcctgctggctgcagccaggtccctgggtccatacacagcctgcatcaagagcctgcagagactcgggggctggagatgggaaacagatggtggcctgcgctttgtctttcccaagtttacagcctcacctgggggtggaggctgttctgaggggcccccaagag

SEQ ID NO: 32971 - DNA, 169 bp, Homo sapiens
  MAP TO AL121819.1; EXPRESSED IN PLACENTA, SIGNAL = 3.7; SWISSPROT HIT: Q65328, EVALUE 3.90e+00; NT HIT: D86980.1, EVALUE 9.90e-02; EST_HUMAN HIT: AI557112.1, EVALUE 5.80e-01
ctattcctttccctggaccacactctttgggaagcaggagccacctcatctcttcttgtgtctcttgtaacccttgtagcttgtgccttgctgggggtttaaaatgcttgttgaatgaatacatgctccttagcagaagcatatgtagaggccgccaattcagaagatc

SEQ ID NO: 32972 - DNA, 151 bp, Homo sapiens
  MAP TO AC020754.2; EXPRESSED IN PLACENTA, SIGNAL = 1.3; NT HIT: Y15671.1, EVALUE 5.40e+00; SWISSPROT HIT: P35611, EVALUE 4.00e+00
cctcggcaagttcctcacccagcaagactatgttgtgaagtcctacccttgcgtctgccgaggggacccccaccaccaccagcccagcatctggaagaagcctgactctccctttggagtgccagttcctcttgatttctagttccgacat

SEQ ID NO: 32973 - DNA, 105 bp, Homo sapiens
  MAP TO AL117332.16; EXPRESSED IN PLACENTA, SIGNAL = 1.3; NT HIT: gi11421401, EVALUE 1.00e-52; SWISSPROT HIT: P36627, EVALUE 4.80e-01; EST_HUMAN HIT: AU130294.1, EVALUE 2.00e-52
agagaagaattcaaaccaaacaagcccaaaccatgtggtctttgtaatcagtttggacatgaggtcaaagattgtgaaggtttgccaagagaaaagaagggaaag

SEQ ID NO: 32974 - DNA, 182 bp, Homo sapiens
  MAP TO AL133551.4; EXPRESSED IN PLACENTA, SIGNAL = 1.6; NT HIT: AB046813.1, EVALUE 2.00e-98; EST_HUMAN HIT: AW118802.1, EVALUE 3.00e-98; SWISSPROT HIT: Q15034, EVALUE 7.00e-21
atcaatagcttggatcagtttagagcgtagagtttctttttctgtatattttggaagatccagaagattaaaacaagtatgggaaactgggagatactcctcaccacctcctgtggactggatgactagtttcagactcttcataccaagaataggaatgcgatcactacctgtcaaaaata

SEQ ID NO: 32975 - DNA, 84 bp, Homo sapiens
  MAP TO AL079295.1; EXPRESSED IN PLACENTA, SIGNAL = 1.2; EXPRESSED IN HELA, SIGNAL = 1.4; NT HIT: AL139077.2, EVALUE 4.30e-02; EST_HUMAN HIT: BE778861.1, EVALUE 1.00e+00
tgatattttgaagtgtgtccctggtattatagaggacaatttgctccctggtgtccaagagagagaagagcaattgagcagcct

SEQ ID NO: 32976 - DNA, 583 bp, Homo sapiens; identical to SEQ ID NO: 16495
  MAP TO Z95114.19; EXPRESSED IN PLACENTA, SIGNAL = 1.2; NT HIT: Y10226.1, EVALUE 1.50e+00; EST_HUMAN HIT: AV720678.1, EVALUE 0.00e+00; SWISSPROT HIT: P03385, EVALUE 1.00e+00

SEQ ID NO: 32977 - DNA, 205 bp, Homo sapiens
  MAP TO AL022238.1; EXPRESSED IN HELA, SIGNAL = 1.4; EXPRESSED IN PLACENTA, SIGNAL = 1.3; NT HIT: AF106656.1, EVALUE 1.00e-112; SWISSPROT HIT: Q09332, EVALUE 1.70e+00; EST_HUMAN HIT: AW812483.1, EVALUE 1.00e-102
ttcagtttggggattgaggtacccatagatcaaccaggtggacgtctcactcagtaggtatgaggtctggcacttgagcaagtggtctggcctagaggtgacagatttgagggtcgtgaggttattggggtaatcataagattgaaggagattatccagagagtacagtcagtagggcaacttgttgggacacacactgcatttc

SEQ ID NO: 32978 - DNA, 372 bp, Homo sapiens
  MAP TO AC008166.1; EXPRESSED IN PLACENTA, SIGNAL = 2.2; EST_HUMAN HIT: BE163587.1, EVALUE 1.00e-101; SWISSPROT HIT: P70213, EVALUE 1.00e-12; NT HIT: AL163246.2, EVALUE 5.00e-98
gtggaaaacaggacacgagctcttatcatgcaagtggctgacctgcagtgaaaggtgcatgcacagcctcaccaggtttctactgttaaagtgagggcattgattggaaaagaatggcaccctaaaacttggaatgaggatgtgtgggaggaccctgatgaagctgggaacgctgactttgtaaacactgatgcaccttttttgccaaaagaaacagcttccccatccctagtagtggcaacatcccctccccgacccatgctgccatcagcctttctacctttgtctaaggaaataaaccctgttctgcctgaggcaacagtcatggcctcccctgaggcagttgccaggcaagataatgttgattatctt

SEQ ID NO: 32979 - DNA, 246 bp, Homo sapiens
  MAP TO AC005300.10; EXPRESSED IN PLACENTA, SIGNAL = 1.5; NT HIT: AP001514.1, EVALUE 1.50e-01; EST_HUMAN HIT: BE781069.1, EVALUE 2.20e-01; SWISSPROT HIT: P20722, EVALUE 2.10e+00
caagacccccgggagaggcaatcttccagctcctcctccatgttagcttgtacatgagccctccaagcttggacaatgacagctacagagccaagcaggaggagggcagggaccctggaaaaacaggaggaagcaactcgagccaacaagatatcacacctgaacaccaaaaaacagctgccaagagaaaactgaccaagccccacacgccacacaggaaatgcctggacaaatggtgcctctaac

SEQ ID NO: 32980 - DNA, 81 bp, Homo sapiens
  MAP TO AC006427.13; EXPRESSED IN PLACENTA, SIGNAL = 1.3; NT HIT: AL161540.2, EVALUE 4.10e-02; EST_HUMAN HIT: AW904491.1, EVALUE 1.00e-33
tgttcgtgaaactgcagttatttgacatgactggaaaaaagagtgcttgtagaagagtggtaagagatgaaacaggaaagg

SEQ ID NO: 32981 - DNA, 460 bp, Homo sapiens
  MAP TO AC006992.2; EXPRESSED IN PLACENTA, SIGNAL = 1.9; NT HIT: V00202.1, EVALUE 2.90e-01; EST_HUMAN HIT: BE967917.1, EVALUE 4.30e-01; SWISSPROT HIT: P34158, EVALUE 8.20e+00
aaagtgagctgcctttgcttaaaatgcttttctataattctctttttaaatggccttaagtttatggttcttattttatgcttcacagtgtacaggtcaaaaaaaaaatctcatttcctccttgcagttgggtcttagtctataatggcattccttatcatgatcagccaccttattcagctgactttgatacaaataactttgggagggatccccaaatcaaatcttccctcaacgatgaagatttttatccagcacacagcatataataaatatgtgatgacagaatgattgaatctgacacttgggagtatagacaaaatttggcactactggctcaaaaaatggagtttaaaaattgccacaagcaatggcactattgcctcattgtcttatattattatcttatttaattttgacacatactatatatttattgtgtgaagaatttgtatcttct

SEQ ID NO: 32982 - DNA, 76 bp, Homo sapiens
  MAP TO AC006427.13; EXPRESSED IN PLACENTA, SIGNAL = 1.4; NT HIT: gi9695413, EVALUE 1.50e-01; EST_HUMAN HIT: AA230280.1, EVALUE 2.30e-01
tttcagatggagaatttgccttagaatggattatacacagagccacattcatacctgatttaaatgatttagatgg

SEQ ID NO: 32983 - DNA, 172 bp, Homo sapiens; identical to SEQ ID NO: 32477
  MAP TO AL022238.1; EXPRESSED IN PLACENTA, SIGNAL = 1.4; EXPRESSED IN HELA, SIGNAL = 1.3; EST_HUMAN HIT: AV705907.1, EVALUE 2.30e+00; NT HIT: AF106656.1, EVALUE 2.00e-92; SWISSPROT HIT: Q09137, EVALUE 5.10e+00

SEQ ID NO: 32984 - DNA, 296 bp, Homo sapiens
  MAP TO AC007556.2; EXPRESSED IN PLACENTA, SIGNAL = 1.4; EXPRESSED IN HELA, SIGNAL = 1.3; NT HIT: gi11430460, EVALUE 0.00e+00; EST_HUMAN HIT: BF316201.1, EVALUE 1.10e+00; SWISSPROT HIT: P98164, EVALUE 2.00e-52
tgaccggcacaatgactgtggtgactatagcgacgagaggggctgcttataccagacttgccaacagaatcagtttacctgtcagaacgggcgctgcattagtaaaaccttcgtctgtgatgaggataatgactgtggagacggatctgatgagctgatgcacctgtgccacaccccagaacccacgtgtccacctcacgagttcaagtgtgacaatgggcgctgcatcgagatgatgaaactctgcaaccacctagatgactgtttggacaacagcgatgagaaaggctgtggtg

SEQ ID NO: 32985 - DNA, 88 bp, Homo sapiens
  MAP TO AC007556.2; EXPRESSED IN PLACENTA, SIGNAL = 1.2; EXPRESSED IN HELA, SIGNAL = 1.5; NT HIT: gi11430460, EVALUE 3.00e-28; EST_HUMAN HIT: BF130444.1, EVALUE 2.00e-23; SWISSPROT HIT: P98164, EVALUE 1.00e-13
tcgaactgcctatcaacctgccccccccatgcaggtgcatgcacggaggaaattgctattttgatgagactgacctccccaaatgcaa

SEQ ID NO: 32986 - DNA, 202 bp, Homo sapiens
  MAP TO AC007567.1; EXPRESSED IN PLACENTA, SIGNAL = 4.2; NT HIT: AF156961.1, EVALUE 2.00e-89; EST_HUMAN HIT: T96421.1, EVALUE 1.00e-45; SWISSPROT HIT: Q02457, EVALUE 8.50e+00
tagacaaaggggtaaataatgaaccaaagagtgccaatattccccgtttatgccccctccaagcagtgggaggaggagaattcggcccagccagagtgcatgtacctttttctctctcagacttgaagcaaattaaaatagacctaggtcaattctcagataaccctgatggctatattgatgtttacaagggttaggacaa

SEQ ID NO: 32987 - DNA, 572 bp, Homo sapiens; identical to SEQ ID NO: 16509
  MAP TO AC007564.9; EXPRESSED IN PLACENTA, SIGNAL = 1.2; NT HIT: gi11465934, EVALUE 1.00e-03; EST_HUMAN HIT: BE146537.1, EVALUE 3.50e-02

SEQ ID NO: 32988 - DNA, 226 bp, Homo sapiens
  MAP TO AC006427.13; EXPRESSED IN PLACENTA, SIGNAL = 1.5; EST_HUMAN HIT: BF507518.1, EVALUE 3.20e+00; SWISSPROT HIT: Q9ZLM8, EVALUE 6.60e+00; NT HIT: X69192.1, EVALUE 1.40e-01
gtcaaggtatgtaatgcactttgcatgtttcctggcacacagctggggatcaaaacatgtttcttgaataataggaccctcagaaaaggaaaagaagctgaggtcactctctccaaaaaatgtattcccatgattttgaaatcaaggagtttgtcctttatttctgtaggagtgattaggatgtccctaaatgttagaaactcagttaacagcagagaaacaagat

SEQ ID NO: 32989 - DNA, 125 bp, Homo sapiens
  MAP TO AL079295.1; EXPRESSED IN PLACENTA, SIGNAL = 1.4; SWISSPROT HIT: P57268, EVALUE 2.40e+00; NT HIT: AB016194.1, EVALUE 1.10e+00; EST_HUMAN HIT: R43678.1, EVALUE 2.60e-02
agactgctgacgaggatcctgatctcagggagcttctgtttggggtcggggaggagacagacaacaaacaaacatataacaatcaacggtaagaactaaaatcagtgacaagtgaagacaaagca

SEQ ID NO: 32990 - DNA, 116 bp, Homo sapiens
  MAP TO AC008174.2; EXPRESSED IN PLACENTA, SIGNAL = 1.2; NT HIT: AF325363.1, EVALUE 2.50e-01; EST_HUMAN HIT: BF672645.1, EVALUE 5.90e+00
cttttgatttataccattatcctgtacatctgcctgataaacaacagaagctgagttttttttcgtaaaattatttgaactattttgacgctgatgagcagcatttgctgtatgtc

SEQ ID NO: 32991 - DNA, 151 bp, Homo sapiens
  MAP TO Z82201.1; EXPRESSED IN PLACENTA, SIGNAL =   2; SWISSPROT HIT: P43489, EVALUE 1.00e+00; EST_HUMAN HIT: BF315095.1, EVALUE 2.00e+00; NT HIT: X65292.1, EVALUE 8.70e-02
gtgtccaattgctggagctgaacatgctcaaagggcatattcagtatgttctgatgaaatcacagaagatcagacaccatctgctccagtacccatcaagagccaaattccacccattactctccccagtaaaaagggggctagccttagg

SEQ ID NO: 32992 - DNA, 240 bp, Homo sapiens
  MAP TO AC007564.9; EXPRESSED IN PLACENTA, SIGNAL = 1.2; EST_HUMAN HIT: AU143902.1, EVALUE 2.20e-01; NT HIT: gi11467432, EVALUE 3.70e-02
ttgaaagcaaatggctggaaaaatattaccatgaaaataataagcaaaataaagccactttcctatgttagcatcagataaagcaggctttatgggaaagtgaacattattacaaaaaggtcatgtaatttaaaaagcataattaagaaaagtactattatcaaaatgataaaatgttcaattcaccaagatgatataacagctatcaatctgattgcacccaagaacacagcctcaaat

SEQ ID NO: 32993 - DNA, 109 bp, Homo sapiens
  MAP TO AL008723.8; EXPRESSED IN PLACENTA, SIGNAL = 1.4; NT HIT: AJ238044.1, EVALUE 2.40e-01; EST_HUMAN HIT: W49512.1, EVALUE 3.50e-01; SWISSPROT HIT: P09394, EVALUE 3.20e+00
gcatttcctaagcacctgtgagtgaaagtcctgtgtgtggccccttcctggtgatggaaccatggcttcttactcatagaggcatccctgatgccatgcacagtgactg

SEQ ID NO: 32994 - DNA, 103 bp, Homo sapiens
  MAP TO Z82201.1; EXPRESSED IN PLACENTA, SIGNAL = 1.5; NT HIT: AF238059.2, EVALUE 1.40e-02; EST_HUMAN HIT: BF131844.1, EVALUE 8.20e-02
atgtgtaacacctgcatcattggaataccagaaagagaaagagaaataagcaaacaaacaaagaaacaaaacaagagaacaaacaaaaacaaaaacccatttt

SEQ ID NO: 32995 - DNA, 165 bp, Homo sapiens
  MAP TO AL079300.11; EXPRESSED IN PLACENTA, SIGNAL = 1.4; NT HIT: AJ295624.1, EVALUE 9.60e-02; EST_HUMAN HIT: BF683313.1, EVALUE 5.70e-01; SWISSPROT HIT: O67650, EVALUE 3.90e+00
aagtaacatttctgccaacaacaacatccactcctactcagctcttcgttccctgcaattcctgtcttgcccgacccctgcagagtggaagaaggtgatggatgggcagagaaatgggagatggacagctaccagggaagaatctgtgatttgggagccttttgg

SEQ ID NO: 32996 - DNA, 562 bp, Homo sapiens; identical to SEQ ID NO: 16522
  MAP TO AL079295.1; EXPRESSED IN PLACENTA, SIGNAL = 1.4; SWISSPROT HIT: Q41014, EVALUE 3.70e+00; NT HIT: Z54173.1, EVALUE 3.60e-01; EST_HUMAN HIT: AW243033.1, EVALUE 2.10e+00

SEQ ID NO: 32997 - DNA, 86 bp, Homo sapiens
  MAP TO AL035682.16; EXPRESSED IN PLACENTA, SIGNAL = 1.2; NT HIT: gi11420516, EVALUE 2.00e-41; EST_HUMAN HIT: BF243808.1, EVALUE 1.00e+00; SWISSPROT HIT: Q13469, EVALUE 1.00e-10
ctcttcccattgatgacgtagaagttcacttttacaggtgtgcggatatgcttgttccgatattcagggatctcaacaaaaagcat

SEQ ID NO: 32998 - DNA, 117 bp, Homo sapiens
  MAP TO AP000041.1; EXPRESSED IN PLACENTA, SIGNAL = 2.4; NT HIT: U30729.1, EVALUE 2.60e-01; EST_HUMAN HIT: BF183646.1, EVALUE 3.80e-01
catgctcttttatatgtggccccacagccaacttatgatcctcaatgactcctccagcctccaccatcacggaggttggggttctgcctagctgggagatgagaatggaatgagaag

SEQ ID NO: 32999 - DNA, 129 bp, Homo sapiens
  MAP TO AC006427.13; EXPRESSED IN PLACENTA, SIGNAL = 1.4; NT HIT: AF200418.1, EVALUE 2.90e-01; EST_HUMAN HIT: BF304909.1, EVALUE 1.70e+00
atgtagtggttatgcaccttgtcacaggttttgtaacccatagaaaaccaatggtcacccatggtccacggacattctttccagaaaaagacactcagatgactgtgcccctcctggcacacacactct

SEQ ID NO: 33000 - DNA, 105 bp, Homo sapiens
  MAP TO AC007719.1; EXPRESSED IN PLACENTA, SIGNAL = 1.3; NT HIT: AL163303.2, EVALUE 8.90e-01; EST_HUMAN HIT: AW885845.1, EVALUE 6.00e-12; SWISSPROT HIT: P52848, EVALUE 7.20e+00
tttaccttctaaatccttttcaaagtatcgtcttccttttttctccagtttacatccagttttactccccaatatcttttccataggctttggttctcactttag

SEQ ID NO: 33001 - DNA, 607 bp, Homo sapiens
  MAP TO AC004032.7; EXPRESSED IN PLACENTA, SIGNAL = 1.7; EST_HUMAN HIT: AW089770.1, EVALUE 6.00e-07; NT HIT: gi11437071, EVALUE 4.00e-07; SWISSPROT HIT: P51461, EVALUE 5.30e+00
ttctcactcctgcagagcaagggggaattgaatccatttgctcaggatgacttcatactgggttctacctgggatacagcagacttgggaaaattgggggcagccctggggtccctgaagggcctccagtggaatttagctccataggcatccggaagcatgtattaagtcccttccttgtgctacttctttctccagtggtggttagtacgtgggagtgctaagagcagtgcctggcacacagtaagcactcaatactcaataagtgtttgctaacatgagcttttccaccttcacagtgactccatgcattcattcatccacctaacatttttgcccatccctgcccttcactaggtcctggaaacgcagcaatgaacaagaaagacagagtggggagtgataaaagacatcaaccttgccctcacagagctcctgctctggaggaagaccaacattacctaggaatggctctaacaggagaaaaactgcacgtggtgtgtgctgctttagaagaaggtgctggagctctagggagagcacctgggggcttgacctggcctgcgtaggggaagggtcagaaagacactctttgtcttgcccttcc

SEQ ID NO: 33002 - DNA, 101 bp, Homo sapiens
  MAP TO AB016897.1; EXPRESSED IN PLACENTA, SIGNAL = 1.4; EST_HUMAN HIT: BE938792.1, EVALUE 4.00e-50; SWISSPROT HIT: P55196, EVALUE 2.00e-09; NT HIT: AB011399.1, EVALUE 3.00e-50
acctgacatcagccctacagagcgcacacataaagtcattgcagtcgtcaacaagatggtgagcatgatggagggtgtcatccaggtacgttccagccggc

SEQ ID NO: 33003 - DNA, 96 bp, Homo sapiens
  MAP TO AC007463.3; EXPRESSED IN PLACENTA, SIGNAL = 2.7; NT HIT: gi11440526, EVALUE 3.20e+00; EST_HUMAN HIT: AA077909.1, EVALUE 1.20e+00
ggtgtttttaggatccacatccccagctacagcaggagacaagggtcttgagacctttagaaatccaaattctactcggacaacatagttgtcctg

SEQ ID NO: 33004 - DNA, 114 bp, Homo sapiens
  MAP TO AC007539.8; EXPRESSED IN PLACENTA, SIGNAL = 1.3; NT HIT: U66277.1, EVALUE 3.90e+00; EST_HUMAN HIT: BF223935.1, EVALUE 1.50e+00
gcctgagagaaaaatctgtgtcatcatcaatgtcatcatcatcatcatcaacaacaaatagatcactggaccaccattcaacaaatactaaaaactgggtcaatggtgggtcat

SEQ ID NO: 33005 - DNA, 201 bp, Homo sapiens
  MAP TO AC007462.2; EXPRESSED IN PLACENTA, SIGNAL = 1.2; NT HIT: AF090141.1, EVALUE 1.20e-01; EST_HUMAN HIT: AW814278.1, EVALUE 1.80e-01; SWISSPROT HIT: Q10907, EVALUE 4.40e-01
ttatgccaaggttatataaagcaattccaggtcactgagccagttgaagtaacatataatagggaggaaaaatatgtctaccaatggaaattataccatgattcttcagtgatctcagttttctcagatgataactggttgggagcatctgtgaacaagatcatgagaaataaaccagatttgaatagccacacatgagaa

SEQ ID NO: 33006 - DNA, 166 bp, Homo sapiens
  MAP TO Z83844.5; EXPRESSED IN PLACENTA, SIGNAL = 1.5; EST_HUMAN HIT: AW451790.1, EVALUE 1.00e-88; SWISSPROT HIT: Q61586, EVALUE 1.80e+00; NT HIT: AB025290.1, EVALUE 3.80e-01
gtaccaagtgctggtggggatacggagaagagcagctcccaggcgctgctggtgcaaatgtgctttgttgcacccacggcaggaaactgaccagcttctcatcaagttaaatacgcatctaccctatggcctagcatttccactcttgcttacacatccaggagaa

SEQ ID NO: 33007 - DNA, 362 bp, Homo sapiens
  MAP TO AC019222.3; EXPRESSED IN PLACENTA, SIGNAL = 0.52; NT HIT: gi11428735, EVALUE 0.00e+00; EST_HUMAN HIT: AU125996.1, EVALUE 0.00e+00; SWISSPROT HIT: P98155, EVALUE 2.00e-65
gcaatataacatgtagtcccgacgagttcacctgctccagtggccgctgcatctccaggaactttgtatgcaatggccaggatgactgcagcgatggcagtgatgagctggactgtgccccgccaacctgtggcgcccatgagttccagtgcagcacctcctcctgcatccccatcagctgggtatgcgacgatgatgcagactgctccgaccaatctgatgagtccctggagcagtgtggccgtcagccagtcatacacaccaagtgtccagccagcgaaatccagtgcggctctggcgagtgcatccataagaagtggcgatgtgatggggaccctgactgcaaggatggcagtgatgag

SEQ ID NO: 33008 - DNA, 109 bp, Homo sapiens
  MAP TO AC007313.3; EXPRESSED IN PLACENTA, SIGNAL = 1.5; EST_HUMAN HIT: BE891550.1, EVALUE 3.00e-14; NT HIT: AB009668.1, EVALUE 1.00e-12
atgaagcatggctttaccaggatgatcttgaagacaaagtacaatcaaagcaatggctaccaagagagggaaatggtccaaagtaaaagcagactggtcaagagcaaag

SEQ ID NO: 33009 - DNA, 236 bp, Homo sapiens
  MAP TO AC008166.1; EXPRESSED IN PLACENTA, SIGNAL = 1.3; NT HIT: AL163246.2, EVALUE 6.00e-41; EST_HUMAN HIT: AI436093.1, EVALUE 4.00e-43; SWISSPROT HIT: P43679, EVALUE 3.90e-01
agtttatgagggcagcatctgcatctttaaaaaaccctgtaattgctcttctccatatgtcagatctaacggtgggaaccacagtcactcaactacaaaatttaaatacagtgggaataattggatcccaggcagcagaagccaagtggtggcactgaaccatcaaaatcaaggtgagcatagctactgtaataaacagcagaggcaaagcagcattaaaaatactctgacttgtg

SEQ ID NO: 33010 - DNA, 160 bp, Homo sapiens
  MAP TO AC009290.1; EXPRESSED IN PLACENTA, SIGNAL = 1.2; NT HIT: D16473.1, EVALUE 7.00e-12; EST_HUMAN HIT: BF196488.1, EVALUE 1.00e-11
  unsure 85
aattaaaacgaatatacctctctggttgaggatgttgataagaaggaggctatgtacgtgtgggggtatgggatatatgaaaaantctctgtaccttctgctcagttttgccatgaacctaaaactgctcttaaaattaaagtatatttttaaaattcca

SEQ ID NO: 33011 - DNA, 172 bp, Homo sapiens; identical to SEQ ID NO: 32476
  MAP TO AL008723.8; EXPRESSED IN PLACENTA, SIGNAL = 1.3; NT HIT: Z49301.1, EVALUE 4.00e-01; EST_HUMAN HIT: AW295536.1, EVALUE 5.90e-01; SWISSPROT HIT: P11099, EVALUE 5.10e+00

SEQ ID NO: 33012 - DNA, 144 bp, Homo sapiens
  MAP TO AL079300.11; EXPRESSED IN PLACENTA, SIGNAL = 1.2; NT HIT: U82695.2, EVALUE 8.20e-02; EST_HUMAN HIT: AI277806.1, EVALUE 8.00e-03
tagagcttgaaagctggtagtttcaagttgaacgtctttctctgcatatgccagctgtgacctgggaaagcctcttcccatctctcagcctcagtttcctggtccgtaaaaccaagacgatcatattctacttggtgggatctc

SEQ ID NO: 33013 - DNA, 211 bp, Homo sapiens
  MAP TO AP000127.1; EXPRESSED IN PLACENTA, SIGNAL = 1.2; NT HIT: AL163285.2, EVALUE 5.00e-07; EST_HUMAN HIT: BE044555.1, EVALUE 8.00e-07; SWISSPROT HIT: P98177, EVALUE 8.50e+00
ggattcttgctgaagagggacaagggtgatcagacatcatctgggggatggtagagaaagagaagcctaattaggtatcaaaggtggagggtttttgctaagctgacttagcggagttcttggctaaaactggattttacaaggaaatgcaaggacaagcttaggagaagcttcaggagcctgagtaaagtttggtcaaagatatttgtta

SEQ ID NO: 33014 - DNA, 157 bp, Homo sapiens
  MAP TO Z86090.10; EXPRESSED IN PLACENTA, SIGNAL = 1.3; NT HIT: AF298224.1, EVALUE 9.00e-05; EST_HUMAN HIT: BE222390.1, EVALUE 6.00e-07; SWISSPROT HIT: P24447, EVALUE 6.80e+00
atgggcatttggactattccatgttttccctattatgaataatgctattatgaatattcatgtaaaagtttctgtgttggtatattttttcaattctcttgagtatataacgatgagaagaattgctagtcaaatggtaattctacgttatgctatc

SEQ ID NO: 33015 - DNA, 122 bp, Homo sapiens
  MAP TO AP000129.1; EXPRESSED IN PLACENTA, SIGNAL = 1.2; NT HIT: AF119117.1, EVALUE 1.10e+00; EST_HUMAN HIT: BF432020.1, EVALUE 4.00e-01; SWISSPROT HIT: O46899, EVALUE 1.80e+00
tagcgactcagtattaaactcagtcgattcaagcctctgttcctcagctcctttctccctgggaatggtttttactggtgggtgggtttgcagcactgtcctggcatcaggtgtaagaggca

SEQ ID NO: 33016 - DNA, 96 bp, Homo sapiens
  MAP TO AC002472.3; EXPRESSED IN PLACENTA, SIGNAL = 1.4; EST_HUMAN HIT: F18769.2, EVALUE 3.00e-01; NT HIT: AB002059.1, EVALUE 8.00e-38
caggcaggggatatgtgaagactgaacataatgattcaggaaaagatgtagcccagtgcctgggggacaccgagcacaggctgagccttcagccac

SEQ ID NO: 33017 - DNA, 84 bp, Homo sapiens
  MAP TO AC006548.19; EXPRESSED IN PLACENTA, SIGNAL = 1.6; NT HIT: AF224669.1, EVALUE 9.00e-28; EST_HUMAN HIT: AW862350.1, EVALUE 4.00e-28; SWISSPROT HIT: P14350, EVALUE 3.30e+00
gtaaagaagtggggcagtgggctcatgctcatggaattcactggtcttaccatgttccccatcatcctgaaacagctggattga

SEQ ID NO: 33018 - DNA, 159 bp, Homo sapiens
  MAP TO AC007106.6; EXPRESSED IN PLACENTA, SIGNAL = 1.4; NT HIT: AL163247.2, EVALUE 1.00e-10; EST_HUMAN HIT: AW901816.1, EVALUE 1.00e-23; SWISSPROT HIT: P48619, EVALUE 6.80e+00
gattacagatcccaagatttcttgtaattctgctgctaaggggcttgtactcagggtattccactgttcaaagtaggcaccccactttgctaaagtggatgtgtgtgccatcccagtccagggggttgttacccataaatgtacccaccccactaatgg

SEQ ID NO: 33019 - DNA, 220 bp, Homo sapiens
  MAP TO AC007253.2; EXPRESSED IN PLACENTA, SIGNAL = 1.5; EST_HUMAN HIT: BE729262.1, EVALUE 2.00e-56; SWISSPROT HIT: P55065, EVALUE 6.10e+00; NT HIT: AJ252313.1, EVALUE 1.00e-60
cctcattacttatgcaaatttctgcagctgcttgaatttctcctcagaaaatgggactttgttttctgtcacatcatctggctgcaaattttctgaactttcatgctctgcttcccttataaaactgaatgcctttaacggcacccaagtcatctcttgaatgctttgctacttagaaatttcttctgccaaataccctaaatcgtctccctcaagttca

SEQ ID NO: 33020 - DNA, 84 bp, Homo sapiens
  MAP TO AC007281.3; EXPRESSED IN PLACENTA, SIGNAL = 1.2; NT HIT: AL163279.2, EVALUE 4.00e-27; EST_HUMAN HIT: AA035369.1, EVALUE 5.00e-24
attcatggggtacatgtgcaggtttgttacatgggtatattgcatgatgctaaggtttggggtatgactgatcccatcacccag

SEQ ID NO: 33021 - DNA, 133 bp, Homo sapiens
  MAP TO AC007567.1; EXPRESSED IN PLACENTA, SIGNAL = 2.7; SWISSPROT HIT: P21414, EVALUE 1.00e-05; EST_HUMAN HIT: AU121943.1, EVALUE 2.00e-52; NT HIT: AF009668.1, EVALUE 2.00e-57
atccttcgaacccaacgtctcaactcacttggactgttttaccccaagggttcagggatagcccccatctatttggccagacattagcccaagacttgagccagttctcatacctggacactcttgtccttca

SEQ ID NO: 33022 - DNA, 178 bp, Homo sapiens
  MAP TO AC008174.2; EXPRESSED IN PLACENTA, SIGNAL = 1.5; NT HIT: AE002138.1, EVALUE 1.00e-01; EST_HUMAN HIT: R84245.1, EVALUE 1.60e-01
ccatgtcaagatacagggaatgaggaaaaggtattcctagtggaagaaggaacatgagcgaagtcactggaagaccttggagatgtctgagaataggaatatagaattgttagagccaagtgtcaatgtgatgaaatcatggatcttctcttgcttgttttgcttttgtttatttttc

SEQ ID NO: 33023 - DNA, 77 bp, Homo sapiens
  MAP TO AL022329.9; EXPRESSED IN PLACENTA, SIGNAL = 2.3; EST_HUMAN HIT: BF665310.1, EVALUE 2.30e-01; NT HIT: gi9631294, EVALUE 1.50e-01
tagtgctttatatcctctatagctgtggctgggaataaaggaaatttcatgtaattaataaggtatttaatgatgac

SEQ ID NO: 33024 - DNA, 235 bp, Homo sapiens
  MAP TO AL035682.16; EXPRESSED IN PLACENTA, SIGNAL = 1.3; NT HIT: X95931.1, EVALUE 3.60e-02; EST_HUMAN HIT: AW299734.1, EVALUE 4.00e-06; SWISSPROT HIT: P04774, EVALUE 5.60e+00
atgggtctagggtaaggacaggagaggaattcacctcgccaagaaggactcttctcccagacaagaaaccaacatggctctgccctctgaaccctgtgtgaagtcaaccaggctcccagagtgcaggtagaagggcagctgatgttttctgagcacctactatgtgcctgatactttcagttccttgatctccttctattgctaatacaccaccaaccccatctcagagatggga

SEQ ID NO: 33025 - DNA, 175 bp, Homo sapiens
  MAP TO AP000127.1; EXPRESSED IN PLACENTA, SIGNAL = 1.2; NT HIT: AJ131016.1, EVALUE 4.10e-01; SWISSPROT HIT: P45604, EVALUE 3.90e+00; EST_HUMAN HIT: BE063883.1, EVALUE 6.00e-01
acttagcactgctatcatttctatttcctctggtaccacagtttacctagccaaggtcccagccactggagctaacgctgccaaacccaaaactatagcccaaggaagaagagttgaaagcctgcaaagtcaaaatggccaggcctatatgcatccccatagagaaaacccaagc

SEQ ID NO: 33026 - DNA, 557 bp, Homo sapiens; identical to SEQ ID NO: 16526
  MAP TO AL035682.16; EXPRESSED IN PLACENTA, SIGNAL = 1.2; NT HIT: AF217490.1, EVALUE 3.50e-01; EST_HUMAN HIT: AW505176.1, EVALUE 0.00e+00; SWISSPROT HIT: Q05262, EVALUE 8.20e+00

SEQ ID NO: 33027 - DNA, 115 bp, Homo sapiens
  MAP TO AC004909.2; EXPRESSED IN HELA, SIGNAL = 0.6; EXPRESSED IN BT474, SIGNAL = 2.3; EXPRESSED IN HBL100, SIGNAL = 0.75; EST_HUMAN HIT: AI654218.1, EVALUE 1.50e+00; NT HIT: AF157623.1, EVALUE 5.40e-02; SWISSPROT HIT: P07850, EVALUE 4.00e+00
tgacgtttatgctgttgatgatgacaatgacaacatgatgtacatgaatttattcactgtgctgggcagcggagagctaaaagacatagatcccgacctcaaaagacttaccatc

SEQ ID NO: 33028 - DNA, 148 bp, Homo sapiens
  MAP TO AL035455.28; EXPRESSED IN BT474, SIGNAL = 5.7; EXPRESSED IN HBL100, SIGNAL = 2.2; NT HIT: AJ276210.1, EVALUE 1.00e-56; SWISSPROT HIT: P51154, EVALUE 7.00e-15; EST_HUMAN HIT: BE886990.1, EVALUE 2.00e-56
taatttctataaagagttcatttatgtttatcgcgttttttgcgctggtctctacaaaaattgcatgaatagagtcggcgtagtcctttgcatctctctccatgacttctctggaaggcaacaactacatatcagaaattctacccat

SEQ ID NO: 33029 - DNA, 367 bp, Homo sapiens
  MAP TO AP000406.1; EXPRESSED IN BT474, SIGNAL = 2.2; EXPRESSED IN HBL100, SIGNAL =   1; EXPRESSED IN HELA, SIGNAL = 1.4; NT HIT: AP000006.1, EVALUE 3.60e+00; SWISSPROT HIT: P09991, EVALUE 7.40e+00; EST_HUMAN HIT: BF207688.1, EVALUE 0.00e+00
caacatgaaaaagaatgcattccatgtttggattttcacattggcgtaatatgtgtccatcttctttgctactctttctttgaccaaatgtaattttaaaatgagaatcactaggcaggcacttgagaggcattcctaaatttatatgtccatctattgtcttttcttcataaacaataatgttcttattaaactgattctttatcctttcactgaaatagtcattagcactcagggctgagtagatactctcgctgggtttaccatatgctgtaaacacactacggtctaattttctggagtttccattcaacgtaaaggtgaaacaacattctttattgttcaaatttggattctgcatttcaag

SEQ ID NO: 33030 - DNA, 91 bp, Homo sapiens
  MAP TO AL078623.21; EXPRESSED IN BT474, SIGNAL = 1.9; EST_HUMAN HIT: AI201676.1, EVALUE 1.10e+00
aatagcaacatcaacaatagtaatcacaaactcctgtgtgatcgtattctttatggtaaatgttatcattattttagtcttcaaagcaact

SEQ ID NO: 33031 - DNA, 135 bp, Homo sapiens
  MAP TO AL031428.9; EXPRESSED IN BT474, SIGNAL = 1.3; EXPRESSED IN HELA, SIGNAL =   3; EXPRESSED IN HBL100, SIGNAL = 1.6; NT HIT: AB011173.1, EVALUE 2.00e-70; EST_HUMAN HIT: W48615.1, EVALUE 3.00e-70; SWISSPROT HIT: P06660, EVALUE 1.80e+00
cttgcatagggcggtcagatccctgtgtttgcttttcactaagaactcggcagtaatatctctgggtggctttacttcagatgcttctttgtattgctgatggagttctttaattttctctttcaaatttaccat

SEQ ID NO: 33032 - DNA, 152 bp, Homo sapiens
  MAP TO AL109613.10; EXPRESSED IN BT474, SIGNAL = 2.3; NT HIT: gi8923248, EVALUE 2.00e-79; EST_HUMAN HIT: AA182952.1, EVALUE 2.00e-79; SWISSPROT HIT: P09081, EVALUE 3.00e+00
tcctgagggaagttacactgatgatgcaaaccaggaagtccgtgggccaccccagcagcatggtcaccacaatgagtttgatgatgaatttgaggatgatgatcccttgcctgctattggacactgcaaagctatctacccttttgatggta

SEQ ID NO: 33033 - DNA, 188 bp, Homo sapiens
  MAP TO AC007566.1; EXPRESSED IN BT474, SIGNAL = 0.7; EXPRESSED IN HBL100, SIGNAL = 0.69; EST_HUMAN HIT: AA937080.1, EVALUE 2.00e-99; NT HIT: gi11419442, EVALUE 1.00e-102; SWISSPROT HIT: O43933, EVALUE 1.00e-30
tctctggtggatatactctgacgagagagtcgagaatgtatggctcgatccacaagtactgtaaaatctctagccacaaacccgccagtttctttagctacatgctgcaggtcaagatcggtgaacttgtttatatcacagtccaatttattttttattacattacacagaatttcacatctttgttc

SEQ ID NO: 33034 - DNA, 131 bp, Homo sapiens
  MAP TO AC009637.2; EXPRESSED IN BT474, SIGNAL = 1.1; SWISSPROT HIT: O97681, EVALUE 7.00e+00; EST_HUMAN HIT: BF508625.1, EVALUE 6.00e-68
agaccctttttggatttgtggcccaacccacaagttatagttccttctctgaatatttcatccagattgtgaagagcagcttctggcagccacagttgtactatgtgacccctacttcccatgcccaggac

SEQ ID NO: 33035 - DNA, 101 bp, Homo sapiens
  MAP TO AC009405.2; EXPRESSED IN BT474, SIGNAL = 0.95; EXPRESSED IN HBL100, SIGNAL = 1.1; EST_HUMAN HIT: BF380745.1, EVALUE 3.20e-01
acatgaactcatcaagaagggagatgacatcatggcgcatatgcctcgcttcaagccaaagcaccactgtgggagaggtgaggtgggattcccaggggact

SEQ ID NO: 33036 - DNA, 191 bp, Homo sapiens
  MAP TO AC009639.2; EXPRESSED IN BT474, SIGNAL =   1; EXPRESSED IN HELA, SIGNAL = 1.3; NT HIT: AB032377.1, EVALUE 2.00e-98; EST_HUMAN HIT: BE299090.1, EVALUE 5.00e-41; SWISSPROT HIT: O35280, EVALUE 1.00e-06
  unsure 157
  unsure 191
tctccataggcaccttctcccagggtttgcaccaagtcccagtcttccacaaagggcactgccatgactccaccgagcacctcggctgtaaaaggcaggaatccagaaaagatgtagagtgtaagatcaccagtgaagccactgagccccgcctctnccccaggattgcccacgaaaattaacagctcttn

SEQ ID NO: 33037 - DNA, 276 bp, Homo sapiens
  MAP TO AC010740.2; EXPRESSED IN BT474, SIGNAL = 3.9; EST_HUMAN HIT: AW086443.1, EVALUE 4.00e-09; SWISSPROT HIT: Q02563, EVALUE 2.60e+00; NT HIT: AB037997.1, EVALUE 2.00e-04
agggatcatctcagtctcagacttgagttcctggatgttgctggtgatcatcttggcactggataattatttttggttttctcttggggagagtgaagccatctggcttctcttctgcaattttgatggtgtcagtctcttcaactggggcaatttaaacatgccaattaacctaacatgcatatttttgggatgtgggatgaaaccagagcactcagagaaaacccacacagacatggggagaacaggcaaactccatacagatagtggccccag

SEQ ID NO: 33038 - DNA, 103 bp, Homo sapiens
  MAP TO AC010877.1; EXPRESSED IN BT474, SIGNAL = 1.4; NT HIT: AF000994.1, EVALUE 1.00e-51; SWISSPROT HIT: O14607, EVALUE 2.00e-15; EST_HUMAN HIT: R64076.1, EVALUE 1.00e-31
gcaatatcagacattgagagaagctcttgttgcagcaggaaaagaggttatatggcatgggcggacaaatgatgaaccagctcattactgtagcatttgtgag

SEQ ID NO: 33039 - DNA, 82 bp, Homo sapiens
  MAP TO AC010090.1; EXPRESSED IN BT474, SIGNAL = 1.4; EXPRESSED IN HBL100, SIGNAL =  44; NT HIT: X57033.1, EVALUE 1.70e-01
ctgctttcttcttctccaactgctcctcctccacatcatcatcattatcatcatcatcacttttagaccaatactctctata

SEQ ID NO: 33040 - DNA, 146 bp, Homo sapiens
  MAP TO AP000148.1; EXPRESSED IN BT474, SIGNAL = 0.73; EST_HUMAN HIT: AV650378.1, EVALUE 4.90e-01; SWISSPROT HIT: Q45411, EVALUE 5.10e+00
aatattctatgtcctgtcaaggcagaaatactccttgttgtgcatgctaatggccttttttcatatttctattatagaaattattacattgctgttatttttcacagtcatgtctcctctgctgctggaggaaattctgaagaaga

SEQ ID NO: 33041 - DNA, 124 bp, Homo sapiens
  MAP TO AC008164.2; EXPRESSED IN BT474, SIGNAL = 0.84; NT HIT: U40653.1, EVALUE 4.30e+00; SWISSPROT HIT: O60610, EVALUE 5.20e+00; EST_HUMAN HIT: AA350416.1, EVALUE 1.60e+00
ttgtgccaagatctctgcacttcgtggtactggatgttcacaagctccaggaggtagcctgggaccaggtacagaagatgagactgaagctcagggaggaaatggcttggcaaagcccacagct

SEQ ID NO: 33042 - DNA, 256 bp, Homo sapiens
  MAP TO AL031667.17; EXPRESSED IN BT474, SIGNAL =   1; EXPRESSED IN HBL100, SIGNAL = 1.9; EXPRESSED IN HELA, SIGNAL = 0.99; NT HIT: AF215703.1, EVALUE 3.40e-02; EST_HUMAN HIT: AL449758.1, EVALUE 4.00e-77; SWISSPROT HIT: Q12873, EVALUE 4.00e-19
gtaaagaaactgcagtctatcctaaaaccaatgatgcttcggcggctgaaagatgatgtggaaaagaaccttgctcccaaacaagagacgatcattgaggtggaactgaccaatatccagaaaaagtactaccgtgccatcctcgagaagaacttttccttcctgaccaagggggcaaatcagcacaacatgcccaatctcatcaacaccatgatggagctgaggaagtgctgtaaccatccctacctgatcaatg

SEQ ID NO: 33043 - DNA, 186 bp, Homo sapiens
  MAP TO AC007239.2; EXPRESSED IN BT474, SIGNAL = 0.74; EST_HUMAN HIT: BE767277.1, EVALUE 2.00e-04; NT HIT: AF073299.1, EVALUE 1.00e-101; SWISSPROT HIT: P48763, EVALUE 6.00e-28
cagaatgaagacagtaaagaatatgacaacaatggcagccgtaataaacaattttttccgaggaaacacagcagcaggaaggagaaacactaacgcaaaacagatggcacctcgaagtcctccataggcaatgatgaactggtccttaaaggtcaggggaatggtccggaacctattaatgacctg

SEQ ID NO: 33044 - DNA, 196 bp, Homo sapiens
  MAP TO AL021393.1; EXPRESSED IN BT474, SIGNAL = 1.4; NT HIT: U43526.1, EVALUE 7.20e+00; SWISSPROT HIT: Q26710, EVALUE 4.90e+00
aagcagagggactatgctctctttcaaattgatcaccttagttctcaaaacatccagaagtatcacatacgtggagaacctgcccacgccagtgttgttttgttgtgggtgcaccattgacttacccagtattctcaaggtcttcgaactgatgattctgctcaatttcatttctctttggccctggaaaggcagt

SEQ ID NO: 33045 - DNA, 292 bp, Homo sapiens
  MAP TO AL132774.1; EXPRESSED IN BT474, SIGNAL = 1.3; EXPRESSED IN HELA, SIGNAL = 1.4; EXPRESSED IN HBL100, SIGNAL = 2.2; SWISSPROT HIT: O58284, EVALUE 8.50e+00; NT HIT: U58105.1, EVALUE 2.80e+00
aattccagaaggagaaaatgaaaccacaaccttgaccaaggacttaaatacaatgggactaatgaaaaatgtaatatctcaatgtagcagccttgtatggtcagtgaaaaaaaaaactaatgggaatctggaggcttgtgttagatcatgccaactgaatttagttggtattatagtcctggctgttacagacattgtgactgtaaatgaatcaattccctgtgatagcacctggtgtgccatttttgattttggccatgtatttttctcaatcccttttgcacccaaagat

SEQ ID NO: 33046 - DNA, 200 bp, Homo sapiens
  MAP TO AL117355.1; EXPRESSED IN BT474, SIGNAL = 1.2; EXPRESSED IN HELA, SIGNAL = 1.5; EXPRESSED IN HBL100, SIGNAL = 0.94; EST_HUMAN HIT: AW303480.1, EVALUE 3.00e-98; SWISSPROT HIT: Q26255, EVALUE 1.30e+00; NT HIT: AB037754.1, EVALUE 3.00e-98
ctctgaaagagaatctttactatgaagctggcaaaatgcttgccatttctttagttcacggtggtccttcacctggtttcttttctaaaaccttgtttaactgccttgtttatggaccagaaaatacccagccaattttagatgatgtttcagactttgatgtggcacagattataatcagggtaagcaatgtatctgtt

SEQ ID NO: 33047 - DNA, 275 bp, Homo sapiens
  MAP TO AC004900.2; EXPRESSED IN BT474, SIGNAL = 1.2; EXPRESSED IN HELA, SIGNAL = 1.6; EXPRESSED IN HBL100, SIGNAL = 1.5; EST_HUMAN HIT: AW501661.1, EVALUE 0.00e+00; NT HIT: AB007900.1, EVALUE 0.00e+00; SWISSPROT HIT: P46062, EVALUE 3.00e-14
ctccgcggggtgcagtcatcatgcgggggaatgatgacaaccttcaccgtgacagatgttctcaggaggtcgatcatctgctcatggctcagagtggctaccgccaccttgcagatctccaccaggcgactgccctgcctcagccctgcctgccaggcataaccgtagggctccacatccgccacaatgccctcatagttgacatggaagccaagctgtcctagcccatttcttcgcagagtcatctccaccgattcacagccttttgaaacaaa

SEQ ID NO: 33048 - DNA, 127 bp, Homo sapiens
  MAP TO AC007182.3; EXPRESSED IN BT474, SIGNAL = 0.65; EST_HUMAN HIT: BE730289.1, EVALUE 5.00e-53; NT HIT: AF016898.1, EVALUE 5.00e-64; SWISSPROT HIT: P43681, EVALUE 2.30e+00
gactcatctgatgatgtgagaagagttcagaggagggagaaaaatcgtattgccgcccagaagagccgacagaggcagacacagaaggccgacaccctgcacctggtaagtgttcagatcaatcttc

SEQ ID NO: 33049 - DNA, 198 bp, Homo sapiens
  MAP TO AL049652.16; EXPRESSED IN HELA, SIGNAL = 1.1; EXPRESSED IN HBL100, SIGNAL = 1.1; EXPRESSED IN BT474, SIGNAL = 1.4; EST_HUMAN HIT: AU121681.1, EVALUE 9.00e-93; NT HIT: AF224263.1, EVALUE 1.00e-01; SWISSPROT HIT: P53914, EVALUE 9.00e-16
tcaccggaagaaaagaatgcgacagctgcagaagaaaataaagaatggaacactgaacataaagcaggacgacccctttgaactcttcatagcagccacaaacattcgctactgctactacaacgagacccacaagatcctgggcaataccttcggcatgtgtgtgctgcaggtgggtggcttcctctaacctgtgat

SEQ ID NO: 33050 - DNA, 212 bp, Homo sapiens
  MAP TO AB026898.1; EXPRESSED IN BT474, SIGNAL = 1.6; EXPRESSED IN HELA, SIGNAL = 1.4; NT HIT: AB026898.1, EVALUE 1.00e-116; EST_HUMAN HIT: BE256811.1, EVALUE 2.00e-74; SWISSPROT HIT: P50527, EVALUE 5.00e-05
gttctgttctggatattattaagcacattgtggcaaaaggggaacacaaaagtggagtcctagatgaatctaccattgctacgatactccgagaagtactggaagggctggaatatctgcataaaaatggacagatccacaggtatgtaaaagacaatactcttgtgttacatcatctcattaaggccattcccactcttttacagaatcgt

SEQ ID NO: 33051 - DNA, 208 bp, Homo sapiens
  MAP TO AL121716.2; EXPRESSED IN BT474, SIGNAL = 1.3; NT HIT: AJ249395.1, EVALUE 4.20e-01; EST_HUMAN HIT: AA625526.1, EVALUE 1.00e-106; SWISSPROT HIT: Q9Y3R5, EVALUE 1.00e-02
gcctggctgaaccaagtcctacaaagacatgatattgcacgagttttggaaccattgctattgctcctgcttcatccaaaaactcagagggtttcagtacagcgtgtacaagcagaacgttattggaataagtctccctgttatccaggagaggagagtgacaagcatttcatgcaaaattttgcctgcagcaatggtgaataacaca

SEQ ID NO: 33052 - DNA, 195 bp, Homo sapiens
  MAP TO AC007876.1; EXPRESSED IN BT474, SIGNAL =  13; EXPRESSED IN HELA, SIGNAL =  39; EST_HUMAN HIT: BF209626.1, EVALUE 4.40e-02; SWISSPROT HIT: P03355, EVALUE 3.80e-02
gcttgggatctctaggagaagaatctccaggaggagaggcataactaaggcttcctctttagaaggtagagttgtcattgcagcctggtttgcttctttgactgtctttctattttctttagcctttagtgtttttgctttttggtacctcttgcagtgcatcactgacatctgtattgagacccctacagcatc

SEQ ID NO: 33053 - DNA, 181 bp, Homo sapiens
  MAP TO AC009758.1; EXPRESSED IN BT474, SIGNAL = 0.97; EXPRESSED IN HELA, SIGNAL = 0.97; EST_HUMAN HIT: AW754106.1, EVALUE 2.50e+00; NT HIT: AF071938.1, EVALUE 3.60e-01; SWISSPROT HIT: gi399154, EVALUE 8.50e+00
  unsure 22
  unsure 105
  unsure 119
tggaggaaaagttgagaacctngtaaaccaggatgagacgagattacctgccgagcagatctttcatgggcctgaaatccaggctgccccggtaattgcagaccnaggctacaggggangcctgaggtttcttaaagggaacccgatattccaagagagatccaggcttcaagggaaacat

SEQ ID NO: 33054 - DNA, 188 bp, Homo sapiens
  MAP TO AC010968.1; EXPRESSED IN BT474, SIGNAL = 1.1; EXPRESSED IN HBL100, SIGNAL = 1.8; NT HIT: gi10442821, EVALUE 6.00e-99; EST_HUMAN HIT: R31173.1, EVALUE 4.00e-69; SWISSPROT HIT: P40851, EVALUE 1.30e+00
ctaaaccaggtggacaggtgaaatgtcagtatatctctgctgtggataaagttatatttgtggatgattatgcagtagggtgtaggaaggaccttaatggaatcttgttgttagacactgctctgcaaactccagtttcaaagcaggatgatgtggttcagcttgaattacccgttacagaggtaagt

SEQ ID NO: 33055 - DNA, 84 bp, Homo sapiens
  MAP TO AP000426.1; EXPRESSED IN BT474, SIGNAL = 0.96; EST_HUMAN HIT: BF370440.1, EVALUE 4.00e-09
cactgacatgagctgacttggagtgttgaaatgaaagaactgagtgtcttacccttctcgttcatcatccgtgttgtaatacac

SEQ ID NO: 33056 - DNA, 636 bp, Homo sapiens
  MAP TO AC004943.1; EXPRESSED IN BT474, SIGNAL = 1.1; EST_HUMAN HIT: AW663888.1, EVALUE 0.00e+00; NT HIT: gi11432574, EVALUE 0.00e+00; SWISSPROT HIT: P28167, EVALUE 9.00e-22
tagtaaaattgggaccttttctgaaaggcagagctctctttggctctgagcccgagtcttcttgtactgacccagagtcactgcccgttgggctctgtttatcttccaagtcactctcttcctccttgtcttcctcaacaattatggtatggtcctctgccagagtggggtctcccattgccaggaggtccccattggccagcaggccaccataaagctgttggatgtcagcctcactcagctccaggtggcttgtctcaaggtgcttcttcagagcctggaaagttcggaaactgcgctgacaaagacagcacatggtggcagctctgatcacatggtactgagaatggagctgcaacttttcaatggtcttgaaggccaggctacactgattacagcggtacttgtacacatggcgatctgacaccggcagctgaggcctcttggcatgcacttcattaaaatgcgtctgaagggcagcagaagttttgaaaacctggttgcaccccttcttccagcagatgaagcctgagtcttctctcacagagcctgggtcagcaggggatggtttcaaatctccgctttgctctgtgcttgcggatggcaagatgttctttcccagatcctctgaggttt

SEQ ID NO: 33057 - DNA, 166 bp, Homo sapiens
  MAP TO AC011504.2; EXPRESSED IN BT474, SIGNAL = 1.1; EST_HUMAN HIT: H62176.1, EVALUE 5.70e-01; NT HIT: gi4557556, EVALUE 3.20e-01; SWISSPROT HIT: Q63003, EVALUE 1.30e+00
ctggaacaggaggaagaagcctgctccggcagttttcctggaattgcctggaaacttttactttctgtttcctctgctgataatgactgtcttcggctctgcagccagctcccctctccccccctccagccccctgttgctgcagcctccccgagctccggtataa

SEQ ID NO: 33058 - DNA, 87 bp, Homo sapiens
  MAP TO AC008123.9; EXPRESSED IN BT474, SIGNAL =  51; EST_HUMAN HIT: AA383750.1, EVALUE 1.80e-01; NT HIT: AF087482.1, EVALUE 7.10e-01; SWISSPROT HIT: P16943, EVALUE 5.40e+00
aactgaaaagaggcacagaggctgcaggatcagcaggatgggtgccaaaacctgctgtggcaccatgcctttgcaaaggtggatctt

SEQ ID NO: 33059 - DNA, 90 bp, Homo sapiens
  MAP TO AC008012.8; EXPRESSED IN HBL100, SIGNAL = 1.2; EXPRESSED IN BT474, SIGNAL = 1.1; NT HIT: gi11436739, EVALUE 8.00e-44; EST_HUMAN HIT: AW373185.1, EVALUE 8.00e-44; SWISSPROT HIT: P03303, EVALUE 7.10e+00
atgggactccgaaatatactcaaagtttgctgtacccatgacatcacaacaataagcattcctctcttgctggtacatgatatgtcagag

SEQ ID NO: 33060 - DNA, 150 bp, Homo sapiens
  MAP TO AL117332.2; EXPRESSED IN BT474, SIGNAL = 1.5; EXPRESSED IN HELA, SIGNAL = 6.2; EST_HUMAN HIT: BE206903.1, EVALUE 7.00e-58; SWISSPROT HIT: P40848, EVALUE 6.00e-11; NT HIT: gi11421401, EVALUE 1.00e-56
cactccatctattgccatgtagagaagtcttcttggtcttacaatactgaaaagtctgtcaatgtactcaaaaattgcaaccatcatttcatcttcattttttggtgctggtctataatgacaaccaaacaatgtaatataatataatgt

SEQ ID NO: 33061 - DNA, 172 bp, Homo sapiens
  MAP TO AC007282.2; EXPRESSED IN BT474, SIGNAL = 1.1; EXPRESSED IN HBL100, SIGNAL = 1.7; EXPRESSED IN HELA, SIGNAL = 0.82; NT HIT: Y13402.1, EVALUE 3.40e-01; EST_HUMAN HIT: H04619.1, EVALUE 7.00e-80; SWISSPROT HIT: Q58366, EVALUE 5.70e-01
actcagagccaaaagcaagtacagaagactctggaatggatacgctagggtcttgtattgttgcagaaggtttgagaggttggatagctgatctcctgctagaacatatatcacaacaatattccacacagcacagccagccaagaatccatgagaaaagagaccaatcatc

SEQ ID NO: 33062 - DNA, 165 bp, Homo sapiens
  MAP TO AC011356.1; EXPRESSED IN BT474, SIGNAL = 0.97; EXPRESSED IN HELA, SIGNAL = 4.3; EXPRESSED IN HBL100, SIGNAL = 0.97; EST_HUMAN HIT: BF061624.1, EVALUE 5.00e-69; NT HIT: AB037732.1, EVALUE 3.00e-69; SWISSPROT HIT: P07860, EVALUE 5.80e-01
atgttaatatccaagttagaaaaaaacaaaaacatgaaaccagaagaaagagcaaatataatgaagactttgaaagagcttggagagaagatctcacaattaaaagatgaattaaaaacatcttctgcagtctccacaccatctaaagtgaagacaaaaacggag

SEQ ID NO: 33063 - DNA, 298 bp, Homo sapiens
  MAP TO AC006348.2; EXPRESSED IN BT474, SIGNAL = 1.1; NT HIT: L40608.1, EVALUE 6.00e-04
agtgtctgactcacggcaaacactcgtggtggttgtgctggtgtgaggagtgatcatggtaacaacggtagtagtagtggcaaaggtaatggcagtagtagagggagtagtggcagcatggtagtggtagtagtcatgaggatggtaatagtggcgacagtggtagtggtggtggtaacagttgtagtagtagtgatagaaatggtaggagtaatgatagtaggaatggtggtggtaagagttgttatggggtggtagtaatggtagtagtgattttagtatgtagcagcaatggtag

SEQ ID NO: 33064 - DNA, 316 bp, Homo sapiens
  MAP TO AC007189.6; EXPRESSED IN BT474, SIGNAL = 5.2; EST_HUMAN HIT: BF104760.1, EVALUE 2.90e-01; SWISSPROT HIT: Q13258, EVALUE 5.80e+00
agtcatcttgcagatatcactcatcgagaatccagacatcttatgcaggactatcattatagtgaagaaattattagccatctcctggctgtcagtgttgcaaggatctaaggatgttgccatgactacaaggatgtttgggcacaatcgagatttacaattgctttttttatcagtaatctgcctggcagagccaactttgcctaccatcttcaaatctaggaaaatgtggccagcttttccttccagaacactgatgttgaaggtgagatttcagcccaagccggtcatctccagggaggcaaggaccacctct

SEQ ID NO: 33065 - DNA, 234 bp, Homo sapiens
  MAP TO AL021332.1; EXPRESSED IN BT474, SIGNAL =   1; EST_HUMAN HIT: AA287024.1, EVALUE 8.30e-01; NT HIT: D38157.1, EVALUE 2.00e-03; SWISSPROT HIT: P94177, EVALUE 3.20e+00
ccatgatgataactggaattactattccaaagtccacctctggaagaaaaaatagagtcctatttaattttgtgatttttctgtttatgtcagttgacactataatgcacacgctgtataagcaagttgtcagtgctaaacaaatagaactgagtgtaaagatgggtgaaataatcagaatgaccaagccgctgatcaagtccccagatgtagagatggagcttattccatgac

SEQ ID NO: 33066 - DNA, 192 bp, Homo sapiens
  MAP TO AL034551.14; EXPRESSED IN HELA, SIGNAL = 2.2; EXPRESSED IN BT474, SIGNAL =   1; NT HIT: AF211170.1, EVALUE 1.50e+00; EST_HUMAN HIT: BE173168.1, EVALUE 1.20e-01; SWISSPROT HIT: P34530, EVALUE 2.80e+00
taagggcaaaagatcactccggagttatgatagcatttctgtgctactccaagggctttccgaatcactagacatgccaatgtctgacaaatgatacgtttaatagagatgaaccctaagctcaccctgagaaacaagattttggatgccacccaatcagaggcacaatcacagatgccttttctctcgttt

SEQ ID NO: 33067 - DNA, 190 bp, Homo sapiens
  MAP TO AC007030.2; EXPRESSED IN BT474, SIGNAL = 1.1; EXPRESSED IN HELA, SIGNAL = 1.1; SWISSPROT HIT: P22159, EVALUE 1.30e+00
caaacaaacaaaacagacaaaaaaacccaactacagtcctttcctcagactgcctctcagtgggcctcagagcccggggcagctgctgcagctggcgaggccaatctgccatcactcagaaattccacagttggacagaaatcaggacaggcagcccagctcccgtcaaggtgatcctctgcagattaag

SEQ ID NO: 33068 - DNA, 180 bp, Homo sapiens; identical to SEQ ID NO: 32219
  MAP TO AC009957.4; EXPRESSED IN BT474, SIGNAL = 0.92; NT HIT: AE000814.1, EVALUE 1.70e+00; EST_HUMAN HIT: AI701637.1, EVALUE 2.50e+00; SWISSPROT HIT: P34029, EVALUE 2.90e+00

SEQ ID NO: 33069 - DNA, 409 bp, Homo sapiens
  MAP TO AL034374.2; EXPRESSED IN HELA, SIGNAL =   1; EXPRESSED IN BT474, SIGNAL = 0.94; NT HIT: gi11464974, EVALUE 3.00e-93; EST_HUMAN HIT: BE080106.1, EVALUE 3.00e-93; SWISSPROT HIT: P25358, EVALUE 5.00e-03
aaagcctgacctagacatttacagaaacagcaccttttctgaaagccttagtttcaactctcctccctgctcacacctgttccccaagtccccgtctctaatacttacagtggccgcaggggacccagttcatcacaaaccaccagatgttcagcatcgaggcatggtggtagacgtgcaggaccgtgatctggtggttgttcttgcgcaggatgaagaagaaagtgtccataaattctatgagtttggagaagtagtaccaccagaggacacggataatctaagaggaaagggtcaaagatttaaggcttatcctcacggcttctctggaatatcacctctgacatgtttcactaatatccaaaaatctgatgtcaactcggagaagcccgagtgccccaagagctct

SEQ ID NO: 33070 - DNA, 223 bp, Homo sapiens
  MAP TO AL109928.5; EXPRESSED IN BT474, SIGNAL = 1.6; EXPRESSED IN HBL100, SIGNAL = 1.8; NT HIT: AF169690.1, EVALUE 3.00e-24; EST_HUMAN HIT: F08337.1, EVALUE 3.00e-24; SWISSPROT HIT: P55291, EVALUE 4.00e-04
cattgtcgtggagaatgaggagaggctcgtcttctgtgagagaggaaagcttcagccgccaaggaaggcagcagccagcgccactgtgagtgtgcaggtgacagacgccaacgacccaccagcctttcacccccagagcttcattgtcaataaagaggagggcgccaggcctgggaccctgttgggaacttttaatgccatggatccagacagccagataagg

SEQ ID NO: 33071 - DNA, 158 bp, Homo sapiens
  MAP TO AL049875.2; EXPRESSED IN BT474, SIGNAL = 0.88; EST_HUMAN HIT: AI817732.1, EVALUE 1.00e-07; NT HIT: AL163208.2, EVALUE 4.00e-19
catctctctggggtggagcccccaggagacaagcaaaaggcccttggccacaaccattactaaggtccctttctctgtcctacttagggaggaaacataaaccatgagatcacctcaaagctgtagtgggcagcctgggagtgctaaactgcaatgta

SEQ ID NO: 33072 - DNA, 191 bp, Homo sapiens
  MAP TO AL096677.18; EXPRESSED IN BT474, SIGNAL = 0.96; NT HIT: M95098.1, EVALUE 3.80e-01; EST_HUMAN HIT: AI200857.1, EVALUE 2.00e-98; SWISSPROT HIT: O60676, EVALUE 2.90e-02
tattgactctgatggccctcccctaccaagcaaggaagaaaacctttctaagcgtccatgaagtgatggcagtagaaaactatgcgaaggacagcttgcagtggatcaccgaccagtataacaaggaaagtgatgacaagtaccacttcaggatcttccgagtccttaaagtccagaggcaggtgagtgta

SEQ ID NO: 33073 - DNA, 119 bp, Homo sapiens
  MAP TO AP000251.1; EXPRESSED IN BT474, SIGNAL = 1.8; EST_HUMAN HIT: F32977.1, EVALUE 3.90e-01; NT HIT: gi11426244, EVALUE 2.60e-01; SWISSPROT HIT: Q01636, EVALUE 1.40e+00
ggtggaagcaaggcgccttctgatccacactgagccatcagctgtccccaccagctggtcagccgcacttcgcatccccagaaccaacctccaagaccccggacccctggcctggaaat

SEQ ID NO: 33074 - DNA, 127 bp, Homo sapiens
  MAP TO AL096700.6; EXPRESSED IN BT474, SIGNAL =  29; EXPRESSED IN HBL100, SIGNAL = 0.92; NT HIT: Y12503.1, EVALUE 6.10e-02; EST_HUMAN HIT: BE145329.1, EVALUE 7.20e-02; SWISSPROT HIT: O24467, EVALUE 5.20e+00
acacaggcttcagttcatttttgtggggtgccagcttgtgcttgtgggttttagcctgctcgtgatcttccttcctgactacctgccctgtagactttgagctccagcatcagatatggagaccaca

SEQ ID NO: 33075 - DNA, 141 bp, Homo sapiens
  MAP TO AL049835.3; EXPRESSED IN BT474, SIGNAL = 0.62; NT HIT: AJ251973.1, EVALUE 1.70e-02; SWISSPROT HIT: O50165, EVALUE 6.70e+00
ttcctagctgtgtaaccttggatgtgacatttaacacttagagctttaatttcctcatccataatatggggaaaattaagtagggtaatgtatgtgaaagtgaaaactattgtaagtaaaaataaaatagaaattgaagtt

SEQ ID NO: 33076 - DNA, 1645 bp, Homo sapiens
  MAP TO AC008174.1; EXPRESSED IN BT474, SIGNAL = 0.63; SWISSPROT HIT: P13666, EVALUE 7.50e-02
ttgtgaaggattaatccccaaactaccttcctttaactttgatgtgaacattttcatattagttgctaattcaacctgattaacagtgtaggcattttcagctccttggaacaaactttctcttgaaaggttttgtatcaaagactcattgaaataagtacactggtccattagtgtgccaatgatctcacttgctacaatgttctctttcaatatgctaattgaagatggttccatttggcttatttcgttgtctagcttgttcttaattacagcaagcatgtcactgatgatattaacagcatatgtaagtaattgtgaatggaatgaatgaacccgtagaaggatattctgtatgttttccttgaaattaatagtatttgactcggatttatcagaaaacattttcagtggttgtaattttggcaacatttttttgtttaacagtttctgttggatagaagaaaggttttctataggcattttcacaatttcagaaaactcatatttggagatatgtttaaactgcaagtccacaaatgactctaacatgtttaaaaccgtttctacaatctcttgaacaatttggttgctggagcccacagaaatttggtcttttgtctttgtgttatagattggtaaactgctgaggctatgcttgtttggaaaaccatatttacttttagcagtaatgtgttctttactgtttgatagagtttcttcactatctggagtgggaatttgggacagaaagcatagctgtagtttttcaagtagcatttcaacaatttcccttccaaacatattaatttgtgctttagtatcctcggctctagtagaagctcctttaaaatgattataaaacctgctttcacaattctcaagagggggcaaatttaaaagtgaaagagaatattctaattcttttgcttttattgaaatttcagtcaaaacattttcagctatcatcaatagcttacatttttcattttccttgtcatttgattctgtttgccacttgtcaaacaattttttaaatataccttctctaggaaaaatgtgctctagctgtgaagaaacattctccaagtaaaaacatgcttgttgtttaggaagggatcctgtgcctatattcccctgtgaaagtctgagatgtgaggatttcatcgggtaagccaaattgcagttattggtaacatataattcttgcaaaactgtattaactattttacctgctgctatgatttgatcagatggtaaagctttggtttgctttacctttccaaattccttcacaattgtttctaggatgttaattattatatccttggcatatatttttagttctgaagtgggcaattttgtgtccagtaaatttttggcatctccagctgacatgatgtgtgacaacccaatggcagtcttggatctgctgtcttttagggtcttctctccaggacctaacttggttttgcttttggccttagcagcactcagtcctaagtgtgttttttttgtaaatttaggcaaagtggtaatttttgatcttgtttttaaatgtgctttaaagcatggcttagggttgtccttagggctcacctttaaaggaagtgagacaaaatttgtgatcttattgagaaccatt

SEQ ID NO: 33077 - DNA, 113 bp, Homo sapiens
  MAP TO AC004885.2; EXPRESSED IN BT474, SIGNAL = 0.68; SWISSPROT HIT: P34811, EVALUE 3.10e+00; NT HIT: AF135027.1, EVALUE 2.10e-01
ttgaagggagtgagcgtagcgaatcattcacaggtgagggcgggaaacctaagaacagcataggggagaggtctgtggatactgtagaaaagcagtgagttgaagagtattag

SEQ ID NO: 33078 - DNA, 90 bp, Homo sapiens
  MAP TO AC011308.2; EXPRESSED IN HBL100, SIGNAL = 0.98; EXPRESSED IN BT474, SIGNAL = 0.92; NT HIT: S52213.1, EVALUE 3.00e-03; EST_HUMAN HIT: AW401751.1, EVALUE 1.20e-02
ccccagggctgctccttcaccaggttgggcatgttgttctcactggacaagaccacctgttccatgggggggcagtgtgccttgagggct

SEQ ID NO: 33079 - DNA, 128 bp, Homo sapiens
  MAP TO AC007733.1; EXPRESSED IN BT474, SIGNAL = 0.72; NT HIT: M58318.1, EVALUE 3.00e-04; SWISSPROT HIT: P22269, EVALUE 8.90e+00; EST_HUMAN HIT: AA493851.1, EVALUE 7.00e-03
  unsure 88
aggaagctgctgatcatcagattcaggtgtttctccttactgggagaccgcctttccctggcacggctgcaatcaattattacaactnaactgcctgaccatcacctgatggcttccgaacattccag

SEQ ID NO: 33080 - DNA, 138 bp, Homo sapiens
  MAP TO AC009973.2; EXPRESSED IN BT474, SIGNAL = 1.7; EXPRESSED IN HBL100, SIGNAL = 0.96; EST_HUMAN HIT: AI990847.1, EVALUE 4.00e-59; SWISSPROT HIT: O75600, EVALUE 3.00e+00; NT HIT: gi11431509, EVALUE 1.20e+00
ggtgaagaacagctgtctccagcctgtgtcctccgccagggccctcacgtcaggagtgatggtgtcgcaggtcgactggactatctgttcccacagtttatcagacatgcacagctgtgggtgggaaaagtcagaggt

SEQ ID NO: 33081 - DNA, 314 bp, Homo sapiens
  MAP TO AL096817.12; EXPRESSED IN BT474, SIGNAL = 7.7; EST_HUMAN HIT: AI791362.1, EVALUE 1.00e-110; SWISSPROT HIT: Q43068, EVALUE 1.10e+00
gaagtgacagctaaaactaagacagagatgtatcaaaacatggatgacgaaatgaagagagagcacttggctgcagaacagcgcatggtccacagaatccaaaggattatgatggaatgccacagagagaaggtcgaagctgtggagaaagccagggctgaagaaagacacatcgcccaggaagcaatccaggcccagaaaaggtattccagagaactcatttacaaattagtaacttcctttatcaaaatcaacctggagaaacagataaggttacagtacataggtagatattgcccagtttttgtgttttt

SEQ ID NO: 33082 - DNA, 85 bp, Homo sapiens
  MAP TO AC007652.1; EXPRESSED IN HELA, SIGNAL = 8.3; EXPRESSED IN BT474, SIGNAL =   4; EST_HUMAN HIT: T68328.1, EVALUE 7.00e-01
cccagtatcattttcccagttcctgaacatgtaattggaattgtcatacttggtagttggcataaccattgctcctggattttgc

SEQ ID NO: 33083 - DNA, 109 bp, Homo sapiens
  MAP TO AL109843.6; EXPRESSED IN BT474, SIGNAL =  48; NT HIT: Y14980.1, EVALUE 2.00e-01; EST_HUMAN HIT: AW845657.1, EVALUE 9.50e-01
tataaatgctacagtgcccaagaccataatttattgggatagtcaaacaacaattgaaaaggtttcctgtgaaatgagatacaaggctacaacaaaccaaacttggaat

SEQ ID NO: 33084 - DNA, 84 bp, Homo sapiens
  MAP TO AC009401.1; EXPRESSED IN BT474, SIGNAL = 1.3; EST_HUMAN HIT: AW237754.1, EVALUE 3.00e-03; SWISSPROT HIT: Q15390, EVALUE 5.40e+00; NT HIT: AF092030.2, EVALUE 4.30e-02
agattccttatcacaaataatgaaagcaaaaagaaaacggagcacatctttaaggtactaaaagaaaaaaatgctataaagcta

SEQ ID NO: 33085 - DNA, 190 bp, Homo sapiens
  MAP TO AC010879.1; EXPRESSED IN BT474, SIGNAL = 1.2; SWISSPROT HIT: P29374, EVALUE 2.90e+00; NT HIT: AF134513.1, EVALUE 2.40e-02
aataggacctagactctgcaaggtagtaccgaagaaaacaaagacccacagtcttggagtttacattctgaagaggaaaagcagacatggcaaacaagtataccatgaatatagatctctgatcaactcctttctcctcatccttctcaatgtcatcaacatgaatatcatctttatacttgaggcagac

SEQ ID NO: 33086 - DNA, 105 bp, Homo sapiens
  MAP TO AC004381.1; EXPRESSED IN BT474, SIGNAL = 1.6; EXPRESSED IN HBL100, SIGNAL = 1.2; EST_HUMAN HIT: AA281408.1, EVALUE 2.00e-52; NT HIT: AB040937.1, EVALUE 9.00e-53; SWISSPROT HIT: P14846, EVALUE 3.10e+00
tcaattcctcattgaaggcctgagtctcaaagaatttttggtggaaatacttaaatttctgtcacaaatatggcttgtttctggagaactaaaagtgagtccccc

SEQ ID NO: 33087 - DNA, 251 bp, Homo sapiens
  MAP TO AC011345.1; EXPRESSED IN BT474, SIGNAL = 1.9; SWISSPROT HIT: P23989, EVALUE 2.20e+00; NT HIT: AJ251154.1, EVALUE 5.10e-01; EST_HUMAN HIT: BE089226.1, EVALUE 6.00e-04
tcatttggaaaagttgtcagttgtacatgacagtgtcttttatgagatttcaagttacagcttcaaagggcccagtgccgttttgatacttgtgagaaaggtttccagggataagttcagaaatatgaaagctagtatgcgtacacctggcactagcgctgtcttacctattaatttggccctctcctcaagttataatgtccaaattggccttccaaaagatggcatcagacatactcccagtctttcag

SEQ ID NO: 33088 - DNA, 112 bp, Homo sapiens
  MAP TO AC010740.3; EXPRESSED IN BT474, SIGNAL =   1; EST_HUMAN HIT: AI989963.1, EVALUE 9.80e-01; SWISSPROT HIT: Q07954, EVALUE 2.00e-07; NT HIT: gi11419283, EVALUE 3.00e-47
atgtcttttgaattaagaaaactctactggaccgatggaaacacaattaacatggcaaatatggatggcagtaatagcaagattctgtttcagaatcagaaggagccagttg

SEQ ID NO: 33089 - DNA, 82 bp, Homo sapiens
  MAP TO AC009475.2; EXPRESSED IN BT474, SIGNAL =   1; EST_HUMAN HIT: AW857136.1, EVALUE 9.00e-25
atttaggacttgataagtcggttttattgcttccaattcaattgctttgccaagttttctggaaataaaacataaaagacac

SEQ ID NO: 33090 - DNA, 164 bp, Homo sapiens
  MAP TO AL121578.1; EXPRESSED IN BT474, SIGNAL = 1.8; SWISSPROT HIT: P47708, EVALUE 4.00e-04; EST_HUMAN HIT: H55391.1, EVALUE 9.70e-02; NT HIT: X04655.1, EVALUE 1.50e+00
ggtaataaaaaagagtgttaaccctcagtggaatcatacattcatgttcagtggcatccatccccaggatataaagaatgtttgcctagaacttactatctgggacaaggaggccttttccagcaacatctttctgggaggagttcgtttgaattctggaagtg

SEQ ID NO: 33091 - DNA, 92 bp, Homo sapiens
  MAP TO AC007110.3; EXPRESSED IN BT474, SIGNAL = 0.97; EST_HUMAN HIT: AI633888.1, EVALUE 7.80e-01; NT HIT: AL161584.2, EVALUE 1.60e-01
atggagcagacctgcatggcattaagaaataatcagcctactgaaaatggctatgcagcttttactcagaagaagaacactgcatgtatggg

SEQ ID NO: 33092 - DNA, 211 bp, Homo sapiens
  MAP TO AL118522.3; EXPRESSED IN BT474, SIGNAL = 1.2; NT HIT: X15222.1, EVALUE 1.10e-01; EST_HUMAN HIT: AW816062.1, EVALUE 3.30e-02; SWISSPROT HIT: O99821, EVALUE 4.00e-03
atcttatctagtgtatctttcttttcaggtcttatatttttcatctctacaaatttcattttgttctcttatatcttccatgtctttcctcactatgttgatggtttcctctacatcattttgtataagaagcctatttgtaatagctgcgttaacacccttgttggctaattccatcatttctgtgatttctgggtctatttgtgttaat

SEQ ID NO: 33093 - DNA, 163 bp, Homo sapiens
  MAP TO AL049765.16; EXPRESSED IN BT474, SIGNAL = 1.3; EXPRESSED IN HBL100, SIGNAL =   1; SWISSPROT HIT: P26418, EVALUE 2.20e+00; EST_HUMAN HIT: BF093995.1, EVALUE 8.70e+00; NT HIT: AL161514.2, EVALUE 3.20e-01
aagcacatcttctgaccatgctgaacttggaggaggtgggaatgcacgatttcaccattttcctgaaaggaggggaactgtaacattggtgtatagccccaaatgtcaccatattgccacacctcatattgtgggaggtcaacgaagatctccttggtatctc

SEQ ID NO: 33094 - DNA, 352 bp, Homo sapiens
  MAP TO AC007461.8; EXPRESSED IN BT474, SIGNAL = 0.95; NT HIT: D43770.1, EVALUE 5.00e-11; EST_HUMAN HIT: AA969351.1, EVALUE 1.00e-03; SWISSPROT HIT: O35926, EVALUE 1.10e-02
catcacggagctccaactccttcttcctgggatgcggcacttgcctgtgaagccacaggaggctggaggggtagaggctgggggcaggaagaggaggaagtgaggaagggggcgatgcccgggagggctctgggagagtaaccaattccttcactgggggcaggcgggagtctccagggtcactatggggcaacctgtgaagggaagggaggaaagggatttccggaagtctcccgctctccctcctgcctgcttccctccttcccctagcggttgattgcgaggagcagcggaaggaaggatgtatcaaaccgaaagaagaaagaacccctgccagtcgcccccatgacat

SEQ ID NO: 33095 - DNA, 178 bp, Homo sapiens
  MAP TO AC009957.2; EXPRESSED IN BT474, SIGNAL = 1.3; SWISSPROT HIT: P14350, EVALUE 4.90e+00; EST_HUMAN HIT: AA279963.1, EVALUE 8.00e-96
tgagtatcctcatcattgaagcattctatggaggctcccataaacagctggtggatcttcttcaagaagagttaggagactgtgtcgtttatacccttcctgcaaagaaatggcattggagagcccggacatctgctttatatttctctcagaccattcccatcagtgagcattacag

SEQ ID NO: 33096 - DNA, 262 bp, Homo sapiens
  MAP TO AC008171.1; EXPRESSED IN BT474, SIGNAL = 0.62; NT HIT: gi11422496, EVALUE 1.60e-01; EST_HUMAN HIT: BE087807.1, EVALUE 7.00e-50
acggtctgtctgataagagctctcactctggccaaggagctctgaattgtgagtctgcccctcaggggaattcggagctagaggacatggaaaataaagccaggaaagtcaaaaaaacgaaagagaaggagaagaaaaaggaaaagggcaaattgaaagtcaaggagaaaaagcgcaaagaggagaatgaagatccagaaaggaaaataaagaagaagggcttcggcgccatgctgaggtatgggcctgctttgaaggcaaa

SEQ ID NO: 33097 - DNA, 177 bp, Homo sapiens
  MAP TO AL096763.9; EXPRESSED IN BT474, SIGNAL =   1; EST_HUMAN HIT: BF314193.1, EVALUE 6.10e-01; SWISSPROT HIT: P32192, EVALUE 1.70e+00
ttgactcctgctccagctctggaggggtcactgctggaagcgactgagacctggcttcagcccttctgacgtcatgtctaaggctacggataccgctgttgatggaggtcacacacgacttccagtctcttccattttccgagagatcacaaattgggtagttttcttggaggaact

SEQ ID NO: 33098 - DNA, 106 bp, Homo sapiens
  MAP TO AC011330.4; EXPRESSED IN BT474, SIGNAL = 1.4; EST_HUMAN HIT: AI674672.1, EVALUE 3.00e-53; NT HIT: gi7662083, EVALUE 2.00e-53
tcaggtagtcaaatctgcagagtcgctctaggatttgagtcattggcttggacttggatttcttggtcatggcacagatgccaacaatgatctgaggttcaggagg

SEQ ID NO: 33099 - DNA, 122 bp, Homo sapiens
  MAP TO AC004947.2; EXPRESSED IN BT474, SIGNAL = 0.65; NT HIT: U45324.1, EVALUE 2.30e-01; SWISSPROT HIT: P22763, EVALUE 5.20e+00
aaatgtgaagcccctgaatgatttcatcagagaggagtggcaccatcaggtttacattctgaaaagatggctttggctgcagtatgaagaatgggttgaggagctcatgagacaaccaggtg

SEQ ID NO: 33100 - DNA, 108 bp, Homo sapiens
  MAP TO AC012449.1; EXPRESSED IN BT474, SIGNAL = 2.1; SWISSPROT HIT: P08548, EVALUE 1.00e-03; EST_HUMAN HIT: N70114.1, EVALUE 6.00e-03; NT HIT: gi4557272, EVALUE 2.30e-01
ccaatggtgaaaagttgcaagttttttctctataatgaggaataagaaaaggatgctcactctcatcaattctgttcagcataacactggaaatactagccatagaaa

SEQ ID NO: 33101 - DNA, 150 bp, Homo sapiens
  MAP TO AL121761.1; EXPRESSED IN BT474, SIGNAL = 1.2; EST_HUMAN HIT: T06656.1, EVALUE 1.00e-62; NT HIT: gi11421885, EVALUE 2.00e-79; SWISSPROT HIT: P50636, EVALUE 2.30e+00
gtgttcggcgtccacctgaacaagtggcagctggacaagaagctgggctgtgggtgcctcctcctgtatggtgtgttcctgtgcttctccatcatgactgagttcaacgtgttcacctttgtgaacctgcccatgtgcggggaccactga

SEQ ID NO: 33102 - DNA, 121 bp, Homo sapiens
  MAP TO AP000018.2; EXPRESSED IN BT474, SIGNAL = 1.4; NT HIT: S66299.1, EVALUE 5.80e-02; SWISSPROT HIT: P36582, EVALUE 4.00e+00; EST_HUMAN HIT: AI199852.1, EVALUE 1.00e-01
caggagcctggaggtctgggagtccagctctgagcctgctccctgctcatacctgctgtttctctcttctgttacacatccttctctctctgactcagctaggtccaatactaggtctttt

SEQ ID NO: 33103 - DNA, 479 bp, Homo sapiens
  MAP TO AL079341.13; EXPRESSED IN BT474, SIGNAL = 0.97; EST_HUMAN HIT: BE295714.1, EVALUE 2.00e-48; SWISSPROT HIT: P21414, EVALUE 6.00e-15; NT HIT: X57147.1, EVALUE 2.00e-48
caagccttagaactgagaaagaaaaaaagaataaatgtgaacacagatagcaagtacgcttatctaatcctacatgcccatgctgcaatatggaaagaaagggagttcctaacatctgggggaacccccaataaataccacaaggaaatcatggagttactgcatgctgtacaaaaacccaaggaggtggcagtcataccctgccaaagccatcaaaaaggtgaagagaaaaggcagaaggaaaccgtcgggcagatgctgagcgccaaaattgctgccaggcggaacctcccaacagaaatacctatggaaggacccttggtatggaacaaccctgtccaagagattaagccccagtattccctgaccaaaacagaatggggactttcacaggggcatagttttctccccctggggtggttaacgacattagaggggaaggtactcatacccgaagccagccagtggaaaatacttaa

SEQ ID NO: 33104 - DNA, 102 bp, Homo sapiens; identical to SEQ ID NO: 30725
  MAP TO AP000076.1; EXPRESSED IN BT474, SIGNAL = 1.8; NT HIT: AB026833.1, EVALUE 8.60e-01; EST_HUMAN HIT: H60548.1, EVALUE 2.20e-01

SEQ ID NO: 33105 - DNA, 165 bp, Homo sapiens
  MAP TO AL132633.1; EXPRESSED IN BT474, SIGNAL = 0.96; NT HIT: L36916.1, EVALUE 8.00e-05; EST_HUMAN HIT: AA769079.1, EVALUE 3.90e-01; SWISSPROT HIT: O09159, EVALUE 2.90e+00
tctgggcctcattcatgcaaattctggactattcaaaaggaagaacataaagattacacagaaagcccaggaaaatgcactctgagggtggttattaatgacatcaatgaatttggggagcaggattaaaccactgagccactttcacaaacgtaattccaaagt

SEQ ID NO: 33106 - DNA, 195 bp, Homo sapiens
  MAP TO AC009613.2; EXPRESSED IN BT474, SIGNAL = 0.97; EST_HUMAN HIT: AI273938.1, EVALUE 2.00e-04; NT HIT: AL163247.2, EVALUE 4.60e-01; SWISSPROT HIT: P29483, EVALUE 7.30e-01
ctccagaaataaatttttattatttataagccactctttttgtgatattgttacagcagcccaaactaagacttctgtttttatctgaatttctttttgccacaatctcctcatgaccagtcttatccatggattaaaacccatgacatcttcctgatccttcaagtacttgggacctgactcttcattagaatc

SEQ ID NO: 33107 - DNA, 129 bp, Homo sapiens
  MAP TO AF145206.1; EXPRESSED IN BT474, SIGNAL =  25; EST_HUMAN HIT: BF366898.1, EVALUE 4.30e-01; NT HIT: U57838.1, EVALUE 2.50e-01
ccttgtatgtacaattatattgttatgcagacgactggtcgttttgctgaaatttttataatcatctcttattccaatgaagctcaccccccgttagacacacaattccctgtgttgctgtatgtctaa

SEQ ID NO: 33108 - DNA, 199 bp, Homo sapiens
  MAP TO AJ009632.2; EXPRESSED IN BT474, SIGNAL = 3.4; SWISSPROT HIT: P53971, EVALUE 8.40e-02; EST_HUMAN HIT: AI362643.1, EVALUE 7.00e-01; NT HIT: AL163209.2, EVALUE 1.00e-108
agaatcagaagttggaaactgttacccatgtttaaggcttgacaatcaagaccaagaggcagaactggggcatgcagcagctgaggacaaagtagttcccagagctgtagaatgcattgaggccaaatcagtggacacgtgcaaccagccacaatctaaagtgagaagatcgatagaggagagaggtaaggcaaggtca

SEQ ID NO: 33109 - DNA, 94 bp, Homo sapiens
  MAP TO AC005476.3; EXPRESSED IN BT474, SIGNAL = 0.81; SWISSPROT HIT: P40899, EVALUE 2.40e+00; EST_HUMAN HIT: AV724733.1, EVALUE 2.90e-01
cttgcccaccaagactccccacagtggtttccaccgcagcctgcttggcacaccgaaccaaatcaacagcatctgcaaggccagcatcattcat

SEQ ID NO: 33110 - DNA, 143 bp, Homo sapiens
  MAP TO AB020863.1; EXPRESSED IN HBL100, SIGNAL = 2.3; SWISSPROT HIT: P13590, EVALUE 1.20e-01; EST_HUMAN HIT: H04072.1, EVALUE 5.00e-75; NT HIT: gi11427201, EVALUE 3.00e-75
acagaggactgggacacaccacgagaatctcccagagtgtcattacagtggaagacttcgagacgattgatgcaggatattacatttgcactgctcagaatcttcaaggacagaccacagtagctaccactgttgagttttcc

SEQ ID NO: 33111 - DNA, 116 bp, Homo sapiens
  MAP TO AC007869.1; EXPRESSED IN HBL100, SIGNAL = 0.87; NT HIT: gi11436378, EVALUE 1.60e-02; SWISSPROT HIT: Q53552, EVALUE 4.00e+00; EST_HUMAN HIT: AA085514.1, EVALUE 1.70e-02
agttcaccctggaaggatctatgggtcagaagagcaagagccttgaatgccgagttactgggagctgtaagttccggtcaaaccagaccagatgagaaccataaaacccgatgcct

SEQ ID NO: 33112 - DNA, 110 bp, Homo sapiens
  MAP TO AC005235.2; EXPRESSED IN HBL100, SIGNAL = 0.87; EST_HUMAN HIT: AA704523.1, EVALUE 3.50e-01; NT HIT: M81725.1, EVALUE 1.30e-02; SWISSPROT HIT: Q03640, EVALUE 1.80e+00
ctgcagattatctttcattccaatgcagcaagtgccattttctctggatttttttccttctgttgttgactcgtctttctcagtgctgtaaacttcttgttgactcatcg

SEQ ID NO: 33113 - DNA, 79 bp, Homo sapiens
  MAP TO AC011402.1; EXPRESSED IN HBL100, SIGNAL = 1.2; EXPRESSED IN HELA, SIGNAL = 1.9; NT HIT: D13705.1, EVALUE 2.50e+00
tgagaaacaccacctggaccagatgataaagtttagcatcacgggtgatgtcatattaatagcatgtatccataatatc

SEQ ID NO: 33114 - DNA, 120 bp, Homo sapiens
  MAP TO AC010739.2; EXPRESSED IN HBL100, SIGNAL = 0.91; EST_HUMAN HIT: BE002187.1, EVALUE 6.10e+00; SWISSPROT HIT: P41812, EVALUE 6.90e+00; NT HIT: AF056116.1, EVALUE 4.10e+00
ggtcctcctggggaacctgccagattatcacattatctcaaaaatgaccacgttgtggtcaagaacatcagctttaggaaatataacaccaaaggctccttctttgaagctgccacaatg

SEQ ID NO: 33115 - DNA, 125 bp, Homo sapiens
  MAP TO AL122035.1; EXPRESSED IN HBL100, SIGNAL = 1.8; NT HIT: gi11434599, EVALUE 1.00e-55; SWISSPROT HIT: P27653, EVALUE 7.00e-06; EST_HUMAN HIT: BE892738.1, EVALUE 2.00e-55
cttgtctgtctgggtcagttcatgaaatatccgagcatcaatggccgcagcaacgaggttattagctgcagtgatggcatggatgtcacctgtgaggtggagattaaactacaaaagaacagaag

SEQ ID NO: 33116 - DNA, 1031 bp, Homo sapiens
  MAP TO AC005164.1; EXPRESSED IN HELA, SIGNAL =   1; EXPRESSED IN HBL100, SIGNAL =   1; NT HIT: gi11419210, EVALUE 0.00e+00; EST_HUMAN HIT: AU128881.1, EVALUE 0.00e+00; SWISSPROT HIT: P24588, EVALUE 3.00e-03
tgtagaagttgaaggggacgagaaaaacgctgttaacagattatctgaattttcctcttcccaaatatctaaaacattgcatataccactcttttctgtgtagcttgtgaaacccaaaaattctgatttctcttcactagtctgaaacaagtctagtaaagactgtaccggtgaactacaaattctgttttcttcttgtgtaataaattcagttcttttatcaaattcagcatttggttccagattttcttttctatttcgtcctaatattattttcacttttcgatgtattttaccagaaggtaaactatccatattcttgaagtcacattcattgggttcctcaggaggagtatggaatggagcctttgcctgaacagttaggtgctcttgtgaactgtttattgttatcagaccagaatcatgagtaaatattgaatgaaggtccttttccttgagatcctttgctggaaaaagcacagtatctgacttctgttttggttgagatccactattatctgtactgaaatcagaaacatgtacagatgcctgtatgttacatttatagtgatctacccttagttcttctaagtcattttcacttaatgtgtgttcggaaatgtcaagaatgcattcctgtttgtttttatgtagaggtagctgtgtaaaattctgtcttatgtcatcttcagctgtacttaacatggaacatttattactcattttctcattaagccctctcaattcatttgaagggtgggggatgggctctgaaataaacaggagctttttttcagtttcctgggtctctttatacaggaaattctgctccttcactgttgtatcatcttcctggcaatctttctgagaaatatgttgcaattccactttttccttttgttcagtctttttcaggacacttgcagaaacaggagaaagggatccaacactgtattttattctttgtaggaaaaatagaagaaaaatattaaaataattgctatcaaaacaaattcctgagtagttagaaa

SEQ ID NO: 33117 - DNA, 470 bp, Homo sapiens
  MAP TO AC010089.1; EXPRESSED IN HBL100, SIGNAL = 4.4; EST_HUMAN HIT: AA906422.1, EVALUE 1.00e-12; NT HIT: U52111.2, EVALUE 2.00e-17; SWISSPROT HIT: P08548, EVALUE 1.00e-05
aaggtctatggatacatacaacaatatgaatgaatgttaaagtaattatgctgaataaaagaagccacaccaaaataaactacttattgtattattacattggtatatgcctctagacaattaaaaccaatctgtatgacagaaaggagatcagtggttgcctgagaagagggtacatggagagagacaggaaggagagattacaaaggagcacaaggataccttttgggatgatgtttatgttcactatattgatcggcttcatgggtatatacgtatgtcaaaacttatcaaattgtacactagatacatatgctgtttattttatgtcacttatacttcaaaatgctgttaaaactctcaccaaattaggtatgcaaggaatgttcctcaacagaataaatgccatattggacaagcccacagccaacatcatacccaatggtaaaaagcagaaagcttttcttcta

SEQ ID NO: 33118 - DNA, 195 bp, Homo sapiens
  MAP TO AL096865.5; EXPRESSED IN HELA, SIGNAL = 0.99; EXPRESSED IN HBL100, SIGNAL = 0.92; SWISSPROT HIT: Q63046, EVALUE 6.00e-24; EST_HUMAN HIT: AA858175.1, EVALUE 8.00e-84; NT HIT: AF001445.1, EVALUE 1.00e-106
gtggtagccctcggagaggtaccagatgggactgtggttactgtcatggcgggtaacgatgaaaattattctgctgagctccggaatgcctctgctgttatgaaaaaccaagtagcaaggttcaacgatctgagatttgtgggccggagtggacgaggtaggtctctgacttttgatactgataatagaataagc

SEQ ID NO: 33119 - DNA, 92 bp, Homo sapiens
  MAP TO AC009834.2; EXPRESSED IN HBL100, SIGNAL = 1.1; NT HIT: L11877.1, EVALUE 5.00e-45; EST_HUMAN HIT: BE897174.1, EVALUE 8.00e-45; SWISSPROT HIT: P33316, EVALUE 8.00e-12
ccactcttccataacacccagaagggagcgctatctgaatgtccgttttcacaacagctttctccataggtggtattgtgtaatcataggca

SEQ ID NO: 33120 - DNA, 128 bp, Homo sapiens
  MAP TO AJ239320.2; EXPRESSED IN HBL100, SIGNAL = 0.91; EXPRESSED IN HELA, SIGNAL = 1.1; EST_HUMAN HIT: BE900519.1, EVALUE 4.00e-66; NT HIT: gi8923768, EVALUE 2.00e-66; SWISSPROT HIT: P32561, EVALUE 3.50e-01
gcccatattctatggagtccggatgatcatcatcgccctcttggctgaccttctggagatgctgcagataagcatcagtgtggaaggtggccatctcctccatggaggccactttaggcttaactatc

SEQ ID NO: 33121 - DNA, 177 bp, Homo sapiens
  MAP TO AF111167.2; EXPRESSED IN HBL100, SIGNAL = 1.2; NT HIT: AF111167.2, EVALUE 6.00e-09
cactgccattgccacaaacgccatcactatcaccatcaccatcacaaccattactactaccatcaccatcaccaccaccaccatcaacacctataccataactaccatctccaccatcatcagcaccattatcatcaccatgccaccaccaccaccactgccattgccaatgcctga

SEQ ID NO: 33122 - DNA, 223 bp, Homo sapiens
  MAP TO AF064857.1; EXPRESSED IN HBL100, SIGNAL = 0.93; SWISSPROT HIT: P46199, EVALUE 1.60e+00; NT HIT: AL163280.2, EVALUE 1.00e-123
cgtatgccgatcacaaactcatagggcaacatgaactgtgggatgaaacagatgggttgccactgcctacctttgacttgctctggttcccttagggaaatggagattttcttagtgtctggcatttgcagctctttccacaagaggacactgtgcaccatgactatcatcccgcctgctgtgggcggaggccagggccaccggcagaggtcctgctggaatt

SEQ ID NO: 33123 - DNA, 166 bp, Homo sapiens
  MAP TO Z98200.8; EXPRESSED IN HBL100, SIGNAL = 0.91; EXPRESSED IN HELA, SIGNAL = 1.4; EST_HUMAN HIT: AW504765.1, EVALUE 7.00e-89; NT HIT: gi7661737, EVALUE 6.00e-89
atgaacatcactcgaaaactatggagtcgaactttcaactgttcagtcccttgcagtgacacagtgcctgtaattgctgtttctgtgttcattctctttctacctgttgtcttctaccttagtagctttcttcactcagagcaaaagaaacgcaaactcattctgc

SEQ ID NO: 33124 - DNA, 78 bp, Homo sapiens
  MAP TO AC007365.2; EXPRESSED IN HBL100, SIGNAL = 1.5; EXPRESSED IN HELA, SIGNAL = 1.1; SWISSPROT HIT: Q66578, EVALUE 5.40e+00; NT HIT: AF093796.1, EVALUE 5.20e-01
gtcagttcccactgctgggggtttctggatgacgaggttgttgagcacccccatgcttatggataccatgagaggaag

SEQ ID NO: 33125 - DNA, 256 bp, Homo sapiens
  MAP TO AL049611.24; EXPRESSED IN HBL100, SIGNAL = 0.91; EXPRESSED IN HELA, SIGNAL = 1.8; NT HIT: gi11417473, EVALUE 1.00e-115; EST_HUMAN HIT: AI460219.1, EVALUE 1.00e-115; SWISSPROT HIT: P29290, EVALUE 4.00e-04
caagcaaactgaaaaggatccaggcgtgcaggaattggaagcattaatagacacaattcagaagcaactgaaagatcactcatgcaaagacaacattcgtgaggcatttcaaatttatgacaaggaagcttcaggatatgtggacagagacatgttctttaaaatctgtgaatcgcttaacgtcccagtggatgactccttggttaaggaggtcagtatgaattactcttctgagttcattgcagaggctaggcac

SEQ ID NO: 33126 - DNA, 104 bp, Homo sapiens
  MAP TO AL122035.1; EXPRESSED IN HBL100, SIGNAL = 1.3; EXPRESSED IN HELA, SIGNAL = 0.97; NT HIT: gi11434599, EVALUE 4.00e-52; SWISSPROT HIT: P11586, EVALUE 2.00e-14; EST_HUMAN HIT: AA306935.1, EVALUE 6.00e-52
agtggcaacaagcaccaccacgtgggggcagaggccggaataccggcatttgatgttaaaaaacttttccattccaatgtctgctccaaatcctgcttccgtca

SEQ ID NO: 33127 - DNA, 167 bp, Homo sapiens
  MAP TO AC007077.2; EXPRESSED IN HBL100, SIGNAL = 0.83; EXPRESSED IN HELA, SIGNAL = 0.69; NT HIT: AB038490.1, EVALUE 8.30e-02; SWISSPROT HIT: O81481, EVALUE 1.30e+00; EST_HUMAN HIT: AI032305.1, EVALUE 1.50e-01
cctcctgtcctacaaatgtactgctcatgcttctgttgcctaaacccaactggaaaccagaaggcaagggaatgtgttaagagctcataggtaggtggagaggggtggcaagtggttctggagctgccaacagtatccactatctgcacactgctgttttccatgca

SEQ ID NO: 33128 - DNA, 159 bp, Homo sapiens
  MAP TO AC007249.2; EXPRESSED IN HELA, SIGNAL = 1.9; EXPRESSED IN HBL100, SIGNAL = 1.4; SWISSPROT HIT: P11926, EVALUE 8.00e-18; EST_HUMAN HIT: AW674950.1, EVALUE 3.00e-70; NT HIT: X16277.1, EVALUE 1.00e-84
ctgacaccaacaacatcgatatttagctctttcgcccgttccaaaaggagcctgctggttctgagcgtggcaccgaatttcacactgagacgacagactgctttggaatcatcagtggcaatccgcaaaaccaacctacaagcaaggaaagtgcagcaa

SEQ ID NO: 33129 - DNA, 190 bp, Homo sapiens
  MAP TO AF064858.1; EXPRESSED IN HBL100, SIGNAL = 3.5; NT HIT: AL163278.2, EVALUE 1.00e-103; SWISSPROT HIT: P46711, EVALUE 2.80e+00
gatcatcccttctttgtttactaattggaatcctttcgcccatcaattcttttgttatcctgcagtttgtattgtgaaggcaaagattagtaaatgccttatcttttctctttatcaacttcagagtagcgatgtggttcatgaccatcttccagttgtgagcagtgagctttttaatattattatgaac

SEQ ID NO: 33130 - DNA, 202 bp, Homo sapiens
  MAP TO AC005018.2; EXPRESSED IN HBL100, SIGNAL = 1.3; NT HIT: AJ403239.1, EVALUE 2.60e-02; SWISSPROT HIT: Q10508, EVALUE 5.60e-01
ctttcttcctgctgagcttgagccatggcccagctgtggccgtggtgacagtgaccagaatgatgaccagggctgtgcttttctctcctttcttcccttttctcagagccctgcccagcaacagcaaaatacaaatcctctagactcctgcactctccacccacttcctcctgctcagattcctcatctccctgcttcccca

SEQ ID NO: 33131 - DNA, 306 bp, Homo sapiens
  MAP TO AL031302.1; EXPRESSED IN HBL100, SIGNAL = 1.1; NT HIT: AF070655.1, EVALUE 1.00e-110; EST_HUMAN HIT: AI249062.1, EVALUE 0.00e+00; SWISSPROT HIT: O75964, EVALUE 5.00e-39
gacataaaaccacgtcgacacctcagtggccaccaaaccgttcagcaaagcttccttaactgtgagctgtttgaagctaccagtctgagcactactgactatttttttcaggctctgaatagctctagggatctcagcaggggtgggaggaaccagctcaaccgtggtgtagtaccaaaatgcggccaatcgaggcttcaagtaagtcacagcagcattcaccagtgctggggtcttctccacaaggttacggacaaatggagccatggttctgggatggaaagtccatcatcccgaatggccagc

SEQ ID NO: 33132 - DNA, 192 bp, Homo sapiens
  MAP TO AC008008.2; EXPRESSED IN HBL100, SIGNAL = 0.98; EXPRESSED IN HELA, SIGNAL = 0.72; EST_HUMAN HIT: AI371111.1, EVALUE 5.00e-44; NT HIT: gi11421724, EVALUE 7.00e-77
ctcccaaccctcccacaattagagaagagctctgcacagcttcatatgacaccatcactgtgcattggacctccgatgatgagttcagcgtggtctcctacgagctccagtacaccatattcaccggacaagccaacgtcgttagtgagtatctcatggcctatttatttctgtctttggtggctttcttca

SEQ ID NO: 33133 - DNA, 238 bp, Homo sapiens
  MAP TO AL049748.1; EXPRESSED IN HBL100, SIGNAL = 2.3; SWISSPROT HIT: O35548, EVALUE 1.90e+00; NT HIT: AF071550.1, EVALUE 8.90e+00
atatgttagacttgtccgtaatacccctggatgcccactgactcttacttttagttctgactttcattcatctgagcataagtggaataaattaggaggatattttaatcacttttataattctggacctgttgctctccttagccctagagataacagccatgggtatggttgtgtgtgtatcattttctgtttcatgattacatattatatagtaaggtttataagtttttctcat

SEQ ID NO: 33134 - DNA, 99 bp, Homo sapiens
  MAP TO AP000501.1; EXPRESSED IN HBL100, SIGNAL = 1.3; EST_HUMAN HIT: AA815400.1, EVALUE 9.00e-04; SWISSPROT HIT: Q62396, EVALUE 7.00e+00
tgttcatggatgtgcccctcgcccacaagctagagggcagcttgttaaagacctacaaacaagatgattacccgaacaagatattcttagcctatagag

SEQ ID NO: 33135 - DNA, 97 bp, Homo sapiens
  MAP TO AC011087.1; EXPRESSED IN HBL100, SIGNAL = 8.8; EST_HUMAN HIT: AW806184.1, EVALUE 3.00e-01; NT HIT: AB007941.1, EVALUE 1.70e-01
agatagcattggaggacaagatgacatggagttgacttactcgagggagaagggtattgcaggtaggtgggagaactcttctaacagatttttaagc

SEQ ID NO: 33136 - DNA, 171 bp, Homo sapiens
  MAP TO AC007314.3; EXPRESSED IN HBL100, SIGNAL = 0.71; EST_HUMAN HIT: AW371947.1, EVALUE 1.00e-84; NT HIT: AL161564.2, EVALUE 6.20e+00; SWISSPROT HIT: P48234, EVALUE 4.00e-06
ttcacgaagttcttgttgctctaagagtcttagtttcttcttccttttttcactaatttttgaaacaagtggattcagaagcctaaattcttcactctcttcatctacttggaagtcagggttctcaaacataactttaaatcgatcatcggtgagaatattaggaagact

SEQ ID NO: 33137 - DNA, 203 bp, Homo sapiens
  MAP TO AL049868.10; EXPRESSED IN HBL100, SIGNAL = 0.93; NT HIT: AL163247.2, EVALUE 1.00e-01; EST_HUMAN HIT: AI821192.1, EVALUE 4.90e-01; SWISSPROT HIT: Q9Q8Z2, EVALUE 9.80e-01
cttccattggatggagagactgtaaaatattgcgttgatgtatatacagactggattatggctttagtgttgccaaaagattctattccattgccagttattaaagagcctaatcaatatgttcaaactatactaaaacacctacagaatctttttgtaccaaggtaagctatacctgtctatctggcccattatcagggtca

SEQ ID NO: 33138 - DNA, 133 bp, Homo sapiens
  MAP TO AC006346.1; EXPRESSED IN HBL100, SIGNAL = 1.2; NT HIT: gi11422122, EVALUE 3.00e-69; EST_HUMAN HIT: BF106869.1, EVALUE 1.70e+00; SWISSPROT HIT: P70579, EVALUE 4.00e-19
atgtcatcctcattggcaaacataatcactgctcgagcattaggtgtttctagcaggcgtttgataattttttcaaattctccaggtcttggttcacgtgggattttctgtgactgagcaatgcaaacaccac

SEQ ID NO: 33139 - DNA, 372 bp, Homo sapiens
  MAP TO AP000120.1; EXPRESSED IN HELA, SIGNAL = 0.98; EXPRESSED IN HBL100, SIGNAL = 0.67; EST_HUMAN HIT: AI654552.1, EVALUE 0.00e+00; SWISSPROT HIT: Q9Y6J6, EVALUE 8.00e-67; NT HIT: gi11526220, EVALUE 0.00e+00
atgtctactttatccaatttcacacagacgctggaagacgtcttccgaaggatttttattacttatatggacaattggcgccagaacacaacagctgagcaagaggccctccaagccaaagttgatgctgagaacttctactatgtcatcctgtacctcatggtgatgattggaatgttctctttcatcatcgtggccatcctggtgagcactgtgaaatccaagagacgggaacactccaatgacccctaccaccagtacattgtagaggactggcaggaaaagtacaagagccaaatcttgaatctagaagaatcgaaggccaccatccatgagaacattggtgcggctgggttcaaaatgtccccctga

SEQ ID NO: 33140 - DNA, 128 bp, Homo sapiens
  MAP TO AL049832.2; EXPRESSED IN HBL100, SIGNAL = 1.4; EST_HUMAN HIT: AI438966.1, EVALUE 1.10e+00; SWISSPROT HIT: Q14681, EVALUE 1.40e+00; NT HIT: AF252302.1, EVALUE 2.40e-01
gagctgcctggcccaagtcacggcatcctccccaggttggactgatggaggtccagcatctgtttccaattccgaacaactttgaggagcacgtctagctcccgagcgttctgtggggttagctgagg

SEQ ID NO: 33141 - DNA, 122 bp, Homo sapiens
  MAP TO AL079337.3; EXPRESSED IN HBL100, SIGNAL = 4.1; NT HIT: AB008189.1, EVALUE 4.20e+00
agagagaacaatgcaaagaaagaaaaactttatgatgattctatgacactttcaccaaacactaagaaaacaaacataaaatgaacaacttggttttcaaacagaaataataaatctgtaag

SEQ ID NO: 33142 - DNA, 109 bp, Homo sapiens
  MAP TO AC006348.2; EXPRESSED IN HBL100, SIGNAL =   1; NT HIT: AF172329.1, EVALUE 3.70e+00; EST_HUMAN HIT: BE972426.1, EVALUE 1.40e+00; SWISSPROT HIT: P12895, EVALUE 5.30e+00
tgcatggattcctacgccagaaagaggcttcacgagaaactggagctgccggtcattatccatcatgaacccagaggcacatatgctttcaaatgttagtaacgcgaat

SEQ ID NO: 33143 - DNA, 124 bp, Homo sapiens
  MAP TO AC010904.1; EXPRESSED IN HBL100, SIGNAL = 1.1; NT HIT: D13971.1, EVALUE 2.30e-01; SWISSPROT HIT: P22272, EVALUE 4.00e+00
tggcattttcatattgcatgatatgattcttaagagtcctttcctctccagtgctccacaccctgagctgcttgttgctatagacccagtgaggcaccatgcctttggcttccggataccatct

SEQ ID NO: 33144 - DNA, 99 bp, Homo sapiens
  MAP TO L78810.1; EXPRESSED IN HBL100, SIGNAL = 0.94; EST_HUMAN HIT: BE693933.1, EVALUE 7.80e-02; NT HIT: L78810.1, EVALUE 3.00e-49
tgagaaggagcagttggtgaagaaggaaaaggaaagtgtggtgtccaggaagccaagtgaaggtggtatgtcaaggaggagtggtgagctgctgagggc

SEQ ID NO: 33145 - DNA, 212 bp, Homo sapiens
  MAP TO AC007510.4; EXPRESSED IN HBL100, SIGNAL =   1; EXPRESSED IN HELA, SIGNAL = 0.62; NT HIT: AF177767.1, EVALUE 7.80e+00; SWISSPROT HIT: P03299, EVALUE 4.40e+00
gcaccaggtctgtgaggctgatgacagtgaagaaggctctatacacccagaaaaaggataatggaagacagaagggctccactaaaaggagaggggcaatgctgcagttttcctgcttcctggctttgcccatggctacctctgaggagttgctcaggacactgtgcttgttaggaacaaagggcctccagcactctctcattttgcaaagg

SEQ ID NO: 33146 - DNA, 265 bp, Homo sapiens
  MAP TO AL022727.1; EXPRESSED IN HBL100, SIGNAL = 1.6; NT HIT: AF283558.1, EVALUE 7.00e-07; SWISSPROT HIT: P23275, EVALUE 1.00e-28; EST_HUMAN HIT: AA972046.1, EVALUE 1.00e-05
tgatcttctacctgatgacactgacaggaaacctgttcatcatcatcctgtcatacgtggactcccatctccacacaccaatgtacttcttcctttcaaacctctcatttctggatctctgccacaccaccagctctatccctcagttgctggtgaatctccggggcccggaaaagaccatctcgtatgctggttgcatggttcaactttactttgttcttgcactgggaatcgcagagtgtgtcctactggtggtgatgtcgta

SEQ ID NO: 33147 - DNA, 123 bp, Homo sapiens
  MAP TO AL031132.1; EXPRESSED IN HBL100, SIGNAL = 1.7; NT HIT: AL163285.2, EVALUE 9.20e-01
tgctgcagctgggtgaacttggtctttgtagacttctctctcaagtttatctcaagagggggatttgaccaaagagttagaatggaaataatggcattcttctcccatttcttatttctgacc

SEQ ID NO: 33148 - DNA, 173 bp, Homo sapiens
  MAP TO AL096771.11; EXPRESSED IN HBL100, SIGNAL = 0.92; EXPRESSED IN HELA, SIGNAL =   1; EST_HUMAN HIT: BE004406.1, EVALUE 5.00e-90; SWISSPROT HIT: Q99715, EVALUE 2.00e-25; NT HIT: gi11418424, EVALUE 5.00e-90
gcatggctttgaatttcattcgccaacagaacttcaggacccaagctggcatgagacctcgagctcgaaaaattggtgtgctcattactgatggaaaatcacaagacgatgttgaagcaccttcaaagaaactcaaggatgagggagtggagctgtttgctattggtacgcac

SEQ ID NO: 33149 - DNA, 141 bp, Homo sapiens
  MAP TO AL035460.13; EXPRESSED IN HBL100, SIGNAL = 0.91; SWISSPROT HIT: O08791, EVALUE 5.00e-21; EST_HUMAN HIT: BF515857.1, EVALUE 7.00e-74; NT HIT: AB037863.1, EVALUE 4.00e-74
tcggtccttttccacgaagtcgatgaaggctgtgcgctccacctccacgggctgcccctgccggtcgtacatggccagcacgaagtggaagaagttggatttcctgaggttggagggaggctgcttctcaaaatgtgctcg

SEQ ID NO: 33150 - DNA, 89 bp, Homo sapiens
  MAP TO AC009972.3; EXPRESSED IN HBL100, SIGNAL = 1.1; EST_HUMAN HIT: AW270642.1, EVALUE 7.40e-01
ctggaccagagaaagatgagaaagtaaacaatgttaaagcagtgagcaattcactaaatggatatgcaagtcacaataataagcctgag

SEQ ID NO: 33151 - DNA, 384 bp, Homo sapiens
  MAP TO AC007282.2; EXPRESSED IN HBL100, SIGNAL = 1.6; SWISSPROT HIT: P45624, EVALUE 4.10e-01; EST_HUMAN HIT: R59526.1, EVALUE 6.20e-02
gtcatgtacagtgccacttgaacctgatttggagttaggtacttcgcttattaaatgtttctttttggtactactattttttttaattggaaaatctctctcatcagcttcgaagtgttttttagagacatgttcttctacctctggagattgtcctggtccactttctaaaaatgaatctgcaggaatatttttaattatctgacccccttctgaaagtgaatattcaggaatatttttaattacttgaccaccttctaaaagtgaatctgcaggaatattttcaattatttgactaccttctgaaaatgaatctgcaggaatatttttaattatttgacttaaagtagtctttgaatttaaaatgtctttttctgaaagcca

SEQ ID NO: 33152 - DNA, 426 bp, Homo sapiens
  MAP TO AC011504.2; EXPRESSED IN HBL100, SIGNAL = 3.4; SWISSPROT HIT: P10656, EVALUE 4.20e+00; EST_HUMAN HIT: BE881566.1, EVALUE 1.00e-01; NT HIT: M91005.1, EVALUE 9.00e-01
tgtgttgaagtaggcatcaaaagctctgccagctttctcctctgcccgtgcctacaagctgaaagtgacttgctaaagaaaaaggaggtggatccaagttttttaaaggtctgttaccaggaacaaggagacatcaggcaacagaccttcctaattttgtcttctcaaggtcagcaatgttgtctacatgcccattcgcttgttcttatcctccgagtctatagcaaggttggcctcgatcaaggtgacatgaaggtgcatgctttccccaagtattcagaggaggggatgtgggctgaaggagttggggggattaaaatggctacggatcattttagaatcctcatcatccactggaccacaaagcggcagtaccagttagacaaagaaacggatgctcagaaagacaaacaacttctcaaaagt

SEQ ID NO: 33153 - DNA, 241 bp, Homo sapiens
  MAP TO AC007563.1; EXPRESSED IN HBL100, SIGNAL = 0.71; EXPRESSED IN HELA, SIGNAL = 0.62; SWISSPROT HIT: P25396, EVALUE 1.10e+00; NT HIT: L27213.1, EVALUE 2.30e+00; EST_HUMAN HIT: AU158321.1, EVALUE 3.40e+00
gttgggtggagtgtgacccaccccaactccaaagacaggccccgattggtctaaaccagtcagataatccctttcaatttaccataaaagttgatccaggaataagcaataatccaaatttaagtgaagcagcccatggcattcccctgggaatcacagtgatgggttcaagttggcccaatgggagtgaagctcaggaccagccccaacctcatgggtacgtgacctttgaggtcaaggc

SEQ ID NO: 33154 - DNA, 265 bp, Homo sapiens
  MAP TO AL008728.1; EXPRESSED IN HBL100, SIGNAL = 0.92; EST_HUMAN HIT: BE217914.1, EVALUE 2.60e+00; SWISSPROT HIT: P26660, EVALUE 2.10e-01
cgtggctaaagacaccgaccccagtgctgcctctccaggatcagtgacagaccccgaggttctggagccgggaaaaaaccatgacattgtgcaggtagatgaaatgccgcgttgtgcgggtgaggaccccgagactccgaaatggcacgaggcacatcccggctgcacagctcatgccttggccccttatggagaccccagtccagggtctgaagaggatgaccgtttctggatatgttgcactttgccctcattttggactaat

SEQ ID NO: 33155 - DNA, 101 bp, Homo sapiens
  MAP TO AL035086.12; EXPRESSED IN HBL100, SIGNAL =   1; EXPRESSED IN HELA, SIGNAL = 0.72; SWISSPROT HIT: P27653, EVALUE 1.40e-02; EST_HUMAN HIT: AI979246.1, EVALUE 4.00e-50
ctgatttttcaagaagttcaattacagctttggcaacaggtgaaacaaaacattcatgggcatcccctcgcaccagcttccccaggtttatgtctgttact

SEQ ID NO: 33156 - DNA, 478 bp, Homo sapiens
  MAP TO AL049830.2; EXPRESSED IN HBL100, SIGNAL = 1.2; NT HIT: gi11437360, EVALUE 0.00e+00; EST_HUMAN HIT: AW023479.1, EVALUE 0.00e+00; SWISSPROT HIT: O43405, EVALUE 4.00e-90
gctgtctgtcggaataatggcttcttctcttaccacatgcccaactggtttggcaccacaaaatacgtaaagcctctggtacagaagctgtgcactcatgaacaaatgatgtgcagcaagacctgttataactcagtgaacattgcctttctaattgatggctccagcagtgttggagatagcaatttccgcctcatgcttgaatttgtttccaacatagccaagacttttgaaatctcggacattggtgccaagatagctgctgtacagtttacttatgatcagcgcacggagttcagtttcactgactatagcaccaaagagaatgtcctagctgtcatcagaaacatccgctatatgagtggtggaacagctactggtgatgccatttccttcactgttagaaatgtgtttggccctataagggagagccccaacaagaacttcctagtaattgtcacagatgggcagtcctatg

SEQ ID NO: 33157 - DNA, 132 bp, Homo sapiens
  MAP TO AC010149.2; EXPRESSED IN HBL100, SIGNAL = 0.94; NT HIT: AF056322.1, EVALUE 1.00e-68; SWISSPROT HIT: P23497, EVALUE 2.00e-19; EST_HUMAN HIT: AU135411.1, EVALUE 2.00e-68
tcacggaggccctcgaggaatggaaatgtcttttttattgcatttgaaatctccaccttatttcttttgaagtgcttgaatacaatgtcatagagcagcctgtcatctacaccctggtcttccgtgaacatc

SEQ ID NO: 33158 - DNA, 432 bp, Homo sapiens; identical to SEQ ID NO: 21450
  MAP TO AL034345.3; EXPRESSED IN HBL100, SIGNAL = 1.5; NT HIT: AB037831.1, EVALUE 2.00e-04; SWISSPROT HIT: Q39575, EVALUE 6.00e-25; EST_HUMAN HIT: BF221813.1, EVALUE 7.00e-83

SEQ ID NO: 33159 - DNA, 107 bp, Homo sapiens
  MAP TO AC007358.2; EXPRESSED IN HBL100, SIGNAL = 1.1; NT HIT: Y14274.1, EVALUE 7.80e-01; EST_HUMAN HIT: AI276750.1, EVALUE 7.00e-54; SWISSPROT HIT: P54660, EVALUE 9.10e+00
tgttgtgggaactctttgtattgatggacaggtaaaactgctcaagaactcttgctgatgcgtcaacagtagcatccctgagctttcgattggtactagcattatct

SEQ ID NO: 33160 - DNA, 110 bp, Homo sapiens
  MAP TO AC007768.1; EXPRESSED IN HBL100, SIGNAL = 1.2; NT HIT: AF197159.1, EVALUE 2.00e-01; EST_HUMAN HIT: AA074055.1, EVALUE 2.40e-01; SWISSPROT HIT: P46783, EVALUE 6.90e+00
gggaaaaactgaaccaaactttgtgtctccggagattaaaagaagtaccagaagcaaatctcatccccgtcttggaggtaagaaatgggaaagaccagctagaacaactg

SEQ ID NO: 33161 - DNA, 102 bp, Homo sapiens
  MAP TO AC006318.2; EXPRESSED IN HBL100, SIGNAL = 0.92; NT HIT: AJ400861.1, EVALUE 7.30e-01; EST_HUMAN HIT: AI223493.1, EVALUE 8.80e-01
taactcaggtcatcatccttaaaccagaaatagataacctgatagttagggtcaagggtcctcaaaattgcagctgaatcagcatcagagctctttgtcctc

SEQ ID NO: 33162 - DNA, 102 bp, Homo sapiens
  MAP TO AC009508.2; EXPRESSED IN HBL100, SIGNAL =   1; NT HIT: AL163303.2, EVALUE 1.00e-05; EST_HUMAN HIT: AW817268.1, EVALUE 4.00e-06
aagaagagctactactattccttcacaagctcttctgaaaaacagaagaggaggaacactttccagctcatcctataaggccaatattaccctgataccaat

SEQ ID NO: 33163 - DNA, 384 bp, Homo sapiens
  MAP TO AL033532.15; EXPRESSED IN HBL100, SIGNAL = 0.99; EST_HUMAN HIT: AI929343.1, EVALUE 0.00e+00; SWISSPROT HIT: P20659, EVALUE 9.20e-01; NT HIT: gi11425524, EVALUE 0.00e+00
gcatgctggcagagctgatcagcaggtagaggagggcagagaagttgcaccacactacaccaaagatccattccctgcggatggagctcgtcaccacaaaaggcagcaccaacacggacagcaggaagttggacagagtcaggctgaagacgaacttgttgctgagggtgaggaggtaggacttcttgtacaaggtgaccacgatgaccaggtttcccaggcagacaaaaatggtgatgacaatgatggcgatgaactgggtgatgatgacgcccccttcgccaccctcctcctcagtgagattactcagctccttcctgcagctgagggaggagttgaggctcatggtcagtgcacctcggcgtggggtgggcagagcatgct

SEQ ID NO: 33164 - DNA, 124 bp, Homo sapiens
  MAP TO AL078623.24; EXPRESSED IN HBL100, SIGNAL = 1.5; EST_HUMAN HIT: F00098.1, EVALUE 4.40e+00
tcttgaagacattcaagacattcaagaagacattcaagacattcaagaagacattcaagacattcttgatagacctattgcttctgtgactataagaggctctaatattccacatggccacaaa

SEQ ID NO: 33165 - DNA, 175 bp, Homo sapiens
  MAP TO AC007653.1; EXPRESSED IN HBL100, SIGNAL = 0.7; SWISSPROT HIT: Q92995, EVALUE 5.00e-27; EST_HUMAN HIT: BE837639.1, EVALUE 5.00e-94; NT HIT: gi4507848, EVALUE 3.00e-94
atgaactgatcgcttatgaactaacgagaagggaagcagaagcaaacagaagaccccttcctgagttggtacgtgccaagataccatttagtgcctgccttcaggccttctctgaaccagaaaatgttgatgatttctggagcagtgccctacaagcaaagtctgcgggtgtgaa

SEQ ID NO: 33166 - DNA, 550 bp, Homo sapiens
  MAP TO AL049780.2; EXPRESSED IN HBL100, SIGNAL = 0.74; SWISSPROT HIT: P74925, EVALUE 3.00e-17; NT HIT: gi11434945, EVALUE 0.00e+00; EST_HUMAN HIT: BF207616.1, EVALUE 0.00e+00
gcaattatttccagtcagagaaggaaaccagtgcctggcattctcaccatctttctacctaccatgatcaagtgcttgtcagttgaagtacaagccaaattgcgttctggtttggccataagctccttgggccaatgtgttgaggaacttgccctcaacagtattgatgctgaagcaaaatgtgtggctgtcagggtgaatatggaaaccttccaagttcaagtgatagacaatggatttgggatggggagtgatgatgtagagaaagtgggaaatcgttatttcaccagtaaatgccactcggtacaggacttggagaatccaaggttttatggtttccgaggagaggccttggcaaatattgctgacatggccagtgctgtggaaatttcgtccaagaaaaacaggacaatgaaaacttttgtgaaactgtttcagagtggaaaagccctgaaagcttgtgaagctgatgtgactagagcaagcgctgggactactgtaacagtgtataacctattttaccagcttcctgtaaggaggaaatgcatgg

SEQ ID NO: 33167 - DNA, 122 bp, Homo sapiens
  MAP TO AC009559.2; EXPRESSED IN HBL100, SIGNAL = 4.7; EST_HUMAN HIT: AA015938.1, EVALUE 9.00e-63; NT HIT: U75361.1, EVALUE 1.00e-33; SWISSPROT HIT: P27715, EVALUE 1.00e-09
gctttttgtttttgtgccttgttttctcttcttgtctccaaggttgggtcccagtatacaaacttccacaaaggggcggaacattgctgtggtctgccagtttaggtcattaatagcaatca

SEQ ID NO: 33168 - DNA, 266 bp, Homo sapiens
  MAP TO AC009972.2; EXPRESSED IN HBL100, SIGNAL = 4.9; EST_HUMAN HIT: BF338139.1, EVALUE 9.60e-01; SWISSPROT HIT: Q57599, EVALUE 1.20e-01
atgaattaattgtcaattcttgcaccatgttggtgcaaacatggttaacaaacaagagattagatggactctcattcttctatatgaatgaatggggtggggggaatccaacaggaatctgtgaagaaatatggcataaaaaggaaaaaaagtattaccctaaagattcagagctatcttccaaaaatgattatgcacaaaaacaggggaaaatcagaaaaacgcttgatgtccataattgaatacaaaaagatatgacctctata

SEQ ID NO: 33169 - DNA, 140 bp, Homo sapiens
  MAP TO AC010082.2; EXPRESSED IN HBL100, SIGNAL = 0.97; EST_HUMAN HIT: T97948.1, EVALUE 7.30e+00; SWISSPROT HIT: P45608, EVALUE 5.10e+00
aagctttttgtattgcctgttttagatccttctgaagggcatttccctcaccacatccaattgatgaattgcctttttcacagaggtcaggttttgggatcaaggcaaagggaaagtggaggaaatctgggcctggataa

SEQ ID NO: 33170 - DNA, 95 bp, Homo sapiens
  MAP TO AL132719.1; EXPRESSED IN HBL100, SIGNAL = 1.3; NT HIT: AF043948.1, EVALUE 6.70e-01; EST_HUMAN HIT: T47785.1, EVALUE 2.00e-01; SWISSPROT HIT: P24522, EVALUE 5.40e+00
ggagttttgcaccccctgacctatactgttatttctaaacttcccaacatctctctcaggtgtatgatccatgttttggaggtgaagacaatgag

SEQ ID NO: 33171 - DNA, 101 bp, Homo sapiens
  MAP TO AF187000.1; EXPRESSED IN HBL100, SIGNAL = 0.93; NT HIT: X60206.1, EVALUE 1.80e-01; SWISSPROT HIT: P27998, EVALUE 5.30e+00; EST_HUMAN HIT: BF110726.1, EVALUE 1.30e+00
ctgacgagatttcagagggcgccctggccacgcctcttggcactctgtcaaatcaactttctccttatttctattcattgcagaaatgtgaaaattcaaag

SEQ ID NO: 33172 - DNA, 142 bp, Homo sapiens
  MAP TO AL049708.6; EXPRESSED IN HBL100, SIGNAL = 1.1; NT HIT: AE004673.1, EVALUE 8.10e-02
agggcactggggcgcttggtcctctcagacctctcaggattcagggcacagggtccttctgatgggatctgctgatgtaccctagaaaacaatgctaccgcaatgagctttctatgaaatctgtcagaagttccattatttc

SEQ ID NO: 33173 - DNA, 85 bp, Homo sapiens
  MAP TO AC008038.1; EXPRESSED IN HBL100, SIGNAL = 0.75; EST_HUMAN HIT: W04149.1, EVALUE 1.00e-34; NT HIT: gi8923389, EVALUE 6.00e-35
agtctagccagctgttctttgtagaatgcatcctgcttctttagcactcggtctttctcttccagctgcctagcctaaaaaaaga

SEQ ID NO: 33174 - DNA, 129 bp, Homo sapiens
  MAP TO AC011232.3; EXPRESSED IN HBL100, SIGNAL = 1.1; NT HIT: X72016.1, EVALUE 2.90e-01; EST_HUMAN HIT: AW470877.1, EVALUE 2.00e-48
gatctggcagccggtcagttagacagagtccacaagggagtcgctcaggaagttgacaagatggtagaagatgaagagggaatagaaatcgatcaagaagtgggagccacaaacggagttttgactatt

SEQ ID NO: 33175 - DNA, 121 bp, Homo sapiens
  MAP TO AE000660.1; EXPRESSED IN HBL100, SIGNAL = 1.1; NT HIT: M64350.1, EVALUE 5.00e-33; EST_HUMAN HIT: AW268496.1, EVALUE 2.00e-05; SWISSPROT HIT: P04437, EVALUE 3.10e+00
gcaaaaaagaacagctccctgcacatcacagccacccagactacagatgtaggaacctacttctgtgcagggcacagtgctccccaagcacctgctgcctgtctccaaatcttgccctggg

SEQ ID NO: 33176 - DNA, 114 bp, Homo sapiens
  MAP TO AC005043.2; EXPRESSED IN HBL100, SIGNAL =   1; SWISSPROT HIT: O51680, EVALUE 6.90e+00; EST_HUMAN HIT: T76973.1, EVALUE 3.70e-01; NT HIT: J03890.1, EVALUE 2.50e-01
ggggctcagccagctccctccagcatcatgcttgcactctcctccctgtttgagaggacagcggggcttgccccacccctttctgccattgaagtcctggtggtaggccatagt

SEQ ID NO: 33177 - DNA, 258 bp, Homo sapiens
  MAP TO AL049563.4; EXPRESSED IN HBL100, SIGNAL = 0.75; SWISSPROT HIT: P13983, EVALUE 2.70e-01; EST_HUMAN HIT: AV727554.1, EVALUE 0.00e+00; NT HIT: AB030151.1, EVALUE 5.30e-01
atacttttccgaatgctgattcttcatctgtccctcatggagcagtctattatccagtaatgtcagatccctatgggcagccacctttgccaggttttgactcctgccttccggttgtgccagattattcctgtgttcccccctggcatccagttggtacagcatatggtggttcttctcaaattcatggtgctataaatcctgggccaattggctgtattgctccatctcccccagcttctcattatgtacctcagg

SEQ ID NO: 33178 - DNA, 136 bp, Homo sapiens
  MAP TO AL049593.4; EXPRESSED IN HBL100, SIGNAL = 1.2; EST_HUMAN HIT: AA424272.1, EVALUE 3.10e-01; NT HIT: X54257.1, EVALUE 3.00e-01
cattctaactctttggtcaaatccccctcttgagataaacttgagagagaagtctacaaagaccaagttcacccagctgcagcagaacctgttccaagtcaccagcactcccagacccaggattccctccaaattc

SEQ ID NO: 33179 - DNA, 104 bp, Homo sapiens
  MAP TO AC008126.9; EXPRESSED IN HBL100, SIGNAL = 0.95; NT HIT: AF009512.1, EVALUE 8.80e-01
accgtgtttgcattgaacatcaacatgaatattctgatacttttcaggatgaacgccacctttttcctaagtattgcagcatttctttcaataaaattggtttt

SEQ ID NO: 33180 - DNA, 142 bp, Homo sapiens
  MAP TO AC008280.2; EXPRESSED IN HBL100, SIGNAL = 0.98; EST_HUMAN HIT: AA703574.1, EVALUE 4.80e-01; SWISSPROT HIT: Q9ZCW4, EVALUE 8.80e+00
gtaagaaaaaaatatgaagatgtagcaaatataaaaattgctatgatggctgacactgttgttggtgatcttgctctgcttataggaacacagacattttacttagacttaactttcagaaattcaacctttagagtctcaa

SEQ ID NO: 33181 - DNA, 240 bp, Homo sapiens
  MAP TO AC009232.1; EXPRESSED IN HBL100, SIGNAL = 5.5; NT HIT: gi11419255, EVALUE 3.70e-02; SWISSPROT HIT: P78007, EVALUE 1.50e+00; EST_HUMAN HIT: BF575387.1, EVALUE 5.50e-02
cttgggaatacttttgcaggtctcccaatgaaagactatagcaaaggagtggcagtggagatggaggaaaaacagatggagaaagattttgctggaaaaatgattgagaagtttatagggactgaggaaaagaggattcaggaaagacacctagttttctgcttcacgcaactgatgatggtgaagctgtcctctgagttaaagaatgggcagatggggacaaggaccattgatggcttc

SEQ ID NO: 33182 - DNA, 93 bp, Homo sapiens
  MAP TO AC010985.1; EXPRESSED IN HBL100, SIGNAL = 1.4; NT HIT: gi11436694, EVALUE 7.70e-01
atgttgtttttaacagaatctttcagttcaaaaatgttctctacttgaggcttaagtaattgtttcatgtcatcatcagtatatatttttaac

SEQ ID NO: 33183 - DNA, 170 bp, Homo sapiens
  MAP TO AL109750.5; EXPRESSED IN HBL100, SIGNAL = 1.5; NT HIT: M22486.1, EVALUE 6.00e-12; EST_HUMAN HIT: AA584902.1, EVALUE 1.00e-08; SWISSPROT HIT: P14688, EVALUE 3.80e+00
gtgttatccctctctgtcacttctactttccttataagggcaccaatcatattaaattaaaggatcacattactccgtactatcgcatcttaactaattacatctgcaatgaccatatttccaaataagattacattcttactttctagaaaggacatgattttcaggga

SEQ ID NO: 33184 - DNA, 269 bp, Homo sapiens
  MAP TO AC012073.1; EXPRESSED IN HELA, SIGNAL = 1.2; NT HIT: AB011083.1, EVALUE 0.00e+00; EST_HUMAN HIT: AA446922.1, EVALUE 0.00e+00; SWISSPROT HIT: P21932, EVALUE 3.00e-37
tcgtgctcccgaaaacgcttgtggtcgtattcatcaaagacgggacgccaggcatagaggttgatggtggccacggcgcctgcgacgagcagcatgagcgtgagcttcaccatgtggctgacctgcaccagcatgatggtggcgatgagggacagcacggccacatagttgtaatacttggggttctccaggcagctgccctccgtttccatccctgccgttgcattgctgggtcccgtgtagtactggagacagctgagctggaggcc

SEQ ID NO: 33185 - DNA, 112 bp, Homo sapiens
  MAP TO AC011561.2; EXPRESSED IN HELA, SIGNAL = 1.1; NT HIT: U72145.1, EVALUE 2.10e-01; EST_HUMAN HIT: BF214492.1, EVALUE 3.60e-01
accccagccctggtggagcttaaaacctcacaggtattagatgagcatgagataaataattctacgagccatgaaagtcatgaaagggagaatgcaacagcacaacaaaaag

SEQ ID NO: 33186 - DNA, 88 bp, Homo sapiens
  MAP TO AC010721.1; EXPRESSED IN HELA, SIGNAL = 1.3; NT HIT: AF208066.1, EVALUE 1.50e-01; EST_HUMAN HIT: N73600.1, EVALUE 2.70e-01; SWISSPROT HIT: P26890, EVALUE 5.40e+00
cagacatctgccaagcatgttcttattcctattccacaacaatatactatgtaaaggaaaattcattgtcttctattttggatgaaaa

SEQ ID NO: 33187 - DNA, 146 bp, Homo sapiens
  MAP TO AC009958.1; EXPRESSED IN HELA, SIGNAL = 1.4; SWISSPROT HIT: P10105, EVALUE 8.70e+00; NT HIT: AF065133.1, EVALUE 7.20e-02
ctgcacgttctcctgtgagcagaaaactcaccaggaccctgcacagcccgagggcctcaaacgcagcctccctaggagctcagcctctcagtgcagcaccagcaactgcagcgcccagagatggagtccacagcagatgggctcag

SEQ ID NO: 33188 - DNA, 96 bp, Homo sapiens
  MAP TO AL035414.18; EXPRESSED IN HELA, SIGNAL = 0.93; NT HIT: X06212.1, EVALUE 4.40e-02; EST_HUMAN HIT: BE162149.1, EVALUE 3.20e+00; SWISSPROT HIT: P98181, EVALUE 1.80e+00
aagaccagcacgatcagacacacacctttcttctcattccatacaccaccctgcagtaccaccgtgactgctaccatcccgcgagcaccttgcctt

SEQ ID NO: 33189 - DNA, 170 bp, Homo sapiens
  MAP TO Z82214.22; EXPRESSED IN HELA, SIGNAL = 0.6; EST_HUMAN HIT: F00674.1, EVALUE 2.30e+00; SWISSPROT HIT: O84859, EVALUE 1.30e+00
ccccgagccccagccagtgactctccaccactgtccacccacatgccgcagaaaggagcaggggctgcagagccacagcctggggctggagtcccggctgcgtcacaagcagtggcgctcacttcctctccctcagctgtgcatgaggggcggcagcgggtacttctcat

SEQ ID NO: 33190 - DNA, 150 bp, Homo sapiens
  MAP TO AC011376.1; EXPRESSED IN HELA, SIGNAL = 1.1; NT HIT: X52633.1, EVALUE 1.30e+00; EST_HUMAN HIT: AA341536.1, EVALUE 2.00e-79
ctgaaccaattctctgtatgcagatttagcaaggttataaggtaccaaaagattagacccaagaaaatagagaacttccaatccagtaaaaatcatagcaaatttattgatgataacaattgtctccaaaggaacaaggcagagtcgtgc

SEQ ID NO: 33191 - DNA, 156 bp, Homo sapiens
  MAP TO AL078638.6; EXPRESSED IN HELA, SIGNAL = 1.1; EST_HUMAN HIT: AW962813.1, EVALUE 1.00e-65; SWISSPROT HIT: P53049, EVALUE 5.10e-02
cagctattctccgttgttcttctttctcttttcgctccttcagctttctctgtctttcctccatctgtttttcatattggagcttggtctttctttctttttcaagtagttgtgtttctttattggctgaaatattccaaatacattttcaaggtg

SEQ ID NO: 33192 - DNA, 135 bp, Homo sapiens
  MAP TO AL109759.1; EXPRESSED IN HELA, SIGNAL = 0.96; NT HIT: AE001237.1, EVALUE 2.60e-01; SWISSPROT HIT: O02769, EVALUE 7.00e+00; EST_HUMAN HIT: AA157467.1, EVALUE 7.00e-33
actcatttcttctgcagttattctcattttacattccttggtcttgtagattctatccacaattatagctccattcttctgaatagctatccctgtgtctgcattgtttattctgttcagtaattcctgtaatgt

SEQ ID NO: 33193 - DNA, 196 bp, Homo sapiens
  MAP TO AC007363.3; EXPRESSED IN HELA, SIGNAL = 0.82; EST_HUMAN HIT: BE612554.1, EVALUE 2.00e-99; NT HIT: U94178.1, EVALUE 1.80e+00
tgacccatctcctggctcctgtggcccactgattgtggtctggggatgctggtggtagaagcagcagaaggggatggccttggcaaggtggtgggggtggccacagctacagtgacagccagaagctgcatcagagtgaccggctgtgcagttgtccctggaataggtggcctctgataggcttttgtggtctcac

SEQ ID NO: 33194 - DNA, 402 bp, Homo sapiens; identical to SEQ ID NO: 16727
  MAP TO AL035079.14; EXPRESSED IN HELA, SIGNAL = 0.94; NT HIT: Y10196.1, EVALUE 1.00e-18; SWISSPROT HIT: Q41607, EVALUE 1.30e+00; EST_HUMAN HIT: BE157313.1, EVALUE 9.40e-02

SEQ ID NO: 33195 - DNA, 190 bp, Homo sapiens
  MAP TO AP000036.1; EXPRESSED IN HELA, SIGNAL = 0.96; NT HIT: U37056.1, EVALUE 9.60e-02; SWISSPROT HIT: P14859, EVALUE 1.30e+00
ttctttttcacatttttgccctcaactttaagagcatttgcaaaccaagagagctcgtctattttttcattcatgttgttgagaagcttctcagggaaatatctctctacacttttgcagccctttctaataaggatgttcaaagtctgcagataagagttcatgatgtccagtttttgagtgggaaaga

SEQ ID NO: 33196 - DNA, 181 bp, Homo sapiens; identical to SEQ ID NO: 21377
  MAP TO AP000042.1; EXPRESSED IN HELA, SIGNAL = 0.94; NT HIT: AL161590.2, EVALUE 1.70e+00; SWISSPROT HIT: P48099, EVALUE 1.70e+00; EST_HUMAN HIT: N71175.1, EVALUE 9.80e+00

SEQ ID NO: 33197 - DNA, 137 bp, Homo sapiens
  MAP TO AC007721.10; EXPRESSED IN HELA, SIGNAL = 1.9; NT HIT: gi11140810, EVALUE 1.00e-71; SWISSPROT HIT: P40739, EVALUE 1.70e+00; EST_HUMAN HIT: AA361163.1, EVALUE 2.00e-71
cacacctgtgccatttctgggactctgattgatccagctgtggacattggaaggcgaaggaagggaggtggctcctgggtcatctttcacaaggctcaagacttcaacctgcagatgtatctttttccctccagttt

SEQ ID NO: 33198 - DNA, 86 bp, Homo sapiens
  MAP TO AC012106.1; EXPRESSED IN HELA, SIGNAL = 4.3; NT HIT: AF000580.1, EVALUE 3.80e-02; EST_HUMAN HIT: BE163247.1, EVALUE 7.10e-01
ccctttactttgatgctcagacacaccttcagatccttactacgattctccagattgatcataaaattttgaaatctattgcattc

SEQ ID NO: 33199 - DNA, 134 bp, Homo sapiens
  MAP TO AL049647.7; EXPRESSED IN HELA, SIGNAL = 3.9; NT HIT: gi11431313, EVALUE 7.60e-02; EST_HUMAN HIT: AW368072.1, EVALUE 7.70e-02; SWISSPROT HIT: P54643, EVALUE 1.80e+00
ttgctgtttattgagtaagctttgtcagtctgtgctaggtctgtttcacaatccactctccatctgccctggtcaaactcttctccattgtgtatctgcttcttatatatcaccagagacaatttctccctcag

SEQ ID NO: 33200 - DNA, 194 bp, Homo sapiens
  MAP TO AC007738.1; EXPRESSED IN HELA, SIGNAL = 1.1; SWISSPROT HIT: P78820, EVALUE 3.30e-01; NT HIT: AJ242954.1, EVALUE 9.80e-02; EST_HUMAN HIT: AW869159.1, EVALUE 6.00e-59
atgggtagcagtgacttgaggtgatggttcaaaccattcacaggattttcccagtaaattcttcaaagttttcacagatgaaacagttaaagcaccagagcatcgagctaaagtcactgcactgtctgcccaccaattgacatctatcagtgggtaaaaggactctttatctaagaagcgaaaaacaaatcaat

SEQ ID NO: 33201 - DNA, 148 bp, Homo sapiens
  MAP TO AF099810.1; EXPRESSED IN HELA, SIGNAL =   1; SWISSPROT HIT: P14728, EVALUE 1.70e+00; NT HIT: AF099810.1, EVALUE 3.00e-78; EST_HUMAN HIT: AA928546.1, EVALUE 8.60e-02
acctcttcaagcttaggcctgaaatcagcttcctgctgggatctgcctccctcaatttgcacaggggtctttgtaatgattgccatgagtagtgatctgggagaatgcctgatgttgttgtgtgcatgagtgtccatgaaggatgaat

SEQ ID NO: 33202 - DNA, 215 bp, Homo sapiens
  MAP TO AL009051.1; EXPRESSED IN HELA, SIGNAL =   1; EST_HUMAN HIT: H59840.1, EVALUE 4.90e-02; NT HIT: Z80345.1, EVALUE 1.30e-01; SWISSPROT HIT: Q61288, EVALUE 7.80e+00
ctggcatcatttcacccattcattcacccactgagtgtttactttgtgccaggcatattggacctcagggagcttacagtgaggagatcaacaaatttcccgcaatggaagtttggaaggaagcatagaacagagaaagcttgcaattctctgcaggaaccagggacgccttcacagaggagggaacatacaagctcagttttgaagtagatgtt

SEQ ID NO: 33203 - DNA, 2012 bp, Homo sapiens
  MAP TO AC004505.1; EXPRESSED IN HELA, SIGNAL =   1; NT HIT: AF207880.1, EVALUE 0.00e+00; EST_HUMAN HIT: H12950.1, EVALUE 0.00e+00; SWISSPROT HIT: P22265, EVALUE 1.00e-07
gggccagcagattccgatgccgacagtgcagcgcggcctatgacaccctagtcgagctgactgtgcacatgaatgaaacgggccactatcaagatgacaaccgcaaaaaggacaagctcagacccacgagctattcaaagcccaggaaaagggctttccaggatatggacaaagaggatgctcaaaaggttctgaaatgtatgttttgtggcgactccttcgattccctccaagatttgagcgtccacatgattaaaacaaaacattaccaaaaagtgcctttgaaggagccagtcccaaccatttcctcgaaaatggtcaccccggctaagaaacgcgtttttgatgtcaatcggccgtgttcccccgattcaaccacaggatcttttgcagattctttttcttctcagaagaacgccaacttgcagttgtcctccaacaaccgctatggctaccaaaatggagccagctacacctggcagtttgaggcctgcaagtcccagatcttaaagtgcatggagtgtgggagctcccatgacaccttgcagcagctcaccacccacatgatggtcacaggtcactttctcaaggtcaccagctctgcctccaagaaagggaagcagctggtattagacccgttagcagtggagaaaatgcagtcgttgtctgaggccccaaacagtgattctctggctcccaagccatccagtaactcagcatcagattgtacagcctctacaactgagttaaagaaagagagtaaaaaagaaaggccagaggaaaccagcaaggatgagaaagtcgtgaaaagcgaggactatgaagatcctctacaaaaacctttagaccctacaatcaaatatcaatacctaagggaggaagacttggaagatggctcaaagggtggaggggacattttgaaatctttggaaaatactgtcaccacagccatcaacaaagcccaaaacggggcccccagctggagtgcctaccccagcatccacgcagcctaccagctgtctgagggcaccaagccgcctttgcctatgggatcccaggtactgcagatccggcctaatctcaccaacaagctgaggcccattgcaccaaagtggaaagtgatgccactggtttctatgcccacacacctggccccttacactcaagtcaagaaagagtcagaagacaaagatgaagcggtgaaggagtgtgggaaagaaagtccccacgaagaggcctcatctttcagccacagtgagggcgattctttccgcaaaagtgaaacacctccagaagccaaaaagaccgagctgggtcccctgaaggaggaggagaagctgatgaaagagggcagcgagaaggagaaaccccagcccctggagcccacatctgctctgagcaatgggtgcgccctcgccaaccacgccccggccctgccatgcatcaacccactcagcgccctgcagtccgtcctgaacaatcacttgggcaaagccacggagcccttgcgctcaccttcctgctccagcccaagttcaagcacaatttccatgttccacaagtcgaatctcaatgtcatggacaagccggtcttgagtcctgcctccacaaggtcagccagcgtgtccaggcgctacctgtttgagaacagcgatcagcccattgacctgaccaagtccaaaagcaagaaagccgagtcctcgcaagcacaatcttgtatgtccccacctcagaagcacgctctgtctgacatcgccgacatggtcaaagtcctccccaaagccaccaccccaaagccagcctcctcctccagggtcccccccatgaagctggaaatggatgtcaggcgctttgaggatgtctccagtgaagtctcaactttgcataaaagaaaaggccggcagtccaactggaatcctcagcatcttctgattctacaagcccagtttgcctcgagcctcttccagacatcagagggcaaatacctgctgtctgatctggcccacaagagc

SEQ ID NO: 33204 - DNA, 88 bp, Homo sapiens
  MAP TO AC007597.2; EXPRESSED IN HELA, SIGNAL = 0.6; NT HIT: U92882.1, EVALUE 3.90e-02; EST_HUMAN HIT: AI224511.1, EVALUE 1.90e-01; SWISSPROT HIT: P48561, EVALUE 1.80e+00
gtctccaagacctgaggaggagaagatgcggatggaggtggtgaacaggatcgagagtgtaattaaggagctctggcccagcgctgac

SEQ ID NO: 33205 - DNA, 151 bp, Homo sapiens
  MAP TO AC010734.1; EXPRESSED IN HELA, SIGNAL = 3.2; EST_HUMAN HIT: R90929.1, EVALUE 8.00e+00; NT HIT: AJ277661.1, EVALUE 5.40e+00; SWISSPROT HIT: P31793, EVALUE 4.50e-01
acaatatacaggctgcagtttggacagggtcactatctttagagcaaagtgtgctgcctcccccagctacaagtcagctgtcctttcctcatctccctcaacctccagccccagggagaaatgcattagcaaaagccagagcaggcagggt

SEQ ID NO: 33206 - DNA, 239 bp, Homo sapiens
  MAP TO AL035469.7; EXPRESSED IN HELA, SIGNAL = 0.66; NT HIT: Y11204.1, EVALUE 2.30e+00; EST_HUMAN HIT: BF204360.1, EVALUE 3.00e-03
acacatttttggtacatatgaagagctcaataaacagctatttccacaaaagtttctaatatcaccgactccactatcaccactatcatcccatcgtcatggccattaccatcactcaccaccagaatcattatcatcatcatctccttcattttggatcatcaaggttgtctctagtcctgtttttactatttcttgttctacctcatctgtttccattaacagtaagaaaacaattc

SEQ ID NO: 33207 - DNA, 117 bp, Homo sapiens
  MAP TO AC007035.2; EXPRESSED IN HELA, SIGNAL = 1.1; EST_HUMAN HIT: BE095151.1, EVALUE 6.60e-02
tttttaactgcttattttctaaaataataaatgctttcttgtaaataaccttgagcttcacttggaaagtttcagtgtcgtggatcacaatatctgaaatgaaacacatcataaaaa

SEQ ID NO: 33208 - DNA, 156 bp, Homo sapiens
  MAP TO AL078591.17; EXPRESSED IN HELA, SIGNAL = 1.1; EST_HUMAN HIT: AU136559.1, EVALUE 9.00e-83; NT HIT: AB037832.1, EVALUE 5.00e-83; SWISSPROT HIT: O35857, EVALUE 3.90e+00
cctcaaagtatggtgctcttgtgctaataatattcttagttcttcgtgtagcgttataacttccagaaactgtccccataaagccatcaaaagtgagcaaagttgcgcaagattcatatttataagttctgccagttcatcaggattctctatttt

SEQ ID NO: 33209 - DNA, 410 bp, Homo sapiens
  MAP TO AC007253.2; EXPRESSED IN HELA, SIGNAL = 0.69; SWISSPROT HIT: P46504, EVALUE 4.00e-03; EST_HUMAN HIT: BE299720.1, EVALUE 1.00e-120
aaatatttaatgaaatgcaaagacttataaatgaagatccaggaagttggttgaatgccatttcaatttggaaaaatcttcttgaacttgatgcaaaaaaggaaaaactttctcagagagatgataaccaactaaaaagaaaagtgggagaaaatgaaatcattgcaaagaaattaaaaatagaacaaatgcaaaagatagaagagaatagggactgccagctggaaaaacaaataaaagaagaaactctggagcaaagagattttaccactaaaagcgaaaagtttcaagaagaagaatttcagaatgacatagagaaagcaattgatactcataatcagaatgacttgactttcagagtatcttgtcgctgcagtggaactattggaaaggccttcactgcacaggta

SEQ ID NO: 33210 - DNA, 350 bp, Homo sapiens
  MAP TO AC005973.2; EXPRESSED IN HELA, SIGNAL = 0.88; EST_HUMAN HIT: AA454168.1, EVALUE 2.20e-01; NT HIT: AF105999.1, EVALUE 1.00e-127; SWISSPROT HIT: Q04844, EVALUE 3.00e-22
gttccttattttcgtcatggtggtcgccacgctcattgtcatgaattgcgtcatcgtgctcaacgtgtcccagcggacgcccaccacccacgccatgtccccgcggctgcgccacgtaagcgcggagggggcggtgcagcccgggtcggggtggggcttcgtactaacctcgtcccctaagccccgcccctgccccaggttctcctggagctgctgccgcgcctcctgggctccccgccgccgcccgaggccccccgggccgcctcgcccccaaggcgggcgtcgtcggtgggcttattgctccgcgcggaggagctgatactgaaaaagccacggagcgagctcgtgtt

SEQ ID NO: 33211 - DNA, 180 bp, Homo sapiens
  MAP TO AC007386.3; EXPRESSED IN HELA, SIGNAL = 0.62; EST_HUMAN HIT: T09185.1, EVALUE 1.60e-01; NT HIT: AE000775.1, EVALUE 2.30e-02; SWISSPROT HIT: P14575, EVALUE 1.70e+00
aaggcaaaaatggagacccacaaaagtcatactctggccctggagaaagagtttaagagtttcacaaccaatacacatgtgggttacaatgtggttcttggaaatgagtatagacatggcattgctgtgacctatcatgtcttttcctttatgagtctgtcaaaatttcccatgacaaac

SEQ ID NO: 33212 - DNA, 117 bp, Homo sapiens
  MAP TO AC009444.1; EXPRESSED IN HELA, SIGNAL = 1.2; EST_HUMAN HIT: AV689822.1, EVALUE 5.90e+00; NT HIT: X15469.1, EVALUE 1.00e+00; SWISSPROT HIT: P16607, EVALUE 3.10e+00
  unsure 41
gtctcatccattctccagacttcaagtatttcctccatgangaagttctccaaaatctctttctctacctcttacttggcctttgactccaatgctacatatccaactgcctccaaa

SEQ ID NO: 33213 - DNA, 102 bp, Homo sapiens
  MAP TO AL118517.5; EXPRESSED IN HELA, SIGNAL = 3.9; NT HIT: AJ297357.1, EVALUE 2.90e+00; EST_HUMAN HIT: AW856840.1, EVALUE 8.80e-01
tcaatgaaccattgtcatatttcctttttgtgaggtagcaaggtattacttttgtgttcatcatgtctatcagtgttcccagtatcatgataaatggcaaac

SEQ ID NO: 33214 - DNA, 250 bp, Homo sapiens
  MAP TO AC007432.7; EXPRESSED IN HELA, SIGNAL = 1.8; NT HIT: AE002142.1, EVALUE 2.40e+00; EST_HUMAN HIT: BE064970.1, EVALUE 1.00e-02
atattatcttgttaacttagtacaattcaacaaagagtcaggtaaaccagtcaatgtggtgaaaagcatgcttgttcttttctgcttagatgtggcccatagcaatgatcatcatcatcttcatcatcatcataattatcaccagcattcagagagtctagaatttttaaaaatatttttcttgttggtcctgtgctttctttccgctgatctgatacttttaaatattataatatctcatgtatataaa

SEQ ID NO: 33215 - DNA, 125 bp, Homo sapiens
  MAP TO AJ239323.2; EXPRESSED IN HELA, SIGNAL = 1.8; EST_HUMAN HIT: W27088.1, EVALUE 4.10e-01
atcatcaccattgaagtacaaccctgtgtgagtgatggagggcatgcttatttcaggctcttttacttcttcaccaagtgattttaggcacatgacttgacctttctggacctcagtaacctcat

SEQ ID NO: 33216 - DNA, 162 bp, Homo sapiens
  MAP TO AC009310.1; EXPRESSED IN HELA, SIGNAL = 1.4; SWISSPROT HIT: P34431, EVALUE 3.80e+00; NT HIT: AL163213.2, EVALUE 8.00e-02
tatcatttgatcactcttccttccaaagccagcagtggcattgctgagaagctccatgatttcagctttgcttttaatgggcttctgcctaggtttgcctttaatggggccacccttttctctcatctctgtacaattcaaaccacatttgaaaggaccatt

SEQ ID NO: 33217 - DNA, 193 bp, Homo sapiens
  MAP TO AC010881.1; EXPRESSED IN HELA, SIGNAL = 4.3; NT HIT: AF158635.1, EVALUE 3.80e-01; SWISSPROT HIT: O82653, EVALUE 1.70e+00
tcctttaggatgtactttgtattgggataaccaagcttgtttctctttgtagcatcccttccctctcttttccccaggaaatagattgatactccaaacatattcacagattttgttgaacatgctatagaaatcactcagattcaaaacatcatgcttggtgtgtagttgatggatatgtaattctttgatt

SEQ ID NO: 33218 - DNA, 145 bp, Homo sapiens
  MAP TO AL121652.1; EXPRESSED IN HELA, SIGNAL = 1.5; NT HIT: AF131205.1, EVALUE 1.10e+00; EST_HUMAN HIT: AW884409.1, EVALUE 3.30e-01
gctaaataaagctcatcctctctgtgatattgctcattctcagttctctctaagcagaactctactggctctgctttatctcctcttccacttaatgctggtatgtccatctgatctaactccccctttgttcctactccttata

SEQ ID NO: 33219 - DNA, 94 bp, Homo sapiens
  MAP TO AC007006.3; EXPRESSED IN HELA, SIGNAL = 1.4; SWISSPROT HIT: P08548, EVALUE 7.10e-02; EST_HUMAN HIT: AA521106.1, EVALUE 1.00e-06; NT HIT: L77569.1, EVALUE 7.00e-04
ataaaaatcattaacagacaaatagaaggaaacttcctcaattctataaagaatatccaggaaaaacccacagttaacatcataattaatggtg

SEQ ID NO: 33220 - DNA, 121 bp, Homo sapiens
  MAP TO AP000084.1; EXPRESSED IN HELA, SIGNAL = 0.94; NT HIT: L76979.1, EVALUE 5.80e-02; SWISSPROT HIT: P25407, EVALUE 9.00e+00; EST_HUMAN HIT: BE736102.1, EVALUE 3.90e-01
aagaggagagacaaagattgagctcgacccaggaaaggacggaatgtgcaaaggagtcagagacagagcatctcaggcagtaagagcaaaccaaaaaacaatcatgataaaaattcattat

SEQ ID NO: 33221 - DNA, 178 bp, Homo sapiens
  MAP TO AL049775.2; EXPRESSED IN HELA, SIGNAL = 0.95; NT HIT: AB025922.1, EVALUE 8.90e-02; SWISSPROT HIT: O00305, EVALUE 3.80e+00
atcatctgaaggtcgttctttgactcgttcatttgtgttacaaacagatcttgaatgcctgccacgtatggctgtaggctctggggaaataacggtgagcgaaagcagaccagcctgtctgcctagagcttacagagaagcaggacagaggttaggagcaggccctgcagcccattcc

SEQ ID NO: 33222 - DNA, 155 bp, Homo sapiens
  MAP TO AP000035.1; EXPRESSED IN HELA, SIGNAL = 0.71; NT HIT: U32763.1, EVALUE 3.00e-01; SWISSPROT HIT: P01785, EVALUE 5.10e-02; EST_HUMAN HIT: AW961430.1, EVALUE 2.10e+00
cctttgcctaagagcaccagacatagccatttgtcctttggttcacacccagttgtgcctgggcactctctcccatcaactggctctgcccttacccagctcaacaacttggaggaaaagggtagccctcctcctacacagctgaggaacctgag

SEQ ID NO: 33223 - DNA, 180 bp, Homo sapiens
  MAP TO AL022319.2; EXPRESSED IN HELA, SIGNAL = 0.98; NT HIT: AJ132366.1, EVALUE 9.00e-02; EST_HUMAN HIT: W92074.1, EVALUE 4.30e-01; SWISSPROT HIT: O83148, EVALUE 1.70e+00
taccacagaattaagacagttcaagaaacttacattgctatcttcaccagaaattccatttttcttccatcctctcatcttttaaaactcaattcaagtatcactttctctttaaagcttgccctgacccttttctttcctcaccctatcctattattgtctatcttcacatgtcctgtt

SEQ ID NO: 33224 - DNA, 151 bp, Homo sapiens
  MAP TO AJ011929.1; EXPRESSED IN HELA, SIGNAL = 2.8; EST_HUMAN HIT: BF349004.1, EVALUE 9.00e-80; SWISSPROT HIT: Q9Y5Z0, EVALUE 6.00e-24; NT HIT: AF200342.1, EVALUE 6.00e-80
atgggggccggcctgaattatgaatgttaccgattcggcatttccccatccacaaatgcgctggtgatcggtgccacggtgatggagggcttctacgtcatcttcgacagagcccagaagagggtgggcttcgcagcgagcccctgtgcag

SEQ ID NO: 33225 - DNA, 186 bp, Homo sapiens
  MAP TO AL049744.7; EXPRESSED IN HELA, SIGNAL = 0.67; SWISSPROT HIT: P41343, EVALUE 1.70e+00; EST_HUMAN HIT: AV735926.1, EVALUE 1.60e-01
gtatcaacggttgtacttatgtgaaatcgtgggcattgagaaagatttggagaaaccagaaattttgtatattgctaatgaaaacgaacattggtacaattactttaaagaactctgtagcggaatctaccaaatttgaaaatatccacatgttgcagtctgtcagttctattcctaggtatatac

SEQ ID NO: 33226 - DNA, 145 bp, Homo sapiens
  MAP TO AC007464.2; EXPRESSED IN HELA, SIGNAL = 0.79; SWISSPROT HIT: P44573, EVALUE 3.00e+00; NT HIT: U65949.1, EVALUE 2.80e-01; EST_HUMAN HIT: AW013995.1, EVALUE 1.30e+00
agcacaatatggctgggaacatgttgggcctgctgaaaaggagaaggactgttccccaaaagagctgcaagcccttaccaacatgtatcagcaggagctgggagagtggagcctgaaggcctgggatcaaggtcaaggtgagaca

SEQ ID NO: 33227 - DNA, 108 bp, Homo sapiens
  MAP TO AC007429.11; EXPRESSED IN HELA, SIGNAL = 1.1; EST_HUMAN HIT: BE072335.1, EVALUE 3.00e-07; SWISSPROT HIT: O79672, EVALUE 6.90e+00; NT HIT: AF272148.1, EVALUE 9.20e-01
tcaaaatataaatgggaaattccagaaatagaccactgataagttttaagttgagcaccgttctgaggagcgtgatgaaacctcacagcagcccgctccatcctgccc

SEQ ID NO: 33228 - DNA, 343 bp, Homo sapiens
  MAP TO AL079306.2; EXPRESSED IN HELA, SIGNAL = 4.1; NT HIT: AE001119.1, EVALUE 7.20e-01; SWISSPROT HIT: Q11082, EVALUE 4.40e-01
aacatccagagtctgtcagtgaaaaaaaaaaaactccattaataccattaatcacaagaacagaagaatgctcatgaatatctccccctcatctttaatttttattctaacagccatctaccacgtacctggcaagatacaaaagaaaaaaaacagacacacttattccttgcactatcaactcacaatatttgaggacactaaaacagtggtgagtataatttacaacctcacctccaataccaccccaagtagagaagtccataatcttcccatatttctgcccattgccaccaaccttcagataacacttataagtgaatccactgtttctggtaaatca

SEQ ID NO: 33229 - DNA, 691 bp, Homo sapiens
  MAP TO AL031775.1; EXPRESSED IN HELA, SIGNAL = 1.9; SWISSPROT HIT: P18004, EVALUE 7.00e-01; NT HIT: AF201687.1, EVALUE 3.00e-45; EST_HUMAN HIT: AV717253.1, EVALUE 5.00e-45
taggtgccctagagggttttttgtttttggtatgttgtgggatttccttcatttaggtagctgaaaatgaaatggtatacttggtatttgtcataaattgatgtttttcattaggtacagcccagatgtgatatttctacaggaagttattcccccatattatagctacctaaagaagagatcaagtaattatgagattattacaggtaacaatttttgttattcaacttgtcttttctttgaaaaacagatcagtgaaagagataaatcaaagttggtctattgggacatagagaggaaaaagcacaaataaataagtttgagaaaaataagcaagacacagaatactacaagaattataggagaatattttatacaacttaatattaatagtgtgaaaaggaaatggatgatttttcaggaaaatataaattactaaaatttgagaaacaacacctttttggtgaaattcagttgttaaaagttttaactgaaataatcacattgtggttattatgctttttcaaaaagtctttattttataattccttatttattttgttgttctttttgtactttttttgccctgagtaatttagtttttaaattttccatctaatttgtttttgctaaatatatttaaaatactactttggccacatctcgtgattttcatatacagtctttcctt

SEQ ID NO: 33230 - DNA, 120 bp, Homo sapiens
  MAP TO AC006390.8; EXPRESSED IN HELA, SIGNAL = 1.1; NT HIT: AF090322.1, EVALUE 2.30e-01; EST_HUMAN HIT: AI971858.1, EVALUE 2.70e-01
gtggagcacaaggaagagaaaatgatcatagacagaagcagcgatgtgataacaaacatcagtatcaacagggaagaggactgtgggtttcagctgagtaaggtgggtcttggctactgt

SEQ ID NO: 33231 - DNA, 95 bp, Homo sapiens
  MAP TO AC007450.1; EXPRESSED IN HELA, SIGNAL = 1.3; NT HIT: D10006.1, EVALUE 4.30e-02
ctgaaaacaagctccaggattgtctctaaagtagtattcacatagaacaaacatgtcatttctatatggcacaccttacggggcttcatctgaca

SEQ ID NO: 33232 - DNA, 437 bp, Homo sapiens
  MAP TO AC009236.1; EXPRESSED IN HELA, SIGNAL = 0.85; EST_HUMAN HIT: BF345483.1, EVALUE 4.10e-01; NT HIT: AF267996.1, EVALUE 1.10e+00
aatctcaaattgtgaaaaaagaaggctccgcatacgctgtctccatttcatgacttgcacatctccttccacattgagtggagctgctttcagtacaatgaccactaatgttgcggttctaatcctgggacccttcctgagtcctcactggctctgctgtatttgttcctgtcacccaccagcttccaattcacctccacctcctcccaggccatcttttcctagtccacctcctcccagtttaccccctcccaatccaccatctcctcctccctgtccacctccacctcctctcagttcacctctgcctcctcccagctcaccttctcctcctcccagtccaccctcacctcttccgagtccaccttttcctcctcctagtctacctcctcccaattcacctcctctcaatccaccttctcctcccaatccacctc

SEQ ID NO: 33233 - DNA, 130 bp, Homo sapiens
  MAP TO AL035667.12; EXPRESSED IN HELA, SIGNAL = 0.68; NT HIT: AJ271735.1, EVALUE 2.00e-05; EST_HUMAN HIT: AU117106.1, EVALUE 1.00e-07; SWISSPROT HIT: P08548, EVALUE 2.00e-04
ataaagaaaatgcaaatcaaaagcacaatgagatactacttcacacctattagaatagctgtaatcaaaagacagacaataacaagatttggtgaggatgtggggaaattggagctcacatacactgcag

SEQ ID NO: 33234 - DNA, 106 bp, Homo sapiens
  MAP TO AL034395.6; EXPRESSED IN HELA, SIGNAL = 1.5; EST_HUMAN HIT: AA017203.1, EVALUE 1.30e+00; NT HIT: L78833.1, EVALUE 7.70e-01; SWISSPROT HIT: O83057, EVALUE 4.10e+00
gggagtggagattgctagtacataaaagttttccaagagatctgagtcgtttgcagttaggtaccaaaccacacaatcctgtagatagatcatagcagtgaaaggc

SEQ ID NO: 33235 - DNA, 84 bp, Homo sapiens
  MAP TO AF108083.1; EXPRESSED IN HELA, SIGNAL = 2.3; SWISSPROT HIT: P56999, EVALUE 9.60e+00; NT HIT: U12024.1, EVALUE 2.30e+00; EST_HUMAN HIT: AA203406.1, EVALUE 4.00e+00
atgcttcatatgcgtgtgatgtggaactggctttttgatgactgggatgttcacttgctgaagaggcccattactcaggtcatg

SEQ ID NO: 33236 - DNA, 172 bp, Homo sapiens
  MAP TO AL035072.7; EXPRESSED IN HELA, SIGNAL = 2.1; EST_HUMAN HIT: AA442445.1, EVALUE 7.00e-06; SWISSPROT HIT: P10227, EVALUE 4.40e-01; NT HIT: M26434.1, EVALUE 2.00e-03
acgaagaaattaaggcagacagagtaagggaccttgcccaggatcacacagctagtgaaaggcagagtcaggatttgaacccaggctcatctgaatccagaggccaggatcttacctactgtgctgtttggccttggaaagctgccttgggtaatttgttaggcaaaaacag

SEQ ID NO: 33237 - DNA, 106 bp, Homo sapiens
  MAP TO AL109622.10; EXPRESSED IN HELA, SIGNAL =  32; EST_HUMAN HIT: AA084052.1, EVALUE 2.00e-05; SWISSPROT HIT: P11369, EVALUE 1.10e+00
ctttttggatagctattatcagaaagataatacaacaagtctcgatgaggttttggagaaaagcaaagtgttgtacgctgttggtgggaatgtgaacgcatattac

SEQ ID NO: 33238 - DNA, 104 bp, Homo sapiens
  MAP TO AC006328.3; EXPRESSED IN HELA, SIGNAL = 0.61; NT HIT: AL163218.2, EVALUE 3.50e+00; EST_HUMAN HIT: AA677549.1, EVALUE 1.30e+00
agcaaactgtggcaaaacatgaacttacttctcaggaaattaaccattatgttggcaatcactgtgattatttgaacagcagcatctggacaaatttagtcaca

SEQ ID NO: 33239 - DNA, 75 bp, Homo sapiens
  MAP TO AL078600.14; EXPRESSED IN HELA, SIGNAL = 2.7; NT HIT: AL163300.2, EVALUE 1.00e-07; SWISSPROT HIT: P28328, EVALUE 5.50e+00; EST_HUMAN HIT: BE254700.1, EVALUE 3.00e-13
cttggttattcaagctgaaggtggcctggtattcaatctgtgaggtgggagcccgttggcaggaatccctctagc

SEQ ID NO: 33240 - DNA, 151 bp, Homo sapiens
  MAP TO AC011003.1; EXPRESSED IN HELA, SIGNAL =  12; NT HIT: AF219927.1, EVALUE 4.00e-28; EST_HUMAN HIT: AA703466.1, EVALUE 3.00e-20; SWISSPROT HIT: P75384, EVALUE 3.00e+00
tcatctttcatttcctgtatcattttattgtattcttcagattccttgcattgggtttcaactttctcctgaatgtcaattatcttcattcctatccatattctgaattctgtttctgccatttcatccatttgagcctggttaagaatca

SEQ ID NO: 33241 - DNA, 187 bp, Homo sapiens
  MAP TO AL034384.1; EXPRESSED IN HELA, SIGNAL = 0.9; NT HIT: AF005640.1, EVALUE 7.00e-03; EST_HUMAN HIT: H14974.1, EVALUE 2.80e-02; SWISSPROT HIT: P05532, EVALUE 1.70e+00
acctttggaactttccctggagaaagtgggaagccaccatattttcaagcaaggaagatggtcagagcagtgttgtggaaaggtttctctaccacagtatggaggacaaatgggaaagccaagactggaggcaggggaagccccctgggaggtggctgtggcaggagtccagggaagagatgatgag

SEQ ID NO: 33242 - DNA, 119 bp, Homo sapiens
  MAP TO AL096865.7; EXPRESSED IN HELA, SIGNAL = 1.1; SWISSPROT HIT: Q63046, EVALUE 6.00e-14; EST_HUMAN HIT: BF058528.1, EVALUE 8.00e-61; NT HIT: AF001445.1, EVALUE 5.00e-61
cttgctacttggtttttcataacagcagaggcattccggagctcagcagaataattttcatcgttacccgccatgacagtaaccacagtcccatctggtacctctccgagggctaccac

SEQ ID NO: 33243 - DNA, 746 bp, Homo sapiens
  MAP TO AC005678.1; EXPRESSED IN HELA, SIGNAL = 1.3; NT HIT: gi7662109, EVALUE 0.00e+00; SWISSPROT HIT: O43309, EVALUE 0.00e+00; EST_HUMAN HIT: AU124164.1, EVALUE 2.00e-04
agttataaacaaaggcttttccacactcgttgcactcatacggcttggcgccggtatgaactccttgatgctgagtaagtatggaacgccgactaaaacttttattacactgagtgcactgataaggtttgtctcttgtgtggatcttgatatggtgaaagaggcctgctttctgactaaaggctttgccacagtcattacagtgatagtgtttttctcctgtgtgaagtctctgatgttggttaagagctgaccaccggccaaaggctttgccacattcattacacttatacggtttctctccagtgtgtattattttgtgtcgaataagcacagttctcccacggaaagcttttccacattcttcgcatttgtagggtctgtctccagtatggatcctctgatgttctatgaggtgtgagtgctgactaaaagcttttccacagtcatcacatccgtaagattcttctcctggacagattctctgatgttcagtatggtcagagttctcagtcaggcttactccattttcatcacaggtaggttgtttatcttctctggagcaagcagagggctcttctgttatttcttcaggttcacgagtttctccacacctagcagacttggacatatcattttcaaatttactggatgtcttcccatgtggttccatttcttcagaaacttcttgctttaaattcccatactcatttccagtctcaacatctaaaactaagaagggatca

SEQ ID NO: 33244 - DNA, 203 bp, Homo sapiens
  MAP TO AL049594.4; EXPRESSED IN HELA, SIGNAL = 0.63; EST_HUMAN HIT: BF237888.1, EVALUE 7.10e-01; NT HIT: AE000825.1, EVALUE 2.60e-02; SWISSPROT HIT: P21542, EVALUE 8.30e+00
actcctgcggcgggcattgccatgcgtcagggtgagctccggggcaggtggaggcagcaaaggcctctcaggaccgcggaagggcctcatcagccaccacatccccacctgcgggcgcgacggcctcatcatctcctccagaaagcaacactgtcagccacacatcaggaactgtcagcctcaaattcaacattcctcattct

SEQ ID NO: 33245 - DNA, 133 bp, Homo sapiens
  MAP TO AL031684.11; EXPRESSED IN HELA, SIGNAL = 0.6; NT HIT: AL163218.2, EVALUE 1.00e+00; EST_HUMAN HIT: AA916674.1, EVALUE 1.70e+00
agttattcaagttattccttacacgagtttgcttagaaataacagtgtaaccaaagtaatggttgccaagatgctcaatacggtcaatcaagcctatggttcagaaaagatatctgatttgacaacttttttg

SEQ ID NO: 33246 - DNA, 78 bp, Homo sapiens
  MAP TO AL121578.1; EXPRESSED IN HELA, SIGNAL =   1; EST_HUMAN HIT: AW014729.1, EVALUE 9.20e-01; NT HIT: D82918.1, EVALUE 1.30e-01
ctcaatatccaaaccactaccaagtccattcatttctttaattataatgtatctagaagccatcctctctcatctccc

SEQ ID NO: 33247 - DNA, 370 bp, Homo sapiens
  MAP TO AL031274.1; EXPRESSED IN HELA, SIGNAL = 1.8; SWISSPROT HIT: Q01740, EVALUE 1.00e-63; NT HIT: gi11423724, EVALUE 0.00e+00; EST_HUMAN HIT: H70270.1, EVALUE 0.00e+00
gactcagctgaaagagtttgtgctaaatgatgagctcccaggacgcatcatcactgggaaagtgttcatcaggccaagcataaaagaggtaaaggaaaactctgtcatatttaacaatacttcaaaggaagagcctattgacatcattgtctttgccactggatacacatttgctttccccttccttgatgagtctgtagtgaaagttgaagatggccaggcctcactgtacaagtatatcttccctgcacatctgcaaaagccaaccctggccattattggcctcatcaaacccttgggctccatgatacctacaggagaaacacaagctcggtgggctgttcgagtcctgaaaggtaagtataagaaa

SEQ ID NO: 33248 - DNA, 132 bp, Homo sapiens
  MAP TO AL049822.19; EXPRESSED IN HELA, SIGNAL =   1; SWISSPROT HIT: O78458, EVALUE 1.80e+00; EST_HUMAN HIT: AA333799.1, EVALUE 5.00e-47; NT HIT: gi7706703, EVALUE 1.00e-49
acctcccctttctggaacatcgttctctgtgccattgccatccttttctttgtggttatgatcatatccatggtttggagcagtcgctgttccagggctagaatatctgtgtcagtcacattcctgaggaaa

SEQ ID NO: 33249 - DNA, 214 bp, Homo sapiens
  MAP TO AC007498.2; EXPRESSED IN HELA, SIGNAL =  15; EST_HUMAN HIT: AU132405.1, EVALUE 1.00e-117; NT HIT: gi11430834, EVALUE 1.00e-117; SWISSPROT HIT: P39770, EVALUE 1.00e-15
acatctagtcacgcagagaaaatcatcaaagaagattctttggggatcctcttcccttttagagaccggggtaaatttaaaaacactgcttgtgacatttgtggcaaaacatttgcttgtcagagtgccttggacattcactatagaagtcataccaaagagagaccatttatttgcacagtttgcaatcgtggcttttccacaaagggtaatt

SEQ ID NO: 33250 - DNA, 190 bp, Homo sapiens
  MAP TO AC009224.1; EXPRESSED IN HELA, SIGNAL = 0.63; NT HIT: M96354.1, EVALUE 2.80e-02; SWISSPROT HIT: O15072, EVALUE 3.40e-01
cttatttgcacttttcttttttagcttgtgaaaattcatcacatttagaaactcagttatctcagcacatgcagaatcacattccatattcacatccaagccctgttcactatttatatttacaatgttgttcgaagttgtggtatttgctttactattttcatcactactttcatgcttcagttaacaa

SEQ ID NO: 33251 - DNA, 517 bp, Homo sapiens
  MAP TO AC011370.1; EXPRESSED IN HELA, SIGNAL =  24; NT HIT: gi7662177, EVALUE 0.00e+00; EST_HUMAN HIT: BE266599.1, EVALUE 0.00e+00; SWISSPROT HIT: Q07283, EVALUE 1.00e-03
atgggattactgtactaaccagcctccgaatatcccgctccgactcccacttgatcttcgagatggcttcttggtgggactgatgctcactccgaaggtccccagccttgattttatctgcttggatcatattgctcagagcctcgtccacctgcttcttggccgttttcaggtccgcaatttcctgtaagagcttaaggcgctctgtgtcaaacagtttccgggcctcctcccgggcctcaatggtgagcgctgtccttactttgtcactgctgccgtcgcggagagcacagagagcagacttgagcctctggatctctccatcacgtaccttcaccgtccttgacatttcctgctcgtgctgcttgataaggttctccctcacagcctgcagctccttcatcttctcctcatggagcttggctttgagttctgtcaccagcaccgtgtgcttgcgctgctccagctcacgaatcctcttcgcttcttgagtcttctctctttcaagctttgatac

SEQ ID NO: 33252 - DNA, 157 bp, Homo sapiens
  MAP TO Z95325.2; EXPRESSED IN HELA, SIGNAL = 0.61; EST_HUMAN HIT: AA811557.1, EVALUE 9.00e-06; NT HIT: U61297.1, EVALUE 1.00e-06
tccttactttcttgcactggatgttccagactcatcttgtatatttcctgctccagtcctggagtcagaaaccatttcttcaagttgtggttaggagaatttttgatctgctcaatcctaagaaagtgctaaaggtggccaaaaaagagggccagag

SEQ ID NO: 33253 - DNA, 133 bp, Homo sapiens
  MAP TO AC009483.2; EXPRESSED IN HELA, SIGNAL = 1.2; EST_HUMAN HIT: N38800.1, EVALUE 5.00e-04; NT HIT: L78833.1, EVALUE 3.00e-04; SWISSPROT HIT: P39188, EVALUE 3.00e+00
atgatgccaagactggacttagacttcaacacttgggctcaagttatccttcagtctcagcttcctaagtggctgagactaaagatacatagcactgagaccaggtttttcactctgaaattttttctcatag

SEQ ID NO: 33254 - DNA, 114 bp, Homo sapiens
  MAP TO AC008124.8; EXPRESSED IN HELA, SIGNAL = 1.2; NT HIT: AE001173.1, EVALUE 2.10e-01
aagtaccatctcagcctcaatggggggagtgacagatttattgggaactaaaaatgcatctgaaaattttatgtatctcatccctaaagtcagcatcttacttaatcgagaaat

SEQ ID NO: 33255 - DNA, 146 bp, Homo sapiens
  MAP TO AL049591.12; EXPRESSED IN HELA, SIGNAL = 0.68; NT HIT: gi6678616, EVALUE 2.80e-01; SWISSPROT HIT: P04372, EVALUE 6.70e+00; EST_HUMAN HIT: AW993730.1, EVALUE 4.90e-01
atggccaacagtttcactaaggatagaaaccaaagattctcacaaaggccaataagaagacacagacaaaacattcacgtcagaattgtttatggcatcaggaagatgaaggtaaccagaaagttcctcattagaaaagtggacag

SEQ ID NO: 33256 - DNA, 263 bp, Homo sapiens
  MAP TO AC009758.1; EXPRESSED IN HELA, SIGNAL = 9.2; EST_HUMAN HIT: AV732431.1, EVALUE 6.10e-02; SWISSPROT HIT: P23269, EVALUE 2.00e-07
ccaagagtcatgtcagcctccagtatcacctcaacacatccaacttccttcttgttgatggggattccaggcctggagcacctgcacatctggatctccatccccttctcagcatatacactggccctgcttggaaactgcaccctccttctcatcatccaggctgatgcagccctccatgagcccatatacctctttctggccatgttggcagccatcgacctggtcctttcctcctcagcattgcccaaaatgcttgccat

SEQ ID NO: 33257 - DNA, 115 bp, Homo sapiens
  MAP TO AL096793.8; EXPRESSED IN HELA, SIGNAL = 7.8; SWISSPROT HIT: P14266, EVALUE 3.10e+00; EST_HUMAN HIT: BE865837.1, EVALUE 3.70e-01
ctatcataagcaactgagtgaaattgagaaatattatgccacaataacaggtcaatttggattggtaaaagagaatcatgaaaagttagaacaaaatggtatgtgctatcttatt

SEQ ID NO: 33258 - DNA, 108 bp, Homo sapiens
  MAP TO AC002524.1; EXPRESSED IN HELA, SIGNAL = 1.7; EST_HUMAN HIT: AI823393.1, EVALUE 8.70e-02
ttggagaggattatgtttaaggaagtgaaggcagcttcttcccaacagccgggaactgagtccttcaatccaacaacctatgagacaataaattctgccaacagccat

SEQ ID NO: 33259 - DNA, 88 bp, Homo sapiens
  MAP TO AL135744.2; EXPRESSED IN HELA, SIGNAL = 1.7; NT HIT: gi11437455, EVALUE 1.00e-42; EST_HUMAN HIT: AA102259.1, EVALUE 4.00e-40
cttatcgatgtagatcttcatttcccgaatatgtggttccttaggcatcagagatgggtttttataggacacattagacttgcgagct

SEQ ID NO: 33260 - DNA, 151 bp, Homo sapiens
  MAP TO AC023202.2; EXPRESSED IN HELA, SIGNAL = 1.7; NT HIT: U07563.1, EVALUE 3.40e-01; SWISSPROT HIT: P41233, EVALUE 5.20e+00; EST_HUMAN HIT: AI498666.1, EVALUE 9.00e-80
aaataaaattcatagaggtcctgagaaatcaagaagtcatcctggatcacgaggtgtcaaccagcaatgccttgagcaccagtggtatcatcccagccctggatcttcctaccaaagcattaggtcatggcctaagcctttttatccttat

SEQ ID NO: 33261 - DNA, 97 bp, Homo sapiens
  MAP TO AC017067.2; EXPRESSED IN HELA, SIGNAL = 1.8; NT HIT: AJ235270.1, EVALUE 3.20e+00
atggtcttacaatatgtcaaccgtgaatatgattatgttatttttgtttttaaagcatgtgaatcttcttttgataaacacaatgtctacacttcag

SEQ ID NO: 33262 - DNA, 118 bp, Homo sapiens
  MAP TO AC012632.2; EXPRESSED IN HELA, SIGNAL = 1.6; SWISSPROT HIT: P26639, EVALUE 2.00e-15; NT HIT: gi4507366, EVALUE 2.00e-60; EST_HUMAN HIT: AU130240.1, EVALUE 3.00e-60
cttaaacattgccagtaaagtttctttcttaacttccagtctttcaaaagcttgtttttctttaatgattttcttacacaaagcctccagagaagagaaatcattgctagacacaccc

SEQ ID NO: 33263 - DNA, 149 bp, Homo sapiens
  MAP TO AC012632.2; EXPRESSED IN HELA, SIGNAL = 3.8; EST_HUMAN HIT: AI745065.1, EVALUE 8.00e-77; SWISSPROT HIT: P26639, EVALUE 9.00e-21; NT HIT: gi11417260, EVALUE 9.00e-79
ttaaaattcttcttctgcctgtttgctgcggaactctttgagctgctgtagccgctcgatagtttcagaaatggtgcgttccccgtggaccttattgtctcttgtgcggatattaacagtgccactgattttctctttttcaccaacaa

SEQ ID NO: 33264 - DNA, 157 bp, Homo sapiens
  MAP TO AC005137.1; EXPRESSED IN HELA, SIGNAL = 1.7; NT HIT: AF039699.1, EVALUE 4.00e-75; EST_HUMAN HIT: AI269960.1, EVALUE 2.00e-74
tgccgctccatctcctgctgctcctggaggatcttgttggactccatcgccagccgcttctgcatgagaagctcctgccgctgcagctcacgctgccgcgcctctgccagccgctcccggtctgtcatgaacagctcccggccctcatgggagaaaa

SEQ ID NO: 33265 - DNA, 212 bp, Homo sapiens; identical to SEQ ID NO: 18997
  MAP TO AL096700.14; EXPRESSED IN HELA, SIGNAL = 3.8; EST_HUMAN HIT: D44816.1, EVALUE 1.00e-116; NT HIT: gi11419957, EVALUE 1.00e-116; SWISSPROT HIT: P40421, EVALUE 8.00e-04

SEQ ID NO: 33266 - DNA, 116 bp, Homo sapiens
  MAP TO AC019219.2; EXPRESSED IN HELA, SIGNAL = 6.5; EST_HUMAN HIT: AW303317.1, EVALUE 1.00e-31; NT HIT: AL163209.2, EVALUE 3.00e-19
atgctgaatgcttcctgccatcgaatatcagactccaagttcttcagttttgagactggactggctctccttgctcttcagcttgcagacggcctgttgtggaaccttgtgatcat

SEQ ID NO: 33267 - DNA, 167 bp, Homo sapiens
  MAP TO AC012632.2; EXPRESSED IN HELA, SIGNAL = 2.2; EST_HUMAN HIT: AU142493.1, EVALUE 3.00e-89; NT HIT: gi11417260, EVALUE 2.00e-89; SWISSPROT HIT: P26639, EVALUE 2.00e-29
cagtgtcctgggcagttcatgggtttcagggcaaacagctccttctccacctcaaaggagaacatgttctcgctgtagtgctgccagtggcccgaggtcatccagagtcggctgttgaagatgtttggggtgactacctcctggaatcctcttttcctatattcgct

SEQ ID NO: 33268 - DNA, 243 bp, Homo sapiens
  MAP TO AL133262.2; EXPRESSED IN HELA, SIGNAL = 2.1; NT HIT: gi11067746, EVALUE 0.00e+00; EST_HUMAN HIT: BE140795.1, EVALUE 0.00e+00; SWISSPROT HIT: P31999, EVALUE 2.40e-01
ctttttcagctcttctttggagaacttttcataaggattatgttccagataggtaatgtgctctgaattattggtaccaaaccctacagttttgccttttttatttccagatggttcataagggtgatgtagaaggtcataatgaagcattgtgatcatttcttttttgattagttcttcacttttctgtaaatctgttaaaggcggttctacatttaagggtcttagaatagtttcatttac

SEQ ID NO: 33269 - DNA, 198 bp, Homo sapiens
  MAP TO AL121761.5; EXPRESSED IN HELA, SIGNAL = 7.7; SWISSPROT HIT: P23578, EVALUE 3.40e-01; NT HIT: X87344.1, EVALUE 7.30e+00; EST_HUMAN HIT: AA320338.1, EVALUE 2.00e-04
cttcccgttccccacccccacacactctgccttttgttccagttccagttaccatctggctgcaaccacatttgagactctgagccagaacaacccagccaagcccttcctgaattccagacactcagaaaccatggcaataataaaatgattattgttttaagccactgagtcttgcggtgactagttatatagcaa

SEQ ID NO: 33270 - DNA, 184 bp, Homo sapiens
  MAP TO Z86090.10; EXPRESSED IN HELA, SIGNAL = 2.2; NT HIT: AF143316.1, EVALUE 2.70e-02; EST_HUMAN HIT: AA573223.1, EVALUE 1.00e-05; SWISSPROT HIT: P08547, EVALUE 1.00e-09
gaaaaaaaaaaatctgcctatgtcaaggtctcaaagatttagtcccatgatttctcctataagttttatgcttttagtttgtatgtttaggtctacaaaccatttcaaattaatttttatgtatcatatgagactgggattgaggttcatttctttacatacaaatatccacttgttccagcaa

SEQ ID NO: 33271 - DNA, 432 bp, Homo sapiens
  MAP TO Z95114.19; EXPRESSED IN HELA, SIGNAL = 1.4; NT HIT: AJ012482.1, EVALUE 2.70e-01; EST_HUMAN HIT: BE393957.1, EVALUE 4.00e-01; SWISSPROT HIT: Q13067, EVALUE 2.90e-01
actggatgagggtgtttgcagactggatgagggtgtttgcagactggatgagggtgtttgctgtctggctatctctctctgttcctctatttctcatggactttctctcaacctacacacaggcccctctgattttagtcagccttgtgtgacccatgtcattcgtgggccctggctgctagatggggaccatgcctgcacttgggccaagccagatgtctacaagctttccctgagtgcctcacaggccactgggcactggggtcgcccagaaatgaccgaccagaagaacaagcagaaggggccatggaggcctagctccctgagtccctggaagaaggatcatgaggaagtgaagtcaggcaccgagagcccaggggagcccatccatcagcaccacaaaggcacaggcatagatcagtgttgcttgaa

SEQ ID NO: 33272 - DNA, 126 bp, Homo sapiens
  MAP TO AB016897.1; EXPRESSED IN HELA, SIGNAL = 5.2; NT HIT: AB011399.1, EVALUE 4.00e-65; EST_HUMAN HIT: AV732214.1, EVALUE 3.00e-14; SWISSPROT HIT: P15619, EVALUE 3.10e+00
agcaagttataatctttttgctggtgcaggggcttgcgtggatgttgatagccactgactgaccagggtggtggttgctgaaggtgagttaggttggctgtggcaactccctaaaatacaacaaat

SEQ ID NO: 33273 - DNA, 287 bp, Homo sapiens
  MAP TO AC007556.2; EXPRESSED IN HELA, SIGNAL = 1.3; NT HIT: gi11430460, EVALUE 0.00e+00; EST_HUMAN HIT: AW512157.1, EVALUE 1.00e+00; SWISSPROT HIT: P98164, EVALUE 5.00e-53
gaggattgaacgcagcactctgacgggcgtggatcgtgaagtcattgtcaatgcagccgttcatgcttttggcttgactctctatggccagtatatttactggactgacttgtacacacaaagaatttaccgagctaacaaatatgacgggtcaggtcagattgcaatgaccacaaatttgctctcccagcccaggggaatcaacactgttgtgaagaaccagaaacaacagtgtaacaatccttgtgaacagtttaatgggggctgcagccatatctgtgcaccag

SEQ ID NO: 33274 - DNA, 112 bp, Homo sapiens; identical to SEQ ID NO: 26502
  MAP TO AC005300.10; EXPRESSED IN HELA, SIGNAL = 1.5; EST_HUMAN HIT: H23396.1, EVALUE 7.00e-55; SWISSPROT HIT: O15075, EVALUE 5.40e+00; NT HIT: gi11526291, EVALUE 7.00e-11

SEQ ID NO: 33275 - DNA, 129 bp, Homo sapiens
  MAP TO AC007564.9; EXPRESSED IN HELA, SIGNAL = 1.3; NT HIT: gi6679031, EVALUE 7.00e-36; EST_HUMAN HIT: BE894192.1, EVALUE 1.00e-66; SWISSPROT HIT: P33215, EVALUE 1.00e-13
catctctgataggtgagaacatgtcacctaaactacttttcccagtatcatcaaagctggagaaatcctgattttttccactgtctgtttccttagataaagtgtctgtgtttatgcttcgaggcaaac

SEQ ID NO: 33276 - DNA, 131 bp, Homo sapiens
  MAP TO AC008022.1; EXPRESSED IN HELA, SIGNAL = 1.8; SWISSPROT HIT: P16785, EVALUE 4.10e+00; NT HIT: gi4826867, EVALUE 7.40e-02; EST_HUMAN HIT: AV727772.1, EVALUE 1.10e-01
cgagtacccagtgaaaggcccagtgaaacccaatcgcactaagtggaagaaacccactcctagacacatcacagtgaaacttcacagaattatgacaaaagtaacagaagtgagggggaaaagaaaaccag

SEQ ID NO: 33277 - DNA, 302 bp, Homo sapiens
  MAP TO AL021707.2; EXPRESSED IN HELA, SIGNAL = 1.2; NT HIT: gi6978614, EVALUE 4.70e-02; EST_HUMAN HIT: BE909149.1, EVALUE 4.30e+00; SWISSPROT HIT: P16241, EVALUE 9.00e-03
cgtgcctcttctttaccatcactcacacacaggtgcctctcctttaccatcaggaagcgtgcctcttctttaccatcactcacacacaggtgcctctcctttaccatcaggaagcgtgcctcttctttaccatcactcacacacaggtgcctctcctttaccatcaggaagcgtgcctcttctttaccatcactcacacacaggtgcctctcctttaccatcaggaagcgtgcctcttctttaccatccatcactcacacacaggtgcctctcctttaccatcaggaagcgtgcctcttctt

SEQ ID NO: 33278 - DNA, 110 bp, Homo sapiens
  MAP TO AL022319.2; EXPRESSED IN HELA, SIGNAL = 2.3; NT HIT: L20422.1, EVALUE 2.40e-01; EST_HUMAN HIT: BF381178.1, EVALUE 5.50e+00
ttagggcagtaatagggtagactgcaggatgaagaagcagtcctgacccttagggaagtctggagcagcctgaagaggggaaccagtaagcatctaggcacggatggaca

SEQ ID NO: 33279 - DNA, 158 bp, Homo sapiens
  MAP TO Z95114.19; EXPRESSED IN HELA, SIGNAL = 1.9; NT HIT: L27208.1, EVALUE 3.60e-01; EST_HUMAN HIT: AA910997.1, EVALUE 5.40e-01; SWISSPROT HIT: P07399, EVALUE 6.80e+00
ttccttccttgatggaggacgacattaaaagaagacaaaggagagaatttggggtgactgatctattgctgcttaggccaagtctaaccattgaaagtctccaaatctcacacctaagggtccctagctcttgtagaacaccacagagattttccagt

SEQ ID NO: 33280 - DNA, 254 bp, Homo sapiens
  MAP TO Z95114.19; EXPRESSED IN HELA, SIGNAL = 1.8; EST_HUMAN HIT: AV656287.1, EVALUE 0.00e+00; NT HIT: AF318287.1, EVALUE 2.40e+00
actttagtatcactgttgatatttgtcttaacatgacaaatcacatttttgtatagaaacaaggcatatctctgcttgtctgctaattaaacggggatttggccctagtttacatcatccccaaactcactcttatcgatagcattcccctccctatacacgctcaatctggtaaaactgaaagaggagttttaacagcactgactataattggcgttctggctggtattggcacgggaactggaggacctcct

SEQ ID NO: 33281 - DNA, 151 bp, Homo sapiens
  MAP TO Z82201.1; EXPRESSED IN HELA, SIGNAL = 1.2; NT HIT: AF224669.1, EVALUE 1.40e+00; EST_HUMAN HIT: BE064381.1, EVALUE 2.00e+00
tgtagattgtgctttctaacatttttaaggttgtaggcttagggtgtaaatgagggactaggggtaggttttcagtgattaactcagtttctttatagcctttctaccaggctctctgctagagaccttcagttacacttgctataactgc

SEQ ID NO: 33282 - DNA, 78 bp, Homo sapiens
  MAP TO AC007092.4; EXPRESSED IN HELA, SIGNAL = 1.2
ttctctttttctcttctccctatgcttctctttccatcttcctctccaacaccatctccctttctctctctgtctgtc

SEQ ID NO: 33283 - DNA, 106 bp, Homo sapiens
  MAP TO AC007539.8; EXPRESSED IN HELA, SIGNAL =   3; NT HIT: gi11435947, EVALUE 1.00e-21; EST_HUMAN HIT: W23234.1, EVALUE 2.00e-21; SWISSPROT HIT: P52067, EVALUE 1.90e+00
aacagtactggtttattctgtccgcccgtctggcttttgtcataatcttccaggtgagttgctgggatagggaatagcccattcgaatccgggctgcaggagtaag

SEQ ID NO: 33284 - DNA, 102 bp, Homo sapiens
  MAP TO AC008022.1; EXPRESSED IN HELA, SIGNAL = 2.6; SWISSPROT HIT: P33042, EVALUE 5.50e+00; NT HIT: X92679.1, EVALUE 5.50e-02; EST_HUMAN HIT: BF093512.1, EVALUE 2.10e-02
ctgagcttgaaaactgagaattgtcctcataacaaatagaagaattctgattttatttctttgctttggtggtggtgctggttggattttgatgttggccat

SEQ ID NO: 33285 - DNA, 143 bp, Homo sapiens
  MAP TO AL022327.17; EXPRESSED IN HELA, SIGNAL = 1.8; NT HIT: gi7524593, EVALUE 1.30e+00; EST_HUMAN HIT: AW502868.1, EVALUE 3.00e-27; SWISSPROT HIT: Q03340, EVALUE 6.90e+00
tctgatgtgcactcctccatctgacgtgcactcctccatctgacgtgcacacctccatctaacgtgccctcctccatctgatgacgtgcactcctccatctgacgtgcattcctccatctgacaatgtgtactcctccatctg

SEQ ID NO: 33286 - DNA, 265 bp, Homo sapiens
  MAP TO AC008022.1; EXPRESSED IN HELA, SIGNAL = 1.2; EST_HUMAN HIT: BE677411.1, EVALUE 1.00e-24; NT HIT: U82671.2, EVALUE 1.00e-20; SWISSPROT HIT: P51991, EVALUE 1.10e+00
  unsure 37
atttacaaaggaaagaggtttcattggttcatggttnctggaaacatgatgctggcatcggctcagtttctgcagtggtctcaggaaacttacaatcatggcggaaggtgaaggaggagcaggcatgtcacagagcccaagtaggagcaagagagagagaatggcgggaggtgctacacacttttaaacaaccagatctcatgagaactcactcactatcaggagaacagcaccaagtggatggtgataattcattcatgaagga

SEQ ID NO: 33287 - DNA, 112 bp, Homo sapiens
  MAP TO AL079295.1; EXPRESSED IN HELA, SIGNAL = 5.8; EST_HUMAN HIT: BE545060.1, EVALUE 1.40e+00; NT HIT: AL161549.2, EVALUE 9.70e-01
gtcttgtatcctgaatgagactgcaaattgtactcaacgtaaaggcctagtgggcaatgacacatcttatctcagcatcatcagttggtcatgccaactgactggcatataa

SEQ ID NO: 33288 - DNA, 120 bp, Homo sapiens
  MAP TO AC007556.2; EXPRESSED IN HELA, SIGNAL = 1.6; NT HIT: gi11430460, EVALUE 1.00e-61; EST_HUMAN HIT: BF130444.1, EVALUE 2.00e-61; SWISSPROT HIT: P98164, EVALUE 2.00e-19
tgcccaacctttgcaaacagatctgcagccacctctgccttctgagacctggaggatacagctgtgcctgtccccaaggctccagctttatagaggggagcaccactgagtgtgatgcag

SEQ ID NO: 33289 - DNA, 247 bp, Homo sapiens
  MAP TO AC008166.1; EXPRESSED IN HELA, SIGNAL =  21; NT HIT: D17522.1, EVALUE 1.00e-02; EST_HUMAN HIT: AW894022.1, EVALUE 8.80e-01
agtatgtttcctaatctataaacaaatacattaaagcatatgatatacttcactgggctttgattgaaaattccaggtcataattcagttcaactacttaatatatagctgatacatactaaaaattcaataaatattgatatttagctacatttactattatcacataatttattaattcatgtgtttaaactgtgtcatgggggaaaatatatcttcctaatcactatgctacgtaagcttatca

SEQ ID NO: 33290 - DNA, 100 bp, Homo sapiens
  MAP TO AL021707.2; EXPRESSED IN HELA, SIGNAL = 1.4; SWISSPROT HIT: Q15040, EVALUE 3.00e-06; NT HIT: gi11418123, EVALUE 1.00e-49; EST_HUMAN HIT: AU131631.1, EVALUE 1.00e-49
ttacacatcggtcctccaactctgatgagcctctacctcttctggtaccaccagcaggagttcacagttctttcctcgcaaatgatgttttagaaacttc

SEQ ID NO: 33291 - DNA, 135 bp, Homo sapiens
  MAP TO AL022327.17; EXPRESSED IN HELA, SIGNAL = 1.7; EST_HUMAN HIT: AU120203.1, EVALUE 1.00e-50; NT HIT: D25217.2, EVALUE 9.00e-51; SWISSPROT HIT: Q15049, EVALUE 7.00e-15
tcaggcgtctgcgcgaagctcgtgtgaactcacgtttattgctgatgggttcaggactagtttgcatccaaaccaaattaaacacgtagtggtcacagcaaacgtggaaacaaacaatatctgaaagttgggaat

SEQ ID NO: 33292 - DNA, 90 bp, Homo sapiens
  MAP TO AP000352.2; EXPRESSED IN HELA, SIGNAL = 1.5; EST_HUMAN HIT: BE392320.1, EVALUE 1.10e+00; NT HIT: gi7524759, EVALUE 1.90e-01; SWISSPROT HIT: P07295, EVALUE 9.50e+00
ttccaccacgcagtgatgcagtaaggcctttgccaggtactggcactggcgccatgctctttgactctccagtttccaggactgtgagcc

SEQ ID NO: 33293 - DNA, 578 bp, Homo sapiens; identical to SEQ ID NO: 16819
  MAP TO AL022318.2; EXPRESSED IN HELA, SIGNAL = 1.2; NT HIT: X91192.1, EVALUE 3.70e-01; SWISSPROT HIT: P30305, EVALUE 1.70e+00; EST_HUMAN HIT: AA075627.1, EVALUE 5.50e-01

SEQ ID NO: 33294 - DNA, 90 bp, Homo sapiens
  MAP TO AB016897.1; EXPRESSED IN HELA, SIGNAL = 1.2; NT HIT: AF181897.1, EVALUE 4.70e-02; EST_HUMAN HIT: BE963272.2, EVALUE 5.00e-09
agccaatgtgattaaagtccataatcagttgactttaagtaaaaaaattataacagataacctgggtggtcctgattcagccaaaaggcc

SEQ ID NO: 33295 - DNA, 156 bp, Homo sapiens
  MAP TO AC004909.2; EXPRESSED IN HELA, SIGNAL = 4.5; EST_HUMAN HIT: AW613417.1, EVALUE 5.00e-69; NT HIT: AL163282.2, EVALUE 6.00e-06
ctgtttgtgttgatgccgatataaacaaacctgcggcattgccagtcatgtaaaagtatagcacacacaataacatacagtatataataataataaatgactattactggtttatgtatttgctggaggggcggggccctcagggacaacctcttg

SEQ ID NO: 33296 - DNA, 93 bp, Homo sapiens
  MAP TO AC007462.2; EXPRESSED IN HELA, SIGNAL = 1.3; NT HIT: Z99116.1, EVALUE 4.90e-02; EST_HUMAN HIT: BF218331.1, EVALUE 1.10e+00
ggaatgctgagtggaaatctgtggaacttctgcaaaataatatttcaattgctgcagaatgttatttgattgatatttacaaccttccattgt

SEQ ID NO: 33297 - DNA, 102 bp, Homo sapiens
  MAP TO AC007539.8; EXPRESSED IN HELA, SIGNAL = 1.6; NT HIT: AL161578.2, EVALUE 2.20e-01; EST_HUMAN HIT: BF214048.1, EVALUE 3.20e-01
atgaacaaagatgggtgggaaagagagaaagactctcttcatttctgttatgtattcattgtcctggtagctttttccaggttgcctactcttttcagtgag

SEQ ID NO: 33298 - DNA, 180 bp, Homo sapiens
  MAP TO AC008151.1; EXPRESSED IN HELA, SIGNAL = 1.4; NT HIT: Y08172.1, EVALUE 1.10e-01; EST_HUMAN HIT: BF569003.1, EVALUE 6.20e-01; SWISSPROT HIT: P33438, EVALUE 1.30e+00
ctgggcaggagcaactctcacaacagaatgcatcctgtgcttcccccagaaagaagcctcctccctgatcctgctggcctttccctctccatctcccccaacccctgagtaagcccaggatcggcagaagagcctcagttccttcttccctaagggaccctctgtgatggtatctgccat

SEQ ID NO: 33299 - DNA, 580 bp, Homo sapiens; identical to SEQ ID NO: 16827
  MAP TO AC008151.1; EXPRESSED IN HELA, SIGNAL = 1.2; NT HIT: S58644.1, EVALUE 2.40e-02; EST_HUMAN HIT: BE061695.1, EVALUE 5.50e-01; SWISSPROT HIT: P09078, EVALUE 3.80e+00

SEQ ID NO: 33300 - protein, 106 aa, Homo sapiens
  MAP TO AC007463.3; EXPRESSED IN PLACENTA, SIGNAL = 1.5; EXPRESSED IN BT474, SIGNAL = 1.1; EXPRESSED IN BONE MARROW, SIGNAL = 1.4; EXPRESSED IN FETAL LIVER, SIGNAL = 1.1; EXPRESSED IN LUNG, SIGNAL = 1.3; EXPRESSED IN HELA, SIGNAL = 1.2; EXPRESSED IN ADULT LIVER, SIGNAL =   1; EXPRESSED IN BRAIN, SIGNAL = 1.5; EXPRESSED IN HEART, SIGNAL = 1.3; EXPRESSED IN HBL100, SIGNAL = 1.1; EST_HUMAN HIT: R17795.1, EVALUE 4.00e-35; SWISSPROT HIT: P44737, EVALUE 8.30e-01
KPEAATNDGAKSVLEMVGQKCKVTLQRMDDLSLCSYIHDLTVQKKSLLLLHPPILVTVRGFVALAYIILPCWMLPALEHRTPGSSVLGLGLALLALQLADGLLWDL

SEQ ID NO: 33301 - protein, 31 aa, Homo sapiens
  MAP TO AC007403.2; EXPRESSED IN HEART, SIGNAL = 2.3; EXPRESSED IN HELA, SIGNAL = 4.1; EXPRESSED IN ADULT LIVER, SIGNAL = 3.3; EXPRESSED IN BRAIN, SIGNAL =   3; EXPRESSED IN BT474, SIGNAL = 2.7; EXPRESSED IN BONE MARROW, SIGNAL = 3.2; EXPRESSED IN HBL100, SIGNAL = 2.7; EXPRESSED IN FETAL LIVER, SIGNAL = 2.8; EXPRESSED IN PLACENTA, SIGNAL = 2.4; EXPRESSED IN LUNG, SIGNAL = 3.7; SWISSPROT HIT: P43947, EVALUE 8.30e+00; EST_HUMAN HIT: AA811928.1, EVALUE 8.00e-05
SSPLTAFIELKRIRALVWIRMWAGLIFYTDH

SEQ ID NO: 33302 - protein, 43 aa, Homo sapiens
  MAP TO AC007393.3; EXPRESSED IN BT474, SIGNAL = 0.99; EXPRESSED IN FETAL LIVER, SIGNAL = 1.2; EXPRESSED IN HELA, SIGNAL = 1.2; EXPRESSED IN ADULT LIVER, SIGNAL = 1.1; EXPRESSED IN PLACENTA, SIGNAL = 0.87; EXPRESSED IN BONE MARROW, SIGNAL = 0.7; EXPRESSED IN HBL100, SIGNAL = 1.1; EXPRESSED IN LUNG, SIGNAL = 1.3; EXPRESSED IN BRAIN, SIGNAL = 1.8; EXPRESSED IN HEART, SIGNAL = 0.93; EST_HUMAN HIT: T78152.1, EVALUE 6.20e+00; EST_HUMAN HIT: BE834549.1, EVALUE 5.00e-17; SWISSPROT HIT: O43913, EVALUE 2.00e-20
NLQKILSHDHPPEYSADFYAAYINILLGVFYTVCRDLKELRHL

SEQ ID NO: 33303 - protein, 37 aa, Homo sapiens
  MAP TO AC007393.3; EXPRESSED IN BT474, SIGNAL = 0.99; EXPRESSED IN FETAL LIVER, SIGNAL = 1.2; EXPRESSED IN HELA, SIGNAL = 1.2; EXPRESSED IN ADULT LIVER, SIGNAL = 1.1; EXPRESSED IN PLACENTA, SIGNAL = 0.87; EXPRESSED IN BONE MARROW, SIGNAL = 0.7; EXPRESSED IN HBL100, SIGNAL = 1.1; EXPRESSED IN LUNG, SIGNAL = 1.3; EXPRESSED IN BRAIN, SIGNAL = 1.8; EXPRESSED IN HEART, SIGNAL = 0.93
ATFKRSCPMIILQSIQLISMLPTLTFFLEFSTLFVEI

SEQ ID NO: 33304 - protein, 61 aa, Homo sapiens
  MAP TO AC007392.3; EXPRESSED IN BT474, SIGNAL = 1.8; EXPRESSED IN BONE MARROW, SIGNAL = 7.6; EXPRESSED IN LUNG, SIGNAL = 3.4; EXPRESSED IN ADULT LIVER, SIGNAL =   3; EXPRESSED IN HELA, SIGNAL =   3; EXPRESSED IN FETAL LIVER, SIGNAL = 2.8; EXPRESSED IN HBL100, SIGNAL = 6.1; EXPRESSED IN PLACENTA, SIGNAL = 2.2; EXPRESSED IN HEART, SIGNAL = 2.8; EXPRESSED IN BRAIN, SIGNAL = 4.2; EST_HUMAN HIT: AW856348.1, EVALUE 5.10e+00; SWISSPROT HIT: Q91740, EVALUE 5.80e+00
FMIYFPQEHIWFYQKSLKSSPKGNISGERSRYQLDSPGTRYTGRRVDVIFKQYYLGDNIYH

SEQ ID NO: 33305 - protein, 71 aa, Homo sapiens
  MAP TO AC007392.3; EXPRESSED IN FETAL LIVER, SIGNAL =  16; EXPRESSED IN HEART, SIGNAL =  17; EXPRESSED IN PLACENTA, SIGNAL = 6.7; EXPRESSED IN BT474, SIGNAL =  40; EXPRESSED IN BONE MARROW, SIGNAL = 9.3; EXPRESSED IN HBL100, SIGNAL =  19; EXPRESSED IN LUNG, SIGNAL =  11; EXPRESSED IN HELA, SIGNAL =  18; EXPRESSED IN ADULT LIVER, SIGNAL =  11; EXPRESSED IN BRAIN, SIGNAL =   9; EST_HUMAN HIT: BE613007.1, EVALUE 1.00e-22; EST_HUMAN HIT: AA036954.1, EVALUE 8.00e-23; SWISSPROT HIT: P97367, EVALUE 5.00e-18
LQSMPGEYVARGGPMGVSMGQPSYTQPQMPPHPAQLRHGPPMHTYIPGHPHHPTVMMHGGPPHPGMPMSAS

SEQ ID NO: 33306 - protein, 75 aa, Homo sapiens
  MAP TO AC007382.2; EXPRESSED IN HELA, SIGNAL = 5.9; EXPRESSED IN FETAL LIVER, SIGNAL = 3.9; EXPRESSED IN LUNG, SIGNAL = 6.2; EXPRESSED IN HEART, SIGNAL = 3.9; EXPRESSED IN BT474, SIGNAL = 3.8; EXPRESSED IN BONE MARROW, SIGNAL = 5.4; EXPRESSED IN ADULT LIVER, SIGNAL = 4.8; EXPRESSED IN BRAIN, SIGNAL = 5.5; EXPRESSED IN PLACENTA, SIGNAL = 4.7; EXPRESSED IN HBL100, SIGNAL = 4.1; EST_HUMAN HIT: BE743922.1, EVALUE 5.00e-37; EST_HUMAN HIT: AW852330.1, EVALUE 9.00e-11; SWISSPROT HIT: O42163, EVALUE 3.00e-12
RAISFVTKNFFSKANGNRSGAPNVVVVMVDGWPTDKVEEASRLARESGINIFFITIEGAAENEKQYVVEPNFANK

SEQ ID NO: 33307 - protein, 33 aa, Homo sapiens
  MAP TO AC007372.4; EXPRESSED IN HEART, SIGNAL = 2.6; EXPRESSED IN BT474, SIGNAL =   2; EXPRESSED IN BONE MARROW, SIGNAL = 3.5; EXPRESSED IN HELA, SIGNAL = 3.4; EXPRESSED IN BRAIN, SIGNAL = 2.9; EXPRESSED IN PLACENTA, SIGNAL = 2.3; EXPRESSED IN HBL100, SIGNAL = 2.4; EXPRESSED IN FETAL LIVER, SIGNAL = 2.3; EXPRESSED IN LUNG, SIGNAL = 2.6; EXPRESSED IN ADULT LIVER, SIGNAL = 2.7; EST_HUMAN HIT: AW880885.1, EVALUE 8.00e-05
FSEGSHCGYDRNSKRTRVRSGARRCDWIAAISY

SEQ ID NO: 33308 - protein, 154 aa, Homo sapiens
  MAP TO AC007372.4; EXPRESSED IN ADULT LIVER, SIGNAL = 1.3; EXPRESSED IN BRAIN, SIGNAL = 0.95; EXPRESSED IN HEART, SIGNAL = 1.1; EXPRESSED IN PLACENTA, SIGNAL = 1.7; EXPRESSED IN BT474, SIGNAL = 1.7; EXPRESSED IN HELA, SIGNAL = 2.5; EXPRESSED IN LUNG, SIGNAL = 1.7; EXPRESSED IN FETAL LIVER, SIGNAL = 1.2; EXPRESSED IN HBL100, SIGNAL = 1.7; EXPRESSED IN BONE MARROW, SIGNAL = 1.8; SWISSPROT HIT: P26809, EVALUE 2.00e-05; EST_HUMAN HIT: BE463763.1, EVALUE 4.00e-49
TKKEAQRLVGLFGFWRQHIPHLGGLLQPLYLVIQKAAIFEWNPEPEKVLQKVQAAVQAALPLGPYDPTDPIMLEVLVADRDAVWSLWQALIGESQQRPVGFWSMALPSSADNYSPFERQLFACSWALVETECLTMGHQVTMQPELPIMNWMLSD

SEQ ID NO: 33309 - protein, 66 aa, Homo sapiens
  MAP TO AC007372.4; EXPRESSED IN BT474, SIGNAL = 0.75; EXPRESSED IN HBL100, SIGNAL = 0.8; EXPRESSED IN LUNG, SIGNAL = 0.77; EXPRESSED IN HELA, SIGNAL = 1.4; EXPRESSED IN ADULT LIVER, SIGNAL =   1; EXPRESSED IN BRAIN, SIGNAL = 1.6; EXPRESSED IN PLACENTA, SIGNAL = 1.4; EXPRESSED IN BONE MARROW, SIGNAL = 0.89; EXPRESSED IN FETAL LIVER, SIGNAL = 1.2; EXPRESSED IN HEART, SIGNAL = 1.5; EST_HUMAN HIT: AA508214.1, EVALUE 3.00e-09; SWISSPROT HIT: Q92813, EVALUE 2.00e-34; EST_HUMAN HIT: BE770446.1, EVALUE 2.00e-33
AHPSDGWAIPGDSSLSFEVKKHQNQEDRCAAAQQLLERFSLPPQCRVVADRMDNNANIAYGVAFER

SEQ ID NO: 33310 - protein, 171 aa, Homo sapiens
  MAP TO AC007363.3; EXPRESSED IN BONE MARROW, SIGNAL = 2.6; EXPRESSED IN HBL100, SIGNAL = 1.8; EXPRESSED IN ADULT LIVER, SIGNAL = 1.8; EXPRESSED IN BRAIN, SIGNAL = 1.9; EXPRESSED IN BT474, SIGNAL = 1.9; EXPRESSED IN LUNG, SIGNAL = 2.3; EXPRESSED IN HELA, SIGNAL = 2.5; EXPRESSED IN PLACENTA, SIGNAL = 2.5; EXPRESSED IN FETAL LIVER, SIGNAL = 2.3; EXPRESSED IN HEART, SIGNAL = 2.5; EST_HUMAN HIT: AA228126.1, EVALUE 6.00e-51; SWISSPROT HIT: O43405, EVALUE 9.00e-50; EST_HUMAN HIT: BF037138.1, EVALUE 5.00e-73
AVCRTNGFYSLHVQSWFGLHKTLQPLVKRVCDTDRLACSKTCLNSADIGFVIDGSSSVGTGNFRTVLQFVTNLTKEFEISDTDTRIGAVQYTYEQRLEFGFDKYSSKPDILNAIKRVGYWSGGTSTGAAINFALEQLFKKSKPNKRKLMILITDGRSYDDVRIPAMAAHLK

SEQ ID NO: 33311 - protein, 27 aa, Homo sapiens
  MAP TO AC007363.3; EXPRESSED IN BONE MARROW, SIGNAL = 2.6; EXPRESSED IN HBL100, SIGNAL = 1.8; EXPRESSED IN ADULT LIVER, SIGNAL = 1.8; EXPRESSED IN BRAIN, SIGNAL = 1.9; EXPRESSED IN BT474, SIGNAL = 1.9; EXPRESSED IN LUNG, SIGNAL = 2.3; EXPRESSED IN HELA, SIGNAL = 2.5; EXPRESSED IN PLACENTA, SIGNAL = 2.5; EXPRESSED IN FETAL LIVER, SIGNAL = 2.3; EXPRESSED IN HEART, SIGNAL = 2.5; EST_HUMAN HIT: AA346825.1, EVALUE 4.00e-07; EST_HUMAN HIT: BF037138.1, EVALUE 2.00e-09
RPCAEQTASTRSTCRAGLASTRPCSLW

SEQ ID NO: 33312 - protein, 46 aa, Homo sapiens
  MAP TO AC007263.3; EXPRESSED IN BONE MARROW, SIGNAL = 4.8; EXPRESSED IN BRAIN, SIGNAL =   5; EXPRESSED IN PLACENTA, SIGNAL = 7.6; EXPRESSED IN BT474, SIGNAL =   4; EXPRESSED IN LUNG, SIGNAL =   6; EXPRESSED IN HELA, SIGNAL = 5.1; EXPRESSED IN ADULT LIVER, SIGNAL = 4.7; EXPRESSED IN HEART, SIGNAL = 3.3; EXPRESSED IN HBL100, SIGNAL = 4.1; EXPRESSED IN FETAL LIVER, SIGNAL = 9.1; SWISSPROT HIT: Q42798, EVALUE 4.60e+00
HEQLGIVRAKKTKRQGVAGEAGASGANCLVLKNLEVAQVTGSQESF

SEQ ID NO: 33313 - protein, 82 aa, Homo sapiens
  MAP TO AC007263.3; EXPRESSED IN HBL100, SIGNAL = 8.3; EXPRESSED IN FETAL LIVER, SIGNAL =   7; EXPRESSED IN HELA, SIGNAL = 8.1; EXPRESSED IN ADULT LIVER, SIGNAL = 7.5; EXPRESSED IN PLACENTA, SIGNAL = 8.8; EXPRESSED IN LUNG, SIGNAL = 9.5; EXPRESSED IN HEART, SIGNAL = 3.4; EXPRESSED IN BRAIN, SIGNAL = 9.2; EXPRESSED IN BT474, SIGNAL = 7.6; EXPRESSED IN BONE MARROW, SIGNAL = 6.1; SWISSPROT HIT: Q12329, EVALUE 4.90e+00
RVLPPLQKVLLSYAILRAPAPMPMPTHMHHHHHHHYHHHDHHHHHHHQHQHQHHQHQHHHHDHHHHHHHHHHHHHHHYHHRH

SEQ ID NO: 33314 - protein, 181 aa, Homo sapiens
  MAP TO AC007263.3; EXPRESSED IN BT474, SIGNAL = 3.3; EXPRESSED IN HBL100, SIGNAL = 1.1; EXPRESSED IN FETAL LIVER, SIGNAL = 1.6; EXPRESSED IN HELA, SIGNAL = 1.3; EXPRESSED IN ADULT LIVER, SIGNAL = 1.4; EXPRESSED IN PLACENTA, SIGNAL = 1.1; EXPRESSED IN BONE MARROW, SIGNAL = 2.6; EXPRESSED IN LUNG, SIGNAL = 1.6; EXPRESSED IN HEART, SIGNAL = 1.4; EXPRESSED IN BRAIN, SIGNAL =   1; EST_HUMAN HIT: BE676347.1, EVALUE 1.00e-87; EST_HUMAN HIT: AI279555.1, EVALUE 1.00e-85; SWISSPROT HIT: O00409, EVALUE 4.00e-97
MGPVMPPSKKPESSGISVSSGLSQCYGGSGFSKALQEDDDLDFSLPDIRLEEGAMEDEELTNLNWLHESKNLLKSFGESVLRSVSPVQDLDDDTPPSPAHSDMPYDARQNPNCKPPYSFSCLIFMAIEDSPTKRLPVKDIYNWILEHFPYFANAPTGWKNSVRHNLSLNKCFKKVDKERSQ

SEQ ID NO: 33315 - protein, 49 aa, Homo sapiens
  MAP TO AC007243.2; EXPRESSED IN HELA, SIGNAL = 2.2; EXPRESSED IN BT474, SIGNAL = 3.1; EXPRESSED IN BONE MARROW, SIGNAL = 4.7; EXPRESSED IN HBL100, SIGNAL = 2.7; EXPRESSED IN FETAL LIVER, SIGNAL = 3.1; EXPRESSED IN LUNG, SIGNAL = 3.2; EXPRESSED IN ADULT LIVER, SIGNAL = 2.9; EXPRESSED IN BRAIN, SIGNAL = 3.8; EXPRESSED IN PLACENTA, SIGNAL = 4.2; EXPRESSED IN HEART, SIGNAL = 3.1; EST_HUMAN HIT: AA720574.1, EVALUE 1.20e-02; SWISSPROT HIT: O16845, EVALUE 4.60e+00
KLFPRALPLTPPDLTSSHFKTTSAWTLSSISLSAFWAKLLNKSLGSSKL

SEQ ID NO: 33316 - protein, 33 aa, Homo sapiens
  MAP TO AC007243.2; EXPRESSED IN PLACENTA, SIGNAL =   1; EXPRESSED IN BT474, SIGNAL = 0.97; EXPRESSED IN LUNG, SIGNAL = 1.1; EXPRESSED IN HELA, SIGNAL = 1.4; EXPRESSED IN ADULT LIVER, SIGNAL = 0.84; EXPRESSED IN BRAIN, SIGNAL = 1.5; EXPRESSED IN HEART, SIGNAL = 0.92; EXPRESSED IN BONE MARROW, SIGNAL = 0.75; EXPRESSED IN FETAL LIVER, SIGNAL = 0.9; EXPRESSED IN HBL100, SIGNAL = 0.93; EST_HUMAN HIT: AW512832.1, EVALUE 2.30e-02
GVLSMTSHLCLLPRMCSSPHLAASVCLPTRVSG

SEQ ID NO: 33317 - protein, 51 aa, Homo sapiens
  MAP TO AC007182.3; EXPRESSED IN PLACENTA, SIGNAL = 1.6; EXPRESSED IN BT474, SIGNAL = 6.7; EXPRESSED IN BONE MARROW, SIGNAL = 0.94; EXPRESSED IN HBL100, SIGNAL = 4.7; EXPRESSED IN FETAL LIVER, SIGNAL =  13; EXPRESSED IN LUNG, SIGNAL = 3.6; EXPRESSED IN HELA, SIGNAL = 4.8; EXPRESSED IN ADULT LIVER, SIGNAL = 3.9; EXPRESSED IN BRAIN, SIGNAL = 3.6; EXPRESSED IN HEART, SIGNAL = 1.9; EST_HUMAN HIT: BE547588.1, EVALUE 2.00e-14; EST_HUMAN HIT: AA312370.1, EVALUE 1.00e-14; SWISSPROT HIT: P25073, EVALUE 6.00e+00
FLHPGYAGRAPVSRSRTSIQTEEEKLRPALSPPGLSRFPPWPSSSFVVSPL

SEQ ID NO: 33318 - protein, 37 aa, Homo sapiens
  MAP TO AC007182.3; EXPRESSED IN PLACENTA, SIGNAL =   1; EXPRESSED IN FETAL LIVER, SIGNAL = 0.98; EXPRESSED IN LUNG, SIGNAL = 0.88; EXPRESSED IN HELA, SIGNAL = 0.69; EXPRESSED IN BRAIN, SIGNAL = 3.3; EXPRESSED IN HEART, SIGNAL = 1.6; EXPRESSED IN ADULT LIVER, SIGNAL = 1.5; EXPRESSED IN BONE MARROW, SIGNAL = 1.1; EST_HUMAN HIT: AU124525.1, EVALUE 3.00e-06; EST_HUMAN HIT: AW962352.1, EVALUE 2.00e-06
VFGIIFTISQGQIIDNYGTKPGNIFLCVFLTLGAALT

SEQ ID NO: 33319 - protein, 55 aa, Homo sapiens
  MAP TO AC007182.3; EXPRESSED IN PLACENTA, SIGNAL = 6.7; EXPRESSED IN LUNG, SIGNAL = 9.5; EXPRESSED IN HELA, SIGNAL =  14; EXPRESSED IN BT474, SIGNAL = 7.3; EXPRESSED IN HBL100, SIGNAL =  17; EXPRESSED IN FETAL LIVER, SIGNAL =  14; EXPRESSED IN BRAIN, SIGNAL =  11; EXPRESSED IN BONE MARROW, SIGNAL =  10; EXPRESSED IN ADULT LIVER, SIGNAL = 5.4; EXPRESSED IN HEART, SIGNAL = 7.9
SQATVISPLPDLHDVLTFMVLGVALTPPSLLKELQGVSPLRGRKQVQTPQLLFLA

SEQ ID NO: 33320 - protein, 83 aa, Homo sapiens
  MAP TO AC007182.3; EXPRESSED IN PLACENTA, SIGNAL = 3.3; EXPRESSED IN BT474, SIGNAL = 1.4; EXPRESSED IN LUNG, SIGNAL = 1.6; EXPRESSED IN FETAL LIVER, SIGNAL = 2.8; EXPRESSED IN BONE MARROW, SIGNAL = 0.66; EXPRESSED IN HELA, SIGNAL = 0.72; EXPRESSED IN ADULT LIVER, SIGNAL = 3.9; EXPRESSED IN BRAIN, SIGNAL = 0.72; EXPRESSED IN HEART, SIGNAL = 1.3; EST_HUMAN HIT: BE281496.1, EVALUE 1.00e-19
ETVAMVNEGPNQEESDDTPVPESALQADPSVSVHPSVSVHPSVSINPSVSVHPSSSAHPSALAQPSGLAHPSSSGPEDLSVIK

SEQ ID NO: 33321 - protein, 122 aa, Homo sapiens
  MAP TO AC007182.3; EXPRESSED IN PLACENTA, SIGNAL = 3.3; EXPRESSED IN BT474, SIGNAL = 1.4; EXPRESSED IN LUNG, SIGNAL = 1.6; EXPRESSED IN FETAL LIVER, SIGNAL = 2.8; EXPRESSED IN BONE MARROW, SIGNAL = 0.66; EXPRESSED IN HELA, SIGNAL = 0.72; EXPRESSED IN ADULT LIVER, SIGNAL = 3.9; EXPRESSED IN BRAIN, SIGNAL = 0.72; EXPRESSED IN HEART, SIGNAL = 1.3; EST_HUMAN HIT: BE281496.1, EVALUE 5.00e-53; SWISSPROT HIT: Q11073, EVALUE 6.00e-14
WIQYGSINNIFMHFYGVSAFAIDWLSMCYMLTYIPLLLPVAWLLEKFGLRTIALTGSALNCLGAWVKLGSLKPHLFPVTVVGQLICSVAQVFILGMPSRIASVWFGANEVSTACSVAVFGNQ

SEQ ID NO: 33322 - protein, 34 aa, Homo sapiens
  MAP TO AC007132.2; EXPRESSED IN PLACENTA, SIGNAL = 9.9; EXPRESSED IN BONE MARROW, SIGNAL =  11; EXPRESSED IN LUNG, SIGNAL = 9.4; EXPRESSED IN HELA, SIGNAL = 7.1; EXPRESSED IN ADULT LIVER, SIGNAL = 6.9; EXPRESSED IN BT474, SIGNAL = 5.7; EXPRESSED IN HBL100, SIGNAL =  10; EXPRESSED IN FETAL LIVER, SIGNAL = 8.8; EXPRESSED IN BRAIN, SIGNAL =  11; EXPRESSED IN HEART, SIGNAL = 8.3; EST_HUMAN HIT: AW996316.1, EVALUE 8.00e-06; EST_HUMAN HIT: BE350127.1, EVALUE 5.00e-06
PSGSIPEESIVIIGEDISTGVIVPEDFPVGQDTE

SEQ ID NO: 33323 - protein, 96 aa, Homo sapiens
  MAP TO AC007103.4; EXPRESSED IN BONE MARROW, SIGNAL = 1.4; EXPRESSED IN HBL100, SIGNAL = 1.8; EXPRESSED IN FETAL LIVER, SIGNAL = 1.3; EXPRESSED IN LUNG, SIGNAL = 1.2; EXPRESSED IN ADULT LIVER, SIGNAL = 0.77; EXPRESSED IN BRAIN, SIGNAL = 1.1; EXPRESSED IN BT474, SIGNAL = 1.2; EXPRESSED IN HELA, SIGNAL = 0.85; EXPRESSED IN PLACENTA, SIGNAL = 1.3; EXPRESSED IN HEART, SIGNAL = 1.3; EST_HUMAN HIT: BE550241.1, EVALUE 2.00e-15; EST_HUMAN HIT: AI089421.1, EVALUE 1.00e-14
IPTLGPQISKGLWPARNETSQQEMTEPSFICIYSHSPSLTLPPELYLLLDQRSEVALDFHRSVNPIVKYACKGSRLHASYKNLTPDDLSLSPVTPK

SEQ ID NO: 33324 - protein, 28 aa, Homo sapiens
  MAP TO AC007092.3; EXPRESSED IN HBL100, SIGNAL = 9.9; EXPRESSED IN FETAL LIVER, SIGNAL = 9.6; EXPRESSED IN BRAIN, SIGNAL =  14; EXPRESSED IN BT474, SIGNAL = 7.5; EXPRESSED IN PLACENTA, SIGNAL =  15; EXPRESSED IN HEART, SIGNAL = 7.9; EXPRESSED IN ADULT LIVER, SIGNAL = 7.1; EXPRESSED IN HELA, SIGNAL = 9.2; EXPRESSED IN LUNG, SIGNAL =  10; EXPRESSED IN BONE MARROW, SIGNAL =  11
RSFSTLKRQDHPREKYSVPILLTFSNVH

SEQ ID NO: 33325 - protein, 45 aa, Homo sapiens
  MAP TO AC007032.2; EXPRESSED IN BONE MARROW, SIGNAL = 5.1; EXPRESSED IN HBL100, SIGNAL = 7.9; EXPRESSED IN ADULT LIVER, SIGNAL =  11; EXPRESSED IN BRAIN, SIGNAL = 1.2; EXPRESSED IN HEART, SIGNAL = 1.8; EXPRESSED IN BT474, SIGNAL = 8.7; EXPRESSED IN FETAL LIVER, SIGNAL =  13; EXPRESSED IN PLACENTA, SIGNAL = 2.4; EXPRESSED IN HELA, SIGNAL = 2.7; EXPRESSED IN LUNG, SIGNAL =  12; EST_HUMAN HIT: N45414.1, EVALUE 4.00e-20; SWISSPROT HIT: P43490, EVALUE 5.00e-21; EST_HUMAN HIT: BF576880.1, EVALUE 6.00e-20
INVFKDPVADPNKRSKKGRLSLHRTPAGNFVTLEEGKGDLEEYGQ

SEQ ID NO: 33326 - protein, 43 aa, Homo sapiens
  MAP TO AC007032.2; EXPRESSED IN BONE MARROW, SIGNAL = 5.1; EXPRESSED IN HBL100, SIGNAL = 7.9; EXPRESSED IN ADULT LIVER, SIGNAL =  11; EXPRESSED IN BRAIN, SIGNAL = 1.2; EXPRESSED IN HEART, SIGNAL = 1.8; EXPRESSED IN BT474, SIGNAL = 8.7; EXPRESSED IN FETAL LIVER, SIGNAL =  13; EXPRESSED IN PLACENTA, SIGNAL = 2.4; EXPRESSED IN HELA, SIGNAL = 2.7; EXPRESSED IN LUNG, SIGNAL =  12; EST_HUMAN HIT: AL135656.1, EVALUE 1.00e-18; SWISSPROT HIT: Q58669, EVALUE 4.70e+00; EST_HUMAN HIT: N45414.1, EVALUE 2.00e-18
LTSSRTQLLIPTKGPKRADYLYIGRQQGILLHWRKEKETLRNM

SEQ ID NO: 33327 - protein, 142 aa, Homo sapiens
  MAP TO D83253.1; EXPRESSED IN BONE MARROW, SIGNAL = 1.8; EXPRESSED IN FETAL LIVER, SIGNAL = 4.3; EXPRESSED IN HELA, SIGNAL = 3.4; EXPRESSED IN ADULT LIVER, SIGNAL =   3; EXPRESSED IN BRAIN, SIGNAL = 6.7; EXPRESSED IN HEART, SIGNAL = 2.5; EXPRESSED IN PLACENTA, SIGNAL = 3.2; EXPRESSED IN BT474, SIGNAL =  14; EXPRESSED IN HBL100, SIGNAL =   5; EXPRESSED IN LUNG, SIGNAL = 4.2; EST_HUMAN HIT: AA403192.1, EVALUE 2.00e-76; SWISSPROT HIT: P53804, EVALUE 9.00e-80
FDITQTPPAYINVLPGLPQYTSIYTPLASLSPEYQLPRSVPVVPSFVANDRADKNAAAYFEGHHLNAENVAGHQIASETQILEGSLGISVKSHCSTGDAHTVLSESNRNDEHCGNSNNKCEVIPESTSAVTNIPHVQMVAIQ

SEQ ID NO: 33328 - protein, 23 aa, Homo sapiens
  MAP TO D83253.1; EXPRESSED IN BONE MARROW, SIGNAL = 1.8; EXPRESSED IN FETAL LIVER, SIGNAL = 4.3; EXPRESSED IN HELA, SIGNAL = 3.4; EXPRESSED IN ADULT LIVER, SIGNAL =   3; EXPRESSED IN BRAIN, SIGNAL = 6.7; EXPRESSED IN HEART, SIGNAL = 2.5; EXPRESSED IN PLACENTA, SIGNAL = 3.2; EXPRESSED IN BT474, SIGNAL =  14; EXPRESSED IN HBL100, SIGNAL =   5; EXPRESSED IN LUNG, SIGNAL = 4.2; EST_HUMAN HIT: AA403192.1, EVALUE 5.00e-07; EST_HUMAN HIT: W19246.1, EVALUE 8.00e-07
IHKRVTRFAPVHQHIYTLGQPFS

SEQ ID NO: 33329 - protein, 70 aa, Homo sapiens
  MAP TO AB000882.1; EXPRESSED IN BONE MARROW, SIGNAL = 2.8; EXPRESSED IN LUNG, SIGNAL = 3.9; EXPRESSED IN ADULT LIVER, SIGNAL =   4; EXPRESSED IN PLACENTA, SIGNAL = 3.1; EXPRESSED IN BT474, SIGNAL =  10; EXPRESSED IN HBL100, SIGNAL =  12; EXPRESSED IN FETAL LIVER, SIGNAL = 6.1; EXPRESSED IN HELA, SIGNAL = 5.8; EXPRESSED IN BRAIN, SIGNAL = 2.9; EXPRESSED IN HEART, SIGNAL = 3.4; EST_HUMAN HIT: T31710.1, EVALUE 5.00e-35; SWISSPROT HIT: Q13838, EVALUE 4.00e-36; EST_HUMAN HIT: BE391973.1, EVALUE 3.00e-35
MAENDVDNELLDYEDDEVETAAGGDGAEAPAKKDVKGSYVSIHSSGFRDFLLKPELLRAIVDCGFEHPSE

SEQ ID NO: 33330 - protein, 35 aa, Homo sapiens
  MAP TO AB000882.1; EXPRESSED IN PLACENTA, SIGNAL = 0.84; EXPRESSED IN BT474, SIGNAL = 1.1; EXPRESSED IN HBL100, SIGNAL =   6; EXPRESSED IN FETAL LIVER, SIGNAL = 2.3; EXPRESSED IN LUNG, SIGNAL = 2.7; EXPRESSED IN HELA, SIGNAL =   4; EXPRESSED IN ADULT LIVER, SIGNAL = 1.7; EXPRESSED IN BRAIN, SIGNAL = 1.4; EXPRESSED IN BONE MARROW, SIGNAL = 2.1; EXPRESSED IN HEART, SIGNAL = 1.5; EST_HUMAN HIT: AW851096.1, EVALUE 1.00e-14
RTDFPYVSAAMPCFVIIIILCVPCCKKKTSAAEGP

SEQ ID NO: 33331 - protein, 50 aa, Homo sapiens
  MAP TO AB008681.1; EXPRESSED IN BT474, SIGNAL = 1.3; EXPRESSED IN HBL100, SIGNAL = 1.4; EXPRESSED IN BRAIN, SIGNAL = 1.7; EXPRESSED IN HEART, SIGNAL = 1.5; EXPRESSED IN ADULT LIVER, SIGNAL = 1.7; EXPRESSED IN PLACENTA, SIGNAL = 1.5; EXPRESSED IN BONE MARROW, SIGNAL = 1.1; EXPRESSED IN FETAL LIVER, SIGNAL = 1.6; EXPRESSED IN LUNG, SIGNAL = 1.2; EXPRESSED IN HELA, SIGNAL = 1.3; EST_HUMAN HIT: BE732193.1, EVALUE 7.00e-06; EST_HUMAN HIT: AI699245.1, EVALUE 1.50e+00; SWISSPROT HIT: Q10038, EVALUE 1.20e+00
RLRHGSASTTTPTGSWSAPTRAAWSAAKASRTSGCTATPPGPTALAPSSS

SEQ ID NO: 33332 - protein, 351 aa, Homo sapiens
  MAP TO AB023051.1; EXPRESSED IN HEART, SIGNAL = 5.6; EXPRESSED IN BT474, SIGNAL =  51; EXPRESSED IN BONE MARROW, SIGNAL =  51; EXPRESSED IN HBL100, SIGNAL = 1.1e+02; EXPRESSED IN FETAL LIVER, SIGNAL =  30; EXPRESSED IN LUNG, SIGNAL = 6.6; EXPRESSED IN HELA, SIGNAL =  23; EXPRESSED IN ADULT LIVER, SIGNAL =  15; EXPRESSED IN PLACENTA, SIGNAL =   9; EXPRESSED IN BRAIN, SIGNAL =  17; EST_HUMAN HIT: BE745540.1, EVALUE 0.00e+00; EST_HUMAN HIT: AI815647.1, EVALUE 1.00e-125; SWISSPROT HIT: P05218, EVALUE 0.00e+00
QSGAGNNWAKGHYTEGAELVDSVLDVVRKEAESCDCLQGFQLTHSLGGGTGSGMGTLLISKIREEYPDRIMNTFSVVPSPKVSDTVVEPYNATLSVHQLVENTDETYCIDNEALYDICFRTLKLTTPTYGDLNHLVSATMSGVTTCLRFPGQLNADLRKLAVNMVPFPRLHFFMPGFAPLTSRGSQQYRALTVPELTQQVFDAKNMMAACDPRHGRYLTVAAVFRGRMSMKEVDEQMLNVQNKNSSYFVEWIPNNVKTAVCDIPPRGLKMAVTFIGNSTAIQELFKRISEQFTAMFRRKAFLHWYTGEGMDEMEFTEAESNMNDLVSEYQQYQDATAEEEEDFGEEAEEEA

SEQ ID NO: 33333 - protein, 36 aa, Homo sapiens
  MAP TO AB023051.1; EXPRESSED IN HBL100, SIGNAL =  44; EXPRESSED IN BRAIN, SIGNAL = 8.6; EXPRESSED IN BT474, SIGNAL =  28; EXPRESSED IN PLACENTA, SIGNAL = 8.6; EXPRESSED IN HEART, SIGNAL = 6.1; EXPRESSED IN ADULT LIVER, SIGNAL = 7.2; EXPRESSED IN HELA, SIGNAL =  19; EXPRESSED IN LUNG, SIGNAL = 8.3; EXPRESSED IN FETAL LIVER, SIGNAL =  22; EXPRESSED IN BONE MARROW, SIGNAL =  13; SWISSPROT HIT: P05218, EVALUE 1.00e-16; EST_HUMAN HIT: BE797296.1, EVALUE 2.00e-15; EST_HUMAN HIT: BE263964.1, EVALUE 1.00e-15
FWEVISDEHGIDPTGTYHGDSDLQLDRISVYYNEAT

SEQ ID NO: 33334 - protein, 19 aa, Homo sapiens
  MAP TO AB023051.1; EXPRESSED IN HBL100, SIGNAL =  44; EXPRESSED IN BRAIN, SIGNAL = 8.6; EXPRESSED IN BT474, SIGNAL =  28; EXPRESSED IN PLACENTA, SIGNAL = 8.6; EXPRESSED IN HEART, SIGNAL = 6.1; EXPRESSED IN ADULT LIVER, SIGNAL = 7.2; EXPRESSED IN HELA, SIGNAL =  19; EXPRESSED IN LUNG, SIGNAL = 8.3; EXPRESSED IN FETAL LIVER, SIGNAL =  22; EXPRESSED IN BONE MARROW, SIGNAL =  13
GLDLLWSRCSPSAVLGGDQ

SEQ ID NO: 33335 - protein, 39 aa, Homo sapiens
  MAP TO AC000052.8; EXPRESSED IN HBL100, SIGNAL = 2.9; EXPRESSED IN HEART, SIGNAL = 2.6; EXPRESSED IN BT474, SIGNAL = 2.5; EXPRESSED IN BONE MARROW, SIGNAL = 4.2; EXPRESSED IN HELA, SIGNAL = 2.8; EXPRESSED IN ADULT LIVER, SIGNAL = 2.8; EXPRESSED IN BRAIN, SIGNAL = 4.2; EXPRESSED IN PLACENTA, SIGNAL = 7.3; EXPRESSED IN FETAL LIVER, SIGNAL = 3.4; EXPRESSED IN LUNG, SIGNAL =   3
RRRRGRGRGGGGGGRKEEEEETVSPLEVGAAIMMIPQLM

SEQ ID NO: 33336 - protein, 58 aa, Homo sapiens
  MAP TO AC000052.8; EXPRESSED IN BONE MARROW, SIGNAL = 1.4; EXPRESSED IN HBL100, SIGNAL = 1.2; EXPRESSED IN FETAL LIVER, SIGNAL = 1.8; EXPRESSED IN ADULT LIVER, SIGNAL = 1.7; EXPRESSED IN BRAIN, SIGNAL = 2.8; EXPRESSED IN BT474, SIGNAL = 1.1; EXPRESSED IN LUNG, SIGNAL = 2.5; EXPRESSED IN PLACENTA, SIGNAL = 2.3; EXPRESSED IN HEART, SIGNAL = 1.3; EXPRESSED IN HELA, SIGNAL = 1.2; EST_HUMAN HIT: AW295363.1, EVALUE 4.00e+00; SWISSPROT HIT: P11515, EVALUE 7.60e+00; EST_HUMAN HIT: BF304560.1, EVALUE 9.30e-01
TVGPELKSSCSESADNCKAMKGKNPRPSDSSYPGPAAQGCVRDLSTVADRGALSENGV

SEQ ID NO: 33337 - protein, 17 aa, Homo sapiens
  MAP TO AC000052.8; EXPRESSED IN BONE MARROW, SIGNAL = 1.4; EXPRESSED IN HBL100, SIGNAL = 1.2; EXPRESSED IN FETAL LIVER, SIGNAL = 1.8; EXPRESSED IN ADULT LIVER, SIGNAL = 1.7; EXPRESSED IN BRAIN, SIGNAL = 2.8; EXPRESSED IN BT474, SIGNAL = 1.1; EXPRESSED IN LUNG, SIGNAL = 2.5; EXPRESSED IN PLACENTA, SIGNAL = 2.3; EXPRESSED IN HEART, SIGNAL = 1.3; EXPRESSED IN HELA, SIGNAL = 1.2
NSGPGAQKQLLRICGQL

SEQ ID NO: 33338 - protein, 39 aa, Homo sapiens
  MAP TO AC000052.8; EXPRESSED IN BT474, SIGNAL = 1.4; EXPRESSED IN HELA, SIGNAL = 1.5; EXPRESSED IN ADULT LIVER, SIGNAL = 5.7; EXPRESSED IN PLACENTA, SIGNAL = 1.7; EXPRESSED IN BONE MARROW, SIGNAL = 1.7; EXPRESSED IN HBL100, SIGNAL = 1.2; EXPRESSED IN FETAL LIVER, SIGNAL = 2.8; EXPRESSED IN LUNG, SIGNAL = 1.6; EXPRESSED IN BRAIN, SIGNAL = 3.6; EXPRESSED IN HEART, SIGNAL = 1.8; EST_HUMAN HIT: AA775999.1, EVALUE 4.00e-10; EST_HUMAN HIT: AV661919.1, EVALUE 5.00e-15; SWISSPROT HIT: P53320, EVALUE 1.80e-01
ANLNNLGFNELAGKASFAHSFVSGCVAGSIAAVAVTPLD

SEQ ID NO: 33339 - protein, 50 aa, Homo sapiens
  MAP TO AC000353.21; EXPRESSED IN PLACENTA, SIGNAL = 1.8; EXPRESSED IN BT474, SIGNAL = 2.9; EXPRESSED IN HEART, SIGNAL = 2.3; EXPRESSED IN HELA, SIGNAL = 3.3; EXPRESSED IN LUNG, SIGNAL = 2.8; EXPRESSED IN HBL100, SIGNAL = 1.7; EXPRESSED IN BONE MARROW, SIGNAL = 2.8; EXPRESSED IN FETAL LIVER, SIGNAL = 2.6; EXPRESSED IN BRAIN, SIGNAL = 2.6; EXPRESSED IN ADULT LIVER, SIGNAL = 2.6
LRISPPLVGMSPAAMPAAPHQAHGLEASLRLEARLKACKSVQEAQPFLTK

SEQ ID NO: 33340 - protein, 62 aa, Homo sapiens
  MAP TO AC000353.21; EXPRESSED IN BONE MARROW, SIGNAL = 3.5; EXPRESSED IN HBL100, SIGNAL = 4.6; EXPRESSED IN BRAIN, SIGNAL = 5.3; EXPRESSED IN HEART, SIGNAL = 4.3; EXPRESSED IN PLACENTA, SIGNAL = 2.9; EXPRESSED IN BT474, SIGNAL = 3.7; EXPRESSED IN FETAL LIVER, SIGNAL =   4; EXPRESSED IN LUNG, SIGNAL = 4.4; EXPRESSED IN HELA, SIGNAL = 5.5; EXPRESSED IN ADULT LIVER, SIGNAL = 4.9; EST_HUMAN HIT: AI554854.1, EVALUE 2.30e+00
LGCKGPLVWSYLQLAASGAATAYFSSFSAYCVFRFLMGMTFSGIILNSVSLVSPAEERPGRA

SEQ ID NO: 33341 - protein, 68 aa, Homo sapiens
  MAP TO AC000353.21; EXPRESSED IN BONE MARROW, SIGNAL =   3; EXPRESSED IN HBL100, SIGNAL = 1.1; EXPRESSED IN ADULT LIVER, SIGNAL = 1.8; EXPRESSED IN HEART, SIGNAL = 1.9; EXPRESSED IN PLACENTA, SIGNAL = 1.2; EXPRESSED IN BT474, SIGNAL = 2.6; EXPRESSED IN LUNG, SIGNAL = 1.4; EXPRESSED IN HELA, SIGNAL =   2; EXPRESSED IN BRAIN, SIGNAL = 2.4; EXPRESSED IN FETAL LIVER, SIGNAL = 1.8; EST_HUMAN HIT: AI934403.1, EVALUE 3.00e-07; SWISSPROT HIT: O76082, EVALUE 1.00e-06
QMGMGFASVHARLGGLTAPLVTTLGEYSTILPPVSFGATAILAGLAVCFLTETRNMPLVETIAAMERR

SEQ ID NO: 33342 - protein, 24 aa, Homo sapiens
  MAP TO AC000353.21; EXPRESSED IN FETAL LIVER, SIGNAL =  93; EXPRESSED IN LUNG, SIGNAL = 1.7; EXPRESSED IN PLACENTA, SIGNAL = 2.1; EXPRESSED IN BT474, SIGNAL = 1.7; EXPRESSED IN HEART, SIGNAL = 1.4; EXPRESSED IN BRAIN, SIGNAL = 1.7; EXPRESSED IN ADULT LIVER, SIGNAL = 1.4; EXPRESSED IN HELA, SIGNAL = 1.2; EXPRESSED IN HBL100, SIGNAL = 1.5; EXPRESSED IN BONE MARROW, SIGNAL = 1.5
VPRRGHGAEQQEEASRPVPGREDP

SEQ ID NO: 33343 - protein, 126 aa, Homo sapiens
  MAP TO AC000353.21; EXPRESSED IN FETAL LIVER, SIGNAL =  93; EXPRESSED IN LUNG, SIGNAL = 1.7; EXPRESSED IN PLACENTA, SIGNAL = 2.1; EXPRESSED IN BT474, SIGNAL = 1.7; EXPRESSED IN HEART, SIGNAL = 1.4; EXPRESSED IN BRAIN, SIGNAL = 1.7; EXPRESSED IN ADULT LIVER, SIGNAL = 1.4; EXPRESSED IN HELA, SIGNAL = 1.2; EXPRESSED IN HBL100, SIGNAL = 1.5; EXPRESSED IN BONE MARROW, SIGNAL = 1.5; EST_HUMAN HIT: AW444513.1, EVALUE 1.10e+00; SWISSPROT HIT: P48988, EVALUE 4.00e-11; EST_HUMAN HIT: BE872607.1, EVALUE 5.00e-04
SLAEKIQVLELLDESKMSQSEVARRFQVSQPQISRICKNKEKLLADWCSGTANRERKRKRESKYSGIDEALLCWYHIARAKAWDVTGPMLLHKAKELADIMGQDFVPSIGWLVRWKRRNNVGFGAR

SEQ ID NO: 33344 - protein, 296 aa, Homo sapiens
  MAP TO AC002470.5; EXPRESSED IN HEART, SIGNAL = 0.97; EXPRESSED IN ADULT LIVER, SIGNAL =  15; EXPRESSED IN PLACENTA, SIGNAL = 0.89; EXPRESSED IN BT474, SIGNAL = 0.77; EXPRESSED IN BONE MARROW, SIGNAL = 0.87; EXPRESSED IN LUNG, SIGNAL = 0.88; EXPRESSED IN HELA, SIGNAL = 0.64; EXPRESSED IN HBL100, SIGNAL = 0.74; EXPRESSED IN FETAL LIVER, SIGNAL =  23; EXPRESSED IN BRAIN, SIGNAL = 0.82; EST_HUMAN HIT: T72216.1, EVALUE 3.00e-60; SWISSPROT HIT: P05546, EVALUE 0.00e+00; EST_HUMAN HIT: AV694748.1, EVALUE 3.00e-85
MKHSLNALLIFLIITSAWGGSKGPLDQLEKGGETAQSADPQWEQLNNKNLSMPLLPADFPKENTVTNDWIPEGEEDDDYLDLEKIFSEDDDYIDIVDSLSVSPTDSDVSAGNILQLFHGKSRIQRLNILNAKFAFNLYRVLKDQVNTFDNIFIAPVGISTAMGMISLGLKGETHEQVHSILHFKDFVNASSKYEITTIHNLFRKLTHRLFRRNFGYTLRSVNDLYIQKQFPILLDFKTKVREYYFAEAQIADFSDPAFISKTNNHIMKLTKGLIKDALENIDPATQMMILNCIYFK

SEQ ID NO: 33345 - protein, 67 aa, Homo sapiens
  MAP TO AC002470.5; EXPRESSED IN PLACENTA, SIGNAL =   4; EXPRESSED IN BT474, SIGNAL = 3.7; EXPRESSED IN LUNG, SIGNAL = 7.1; EXPRESSED IN ADULT LIVER, SIGNAL = 4.4; EXPRESSED IN HEART, SIGNAL = 3.9; EXPRESSED IN BONE MARROW, SIGNAL = 4.7; EXPRESSED IN BRAIN, SIGNAL = 4.7; EXPRESSED IN HELA, SIGNAL =   4; EXPRESSED IN FETAL LIVER, SIGNAL = 4.6; EXPRESSED IN HBL100, SIGNAL = 3.9; EST_HUMAN HIT: BF381101.1, EVALUE 3.00e-17; SWISSPROT HIT: P50090, EVALUE 5.00e-05; EST_HUMAN HIT: AW249542.1, EVALUE 2.00e-05
WTRIPTEHLLRGSPPPPQRRYGHTMVAFDRHLYVFGGAADNTLPNELHCYDVDFQTWEVVQPSSDSE

SEQ ID NO: 33346 - protein, 61 aa, Homo sapiens
  MAP TO AC002470.5; EXPRESSED IN PLACENTA, SIGNAL =   4; EXPRESSED IN BT474, SIGNAL = 3.7; EXPRESSED IN LUNG, SIGNAL = 7.1; EXPRESSED IN ADULT LIVER, SIGNAL = 4.4; EXPRESSED IN HEART, SIGNAL = 3.9; EXPRESSED IN BONE MARROW, SIGNAL = 4.7; EXPRESSED IN BRAIN, SIGNAL = 4.7; EXPRESSED IN HELA, SIGNAL =   4; EXPRESSED IN FETAL LIVER, SIGNAL = 4.6; EXPRESSED IN HBL100, SIGNAL = 3.9; EST_HUMAN HIT: BF381101.1, EVALUE 3.00e-14; EST_HUMAN HIT: AW385142.1, EVALUE 5.20e-02; SWISSPROT HIT: P41246, EVALUE 2.00e+00
LNTCSGAPHHPRSGATGIPWWPLTATSMCLGVRPTTRCPTSCTAMTWTSRPGRSSSPAPTA

SEQ ID NO: 33347 - protein, 121 aa, Homo sapiens
  MAP TO AC006230.11; EXPRESSED IN PLACENTA, SIGNAL = 4.6; EXPRESSED IN BT474, SIGNAL = 9.5; EXPRESSED IN HBL100, SIGNAL =  24; EXPRESSED IN FETAL LIVER, SIGNAL = 4.4; EXPRESSED IN LUNG, SIGNAL = 3.3; EXPRESSED IN HEART, SIGNAL = 2.4; EXPRESSED IN ADULT LIVER, SIGNAL = 1.9; EXPRESSED IN BRAIN, SIGNAL = 4.2; EXPRESSED IN BONE MARROW, SIGNAL = 4.9; EXPRESSED IN HELA, SIGNAL = 5.6; EST_HUMAN HIT: BE264843.1, EVALUE 1.00e-11; EST_HUMAN HIT: BE397757.1, EVALUE 7.00e-12
SFSSLLGGLDLERERLLLSCLRREGLGEPEELLELELREVLELPERLEAEEELEPLLEPVLVLEPELEVELDRDLVLLLPLEALCLFRVLSRPRSFSLDSLVAPLSFERSLDFSSERSLRL

SEQ ID NO: 33348 - protein, 38 aa, Homo sapiens
  MAP TO AC006160.9; EXPRESSED IN BT474, SIGNAL =  29; EXPRESSED IN FETAL LIVER, SIGNAL =  30; EXPRESSED IN HELA, SIGNAL =  20; EXPRESSED IN PLACENTA, SIGNAL = 9.3; EXPRESSED IN BONE MARROW, SIGNAL = 9.3; EXPRESSED IN HBL100, SIGNAL =  37; EXPRESSED IN LUNG, SIGNAL =  14; EXPRESSED IN ADULT LIVER, SIGNAL =  10; EXPRESSED IN BRAIN, SIGNAL =  15; EXPRESSED IN HEART, SIGNAL =   8; EST_HUMAN HIT: BF211805.1, EVALUE 7.00e-09; EST_HUMAN HIT: BE275287.1, EVALUE 4.00e-05
PRWRPGLEQKLTVINQYQSSRNRIPQRYHTSSPAGSSS

SEQ ID NO: 33349 - protein, 48 aa, Homo sapiens
  MAP TO AC006160.9; EXPRESSED IN LUNG, SIGNAL = 1.2; EXPRESSED IN HELA, SIGNAL =   1; EXPRESSED IN PLACENTA, SIGNAL = 2.6; EXPRESSED IN FETAL LIVER, SIGNAL = 1.4; EXPRESSED IN BRAIN, SIGNAL =   1; EXPRESSED IN HEART, SIGNAL = 0.97; EXPRESSED IN BT474, SIGNAL = 0.91; EXPRESSED IN BONE MARROW, SIGNAL = 0.94; EXPRESSED IN HBL100, SIGNAL = 0.89; EXPRESSED IN ADULT LIVER, SIGNAL = 1.9; SWISSPROT HIT: P18302, EVALUE 2.70e+00
FLEETQQAQRAREVETLRQEHRKEMQAMVADFSSAQAQLQARLAALEA

SEQ ID NO: 33350 - protein, 44 aa, Homo sapiens
  MAP TO AC006160.9; EXPRESSED IN LUNG, SIGNAL = 1.2; EXPRESSED IN HELA, SIGNAL =   1; EXPRESSED IN PLACENTA, SIGNAL = 2.6; EXPRESSED IN FETAL LIVER, SIGNAL = 1.4; EXPRESSED IN BRAIN, SIGNAL =   1; EXPRESSED IN HEART, SIGNAL = 0.97; EXPRESSED IN BT474, SIGNAL = 0.91; EXPRESSED IN BONE MARROW, SIGNAL = 0.94; EXPRESSED IN HBL100, SIGNAL = 0.89; EXPRESSED IN ADULT LIVER, SIGNAL = 1.9; EST_HUMAN HIT: AI039029.1, EVALUE 2.10e-02; SWISSPROT HIT: P15251, EVALUE 3.50e+00
KPSGPGRWRHCARNTGRRCRPWWQISVVPRPSSRPGWLPWKPSK

SEQ ID NO: 33351 - protein, 69 aa, Homo sapiens
  MAP TO AC006160.9; EXPRESSED IN BT474, SIGNAL = 1.1; EXPRESSED IN HELA, SIGNAL = 1.2; EXPRESSED IN BRAIN, SIGNAL = 1.3; EXPRESSED IN PLACENTA, SIGNAL = 0.6; EXPRESSED IN HBL100, SIGNAL = 1.1; EXPRESSED IN FETAL LIVER, SIGNAL = 2.1; EXPRESSED IN LUNG, SIGNAL = 5.8e+02; EXPRESSED IN ADULT LIVER, SIGNAL =   1; EXPRESSED IN HEART, SIGNAL = 0.82; EST_HUMAN HIT: BE168080.1, EVALUE 4.00e-04; SWISSPROT HIT: P25386, EVALUE 2.00e-03
TKKEASAETEYMKQQYEEDLRKIKHQTEEEKKHLKDQLVKRLEDLVKKHTVEIKSVRSSVEAERKKLQR

SEQ ID NO: 33352 - protein, 22 aa, Homo sapiens
  MAP TO AC006160.9; EXPRESSED IN BT474, SIGNAL = 1.1; EXPRESSED IN HELA, SIGNAL = 1.2; EXPRESSED IN BRAIN, SIGNAL = 1.3; EXPRESSED IN PLACENTA, SIGNAL = 0.6; EXPRESSED IN HBL100, SIGNAL = 1.1; EXPRESSED IN FETAL LIVER, SIGNAL = 2.1; EXPRESSED IN LUNG, SIGNAL = 5.8e+02; EXPRESSED IN ADULT LIVER, SIGNAL =   1; EXPRESSED IN HEART, SIGNAL = 0.82
MKKTFVKSNIRQKRRRNISKTS

SEQ ID NO: 33353 - protein, 46 aa, Homo sapiens
  MAP TO AC006111.2; EXPRESSED IN PLACENTA, SIGNAL = 0.89; EXPRESSED IN LUNG, SIGNAL = 1.2; EXPRESSED IN HELA, SIGNAL = 2.7; EXPRESSED IN BRAIN, SIGNAL = 1.2; EXPRESSED IN HEART, SIGNAL = 1.4; EXPRESSED IN BT474, SIGNAL = 7.9; EXPRESSED IN HBL100, SIGNAL = 3.6; EXPRESSED IN FETAL LIVER, SIGNAL = 2.2; EXPRESSED IN BONE MARROW, SIGNAL = 2.2; EXPRESSED IN ADULT LIVER, SIGNAL = 1.6; EST_HUMAN HIT: BE789235.1, EVALUE 3.00e-20; EST_HUMAN HIT: H90809.1, EVALUE 2.00e-20; SWISSPROT HIT: Q12931, EVALUE 2.00e-21
VLFCFEQFDELTLLHLREFDKKKLISVETDIVVDHYKEEKFEDRSP

SEQ ID NO: 33354 - protein, 29 aa, Homo sapiens
  MAP TO AC006111.2; EXPRESSED IN PLACENTA, SIGNAL = 0.89; EXPRESSED IN LUNG, SIGNAL = 1.2; EXPRESSED IN HELA, SIGNAL = 2.7; EXPRESSED IN BRAIN, SIGNAL = 1.2; EXPRESSED IN HEART, SIGNAL = 1.4; EXPRESSED IN BT474, SIGNAL = 7.9; EXPRESSED IN HBL100, SIGNAL = 3.6; EXPRESSED IN FETAL LIVER, SIGNAL = 2.2; EXPRESSED IN BONE MARROW, SIGNAL = 2.2; EXPRESSED IN ADULT LIVER, SIGNAL = 1.6; EST_HUMAN HIT: AI964056.1, EVALUE 6.00e-04; EST_HUMAN HIT: AW468509.1, EVALUE 4.00e-04
LLATCRFSSALSSLMSSPCCTFVSLTRRS

SEQ ID NO: 33355 - protein, 37 aa, Homo sapiens
  MAP TO AC006111.2; EXPRESSED IN BONE MARROW, SIGNAL = 1.2; EXPRESSED IN ADULT LIVER, SIGNAL = 1.6; EXPRESSED IN BRAIN, SIGNAL = 1.7; EXPRESSED IN BT474, SIGNAL = 2.6; EXPRESSED IN HBL100, SIGNAL = 2.2; EXPRESSED IN FETAL LIVER, SIGNAL = 2.1; EXPRESSED IN LUNG, SIGNAL = 1.2; EXPRESSED IN HELA, SIGNAL = 1.1; EXPRESSED IN PLACENTA, SIGNAL = 1.7; EXPRESSED IN HEART, SIGNAL = 1.2; EST_HUMAN HIT: AA631940.1, EVALUE 2.00e-11; SWISSPROT HIT: P13468, EVALUE 2.80e+00; EST_HUMAN HIT: BF510632.1, EVALUE 4.00e-12
SHPQAGRPPRRHLQASMMTPRSQPLKNPWPPLWMAVT

SEQ ID NO: 33356 - protein, 89 aa, Homo sapiens
  MAP TO AC006111.2; EXPRESSED IN BONE MARROW, SIGNAL = 5.3; EXPRESSED IN ADULT LIVER, SIGNAL = 4.5; EXPRESSED IN HEART, SIGNAL = 4.4; EXPRESSED IN PLACENTA, SIGNAL = 5.8; EXPRESSED IN BT474, SIGNAL = 4.4; EXPRESSED IN HBL100, SIGNAL = 6.2; EXPRESSED IN FETAL LIVER, SIGNAL = 5.9; EXPRESSED IN LUNG, SIGNAL = 6.9; EXPRESSED IN HELA, SIGNAL = 4.7; EXPRESSED IN BRAIN, SIGNAL = 6.8; EST_HUMAN HIT: AA631949.1, EVALUE 4.00e-09; SWISSPROT HIT: P30545, EVALUE 1.60e+00
IPGGLVDRMTEIRGFNEEEIKVCLEQMFPEDQALLGWMLSQVQADRALYLMCTVPAFCRLTGMALGHLWRSRTGPQDAELWPPRTLCEL

SEQ ID NO: 33357 - protein, 94 aa, Homo sapiens
  MAP TO AC006111.2; EXPRESSED IN BONE MARROW, SIGNAL = 5.3; EXPRESSED IN ADULT LIVER, SIGNAL = 4.5; EXPRESSED IN HEART, SIGNAL = 4.4; EXPRESSED IN PLACENTA, SIGNAL = 5.8; EXPRESSED IN BT474, SIGNAL = 4.4; EXPRESSED IN HBL100, SIGNAL = 6.2; EXPRESSED IN FETAL LIVER, SIGNAL = 5.9; EXPRESSED IN LUNG, SIGNAL = 6.9; EXPRESSED IN HELA, SIGNAL = 4.7; EXPRESSED IN BRAIN, SIGNAL = 6.8; EST_HUMAN HIT: AA371948.1, EVALUE 1.90e+00; SWISSPROT HIT: P55627, EVALUE 8.70e-01
SRIQRHRKALLSKVGGGPELGGPWHRLASLLLVEGLTDLQLREHDFTQVEATRGGGHPARTVALDRLFLPLSRVSVPPRVSITIGVAGMGKTTL

SEQ ID NO: 33358 - protein, 64 aa, Homo sapiens
  MAP TO AC006111.2; EXPRESSED IN ADULT LIVER, SIGNAL =  11; EXPRESSED IN FETAL LIVER, SIGNAL =  17; EXPRESSED IN LUNG, SIGNAL =  17; EXPRESSED IN HELA, SIGNAL =  20; EXPRESSED IN HEART, SIGNAL =  11; EXPRESSED IN PLACENTA, SIGNAL =  12; EXPRESSED IN BONE MARROW, SIGNAL =  15; EXPRESSED IN BRAIN, SIGNAL =  15; EXPRESSED IN BT474, SIGNAL =  13; EXPRESSED IN HBL100, SIGNAL =  18
VSDACAQEANLSLSLSQGVLQSLLPQLLYCRKLRWIPGQGAGAGEGAEERAEAVPSPPPSFSVS

SEQ ID NO: 33359 - protein, 86 aa, Homo sapiens
  MAP TO AC006111.2; EXPRESSED IN ADULT LIVER, SIGNAL =  11; EXPRESSED IN FETAL LIVER, SIGNAL =  17; EXPRESSED IN LUNG, SIGNAL =  17; EXPRESSED IN HELA, SIGNAL =  20; EXPRESSED IN HEART, SIGNAL =  11; EXPRESSED IN PLACENTA, SIGNAL =  12; EXPRESSED IN BONE MARROW, SIGNAL =  15; EXPRESSED IN BRAIN, SIGNAL =  15; EXPRESSED IN BT474, SIGNAL =  13; EXPRESSED IN HBL100, SIGNAL =  18; EST_HUMAN HIT: AA631949.1, EVALUE 1.50e-02; SWISSPROT HIT: Q51658, EVALUE 1.60e+00
EFVAAAYYYGASRRAIFDLFTESGVSWPRLGFLTHFRSAAQRAMQAEDGRLDVFLRFLSGLLSPRVNALLAGSLLAQGEHQAYRTQ

SEQ ID NO: 33360 - protein, 135 aa, Homo sapiens
  MAP TO AC006111.2; EXPRESSED IN ADULT LIVER, SIGNAL =  11; EXPRESSED IN FETAL LIVER, SIGNAL =  17; EXPRESSED IN LUNG, SIGNAL =  17; EXPRESSED IN HELA, SIGNAL =  20; EXPRESSED IN HEART, SIGNAL =  11; EXPRESSED IN PLACENTA, SIGNAL =  12; EXPRESSED IN BONE MARROW, SIGNAL =  15; EXPRESSED IN BRAIN, SIGNAL =  15; EXPRESSED IN BT474, SIGNAL =  13; EXPRESSED IN HBL100, SIGNAL =  18; SWISSPROT HIT: Q01705, EVALUE 9.30e-02; EST_HUMAN HIT: AW003023.1, EVALUE 2.00e-06
SLWQPRITMAHPGGPSSTSSLRAAYPGPGWASSRISGAQPSGPCRQRTGGWTCSCASSPASCLRGSMPSWPAPCWPKASTRPTGPRWLSSCRAACAPMPQSVHGPSTCCTACMSCSTPSWPAAWRRPWRAGPWPG

SEQ ID NO: 33361 - protein, 107 aa, Homo sapiens
  MAP TO AC006052.5; EXPRESSED IN HEART, SIGNAL =   3; EXPRESSED IN PLACENTA, SIGNAL = 2.9; EXPRESSED IN BT474, SIGNAL = 3.2; EXPRESSED IN BONE MARROW, SIGNAL = 2.4; EXPRESSED IN LUNG, SIGNAL =   3; EXPRESSED IN HELA, SIGNAL = 2.8; EXPRESSED IN ADULT LIVER, SIGNAL = 2.1; EXPRESSED IN BRAIN, SIGNAL = 5.1; EXPRESSED IN HBL100, SIGNAL = 2.6; EXPRESSED IN FETAL LIVER, SIGNAL = 2.4; EST_HUMAN HIT: AW340174.1, EVALUE 1.00e-32; SWISSPROT HIT: P19028, EVALUE 2.00e-04
RIHGYRNQRVEVEVAPLTITLRDSLAKFLLPVPETLCSPGLEILVPEGGILPPGETTIPLNYKLRLPSGHFGLLLPLSQQAKKEVTMLIGVIHPDYQDEIILLLHNG

SEQ ID NO: 33362 - protein, 60 aa, Homo sapiens
  MAP TO AC006052.5; EXPRESSED IN HBL100, SIGNAL = 1.5; EXPRESSED IN FETAL LIVER, SIGNAL = 1.1; EXPRESSED IN BRAIN, SIGNAL = 2.8; EXPRESSED IN BT474, SIGNAL = 1.5; EXPRESSED IN BONE MARROW, SIGNAL = 2.4; EXPRESSED IN HELA, SIGNAL = 2.2; EXPRESSED IN ADULT LIVER, SIGNAL = 1.4; EXPRESSED IN PLACENTA, SIGNAL = 2.1; EXPRESSED IN LUNG, SIGNAL = 1.9; EXPRESSED IN HEART, SIGNAL = 1.9; EST_HUMAN HIT: BE149334.1, EVALUE 6.00e-18; SWISSPROT HIT: P23074, EVALUE 4.00e-06
GIVEIRATTKDLKDAGLVIPTKYPFNSPIWPLQKTGGSWRMTMNYRELNQVVTPIAAAVP

SEQ ID NO: 33363 - protein, 35 aa, Homo sapiens
  MAP TO AC006052.5; EXPRESSED IN HBL100, SIGNAL = 1.5; EXPRESSED IN FETAL LIVER, SIGNAL = 1.1; EXPRESSED IN BRAIN, SIGNAL = 2.8; EXPRESSED IN BT474, SIGNAL = 1.5; EXPRESSED IN BONE MARROW, SIGNAL = 2.4; EXPRESSED IN HELA, SIGNAL = 2.2; EXPRESSED IN ADULT LIVER, SIGNAL = 1.4; EXPRESSED IN PLACENTA, SIGNAL = 2.1; EXPRESSED IN LUNG, SIGNAL = 1.9; EXPRESSED IN HEART, SIGNAL = 1.9; EST_HUMAN HIT: BE149334.1, EVALUE 1.00e-09
YHQGLERCRVGDSHQIPIQLSHLASAEDRWVLEND

SEQ ID NO: 33364 - protein, 35 aa, Homo sapiens
  MAP TO AC006052.5; EXPRESSED IN HEART, SIGNAL = 1.4; EXPRESSED IN PLACENTA, SIGNAL =   2; EXPRESSED IN FETAL LIVER, SIGNAL = 1.8; EXPRESSED IN LUNG, SIGNAL = 1.5; EXPRESSED IN HELA, SIGNAL = 1.6; EXPRESSED IN ADULT LIVER, SIGNAL = 1.9; EXPRESSED IN BRAIN, SIGNAL = 1.4; EXPRESSED IN BT474, SIGNAL = 1.5; EXPRESSED IN BONE MARROW, SIGNAL = 2.5; EXPRESSED IN HBL100, SIGNAL = 1.7; EST_HUMAN HIT: AA055018.1, EVALUE 2.00e-08; SWISSPROT HIT: P70213, EVALUE 2.80e-02
KQILSLKSAKIALSESLISSRERAEIVKKQTKALI

SEQ ID NO: 33365 - protein, 42 aa, Homo sapiens
  MAP TO AC005973.2; EXPRESSED IN PLACENTA, SIGNAL = 1.5; EXPRESSED IN HBL100, SIGNAL = 1.4; EXPRESSED IN FETAL LIVER, SIGNAL = 1.3; EXPRESSED IN LUNG, SIGNAL = 1.6; EXPRESSED IN HELA, SIGNAL = 1.3; EXPRESSED IN BRAIN, SIGNAL = 2.2; EXPRESSED IN BT474, SIGNAL =   2; EXPRESSED IN BONE MARROW, SIGNAL = 1.9; EXPRESSED IN ADULT LIVER, SIGNAL = 1.2; EXPRESSED IN HEART, SIGNAL =   1; EST_HUMAN HIT: AW843642.1, EVALUE 1.00e-18; SWISSPROT HIT: Q23356, EVALUE 9.00e-14
DEEEEIKQEINMLKKYSHHRNIATYYGAFIKKSPPGNDDQLW

SEQ ID NO: 33366 - protein, 33 aa, Homo sapiens
  MAP TO AC005973.2; EXPRESSED IN PLACENTA, SIGNAL = 1.5; EXPRESSED IN HBL100, SIGNAL = 1.4; EXPRESSED IN FETAL LIVER, SIGNAL = 1.3; EXPRESSED IN LUNG, SIGNAL = 1.6; EXPRESSED IN HELA, SIGNAL = 1.3; EXPRESSED IN BRAIN, SIGNAL = 2.2; EXPRESSED IN BT474, SIGNAL =   2; EXPRESSED IN BONE MARROW, SIGNAL = 1.9; EXPRESSED IN ADULT LIVER, SIGNAL = 1.2; EXPRESSED IN HEART, SIGNAL =   1; EST_HUMAN HIT: AW843642.1, EVALUE 1.00e-10
PICLGRGGRDQTGDQHAEKVLSPPQHRHLLRSL

SEQ ID NO: 33367 - protein, 73 aa, Homo sapiens
  MAP TO AC005973.2; EXPRESSED IN HEART, SIGNAL = 3.6; EXPRESSED IN BT474, SIGNAL = 8.4; EXPRESSED IN BONE MARROW, SIGNAL = 7.8; EXPRESSED IN HELA, SIGNAL = 5.2; EXPRESSED IN BRAIN, SIGNAL = 2.4; EXPRESSED IN PLACENTA, SIGNAL = 5.2; EXPRESSED IN FETAL LIVER, SIGNAL =   5; EXPRESSED IN LUNG, SIGNAL = 6.6; EXPRESSED IN ADULT LIVER, SIGNAL = 4.6; EXPRESSED IN HBL100, SIGNAL = 8.5; EST_HUMAN HIT: BE938148.1, EVALUE 3.00e-04; EST_HUMAN HIT: AA446174.1, EVALUE 4.00e-02
EYKRKQLEEQRQSERLQRQLQQEHAYLKSLQQQQQQQQLQKQQQQQLLPGDRKPLYHYGRGMNPADKPAWARE

SEQ ID NO: 33368 - protein, 72 aa, Homo sapiens
  MAP TO AC005973.2; EXPRESSED IN HEART, SIGNAL = 3.6; EXPRESSED IN BT474, SIGNAL = 8.4; EXPRESSED IN BONE MARROW, SIGNAL = 7.8; EXPRESSED IN HELA, SIGNAL = 5.2; EXPRESSED IN BRAIN, SIGNAL = 2.4; EXPRESSED IN PLACENTA, SIGNAL = 5.2; EXPRESSED IN FETAL LIVER, SIGNAL =   5; EXPRESSED IN LUNG, SIGNAL = 6.6; EXPRESSED IN ADULT LIVER, SIGNAL = 4.6; EXPRESSED IN HBL100, SIGNAL = 8.5
TLLSPLSLPLGPGIQAEAAGGAAAVRTSPEAAAAGACLPQVPAAAATAAAASETAAAAAPAWGQEAPVPLWS

SEQ ID NO: 33369 - protein, 46 aa, Homo sapiens
  MAP TO AC005973.2; EXPRESSED IN ADULT LIVER, SIGNAL = 1.3; EXPRESSED IN BRAIN, SIGNAL = 1.9; EXPRESSED IN HEART, SIGNAL = 0.97; EXPRESSED IN PLACENTA, SIGNAL = 1.5; EXPRESSED IN BT474, SIGNAL = 2.5; EXPRESSED IN HELA, SIGNAL = 1.7; EXPRESSED IN LUNG, SIGNAL = 2.2; EXPRESSED IN FETAL LIVER, SIGNAL =   2; EXPRESSED IN HBL100, SIGNAL = 2.9; EXPRESSED IN BONE MARROW, SIGNAL = 2.2; EST_HUMAN HIT: BE312777.1, EVALUE 6.00e-19; SWISSPROT HIT: Q23356, EVALUE 3.00e-14
VNLLVGTENGLMLLDRSGQGKVYGLIGRRRFQQMDVLEGLNLLITI

SEQ ID NO: 33370 - protein, 203 aa, Homo sapiens
  MAP TO AC005973.2; EXPRESSED IN BT474, SIGNAL = 3.7; EXPRESSED IN HELA, SIGNAL = 5.9; EXPRESSED IN PLACENTA, SIGNAL = 4.9; EXPRESSED IN BONE MARROW, SIGNAL = 5.7; EXPRESSED IN FETAL LIVER, SIGNAL = 8.6; EXPRESSED IN LUNG, SIGNAL =   5; EXPRESSED IN ADULT LIVER, SIGNAL = 4.4; EXPRESSED IN BRAIN, SIGNAL =  15; EXPRESSED IN HEART, SIGNAL = 5.1; EXPRESSED IN HBL100, SIGNAL = 6.4; EST_HUMAN HIT: BE797916.1, EVALUE 1.00e-42; EST_HUMAN HIT: BE378695.1, EVALUE 1.00e-42; SWISSPROT HIT: P23956, EVALUE 1.00e-29
MSNNSPEYALVFTISGAMATMVSSGLGAACGMAKNGTGIMAMSVMWPELIHMKSIIPVVMAGIITIYGLVAAVPPANSLNDDNSLYSSFLQLGAGLSGLAAGFAIVIVGDTGKCGTAQQPRLFVGMILILIFAKVLILSTKQPLSKPTSHRIRCKDHPSSFRNKQPDTHVLGSWPSVVDLLSVQCPRVHRLLARPCPLPPHAV

SEQ ID NO: 33371 - protein, 126 aa, Homo sapiens
  MAP TO AC005921.3; EXPRESSED IN BT474, SIGNAL =   3; EXPRESSED IN HELA, SIGNAL = 3.4; EXPRESSED IN HEART, SIGNAL = 1.4; EXPRESSED IN PLACENTA, SIGNAL = 2.2; EXPRESSED IN HBL100, SIGNAL = 6.5; EXPRESSED IN FETAL LIVER, SIGNAL =   2; EXPRESSED IN LUNG, SIGNAL = 4.5; EXPRESSED IN ADULT LIVER, SIGNAL = 1.2; EXPRESSED IN BONE MARROW, SIGNAL = 1.5; EST_HUMAN HIT: AW405704.1, EVALUE 3.00e-38; EST_HUMAN HIT: BE378863.1, EVALUE 2.00e-38; SWISSPROT HIT: P08206, EVALUE 2.00e-34
SLPSAHNAPPAKVSTDLTNNPSPMEHTMETVLFTFHRFAGDKGYLMKEGLKVLMGKEFLGFLENQKDPLAADITMKDMDQCQDSTLNFQNLFSLTAGLTTVDNNYFVVPMKQKGTKQAELSNYSAL

SEQ ID NO: 33372 - protein, 94 aa, Homo sapiens
  MAP TO AC005921.3; EXPRESSED IN HEART, SIGNAL = 0.85; EXPRESSED IN ADULT LIVER, SIGNAL =  47; EXPRESSED IN BRAIN, SIGNAL = 2.3; EXPRESSED IN BONE MARROW, SIGNAL = 3.4; EXPRESSED IN HBL100, SIGNAL =   8; EXPRESSED IN FETAL LIVER, SIGNAL = 3.2; EXPRESSED IN HELA, SIGNAL = 3.2; EXPRESSED IN PLACENTA, SIGNAL = 2.3; EXPRESSED IN BT474, SIGNAL =  12; EXPRESSED IN LUNG, SIGNAL = 2.3
EKLRKRTEEPDRDERLKKEKQEREEREKEREREREERERKRRREEEEREKERARDRERRKRSRSRSRHSSRTSDRRCSRSRDHKRSRSRERRRS

SEQ ID NO: 33373 - protein, 103 aa, Homo sapiens
  MAP TO AC005921.3; EXPRESSED IN BONE MARROW, SIGNAL = 2.1; EXPRESSED IN ADULT LIVER, SIGNAL =  19; EXPRESSED IN BRAIN, SIGNAL = 0.76; EXPRESSED IN BT474, SIGNAL =  13; EXPRESSED IN HBL100, SIGNAL = 4.3; EXPRESSED IN LUNG, SIGNAL = 9.2; EXPRESSED IN HELA, SIGNAL = 2.5; EXPRESSED IN PLACENTA, SIGNAL = 1.8; EXPRESSED IN FETAL LIVER, SIGNAL = 8.2; EXPRESSED IN HEART, SIGNAL = 1.4; EST_HUMAN HIT: AA502033.1, EVALUE 2.00e-30; SWISSPROT HIT: O15438, EVALUE 5.00e-44
FLVMLAAMAMAAGGIQAARVLHQALLHNKIRSPQSFFDTTPSGRILNCFSKDIYVVDEVLAPVILMLLNSFFNAISTLVVIMASTPLFTVVILPLAVLYTLVQ

SEQ ID NO: 33374 - protein, 40 aa, Homo sapiens
  MAP TO AC005921.3; EXPRESSED IN BONE MARROW, SIGNAL = 2.1; EXPRESSED IN ADULT LIVER, SIGNAL =  19; EXPRESSED IN BRAIN, SIGNAL = 0.76; EXPRESSED IN BT474, SIGNAL =  13; EXPRESSED IN HBL100, SIGNAL = 4.3; EXPRESSED IN LUNG, SIGNAL = 9.2; EXPRESSED IN HELA, SIGNAL = 2.5; EXPRESSED IN PLACENTA, SIGNAL = 1.8; EXPRESSED IN FETAL LIVER, SIGNAL = 8.2; EXPRESSED IN HEART, SIGNAL = 1.4; EST_HUMAN HIT: U66674.1, EVALUE 1.00e-09; SWISSPROT HIT: Q92455, EVALUE 2.10e+00; EST_HUMAN HIT: BF094938.1, EVALUE 3.00e-20
QPWPWQRVASRLPVCCTRHCCTTRYARHSPSLTPHHQAAS

SEQ ID NO: 33375 - protein, 154 aa, Homo sapiens
  MAP TO AC005921.3; EXPRESSED IN FETAL LIVER, SIGNAL =   1; EXPRESSED IN ADULT LIVER, SIGNAL = 1.2; EXPRESSED IN PLACENTA, SIGNAL = 1.4; EXPRESSED IN BONE MARROW, SIGNAL = 1.3; EXPRESSED IN HBL100, SIGNAL = 2.9; EXPRESSED IN LUNG, SIGNAL = 1.4; EXPRESSED IN HELA, SIGNAL = 1.3; EXPRESSED IN BRAIN, SIGNAL =   3; EXPRESSED IN BT474, SIGNAL = 6.9; EXPRESSED IN HEART, SIGNAL = 1.2; SWISSPROT HIT: Q02926, EVALUE 6.30e-01; EST_HUMAN HIT: BE741337.1, EVALUE 2.00e-54; EST_HUMAN HIT: D78804.1, EVALUE 6.00e-35
EEEDDDDDDDDNLPQLKKESELPFVPNYLANPAFPFIYTPTAEDSAQMQNGGPSTPPASPPADGSPPLLPPGEPPLLGTFPRDHTSLALVQNGDVSAPSAILRTPESTKPGPVCQPPVSQSRSLFSSVPSKPPMSLEPQNGTYAGPAPAFQPFF

SEQ ID NO: 33376 - protein, 20 aa, Homo sapiens
  MAP TO AC005921.3; EXPRESSED IN FETAL LIVER, SIGNAL =   1; EXPRESSED IN ADULT LIVER, SIGNAL = 1.2; EXPRESSED IN PLACENTA, SIGNAL = 1.4; EXPRESSED IN BONE MARROW, SIGNAL = 1.3; EXPRESSED IN HBL100, SIGNAL = 2.9; EXPRESSED IN LUNG, SIGNAL = 1.4; EXPRESSED IN HELA, SIGNAL = 1.3; EXPRESSED IN BRAIN, SIGNAL =   3; EXPRESSED IN BT474, SIGNAL = 6.9; EXPRESSED IN HEART, SIGNAL = 1.2
LLFKWKKKMMMMMMMTTSPS

SEQ ID NO: 33377 - protein, 249 aa, Homo sapiens
  MAP TO AC005883.6; EXPRESSED IN BRAIN, SIGNAL = 5.8; EXPRESSED IN HEART, SIGNAL = 4.1; EXPRESSED IN HBL100, SIGNAL =  55; EXPRESSED IN HELA, SIGNAL =  28; EXPRESSED IN ADULT LIVER, SIGNAL =  11; EXPRESSED IN BT474, SIGNAL =  37; EXPRESSED IN BONE MARROW, SIGNAL =  25; EXPRESSED IN FETAL LIVER, SIGNAL =  28; EXPRESSED IN PLACENTA, SIGNAL = 9.8; EXPRESSED IN LUNG, SIGNAL =  14; EST_HUMAN HIT: BE383869.1, EVALUE 1.00e-110; SWISSPROT HIT: P18124, EVALUE 1.00e-107; EST_HUMAN HIT: BE794127.1, EVALUE 1.00e-111
ARTMEGVEEKKKKVPAVPETLKKKRRNFAEPKIKHLRKKFAQKMLQKARRKLIYEKAKHYHKEYRQLYRTEIQMPRIARKAGNFYVPAKPKLAFVIRIRGVNGVSPKIRKVLQLLRLCQIFNETFVKLNKASINMLRIVEPYIAWGCPNLKSVNELIYKRGYGKINKKGVASTDNTLIARSLGKYSINCMEDLIHEIYTVGKCFKEANNFLWPFKLSSPQGRMKKKTTHFVEVEMLATGRTRSTGLLED

SEQ ID NO: 33378 - protein, 33 aa, Homo sapiens
  MAP TO AC005632.2; EXPRESSED IN FETAL LIVER, SIGNAL = 2.7; EXPRESSED IN LUNG, SIGNAL = 3.2; EXPRESSED IN HEART, SIGNAL = 2.1; EXPRESSED IN BONE MARROW, SIGNAL = 2.4; EXPRESSED IN HELA, SIGNAL = 4.3; EXPRESSED IN ADULT LIVER, SIGNAL = 2.6; EXPRESSED IN BRAIN, SIGNAL = 3.1; EXPRESSED IN PLACENTA, SIGNAL = 2.7; EXPRESSED IN BT474, SIGNAL = 5.6; EXPRESSED IN HBL100, SIGNAL =  12; EST_HUMAN HIT: BE144970.1, EVALUE 1.00e-06; SWISSPROT HIT: Q10968, EVALUE 4.80e+00
SVTVHKGGLSGGVSSFWWVPGLAGLRSEAADLC

SEQ ID NO: 33379 - protein, 24 aa, Homo sapiens
  MAP TO AC005632.2; EXPRESSED IN FETAL LIVER, SIGNAL = 2.7; EXPRESSED IN LUNG, SIGNAL = 3.2; EXPRESSED IN HEART, SIGNAL = 2.1; EXPRESSED IN BONE MARROW, SIGNAL = 2.4; EXPRESSED IN HELA, SIGNAL = 4.3; EXPRESSED IN ADULT LIVER, SIGNAL = 2.6; EXPRESSED IN BRAIN, SIGNAL = 3.1; EXPRESSED IN PLACENTA, SIGNAL = 2.7; EXPRESSED IN BT474, SIGNAL = 5.6; EXPRESSED IN HBL100, SIGNAL =  12; EST_HUMAN HIT: BE386430.1, EVALUE 1.00e-04; EST_HUMAN HIT: BE895532.1, EVALUE 2.00e-04
VKLQTFAVSVTALKGGTDPKREQQ

SEQ ID NO: 33380 - protein, 134 aa, Homo sapiens
  MAP TO AC005632.2; EXPRESSED IN BT474, SIGNAL =  13; EXPRESSED IN BONE MARROW, SIGNAL =  11; EXPRESSED IN HELA, SIGNAL = 8.6; EXPRESSED IN ADULT LIVER, SIGNAL = 9.6; EXPRESSED IN BRAIN, SIGNAL =  13; EXPRESSED IN PLACENTA, SIGNAL =  16; EXPRESSED IN HEART, SIGNAL = 8.1; EXPRESSED IN LUNG, SIGNAL =  12; EXPRESSED IN FETAL LIVER, SIGNAL =  12; EXPRESSED IN HBL100, SIGNAL =  11; EST_HUMAN HIT: AW069534.1, EVALUE 8.00e-41; SWISSPROT HIT: Q03391, EVALUE 9.80e-01
METGAGGSGVPRPEGKGEVPRLRAGCSSPPPAFALKGAGWARRPRWLELGRWRRWPEAAVPPPPRPGAGGDPSERPRPPMRLLAGWLCLSLASVWLARRMWTLRSPLTRSLYVNMTSGPGGPAAAAGGRKENHQ

SEQ ID NO: 33381 - protein, 104 aa, Homo sapiens
  MAP TO AC005632.2; EXPRESSED IN BT474, SIGNAL =  13; EXPRESSED IN BONE MARROW, SIGNAL =  11; EXPRESSED IN HELA, SIGNAL = 8.6; EXPRESSED IN ADULT LIVER, SIGNAL = 9.6; EXPRESSED IN BRAIN, SIGNAL =  13; EXPRESSED IN PLACENTA, SIGNAL =  16; EXPRESSED IN HEART, SIGNAL = 8.1; EXPRESSED IN LUNG, SIGNAL =  12; EXPRESSED IN FETAL LIVER, SIGNAL =  12; EXPRESSED IN HBL100, SIGNAL =  11; EST_HUMAN HIT: AV709389.1, EVALUE 3.00e-04; EST_HUMAN HIT: BE259064.1, EVALUE 2.00e-04
LVVLLPAARGRRRPTRAASHVHVQGAGERAPQRPHPPRQPHGRQAQAQPARQQSHRGPRPLARITAGAGARRRRHRRLRPPPPPPELEPSRPPCPSSPLQGKGW

SEQ ID NO: 33382 - protein, 51 aa, Homo sapiens
  MAP TO AC005632.2; EXPRESSED IN PLACENTA, SIGNAL = 1.2; EXPRESSED IN BONE MARROW, SIGNAL = 4.9; EXPRESSED IN LUNG, SIGNAL = 1.4; EXPRESSED IN HEART, SIGNAL = 0.88; EXPRESSED IN BT474, SIGNAL = 2.2; EXPRESSED IN HBL100, SIGNAL = 2.8; EXPRESSED IN FETAL LIVER, SIGNAL = 1.6; EXPRESSED IN HELA, SIGNAL = 1.3; EXPRESSED IN ADULT LIVER, SIGNAL = 0.9; EXPRESSED IN BRAIN, SIGNAL = 1.1; EST_HUMAN HIT: AA304324.1, EVALUE 6.00e-21; SWISSPROT HIT: P14907, EVALUE 2.00e+00; EST_HUMAN HIT: BF333707.1, EVALUE 2.00e-21
GYGVNGGSGENTYGRKSLGQELRVNNVTSPEFTSVQHGSCALATKDMRKSQ

SEQ ID NO: 33383 - protein, 24 aa, Homo sapiens
  MAP TO AC005632.2; EXPRESSED IN PLACENTA, SIGNAL = 1.2; EXPRESSED IN BONE MARROW, SIGNAL = 4.9; EXPRESSED IN LUNG, SIGNAL = 1.4; EXPRESSED IN HEART, SIGNAL = 0.88; EXPRESSED IN BT474, SIGNAL = 2.2; EXPRESSED IN HBL100, SIGNAL = 2.8; EXPRESSED IN FETAL LIVER, SIGNAL = 1.6; EXPRESSED IN HELA, SIGNAL = 1.3; EXPRESSED IN ADULT LIVER, SIGNAL = 0.9; EXPRESSED IN BRAIN, SIGNAL = 1.1; EST_HUMAN HIT: BF333707.1, EVALUE 1.00e-07; EST_HUMAN HIT: AA304324.1, EVALUE 4.00e-06
WLRCQWGIWGKYLWSEVIGARAEG

SEQ ID NO: 33384 - protein, 66 aa, Homo sapiens
  MAP TO AC005632.2; EXPRESSED IN BRAIN, SIGNAL = 0.97; EXPRESSED IN HEART, SIGNAL = 0.9; EXPRESSED IN PLACENTA, SIGNAL = 1.2; EXPRESSED IN BT474, SIGNAL = 3.6; EXPRESSED IN BONE MARROW, SIGNAL = 6.9; EXPRESSED IN ADULT LIVER, SIGNAL =   1; EXPRESSED IN HELA, SIGNAL = 2.7; EXPRESSED IN LUNG, SIGNAL = 2.3; EXPRESSED IN FETAL LIVER, SIGNAL =   3; EXPRESSED IN HBL100, SIGNAL = 3.9; EST_HUMAN HIT: AW965313.1, EVALUE 4.00e-27; EST_HUMAN HIT: BE219724.1, EVALUE 2.00e-27
ESRKSVLSKPTDSSPEVINYLGNKACECYISTADWAAVQEWQNAIHDLKKSTSSTSLNLKADFNYI

SEQ ID NO: 33385 - protein, 22 aa, Homo sapiens
  MAP TO AC005301.16; EXPRESSED IN PLACENTA, SIGNAL = 2.5; EXPRESSED IN BT474, SIGNAL = 1.1; EXPRESSED IN FETAL LIVER, SIGNAL = 0.8; EXPRESSED IN LUNG, SIGNAL = 5.5; EXPRESSED IN ADULT LIVER, SIGNAL = 0.8; EXPRESSED IN BRAIN, SIGNAL = 1.5; EXPRESSED IN HEART, SIGNAL = 5.8; EST_HUMAN HIT: AU140984.1, EVALUE 6.00e-05; EST_HUMAN HIT: AL045525.1, EVALUE 7.00e-03
SPSPVKPARSREAWWYLPQMPR

SEQ ID NO: 33386 - protein, 33 aa, Homo sapiens
  MAP TO AC005301.16; EXPRESSED IN HEART, SIGNAL = 2.6; EXPRESSED IN LUNG, SIGNAL = 3.7; EXPRESSED IN BRAIN, SIGNAL =   1; EXPRESSED IN PLACENTA, SIGNAL = 1.9
TLCPYHWAKPWDHLLPTTLKVLTSLLQSWKTSL

SEQ ID NO: 33387 - protein, 216 aa, Homo sapiens
  MAP TO AC005301.16; EXPRESSED IN ADULT LIVER, SIGNAL = 1.3; EXPRESSED IN BRAIN, SIGNAL = 1.5; EXPRESSED IN HEART, SIGNAL = 1.5; EXPRESSED IN BONE MARROW, SIGNAL = 1.3; EXPRESSED IN HBL100, SIGNAL = 1.2; EXPRESSED IN HELA, SIGNAL = 1.7; EXPRESSED IN PLACENTA, SIGNAL = 1.6; EXPRESSED IN BT474, SIGNAL = 1.1; EXPRESSED IN FETAL LIVER, SIGNAL = 1.3; EXPRESSED IN LUNG, SIGNAL = 1.8; EST_HUMAN HIT: AA256009.1, EVALUE 3.00e-13; SWISSPROT HIT: P51811, EVALUE 8.00e-41
TYGAIRCNILAIQISNDDTTIKLPPIEFFCVVMWRFLEVISRVVTLAFFIASLKLKSLPVLLIIYFVSLLAPWLEFWKSGAHLPGNKENNSNMVGTVLMLFLITLLYAAINFSCWSAVKLQLSDDKIIDGRQRWGHRILHYSFQFLENVIMILVFRFFGGKTLLNCCDSLIAVQLIISYLLATGFMLLFYQYLYPWQSGKVLPGRTENQPEAPYYY

SEQ ID NO: 33388 - protein, 32 aa, Homo sapiens
  MAP TO AC005301.16; EXPRESSED IN ADULT LIVER, SIGNAL = 1.3; EXPRESSED IN BRAIN, SIGNAL = 1.5; EXPRESSED IN HEART, SIGNAL = 1.5; EXPRESSED IN BONE MARROW, SIGNAL = 1.3; EXPRESSED IN HBL100, SIGNAL = 1.2; EXPRESSED IN HELA, SIGNAL = 1.7; EXPRESSED IN PLACENTA, SIGNAL = 1.6; EXPRESSED IN BT474, SIGNAL = 1.1; EXPRESSED IN FETAL LIVER, SIGNAL = 1.3; EXPRESSED IN LUNG, SIGNAL = 1.8; SWISSPROT HIT: O05975, EVALUE 4.80e+00
HFPCYQLLMGPFAAIYWPSRSAMMILPLSYRR

SEQ ID NO: 33389 - protein, 64 aa, Homo sapiens
  MAP TO AC004882.2; EXPRESSED IN LUNG, SIGNAL = 1.5; EXPRESSED IN HELA, SIGNAL = 3.1; EXPRESSED IN PLACENTA, SIGNAL = 0.85; EXPRESSED IN BONE MARROW, SIGNAL = 1.1; EXPRESSED IN FETAL LIVER, SIGNAL = 2.5; EXPRESSED IN ADULT LIVER, SIGNAL = 3.1; EXPRESSED IN BRAIN, SIGNAL = 1.2; EXPRESSED IN HEART, SIGNAL = 0.82; EXPRESSED IN BT474, SIGNAL = 2.1; EXPRESSED IN HBL100, SIGNAL = 1.9; SWISSPROT HIT: P43361, EVALUE 1.10e+00; EST_HUMAN HIT: BE908158.1, EVALUE 2.00e-30; EST_HUMAN HIT: AW886543.1, EVALUE 9.00e-06
DETRTAYILQAVESAWEGVDRRKATDAKDPSVIEEPNGEPNGVTVTAEAVSQASSHPENSEEEE

SEQ ID NO: 33390 - protein, 27 aa, Homo sapiens
  MAP TO AC004882.2; EXPRESSED IN LUNG, SIGNAL = 1.5; EXPRESSED IN HELA, SIGNAL = 3.1; EXPRESSED IN PLACENTA, SIGNAL = 0.85; EXPRESSED IN BONE MARROW, SIGNAL = 1.1; EXPRESSED IN FETAL LIVER, SIGNAL = 2.5; EXPRESSED IN ADULT LIVER, SIGNAL = 3.1; EXPRESSED IN BRAIN, SIGNAL = 1.2; EXPRESSED IN HEART, SIGNAL = 0.82; EXPRESSED IN BT474, SIGNAL = 2.1; EXPRESSED IN HBL100, SIGNAL = 1.9; EST_HUMAN HIT: AA312475.1, EVALUE 2.00e-03; EST_HUMAN HIT: BE908158.1, EVALUE 8.00e-11
GRDADCLHPPGSRECMGRGGQTESHRC

SEQ ID NO: 33391 - protein, 71 aa, Homo sapiens
  MAP TO AC004882.2; EXPRESSED IN BONE MARROW, SIGNAL = 2.9; EXPRESSED IN HBL100, SIGNAL =  12; EXPRESSED IN ADULT LIVER, SIGNAL =   7; EXPRESSED IN BRAIN, SIGNAL =   6; EXPRESSED IN PLACENTA, SIGNAL = 3.2; EXPRESSED IN HEART, SIGNAL = 9.5; EXPRESSED IN HELA, SIGNAL = 3.8; EXPRESSED IN LUNG, SIGNAL = 3.2; EXPRESSED IN FETAL LIVER, SIGNAL = 8.9; EXPRESSED IN BT474, SIGNAL = 7.8; EST_HUMAN HIT: AA568899.1, EVALUE 4.00e-28; EST_HUMAN HIT: AW516511.1, EVALUE 7.00e-28
SCGNTSSTSMRTSSSLEAPIQARRTRSTQQLFAQSWSLSLKMMLKVLFMDHHSLLARNGFTYKTDSLPSAV

SEQ ID NO: 33392 - protein, 42 aa, Homo sapiens
  MAP TO AC004882.2; EXPRESSED IN LUNG, SIGNAL = 0.83; EXPRESSED IN PLACENTA, SIGNAL = 0.9; EXPRESSED IN BT474, SIGNAL = 1.4; EXPRESSED IN HBL100, SIGNAL = 1.3; EXPRESSED IN FETAL LIVER, SIGNAL = 4.6; EXPRESSED IN HELA, SIGNAL = 0.93; EXPRESSED IN BRAIN, SIGNAL = 1.3; EXPRESSED IN BONE MARROW, SIGNAL = 0.94; EXPRESSED IN ADULT LIVER, SIGNAL = 2.8; EXPRESSED IN HEART, SIGNAL = 1.5; EST_HUMAN HIT: W15398.1, EVALUE 6.00e-21; SWISSPROT HIT: Q05900, EVALUE 1.10e-01; EST_HUMAN HIT: BE876711.1, EVALUE 9.00e-21
MGKRYFCDYCDRSFQDNLHNRKKHLNGLQHLKAKKVWYDMFR

SEQ ID NO: 33393 - protein, 27 aa, Homo sapiens
  MAP TO AC004882.2; EXPRESSED IN LUNG, SIGNAL = 0.83; EXPRESSED IN PLACENTA, SIGNAL = 0.9; EXPRESSED IN BT474, SIGNAL = 1.4; EXPRESSED IN HBL100, SIGNAL = 1.3; EXPRESSED IN FETAL LIVER, SIGNAL = 4.6; EXPRESSED IN HELA, SIGNAL = 0.93; EXPRESSED IN BRAIN, SIGNAL = 1.3; EXPRESSED IN BONE MARROW, SIGNAL = 0.94; EXPRESSED IN ADULT LIVER, SIGNAL = 2.8; EXPRESSED IN HEART, SIGNAL = 1.5
GQPPQPQEAPERAAAPQGQEGLVRHVP

SEQ ID NO: 33394 - protein, 52 aa, Homo sapiens
  MAP TO AC004882.2; EXPRESSED IN HEART, SIGNAL = 1.6; EXPRESSED IN BT474, SIGNAL = 1.4; EXPRESSED IN FETAL LIVER, SIGNAL = 1.4; EXPRESSED IN HELA, SIGNAL = 1.5; EXPRESSED IN ADULT LIVER, SIGNAL = 7.9; EXPRESSED IN PLACENTA, SIGNAL = 1.6; EXPRESSED IN BONE MARROW, SIGNAL = 1.8; EXPRESSED IN HBL100, SIGNAL = 1.6; EXPRESSED IN LUNG, SIGNAL = 1.9; EXPRESSED IN BRAIN, SIGNAL =   2; SWISSPROT HIT: P10925, EVALUE 2.00e+00
CDMQKLTVDELKRLLYDTFCEHLSMKDIENIIMTEEESHLGTAEECPVDVES

SEQ ID NO: 33395 - protein, 73 aa, Homo sapiens
  MAP TO AC004882.2; EXPRESSED IN HELA, SIGNAL = 1.6; EXPRESSED IN BRAIN, SIGNAL = 1.1; EXPRESSED IN HEART, SIGNAL =   1; EXPRESSED IN BT474, SIGNAL = 0.87; EXPRESSED IN BONE MARROW, SIGNAL = 0.97; EXPRESSED IN LUNG, SIGNAL =   1; EXPRESSED IN ADULT LIVER, SIGNAL = 0.98; EXPRESSED IN FETAL LIVER, SIGNAL = 0.92; EXPRESSED IN HBL100, SIGNAL = 2.7; EXPRESSED IN PLACENTA, SIGNAL = 0.62; EST_HUMAN HIT: AI272170.1, EVALUE 2.00e-21; SWISSPROT HIT: P46662, EVALUE 2.00e-22
MRSEETADLLAEKAQITEEEAKLLAQKAAEAEQEMQRIKATAIRTEEEKRLMEQKVLEAEVLALKMAEESERR

SEQ ID NO: 33396 - protein, 40 aa, Homo sapiens
  MAP TO AC004882.2; EXPRESSED IN BONE MARROW, SIGNAL = 0.68; EXPRESSED IN FETAL LIVER, SIGNAL = 0.85; EXPRESSED IN LUNG, SIGNAL = 0.82; EXPRESSED IN HELA, SIGNAL = 1.8; EXPRESSED IN BRAIN, SIGNAL = 0.89; EXPRESSED IN HEART, SIGNAL = 1.1; EXPRESSED IN HBL100, SIGNAL = 1.5; EXPRESSED IN ADULT LIVER, SIGNAL =   1; EXPRESSED IN PLACENTA, SIGNAL = 0.69; EXPRESSED IN BT474, SIGNAL = 0.7; SWISSPROT HIT: P46662, EVALUE 4.00e-05; EST_HUMAN HIT: H55159.1, EVALUE 4.00e-04
ERQRLAREKQMREEAERTRDELERRLLQMKEEATMANEAL

SEQ ID NO: 33397 - protein, 309 aa, Homo sapiens
  MAP TO AC004832.2; EXPRESSED IN BT474, SIGNAL = 1.9; EXPRESSED IN HELA, SIGNAL = 0.73; EXPRESSED IN ADULT LIVER, SIGNAL = 5.5; EXPRESSED IN BONE MARROW, SIGNAL = 4.1; EXPRESSED IN HBL100, SIGNAL =   3; EXPRESSED IN FETAL LIVER, SIGNAL = 3.7; EXPRESSED IN LUNG, SIGNAL = 5.3; EXPRESSED IN BRAIN, SIGNAL =  10; EXPRESSED IN PLACENTA, SIGNAL = 2.1; EXPRESSED IN HEART, SIGNAL = 1.8; EST_HUMAN HIT: AL134671.1, EVALUE 2.00e-94; SWISSPROT HIT: P15982, EVALUE 1.00e-06
TNVDPARESVSYSIHSTANVVLTRGDIHSQVICEVAHVTLRGDSFRGTANLSETIQVPPTLEVTQQPMRAENQVNITCQVTKFYPQRLQLTWLENGNVSRTETASTLTENKDGTYNWMSWLLVNVSAHRDDVKLTCQVEHDGQSAVSKSHDLKVSAHLKEQSSNTAAENTGPNEQNIYIVVGVVCTLLVALLMEALYLVRIRQKKAQGSTSSTRLHEPEKNARKITQDTNDITYADLNLPKGKKPAPRAAEPNNHTEYASIQTSLQPASEDTLTYADLDMVHLNRTPKQLAPKPELSFSEYASIQVPRK

SEQ ID NO: 33398 - protein, 19 aa, Homo sapiens
  MAP TO AC004832.2; EXPRESSED IN BT474, SIGNAL = 1.9; EXPRESSED IN HELA, SIGNAL = 0.73; EXPRESSED IN ADULT LIVER, SIGNAL = 5.5; EXPRESSED IN BONE MARROW, SIGNAL = 4.1; EXPRESSED IN HBL100, SIGNAL =   3; EXPRESSED IN FETAL LIVER, SIGNAL = 3.7; EXPRESSED IN LUNG, SIGNAL = 5.3; EXPRESSED IN BRAIN, SIGNAL =  10; EXPRESSED IN PLACENTA, SIGNAL = 2.1; EXPRESSED IN HEART, SIGNAL = 1.8; EST_HUMAN HIT: AL119770.1, EVALUE 1.00e-03; EST_HUMAN HIT: AI357578.1, EVALUE 2.00e-03
TFPSASVTSPQQMPAPTTV

SEQ ID NO: 33399 - protein, 62 aa, Homo sapiens
  MAP TO AC004832.2; EXPRESSED IN FETAL LIVER, SIGNAL =   2; EXPRESSED IN LUNG, SIGNAL = 0.79; EXPRESSED IN HEART, SIGNAL = 1.2; EXPRESSED IN BT474, SIGNAL = 1.2; EXPRESSED IN BONE MARROW, SIGNAL = 1.2; EXPRESSED IN HELA, SIGNAL = 0.89; EXPRESSED IN ADULT LIVER, SIGNAL = 6.7; EXPRESSED IN PLACENTA, SIGNAL = 0.92; EXPRESSED IN BRAIN, SIGNAL = 1.8; EXPRESSED IN HBL100, SIGNAL = 1.9; EST_HUMAN HIT: AV646993.1, EVALUE 1.00e-23; EST_HUMAN HIT: AA133733.1, EVALUE 4.00e-16; SWISSPROT HIT: P49193, EVALUE 7.00e-07
IQQYLSGGMCGYDLDGCPVWYDIIGPLDAKGLLFSASKQDLLRTKMRECELLLQECAHQTTK

SEQ ID NO: 33400 - protein, 22 aa, Homo sapiens
  MAP TO AC004832.2; EXPRESSED IN FETAL LIVER, SIGNAL =   2; EXPRESSED IN LUNG, SIGNAL = 0.79; EXPRESSED IN HEART, SIGNAL = 1.2; EXPRESSED IN BT474, SIGNAL = 1.2; EXPRESSED IN BONE MARROW, SIGNAL = 1.2; EXPRESSED IN HELA, SIGNAL = 0.89; EXPRESSED IN ADULT LIVER, SIGNAL = 6.7; EXPRESSED IN PLACENTA, SIGNAL = 0.92; EXPRESSED IN BRAIN, SIGNAL = 1.8; EXPRESSED IN HBL100, SIGNAL = 1.9; EST_HUMAN HIT: AA133733.1, EVALUE 5.00e-06
SNSICQGVCVAMTWMAAQSGTT

SEQ ID NO: 33401 - protein, 45 aa, Homo sapiens
  MAP TO AC004032.7; EXPRESSED IN HELA, SIGNAL = 2.9; EXPRESSED IN ADULT LIVER, SIGNAL = 0.78; EXPRESSED IN BRAIN, SIGNAL =   1; EXPRESSED IN BONE MARROW, SIGNAL = 0.75; EXPRESSED IN FETAL LIVER, SIGNAL = 0.78; EXPRESSED IN LUNG, SIGNAL = 1.2; EXPRESSED IN HEART, SIGNAL = 1.3; EXPRESSED IN PLACENTA, SIGNAL = 0.83; EXPRESSED IN HBL100, SIGNAL = 0.94; EST_HUMAN HIT: AA339316.1, EVALUE 2.00e-18; SWISSPROT HIT: Q10571, EVALUE 2.00e-20
STAHDLPANKASASQPGSHLQCLSVHCTDDVGDAKARASVPTWRS

SEQ ID NO: 33402 - protein, 190 aa, Homo sapiens
  MAP TO AC006333.3; EXPRESSED IN BONE MARROW, SIGNAL = 4.1; EXPRESSED IN HBL100, SIGNAL = 3.2; EXPRESSED IN FETAL LIVER, SIGNAL = 2.8; EXPRESSED IN ADULT LIVER, SIGNAL = 2.1; EXPRESSED IN BRAIN, SIGNAL = 2.7; EXPRESSED IN BT474, SIGNAL = 2.9; EXPRESSED IN LUNG, SIGNAL =   3; EXPRESSED IN PLACENTA, SIGNAL = 3.9; EXPRESSED IN HEART, SIGNAL = 3.3; EXPRESSED IN HELA, SIGNAL = 2.5; EST_HUMAN HIT: BE466332.1, EVALUE 8.00e-36; SWISSPROT HIT: Q02357, EVALUE 6.00e-08
ALKYLIPVTSKNAIRKSGLTPIHSAADGQNAQCLELLIENGFDVNTLLADHISQSYDDERKTALYFGVSNNDVHCTEVLLAAGADPNLDPLNCLLVAVRANNYEIVRLLLSHGANVNCYFMHVNDTRFPSVIQYALNDEVMLRLLLNNGYQVEMCFDCMHGDIFGNSFVWSEIQEEVLPGWTSCVIKDNP

SEQ ID NO: 33403 - protein, 38 aa, Homo sapiens
  MAP TO AC006333.3; EXPRESSED IN PLACENTA, SIGNAL = 0.62; EXPRESSED IN HEART, SIGNAL =  42; EST_HUMAN HIT: AA953770.1, EVALUE 3.00e-16
LLGLTKQGPCLPLATEEDSVNTNPSTRMNSSPPCQPRS

SEQ ID NO: 33404 - protein, 91 aa, Homo sapiens
  MAP TO AC006333.3; EXPRESSED IN BRAIN, SIGNAL = 0.7; EXPRESSED IN HEART, SIGNAL =  31; EST_HUMAN HIT: C04498.1, EVALUE 1.00e-25; SWISSPROT HIT: P14240, EVALUE 2.70e+00
SLTISISTWLPMMCLWLWKRSSVSTVLCWRALMMARIPFPVMKLDSTFTLVMCSLTLSISAMAMAALSSACVLARLNVFTTVLSLRASAKR

SEQ ID NO: 33405 - protein, 35 aa, Homo sapiens
  MAP TO AC006343.2; EXPRESSED IN FETAL LIVER, SIGNAL = 0.85; EXPRESSED IN LUNG, SIGNAL = 0.82; EXPRESSED IN HELA, SIGNAL = 0.87; EXPRESSED IN PLACENTA, SIGNAL =  17; EXPRESSED IN BT474, SIGNAL = 0.72; EXPRESSED IN BONE MARROW, SIGNAL = 0.79; EXPRESSED IN HBL100, SIGNAL = 0.7; EXPRESSED IN ADULT LIVER, SIGNAL = 1.5; EXPRESSED IN BRAIN, SIGNAL = 0.78; EXPRESSED IN HEART, SIGNAL = 1.1; EST_HUMAN HIT: BE501412.1, EVALUE 2.00e-15; EST_HUMAN HIT: AW962599.1, EVALUE 2.00e-15; SWISSPROT HIT: P19801, EVALUE 2.00e-16
ENPWGHKRTYRLQIHSMADQVLPPGWQEEQAITWA

SEQ ID NO: 33406 - protein, 77 aa, Homo sapiens
  MAP TO AC006390.8; EXPRESSED IN HBL100, SIGNAL = 0.96; EXPRESSED IN FETAL LIVER, SIGNAL = 1.1; EXPRESSED IN BRAIN, SIGNAL = 2.3; EXPRESSED IN PLACENTA, SIGNAL = 1.1; EXPRESSED IN BT474, SIGNAL = 1.9; EXPRESSED IN BONE MARROW, SIGNAL = 1.1; EXPRESSED IN LUNG, SIGNAL = 1.4; EXPRESSED IN HELA, SIGNAL = 0.9; EXPRESSED IN ADULT LIVER, SIGNAL = 1.6; EXPRESSED IN HEART, SIGNAL = 1.9; EST_HUMAN HIT: AI807917.1, EVALUE 2.00e-15; SWISSPROT HIT: P03111, EVALUE 9.60e-02
EAQKQEEDESCAAAEALTAPEDAGRPAVNSPANQSRGNQCKLFHPSLPQLPSEEEVNSLGREIIKLTKEQAAAELEE

SEQ ID NO: 33407 - protein, 17 aa, Homo sapiens
  MAP TO AC006390.8; EXPRESSED IN HBL100, SIGNAL = 0.96; EXPRESSED IN FETAL LIVER, SIGNAL = 1.1; EXPRESSED IN BRAIN, SIGNAL = 2.3; EXPRESSED IN PLACENTA, SIGNAL = 1.1; EXPRESSED IN BT474, SIGNAL = 1.9; EXPRESSED IN BONE MARROW, SIGNAL = 1.1; EXPRESSED IN LUNG, SIGNAL = 1.4; EXPRESSED IN HELA, SIGNAL = 0.9; EXPRESSED IN ADULT LIVER, SIGNAL = 1.6; EXPRESSED IN HEART, SIGNAL = 1.9
GRLRSKKKMKVVPLLRR

SEQ ID NO: 33408 - protein, 31 aa, Homo sapiens
  MAP TO AC006432.15; EXPRESSED IN PLACENTA, SIGNAL = 2.2; EXPRESSED IN LUNG, SIGNAL = 3.2; EXPRESSED IN HBL100, SIGNAL = 2.2; EXPRESSED IN FETAL LIVER, SIGNAL = 2.3; EXPRESSED IN HELA, SIGNAL = 2.9; EXPRESSED IN BRAIN, SIGNAL = 3.7; EXPRESSED IN BT474, SIGNAL = 2.3; EXPRESSED IN BONE MARROW, SIGNAL = 3.2; EXPRESSED IN ADULT LIVER, SIGNAL = 2.3; EXPRESSED IN HEART, SIGNAL = 3.1; EST_HUMAN HIT: AI218923.1, EVALUE 4.60e-02; EST_HUMAN HIT: AI806978.1, EVALUE 3.10e-02
VCGKTTSNVFFFCSHTTATINMEDFYDHIQG

SEQ ID NO: 33409 - protein, 36 aa, Homo sapiens
  MAP TO AC006432.15; EXPRESSED IN BRAIN, SIGNAL = 1.9; EXPRESSED IN BT474, SIGNAL = 1.9; EXPRESSED IN BONE MARROW, SIGNAL = 2.1; EXPRESSED IN HELA, SIGNAL = 1.9; EXPRESSED IN ADULT LIVER, SIGNAL = 1.8; EXPRESSED IN HEART, SIGNAL = 1.8; EXPRESSED IN PLACENTA, SIGNAL = 1.7; EXPRESSED IN HBL100, SIGNAL = 2.3; EXPRESSED IN FETAL LIVER, SIGNAL = 1.5; EXPRESSED IN LUNG, SIGNAL = 1.6; EST_HUMAN HIT: AU118789.1, EVALUE 2.00e-13; EST_HUMAN HIT: BE279644.1, EVALUE 1.00e-13; SWISSPROT HIT: P22516, EVALUE 2.10e+00
IYHCSRTHSQLAQFVHEVKKSPFGKDVRLVSLGSRQ

SEQ ID NO: 33410 - protein, 21 aa, Homo sapiens
  MAP TO AC006432.15; EXPRESSED IN BRAIN, SIGNAL = 1.9; EXPRESSED IN BT474, SIGNAL = 1.9; EXPRESSED IN BONE MARROW, SIGNAL = 2.1; EXPRESSED IN HELA, SIGNAL = 1.9; EXPRESSED IN ADULT LIVER, SIGNAL = 1.8; EXPRESSED IN HEART, SIGNAL = 1.8; EXPRESSED IN PLACENTA, SIGNAL = 1.7; EXPRESSED IN HBL100, SIGNAL = 2.3; EXPRESSED IN FETAL LIVER, SIGNAL = 1.5; EXPRESSED IN LUNG, SIGNAL = 1.6; EST_HUMAN HIT: AU118789.1, EVALUE 6.00e-05; EST_HUMAN HIT: BE279644.1, EVALUE 3.00e-03
EEEPLWQGCSAGLPRLPAGKQ

SEQ ID NO: 33411 - protein, 67 aa, Homo sapiens
  MAP TO AC006440.3; EXPRESSED IN BONE MARROW, SIGNAL = 0.67; EXPRESSED IN LUNG, SIGNAL =   1; EXPRESSED IN ADULT LIVER, SIGNAL =   1; EXPRESSED IN BRAIN, SIGNAL = 0.69; EXPRESSED IN PLACENTA, SIGNAL = 0.82; EXPRESSED IN HBL100, SIGNAL = 2.5; EXPRESSED IN FETAL LIVER, SIGNAL = 0.79; EXPRESSED IN HELA, SIGNAL = 0.69; EXPRESSED IN HEART, SIGNAL = 1.5; EST_HUMAN HIT: BE082334.1, EVALUE 8.00e-30; SWISSPROT HIT: P18175, EVALUE 1.10e-02
IVELKLEHEQEKTHLLQQHNAEKDSLVRDHEREIENLEKQLRAANMEHENQIQEFKKRDAQVIINNI

SEQ ID NO: 33412 - protein, 26 aa, Homo sapiens
  MAP TO AC006482.2; EXPRESSED IN FETAL LIVER, SIGNAL = 8.7; EXPRESSED IN LUNG, SIGNAL = 8.3; EXPRESSED IN PLACENTA, SIGNAL =  13; EXPRESSED IN HEART, SIGNAL = 6.4; EXPRESSED IN BRAIN, SIGNAL =  11; EXPRESSED IN ADULT LIVER, SIGNAL = 6.1; EXPRESSED IN HELA, SIGNAL = 7.5; EXPRESSED IN HBL100, SIGNAL = 8.9; EXPRESSED IN BONE MARROW, SIGNAL =  12; EXPRESSED IN BT474, SIGNAL = 9.5; EST_HUMAN HIT: AW983880.1, EVALUE 2.00e-05
LWNFELEIDDLEHLAEEISKQQSIQE

SEQ ID NO: 33413 - protein, 33 aa, Homo sapiens
  MAP TO AC006482.2; EXPRESSED IN HEART, SIGNAL = 0.96; EXPRESSED IN PLACENTA, SIGNAL = 1.1; EXPRESSED IN BT474, SIGNAL = 0.72; EXPRESSED IN BONE MARROW, SIGNAL = 0.99; EXPRESSED IN LUNG, SIGNAL = 0.78; EXPRESSED IN HELA, SIGNAL = 0.82; EXPRESSED IN ADULT LIVER, SIGNAL = 0.78; EXPRESSED IN BRAIN, SIGNAL = 1.6; EXPRESSED IN HBL100, SIGNAL = 0.8; EXPRESSED IN FETAL LIVER, SIGNAL = 0.91
QTVSIPRTRTIFPRFLVLITVESDTTRRNHYWQ

SEQ ID NO: 33414 - protein, 97 aa, Homo sapiens
  MAP TO AC006483.2; EXPRESSED IN BRAIN, SIGNAL =  18; EXPRESSED IN HEART, SIGNAL =  48; EXPRESSED IN BONE MARROW, SIGNAL =  81; EXPRESSED IN ADULT LIVER, SIGNAL =  28; EXPRESSED IN PLACENTA, SIGNAL =  24; EXPRESSED IN BT474, SIGNAL =  85; EXPRESSED IN HBL100, SIGNAL =  78; EXPRESSED IN FETAL LIVER, SIGNAL =  37; EXPRESSED IN LUNG, SIGNAL =  45; EXPRESSED IN HELA, SIGNAL =  40; EST_HUMAN HIT: BE271730.1, EVALUE 3.00e-50; SWISSPROT HIT: O42161, EVALUE 4.00e-51; EST_HUMAN HIT: BE256272.1, EVALUE 4.00e-50
IMFETFNTPAMYVAIQAVLSLYASGRTTGIVMDSGDGVTHTVPIYEGYALPHAILRLDLAGRDLTDYLMKILTERGYSFTTTAEREIVRDIKEKLCY

SEQ ID NO: 33415 - protein, 58 aa, Homo sapiens
  MAP TO AC006512.12; EXPRESSED IN LUNG, SIGNAL = 5.5; EXPRESSED IN BRAIN, SIGNAL = 2.2; EXPRESSED IN PLACENTA, SIGNAL = 6.6; EXPRESSED IN BONE MARROW, SIGNAL = 3.8; EXPRESSED IN HBL100, SIGNAL = 6.6; EXPRESSED IN FETAL LIVER, SIGNAL =  11; EXPRESSED IN HELA, SIGNAL = 3.5; EXPRESSED IN ADULT LIVER, SIGNAL = 6.9; EXPRESSED IN BT474, SIGNAL = 5.9; EXPRESSED IN HEART, SIGNAL =   2; EST_HUMAN HIT: W26367.1, EVALUE 3.00e-26; SWISSPROT HIT: P43288, EVALUE 4.50e+00
EGEYKGQDADELLLPPQAARLIQESPTLSKLAAITVLQPFYYLVQQTIHWLFMGYSMT

SEQ ID NO: 33416 - protein, 41 aa, Homo sapiens
  MAP TO AC006552.7; EXPRESSED IN HELA, SIGNAL =  11; EXPRESSED IN HEART, SIGNAL = 5.1; EXPRESSED IN FETAL LIVER, SIGNAL = 9.6; EXPRESSED IN LUNG, SIGNAL = 9.4; EXPRESSED IN ADULT LIVER, SIGNAL = 8.6; EXPRESSED IN BRAIN, SIGNAL = 4.5; EXPRESSED IN PLACENTA, SIGNAL = 8.1; EXPRESSED IN BT474, SIGNAL =  12; EXPRESSED IN BONE MARROW, SIGNAL =  14; EXPRESSED IN HBL100, SIGNAL =  31; EST_HUMAN HIT: BE242820.1, EVALUE 4.00e-13; EST_HUMAN HIT: AW975312.1, EVALUE 5.00e-13
VKLQTFAVSVTALKAVRLELFVPPGGFVVSLASEVKLQTFE

SEQ ID NO: 33417 - protein, 223 aa, Homo sapiens
  MAP TO AC006581.16; EXPRESSED IN HEART, SIGNAL =  13; EXPRESSED IN PLACENTA, SIGNAL =  41; EXPRESSED IN BRAIN, SIGNAL =  23; EXPRESSED IN HELA, SIGNAL =  25; EXPRESSED IN FETAL LIVER, SIGNAL =  28; EXPRESSED IN HBL100, SIGNAL =  46; EXPRESSED IN BONE MARROW, SIGNAL =  17; EXPRESSED IN BT474, SIGNAL =  71; EXPRESSED IN ADULT LIVER, SIGNAL =  15; EXPRESSED IN LUNG, SIGNAL =  29; EST_HUMAN HIT: AW959289.1, EVALUE 9.00e-15
TYTQIQPHSLIQQQQQIHLQQKQVVIQQQIAIHHQQQFQHRQSQLLHTATHLQLAQQQQQQQQQQQQQQQPQATTLTAPQPPQVPPTQQVPPSQSQQQAQTLVVQPMLQSSPLSLPPDAAPKPPIPIQSKPPVAPIKPPQLGAAKMSAAQQPPPHIPVQVVGTRQPGTAQAQALGLAQLAAAVPTSRGMPGTVQSGQAHLASSPPSSQAPGALQECPPTLAPG

SEQ ID NO: 33418 - protein, 75 aa, Homo sapiens
  MAP TO AC006581.16; EXPRESSED IN FETAL LIVER, SIGNAL = 0.88; EXPRESSED IN LUNG, SIGNAL = 2.6; EXPRESSED IN PLACENTA, SIGNAL = 1.8; EXPRESSED IN BONE MARROW, SIGNAL = 1.3; EXPRESSED IN HBL100, SIGNAL = 1.9; EXPRESSED IN ADULT LIVER, SIGNAL = 0.85; EXPRESSED IN BRAIN, SIGNAL = 2.1; EXPRESSED IN HEART, SIGNAL = 2.6; EXPRESSED IN BT474, SIGNAL = 1.5; EXPRESSED IN HELA, SIGNAL = 0.66; EST_HUMAN HIT: AL045854.1, EVALUE 2.00e-34; SWISSPROT HIT: P39769, EVALUE 4.00e-08
KAESVANVNANTPSSELVALTPAPSVPPPTLAMVSRQMGDSKPPQAIVKPQILTHIIEGFVIQEGAEPFPVRAGP

SEQ ID NO: 33419 - protein, 36 aa, Homo sapiens
  MAP TO AC006581.16; EXPRESSED IN PLACENTA, SIGNAL = 1.6; EXPRESSED IN BT474, SIGNAL = 1.6; EXPRESSED IN HBL100, SIGNAL = 2.9; EXPRESSED IN LUNG, SIGNAL = 2.3; EXPRESSED IN HELA, SIGNAL = 1.2; EXPRESSED IN ADULT LIVER, SIGNAL = 1.2; EXPRESSED IN HEART, SIGNAL = 1.6; EXPRESSED IN BONE MARROW, SIGNAL = 2.4; EXPRESSED IN FETAL LIVER, SIGNAL = 1.3; EXPRESSED IN BRAIN, SIGNAL =   3; SWISSPROT HIT: P24668, EVALUE 6.00e-17; EST_HUMAN HIT: BE410827.1, EVALUE 6.00e-16; EST_HUMAN HIT: AU130591.1, EVALUE 8.00e-16
NWIMLIYKGGDEYDNHCGKEQRRAVVMISCNRHTLA

SEQ ID NO: 33420 - protein, 35 aa, Homo sapiens
  MAP TO AC007002.2; EXPRESSED IN BRAIN, SIGNAL = 0.76; EXPRESSED IN FETAL LIVER, SIGNAL = 1.1; EXPRESSED IN LUNG, SIGNAL = 1.1; EXPRESSED IN HELA, SIGNAL = 0.97; EXPRESSED IN ADULT LIVER, SIGNAL = 1.1; EXPRESSED IN PLACENTA, SIGNAL = 1.5; EXPRESSED IN BT474, SIGNAL = 1.1; EXPRESSED IN BONE MARROW, SIGNAL = 1.5; EXPRESSED IN HBL100, SIGNAL = 0.91; EXPRESSED IN HEART, SIGNAL = 1.2; EST_HUMAN HIT: AA463333.1, EVALUE 2.30e+00
GCRWLLHPIPCSPATCRVLSSFLPAASGSSYNANQ

SEQ ID NO: 33421 - protein, 35 aa, Homo sapiens
  MAP TO AC007002.2; EXPRESSED IN BRAIN, SIGNAL = 0.76; EXPRESSED IN FETAL LIVER, SIGNAL = 1.1; EXPRESSED IN LUNG, SIGNAL = 1.1; EXPRESSED IN HELA, SIGNAL = 0.97; EXPRESSED IN ADULT LIVER, SIGNAL = 1.1; EXPRESSED IN PLACENTA, SIGNAL = 1.5; EXPRESSED IN BT474, SIGNAL = 1.1; EXPRESSED IN BONE MARROW, SIGNAL = 1.5; EXPRESSED IN HBL100, SIGNAL = 0.91; EXPRESSED IN HEART, SIGNAL = 1.2; EST_HUMAN HIT: AA744947.1, EVALUE 1.00e+00; SWISSPROT HIT: P27197, EVALUE 2.80e+00
DAGGCCTPFPAAQPRAGCSPAFFQLPAAPLTMPTS

SEQ ID NO: 33422 - protein, 64 aa, Homo sapiens
  MAP TO AC007041.3; EXPRESSED IN BT474, SIGNAL = 6.8; EXPRESSED IN BONE MARROW, SIGNAL = 9.6; EXPRESSED IN HBL100, SIGNAL = 7.1; EXPRESSED IN HELA, SIGNAL =  10; EXPRESSED IN ADULT LIVER, SIGNAL = 7.8; EXPRESSED IN PLACENTA, SIGNAL = 8.2; EXPRESSED IN FETAL LIVER, SIGNAL = 8.3; EXPRESSED IN LUNG, SIGNAL = 8.4; EXPRESSED IN BRAIN, SIGNAL =  11; EXPRESSED IN HEART, SIGNAL = 8.1; EST_HUMAN HIT: AW363137.1, EVALUE 6.00e-32; SWISSPROT HIT: P25822, EVALUE 2.00e-18
NVVEKCVTHASRAERALLIDEVCCQNDGPHSALYTMMKDQYANYVVQKMIDMAEPAQRKIIMHK

SEQ ID NO: 33423 - protein, 90 aa, Homo sapiens
  MAP TO AC007041.3; EXPRESSED IN BT474, SIGNAL = 4.3; EXPRESSED IN BONE MARROW, SIGNAL = 2.5; EXPRESSED IN HEART, SIGNAL = 1.5; EXPRESSED IN LUNG, SIGNAL = 3.2; EXPRESSED IN PLACENTA, SIGNAL = 2.4; EXPRESSED IN HBL100, SIGNAL = 2.4; EXPRESSED IN FETAL LIVER, SIGNAL = 2.3; EXPRESSED IN HELA, SIGNAL = 1.4; EXPRESSED IN ADULT LIVER, SIGNAL = 2.1; EXPRESSED IN BRAIN, SIGNAL = 3.5; EST_HUMAN HIT: AI114743.1, EVALUE 1.00e-47; SWISSPROT HIT: Q12446, EVALUE 9.10e-01
RTPGSRQASPTEVVERLGPNTNPSEGLGPLPNPTANKPLVEEFSNPETQNLDAMEQVGLESLQFDYPGNQVPMDSSGATVGLFDYNSQQQ

SEQ ID NO: 33424 - protein, 205 aa, Homo sapiens
  MAP TO AC007051.3; EXPRESSED IN LUNG, SIGNAL = 1.4; EXPRESSED IN HELA, SIGNAL = 1.6; EXPRESSED IN BRAIN, SIGNAL = 1.7; EXPRESSED IN PLACENTA, SIGNAL = 0.9; EXPRESSED IN HBL100, SIGNAL = 1.9; EXPRESSED IN ADULT LIVER, SIGNAL = 0.82; EXPRESSED IN HEART, SIGNAL =   1; EXPRESSED IN BT474, SIGNAL = 1.5; EXPRESSED IN BONE MARROW, SIGNAL = 1.2; EXPRESSED IN FETAL LIVER, SIGNAL = 2.2; EST_HUMAN HIT: BE154994.1, EVALUE 3.00e-64; SWISSPROT HIT: P22760, EVALUE 2.00e-42
FTQDASLKNKLKLQALIYPVLQALDFNTPSYQQNVNTPILPRYVMVKYWVDYFKGNYDFVQAMIVNNHTSLDVEEAAAVRARLNWTSLLPASFTKNYKPVVQTTGNARIVQELPQLLDARSAPLIADQAVLQLLPKTYILTCEHDVLRDDGIMYAKRLESAGVEVTLDHFEDGFHGCMIFTSWPTNFSVGIRTRNSYIKWLDQNL

SEQ ID NO: 33425 - protein, 43 aa, Homo sapiens
  MAP TO AC007051.3; EXPRESSED IN HBL100, SIGNAL = 2.7; EXPRESSED IN BT474, SIGNAL = 2.6; EXPRESSED IN BONE MARROW, SIGNAL = 1.8; EXPRESSED IN FETAL LIVER, SIGNAL =  33; EXPRESSED IN LUNG, SIGNAL = 2.1; EXPRESSED IN HELA, SIGNAL = 2.5; EXPRESSED IN ADULT LIVER, SIGNAL = 5.8; EXPRESSED IN BRAIN, SIGNAL = 2.3; EXPRESSED IN PLACENTA, SIGNAL = 1.4; EXPRESSED IN HEART, SIGNAL = 1.6; EST_HUMAN HIT: BE262545.1, EVALUE 1.00e-21; SWISSPROT HIT: Q01260, EVALUE 1.20e+00
EEEVSCTGPCCYCNAEVPIVGHEDEHEEVAYDHLDDVQHCLQE

SEQ ID NO: 33426 - protein, 48 aa, Homo sapiens
  MAP TO AC007051.3; EXPRESSED IN HBL100, SIGNAL = 2.7; EXPRESSED IN BT474, SIGNAL = 2.6; EXPRESSED IN BONE MARROW, SIGNAL = 1.8; EXPRESSED IN FETAL LIVER, SIGNAL =  33; EXPRESSED IN LUNG, SIGNAL = 2.1; EXPRESSED IN HELA, SIGNAL = 2.5; EXPRESSED IN ADULT LIVER, SIGNAL = 5.8; EXPRESSED IN BRAIN, SIGNAL = 2.3; EXPRESSED IN PLACENTA, SIGNAL = 1.4; EXPRESSED IN HEART, SIGNAL = 1.6; EST_HUMAN HIT: BE262545.1, EVALUE 2.00e-19; EST_HUMAN HIT: BE314224.1, EVALUE 1.00e-19; SWISSPROT HIT: P38865, EVALUE 2.00e-03
VVISYLLMLIFMTYNGYLCIAVTAGAGTRYFLFSWKKAVVVDITEYCH

SEQ ID NO: 33427 - protein, 50 aa, Homo sapiens
  MAP TO AC007051.3; EXPRESSED IN PLACENTA, SIGNAL = 1.8; EXPRESSED IN BT474, SIGNAL = 0.9; EXPRESSED IN FETAL LIVER, SIGNAL = 1.1; EXPRESSED IN LUNG, SIGNAL = 3.4; EXPRESSED IN ADULT LIVER, SIGNAL = 1.1; EXPRESSED IN BONE MARROW, SIGNAL =   1; EXPRESSED IN HBL100, SIGNAL = 0.97; EXPRESSED IN HEART, SIGNAL = 1.1; SWISSPROT HIT: P50591, EVALUE 3.00e-19; EST_HUMAN HIT: AU134224.1, EVALUE 1.00e-18; EST_HUMAN HIT: H54628.1, EVALUE 3.00e-18
IMAMMEVQGGPSLGQTCVLIVIFTVLLQSLCVAVTYVYFTNELKQVSAVQ

SEQ ID NO: 33428 - protein, 39 aa, Homo sapiens
  MAP TO AC007092.3; EXPRESSED IN HEART, SIGNAL =  14
AMGLLGGSEVLVAEPMKKYGRLMAEKLNVAEDAGLKLVP

SEQ ID NO: 33429 - protein, 609 aa, Homo sapiens
  MAP TO AC007281.3; EXPRESSED IN FETAL LIVER, SIGNAL = 0.64; EXPRESSED IN HELA, SIGNAL = 0.68; EXPRESSED IN ADULT LIVER, SIGNAL = 0.69; EXPRESSED IN HEART, SIGNAL = 6.1; EXPRESSED IN LUNG, SIGNAL = 0.83; EXPRESSED IN BRAIN, SIGNAL = 1.3; EXPRESSED IN PLACENTA, SIGNAL = 0.68; EST_HUMAN HIT: AW452398.1, EVALUE 1.00e-49; SWISSPROT HIT: P32418, EVALUE 0.00e+00
VVTVGSVMYNMRRLSLSPTFSMGFHLLVTVSLLFSHVDHVIAETEMEGEGNETGECTGSYYCKKGVILPIWEPQDPSFGDKIARATVYFVAMVYMFLGVSIIADRFMSSIEVITSQEKEITIKKPNGETTKTTVRIWNETVSNLTLMALGSSAPEILLSVIEVCGHNFTAGDLGPSTIVGSAAFNMFIIIALCVYVVPDGETRKIKHLRVFFVTAAWSIFAYTWLYIILSVISPGVVEVWEGLLTFFFFPICVVFAWVADRRLLFYKYVYKRYRAGKQRGMIIEHEGDRPSSKTEIEMDGKVVNSHVENFLDGALVLEVDERDQDDEEARREMARILKELKQKHPDKEIEQLIELANYQVLSQQQKSRAFYRIQATRLMTGAGNILKRHAADQARKAVSMHEVNTEVTENDPVSKIFFEQGTYQCLENCGTVALTIIRRGGDLTNTVFVDFRTEDGTANAGSDYEFTEGTVVFKPGDTQKEIRVGIIDDDIFEEDENFLVHLSNVKVSSEASEDGILEANHVSTLACLGSPSTATVTIFDDDHAGIFTFEEPVTHVSESIGIMEVKVLRTSGARGNVIVPYKTIEGTARGGGEDFEDTCGELEFQNDEI

SEQ ID NO: 33430 - protein, 24 aa, Homo sapiens
  MAP TO AC007281.3; EXPRESSED IN PLACENTA, SIGNAL = 1.3; EXPRESSED IN FETAL LIVER, SIGNAL = 1.2; EXPRESSED IN LUNG, SIGNAL = 1.1; EXPRESSED IN HELA, SIGNAL = 1.1; EXPRESSED IN BT474, SIGNAL = 1.3; EXPRESSED IN BONE MARROW, SIGNAL = 0.83; EXPRESSED IN HBL100, SIGNAL = 1.2; EXPRESSED IN ADULT LIVER, SIGNAL = 0.91; EXPRESSED IN BRAIN, SIGNAL = 1.9; EXPRESSED IN HEART, SIGNAL = 1.7
YVGGGSDGDADGVGGDSVGDDGGS

SEQ ID NO: 33431 - protein, 60 aa, Homo sapiens
  MAP TO AC007401.2; EXPRESSED IN PLACENTA, SIGNAL = 2.1; EXPRESSED IN BT474, SIGNAL = 1.9; EXPRESSED IN HBL100, SIGNAL = 3.6; EXPRESSED IN HELA, SIGNAL = 4.4; EXPRESSED IN ADULT LIVER, SIGNAL = 1.9; EXPRESSED IN HEART, SIGNAL = 1.1; EXPRESSED IN BONE MARROW, SIGNAL = 1.7; EXPRESSED IN FETAL LIVER, SIGNAL = 1.8; EXPRESSED IN LUNG, SIGNAL = 1.8; EXPRESSED IN BRAIN, SIGNAL = 2.2; EST_HUMAN HIT: BE081333.1, EVALUE 1.00e-23; SWISSPROT HIT: P03355, EVALUE 2.00e-08
MPITIPLKSNHLYPTQRQYPIPQHALKGLKPVTTRLLQHGLLKPINSPYHSPILPLLKRD

SEQ ID NO: 33432 - protein, 44 aa, Homo sapiens
  MAP TO AC007401.2; EXPRESSED IN HBL100, SIGNAL = 2.2; EXPRESSED IN FETAL LIVER, SIGNAL = 3.5; EXPRESSED IN HELA, SIGNAL = 1.2; EXPRESSED IN BRAIN, SIGNAL = 0.73; EXPRESSED IN BT474, SIGNAL =   2; EXPRESSED IN BONE MARROW, SIGNAL = 1.7; EXPRESSED IN LUNG, SIGNAL = 1.9; EXPRESSED IN ADULT LIVER, SIGNAL = 2.7; EXPRESSED IN PLACENTA, SIGNAL = 2.1; EXPRESSED IN HEART, SIGNAL = 1.1; EST_HUMAN HIT: AW504454.1, EVALUE 8.00e+00
NDNWGSGAQPSTLEDTTERTIGHAQPTGCSVTKVLEKPLPHSYP

SEQ ID NO: 33433 - protein, 34 aa, Homo sapiens
  MAP TO AC007421.11; EXPRESSED IN PLACENTA, SIGNAL =  11; EXPRESSED IN BT474, SIGNAL =  28; EXPRESSED IN BONE MARROW, SIGNAL = 8.5; EXPRESSED IN HBL100, SIGNAL =  45; EXPRESSED IN FETAL LIVER, SIGNAL =  28; EXPRESSED IN LUNG, SIGNAL =  13; EXPRESSED IN HELA, SIGNAL =  19; EXPRESSED IN BRAIN, SIGNAL = 5.7; EXPRESSED IN HEART, SIGNAL = 4.4; EXPRESSED IN ADULT LIVER, SIGNAL =  15; EST_HUMAN HIT: AW337950.1, EVALUE 2.00e-13; EST_HUMAN HIT: BE315279.1, EVALUE 2.00e-13; SWISSPROT HIT: P04765, EVALUE 2.00e-14
CDLYETLTITQAVIFINTRRKVDWLTEKMHARDF

SEQ ID NO: 33434 - protein, 367 aa, Homo sapiens
  MAP TO AC007541.9; EXPRESSED IN HELA, SIGNAL = 2.1; EXPRESSED IN FETAL LIVER, SIGNAL =   2; EXPRESSED IN LUNG, SIGNAL = 0.96; EXPRESSED IN ADULT LIVER, SIGNAL = 1.4; EXPRESSED IN HEART, SIGNAL = 1.4; EXPRESSED IN BT474, SIGNAL = 1.5; EXPRESSED IN BONE MARROW, SIGNAL = 0.63; EXPRESSED IN BRAIN, SIGNAL = 0.89; EXPRESSED IN PLACENTA, SIGNAL = 0.68; EXPRESSED IN HBL100, SIGNAL = 0.91; EST_HUMAN HIT: AI796550.1, EVALUE 1.00e-123; SWISSPROT HIT: O49845, EVALUE 1.70e-01
KMRSPPKYRPFLACFTYTTDKQSSKENTRTVEKLYKCSVDIRKIRRLKGWVLLEDETYVEEIANILQELGADETAVASILERCPEAIVCSPTAVNTQRKLWQLVCKNEEELIKLIEQFPESFFTIKDQENQKLNVQFFQELGLKNVVISRLLTAAPNVFHNPVEKNKQMVRILQESYLDVGGSEANMKVWLLKLLSQNPFILLNSPTAIKETLEFLQEQGFTSFEILQLLSKLKGFLFQLCPRSIQNSISFSKNAFKCTDHDLKQLVLKCPALLYYSVPVLEERMQGLLREGISIAQIRETPMVLELTPQIVQYRIRKLNSSGYRIKDGHLANLNGSKKEFEANFGKIQAKKVRPLFNPVAPLNVEE

SEQ ID NO: 33435 - protein, 94 aa, Homo sapiens
  MAP TO AC007541.9; EXPRESSED IN BONE MARROW, SIGNAL = 0.64; EXPRESSED IN HBL100, SIGNAL = 3.4; EXPRESSED IN BRAIN, SIGNAL = 1.5; EXPRESSED IN HEART, SIGNAL = 1.8; EXPRESSED IN PLACENTA, SIGNAL = 1.9; EXPRESSED IN BT474, SIGNAL = 4.6; EXPRESSED IN FETAL LIVER, SIGNAL = 2.6; EXPRESSED IN LUNG, SIGNAL = 1.6; EXPRESSED IN HELA, SIGNAL = 2.7; EXPRESSED IN ADULT LIVER, SIGNAL = 2.4; SWISSPROT HIT: P15921, EVALUE 2.30e+00; EST_HUMAN HIT: N36040.1, EVALUE 7.00e-31; EST_HUMAN HIT: AU142997.1, EVALUE 2.00e-33
SMKDHPQQQPGMLSRVTGGIFSVTKGAVGATIGGVAWIGGKSLEVTKTAVTTVPSMGIGLVKGGVSAVAGGVTAVGSAVVNKVPLTGKKKDKSD

SEQ ID NO: 33436 - protein, 77 aa, Homo sapiens
  MAP TO AC007541.9; EXPRESSED IN BONE MARROW, SIGNAL = 0.64; EXPRESSED IN HBL100, SIGNAL = 3.4; EXPRESSED IN BRAIN, SIGNAL = 1.5; EXPRESSED IN HEART, SIGNAL = 1.8; EXPRESSED IN PLACENTA, SIGNAL = 1.9; EXPRESSED IN BT474, SIGNAL = 4.6; EXPRESSED IN FETAL LIVER, SIGNAL = 2.6; EXPRESSED IN LUNG, SIGNAL = 1.6; EXPRESSED IN HELA, SIGNAL = 2.7; EXPRESSED IN ADULT LIVER, SIGNAL = 2.4; EST_HUMAN HIT: N36040.1, EVALUE 2.00e-48; EST_HUMAN HIT: AU126470.1, EVALUE 4.00e-51; SWISSPROT HIT: P98157, EVALUE 1.20e-02
FNERSPTAAARHVVPCDWGYLQCYKGSCWCHHWWCGLDWWKESGSDQNSCYNCAFHGNRAGERGCLCCGWRCYSCWV

SEQ ID NO: 33437 - protein, 36 aa, Homo sapiens
  MAP TO AC007552.4; EXPRESSED IN PLACENTA, SIGNAL = 4.3; EXPRESSED IN BT474, SIGNAL =   3; EXPRESSED IN LUNG, SIGNAL =  10; EXPRESSED IN HELA, SIGNAL = 5.5; EXPRESSED IN BRAIN, SIGNAL = 4.6; EXPRESSED IN BONE MARROW, SIGNAL = 3.7; EXPRESSED IN HBL100, SIGNAL =   4; EXPRESSED IN FETAL LIVER, SIGNAL = 3.6; EXPRESSED IN ADULT LIVER, SIGNAL =   3; EXPRESSED IN HEART, SIGNAL = 2.6; EST_HUMAN HIT: BE742678.1, EVALUE 9.90e-02; EST_HUMAN HIT: AW370613.1, EVALUE 6.70e-02; SWISSPROT HIT: P00507, EVALUE 3.00e-03
SGPWSQAAEGNSNSGEENKNLFALFDMAYQGFASGN

SEQ ID NO: 33438 - protein, 52 aa, Homo sapiens
  MAP TO AC007552.4; EXPRESSED IN PLACENTA, SIGNAL = 4.3; EXPRESSED IN BT474, SIGNAL =   3; EXPRESSED IN LUNG, SIGNAL =  10; EXPRESSED IN HELA, SIGNAL = 5.5; EXPRESSED IN BRAIN, SIGNAL = 4.6; EXPRESSED IN BONE MARROW, SIGNAL = 3.7; EXPRESSED IN HBL100, SIGNAL =   4; EXPRESSED IN FETAL LIVER, SIGNAL = 3.6; EXPRESSED IN ADULT LIVER, SIGNAL =   3; EXPRESSED IN HEART, SIGNAL = 2.6; SWISSPROT HIT: P12344, EVALUE 3.50e+00; EST_HUMAN HIT: BF684070.1, EVALUE 1.00e-08; EST_HUMAN HIT: BE261829.1, EVALUE 1.00e-08
KISLHSSTWPTKALPVAMVTRMPGLCATLPIIRHCRCQSYTKNMVLHSEGVA

SEQ ID NO: 33439 - protein, 47 aa, Homo sapiens
  MAP TO AC007561.2; EXPRESSED IN BT474, SIGNAL = 0.97; EXPRESSED IN BONE MARROW, SIGNAL = 0.7; EXPRESSED IN HELA, SIGNAL = 1.4; EXPRESSED IN PLACENTA, SIGNAL = 0.6; EXPRESSED IN HBL100, SIGNAL = 1.2; EXPRESSED IN FETAL LIVER, SIGNAL = 1.4; EXPRESSED IN LUNG, SIGNAL =   1; EXPRESSED IN ADULT LIVER, SIGNAL = 2.4; EXPRESSED IN BRAIN, SIGNAL =   1; EXPRESSED IN HEART, SIGNAL = 0.94
FAMDKMIKTSCSVEFFIERKREVELAVKRDLQTHFSIKLTYHSSGNG

SEQ ID NO: 33440 - protein, 19 aa, Homo sapiens
  MAP TO AC007561.2; EXPRESSED IN BT474, SIGNAL = 0.97; EXPRESSED IN BONE MARROW, SIGNAL = 0.7; EXPRESSED IN HELA, SIGNAL = 1.4; EXPRESSED IN PLACENTA, SIGNAL = 0.6; EXPRESSED IN HBL100, SIGNAL = 1.2; EXPRESSED IN FETAL LIVER, SIGNAL = 1.4; EXPRESSED IN LUNG, SIGNAL =   1; EXPRESSED IN ADULT LIVER, SIGNAL = 2.4; EXPRESSED IN BRAIN, SIGNAL =   1; EXPRESSED IN HEART, SIGNAL = 0.94
KPAAPWSSSLKGRERWSWQ

SEQ ID NO: 33441 - protein, 34 aa, Homo sapiens
  MAP TO AC007561.2; EXPRESSED IN HEART, SIGNAL = 0.86; EXPRESSED IN BONE MARROW, SIGNAL = 0.65; EXPRESSED IN HBL100, SIGNAL = 0.7; EXPRESSED IN FETAL LIVER, SIGNAL = 1.1; EXPRESSED IN LUNG, SIGNAL = 2.1; EXPRESSED IN ADULT LIVER, SIGNAL = 0.76; EXPRESSED IN PLACENTA, SIGNAL = 1.6; EST_HUMAN HIT: AA683489.1, EVALUE 5.00e-09; EST_HUMAN HIT: AI191464.1, EVALUE 7.00e-09
AILLLQPQGLAPPRPTKKRAGCTPWIPSSSPSSP

SEQ ID NO: 33442 - protein, 36 aa, Homo sapiens
  MAP TO AC007632.4; EXPRESSED IN BRAIN, SIGNAL = 2.2; EXPRESSED IN HEART, SIGNAL = 1.8; EXPRESSED IN PLACENTA, SIGNAL = 1.6; EXPRESSED IN BT474, SIGNAL = 1.5; EXPRESSED IN HBL100, SIGNAL = 1.6; EXPRESSED IN FETAL LIVER, SIGNAL = 2.8; EXPRESSED IN LUNG, SIGNAL = 2.4; EXPRESSED IN ADULT LIVER, SIGNAL = 2.7; EXPRESSED IN BONE MARROW, SIGNAL = 2.8; EXPRESSED IN HELA, SIGNAL = 3.3; EST_HUMAN HIT: AI913523.1, EVALUE 1.00e-02
YHKKIPQTGKFKQQTFISHSFGAGKFQIQVSANSRS

SEQ ID NO: 33443 - protein, 46 aa, Homo sapiens
  MAP TO AC007642.4; EXPRESSED IN PLACENTA, SIGNAL = 0.91; EXPRESSED IN HBL100, SIGNAL = 1.4; EXPRESSED IN FETAL LIVER, SIGNAL =   2; EXPRESSED IN LUNG, SIGNAL = 1.4; EXPRESSED IN BRAIN, SIGNAL = 1.4; EXPRESSED IN BT474, SIGNAL = 1.1; EXPRESSED IN BONE MARROW, SIGNAL =   1; EXPRESSED IN HELA, SIGNAL = 1.8; EXPRESSED IN ADULT LIVER, SIGNAL = 1.4; EXPRESSED IN HEART, SIGNAL = 1.4; SWISSPROT HIT: P00765, EVALUE 6.00e+00; EST_HUMAN HIT: AW996316.1, EVALUE 7.00e-11
PQVGSSGCIPEEGIVIIDDSSLCAVAPEDLLVGQDPEVEDSDGPDP

SEQ ID NO: 33444 - protein, 17 aa, Homo sapiens
  MAP TO AC007642.4; EXPRESSED IN PLACENTA, SIGNAL = 0.91; EXPRESSED IN HBL100, SIGNAL = 1.4; EXPRESSED IN FETAL LIVER, SIGNAL =   2; EXPRESSED IN LUNG, SIGNAL = 1.4; EXPRESSED IN BRAIN, SIGNAL = 1.4; EXPRESSED IN BT474, SIGNAL = 1.1; EXPRESSED IN BONE MARROW, SIGNAL =   1; EXPRESSED IN HELA, SIGNAL = 1.8; EXPRESSED IN ADULT LIVER, SIGNAL = 1.4; EXPRESSED IN HEART, SIGNAL = 1.4; EST_HUMAN HIT: H87208.1, EVALUE 1.30e-01
SGRFFWMYSRRRHCYHR

SEQ ID NO: 33445 - protein, 29 aa, Homo sapiens
  MAP TO AC007652.1; EXPRESSED IN BT474, SIGNAL = 1.2; EXPRESSED IN BONE MARROW, SIGNAL =   2; EXPRESSED IN HBL100, SIGNAL = 1.5; EXPRESSED IN FETAL LIVER, SIGNAL = 1.6; EXPRESSED IN HELA, SIGNAL = 1.7; EXPRESSED IN ADULT LIVER, SIGNAL = 1.5; EXPRESSED IN PLACENTA, SIGNAL = 1.7; EXPRESSED IN LUNG, SIGNAL = 2.1; EXPRESSED IN BRAIN, SIGNAL = 2.4; EXPRESSED IN HEART, SIGNAL = 1.9
FTDQAACKASLDPTSRTIPSPTPHSLAES

SEQ ID NO: 33446 - protein, 53 aa, Homo sapiens
  MAP TO AC007653.1; EXPRESSED IN HEART, SIGNAL = 0.94; EXPRESSED IN PLACENTA, SIGNAL = 0.79; EXPRESSED IN BONE MARROW, SIGNAL = 0.67; EXPRESSED IN HBL100, SIGNAL = 1.8; EXPRESSED IN FETAL LIVER, SIGNAL = 0.99; EXPRESSED IN ADULT LIVER, SIGNAL = 0.91; EXPRESSED IN BRAIN, SIGNAL =   2; EXPRESSED IN BT474, SIGNAL = 0.66; EXPRESSED IN LUNG, SIGNAL = 0.6; EST_HUMAN HIT: AI090876.1, EVALUE 4.00e-16; SWISSPROT HIT: P50542, EVALUE 2.00e-13
  unsure 2
  unsure 3
AXXLANGDRSEEAVEAYTRALEIQPGFIRSRYNLGISCINLGRLQVKYSNRPR

SEQ ID NO: 33447 - protein, 53 aa, Homo sapiens
  MAP TO AC007653.1; EXPRESSED IN HEART, SIGNAL = 0.94; EXPRESSED IN PLACENTA, SIGNAL = 0.79; EXPRESSED IN BONE MARROW, SIGNAL = 0.67; EXPRESSED IN HBL100, SIGNAL = 1.8; EXPRESSED IN FETAL LIVER, SIGNAL = 0.99; EXPRESSED IN ADULT LIVER, SIGNAL = 0.91; EXPRESSED IN BRAIN, SIGNAL =   2; EXPRESSED IN BT474, SIGNAL = 0.66; EXPRESSED IN LUNG, SIGNAL = 0.6; EST_HUMAN HIT: AI090876.1, EVALUE 1.00e-16
  unsure 2
  unsure 3
  unsure 43
GXXLGERRPQRGSRGGLYASTGDSARIHPVQIQPRNKLHQPGXPTGEVQQQAK

SEQ ID NO: 33448 - protein, 70 aa, Homo sapiens
  MAP TO AC007732.1; EXPRESSED IN FETAL LIVER, SIGNAL = 2.3; EXPRESSED IN LUNG, SIGNAL = 1.6; EXPRESSED IN PLACENTA, SIGNAL = 1.1; EXPRESSED IN BT474, SIGNAL =   5; EXPRESSED IN BONE MARROW, SIGNAL = 2.4; EXPRESSED IN HBL100, SIGNAL = 2.7; EXPRESSED IN HELA, SIGNAL = 2.5; EXPRESSED IN ADULT LIVER, SIGNAL = 1.3; EXPRESSED IN BRAIN, SIGNAL =   2; EXPRESSED IN HEART, SIGNAL = 0.95; EST_HUMAN HIT: AA426111.1, EVALUE 5.00e-29; SWISSPROT HIT: P08775, EVALUE 5.00e-35
VTTPYNADFDGDEMNLHLPQSLETRAEIQELAMVPRMIVTPQSNRPVMGIVQDTLTAVRKFTKRDVFLER

SEQ ID NO: 33449 - protein, 95 aa, Homo sapiens
  MAP TO AC007732.1; EXPRESSED IN ADULT LIVER, SIGNAL = 3.6; EXPRESSED IN PLACENTA, SIGNAL = 3.7; EXPRESSED IN BT474, SIGNAL =   5; EXPRESSED IN BONE MARROW, SIGNAL = 5.5; EXPRESSED IN HBL100, SIGNAL = 4.8; EXPRESSED IN LUNG, SIGNAL = 4.3; EXPRESSED IN HELA, SIGNAL = 4.1; EXPRESSED IN HEART, SIGNAL = 3.2; EXPRESSED IN FETAL LIVER, SIGNAL = 3.8; EXPRESSED IN BRAIN, SIGNAL = 4.4; EST_HUMAN HIT: T05471.1, EVALUE 2.00e-25; SWISSPROT HIT: P08775, EVALUE 7.00e-44
  unsure 88
  unsure 94
GHGGCGRYQPRIRRSGLELYAEWKHVNEDSQEKKILLSPERVHEIFKRISDEECFVLGMEPRYARPEWMIVTVLPVPPLSRAACCCDXRALPVXQ

SEQ ID NO: 33450 - protein, 25 aa, Homo sapiens
  MAP TO AC007732.1; EXPRESSED IN ADULT LIVER, SIGNAL = 3.6; EXPRESSED IN PLACENTA, SIGNAL = 3.7; EXPRESSED IN BT474, SIGNAL =   5; EXPRESSED IN BONE MARROW, SIGNAL = 5.5; EXPRESSED IN HBL100, SIGNAL = 4.8; EXPRESSED IN LUNG, SIGNAL = 4.3; EXPRESSED IN HELA, SIGNAL = 4.1; EXPRESSED IN HEART, SIGNAL = 3.2; EXPRESSED IN FETAL LIVER, SIGNAL = 3.8; EXPRESSED IN BRAIN, SIGNAL = 4.4; EST_HUMAN HIT: T05471.1, EVALUE 2.00e-09
PWWLWAVPAQDPAFWPRAVCGMEAR

SEQ ID NO: 33451 - protein, 25 aa, Homo sapiens
  MAP TO AC007733.1; EXPRESSED IN BONE MARROW, SIGNAL = 1.3; EXPRESSED IN FETAL LIVER, SIGNAL = 1.9; EXPRESSED IN LUNG, SIGNAL = 1.5; EXPRESSED IN HELA, SIGNAL = 2.2; EXPRESSED IN ADULT LIVER, SIGNAL = 1.5; EXPRESSED IN BRAIN, SIGNAL = 0.74; EXPRESSED IN HEART, SIGNAL = 1.1; EXPRESSED IN PLACENTA, SIGNAL = 1.8; EXPRESSED IN BT474, SIGNAL = 1.7; EXPRESSED IN HBL100, SIGNAL = 2.5
GLENHICHCAPVPKEGSDATAQNLF

SEQ ID NO: 33452 - protein, 25 aa, Homo sapiens
  MAP TO AC007741.1; EXPRESSED IN BT474, SIGNAL =   1; EXPRESSED IN BONE MARROW, SIGNAL = 1.2; EXPRESSED IN HEART, SIGNAL = 1.6; EXPRESSED IN PLACENTA, SIGNAL = 1.1; EXPRESSED IN BRAIN, SIGNAL =   2; EXPRESSED IN ADULT LIVER, SIGNAL = 1.4; EXPRESSED IN HELA, SIGNAL = 1.4; EXPRESSED IN LUNG, SIGNAL = 1.2; EXPRESSED IN FETAL LIVER, SIGNAL = 0.93; EXPRESSED IN HBL100, SIGNAL = 0.97; EST_HUMAN HIT: AA962063.1, EVALUE 8.00e-06
GTLHSPFVFCHDWKLPEASPEAEAV

SEQ ID NO: 33453 - protein, 19 aa, Homo sapiens
  MAP TO AC007741.1; EXPRESSED IN BT474, SIGNAL =   1; EXPRESSED IN BONE MARROW, SIGNAL = 1.2; EXPRESSED IN HEART, SIGNAL = 1.6; EXPRESSED IN PLACENTA, SIGNAL = 1.1; EXPRESSED IN BRAIN, SIGNAL =   2; EXPRESSED IN ADULT LIVER, SIGNAL = 1.4; EXPRESSED IN HELA, SIGNAL = 1.4; EXPRESSED IN LUNG, SIGNAL = 1.2; EXPRESSED IN FETAL LIVER, SIGNAL = 0.93; EXPRESSED IN HBL100, SIGNAL = 0.97
CFSLAPLRWDTSFPLCLLP

SEQ ID NO: 33454 - protein, 24 aa, Homo sapiens
  MAP TO AC007741.1; EXPRESSED IN LUNG, SIGNAL = 6.5; EXPRESSED IN HEART, SIGNAL = 0.92; EXPRESSED IN PLACENTA, SIGNAL =  14; EXPRESSED IN BT474, SIGNAL =  57; EXPRESSED IN HBL100, SIGNAL =  21; EXPRESSED IN FETAL LIVER, SIGNAL =  15; EXPRESSED IN ADULT LIVER, SIGNAL =  14; EXPRESSED IN BONE MARROW, SIGNAL = 1.5; EXPRESSED IN HELA, SIGNAL =  20; EST_HUMAN HIT: AA126394.1, EVALUE 4.00e-07; EST_HUMAN HIT: AA196273.1, EVALUE 6.00e-07
CTWSQSWHRPGQRDSARPRSTRPC

SEQ ID NO: 33455 - protein, 72 aa, Homo sapiens
  MAP TO AC007751.3; EXPRESSED IN BT474, SIGNAL =  40; EXPRESSED IN HELA, SIGNAL =  11; EXPRESSED IN ADULT LIVER, SIGNAL = 8.5; EXPRESSED IN HEART, SIGNAL = 2.4; EXPRESSED IN PLACENTA, SIGNAL =   9; EXPRESSED IN BONE MARROW, SIGNAL =  37; EXPRESSED IN HBL100, SIGNAL =  58; EXPRESSED IN FETAL LIVER, SIGNAL =  14; EXPRESSED IN LUNG, SIGNAL = 9.8; EXPRESSED IN BRAIN, SIGNAL = 5.2; EST_HUMAN HIT: BF316215.1, EVALUE 1.00e-03; EST_HUMAN HIT: BE295029.1, EVALUE 8.00e-04; SWISSPROT HIT: P06302, EVALUE 5.70e-02
MLHREAAVDTSSEITTKGIKEKEVMGRQKMEEMSLLMGRLIRKIRIRRLAMREMKKKKKEVGRKRKRNKKIM

SEQ ID NO: 33456 - protein, 36 aa, Homo sapiens
  MAP TO AC007841.1; EXPRESSED IN HBL100, SIGNAL =  11; EXPRESSED IN LUNG, SIGNAL =  36; EXPRESSED IN BRAIN, SIGNAL =  11; EXPRESSED IN BT474, SIGNAL =  11; EXPRESSED IN PLACENTA, SIGNAL =  15; EXPRESSED IN HEART, SIGNAL = 6.7; EXPRESSED IN ADULT LIVER, SIGNAL = 9.9; EXPRESSED IN HELA, SIGNAL = 9.9; EXPRESSED IN FETAL LIVER, SIGNAL =  12; EXPRESSED IN BONE MARROW, SIGNAL =  13; EST_HUMAN HIT: AA720574.1, EVALUE 2.00e-10; SWISSPROT HIT: P53115, EVALUE 1.60e+00
DLLNGFDKNTDNDTDNEIPADVVSDGDEELVGNWSK

SEQ ID NO: 33457 - protein, 220 aa, Homo sapiens
  MAP TO AC007842.1; EXPRESSED IN BONE MARROW, SIGNAL = 0.85; EXPRESSED IN LUNG, SIGNAL =   1; EXPRESSED IN HELA, SIGNAL = 1.1; EXPRESSED IN HEART, SIGNAL = 1.5; EXPRESSED IN PLACENTA, SIGNAL = 0.7; EXPRESSED IN BT474, SIGNAL = 1.4; EXPRESSED IN HBL100, SIGNAL = 1.2; EXPRESSED IN FETAL LIVER, SIGNAL = 0.85; EXPRESSED IN ADULT LIVER, SIGNAL =   1; EXPRESSED IN BRAIN, SIGNAL = 1.3; EST_HUMAN HIT: BF351007.1, EVALUE 3.00e-56; EST_HUMAN HIT: AW949650.1, EVALUE 3.00e-54; SWISSPROT HIT: Q9Y2G7, EVALUE 1.00e-53
LEYKYITKNLLSEKNVCKIYLSQLQTGEKSKNTIHEDTIFRNGLQCKHEFERQERHQMGCVSQMLIQKQISHPLHPKIHAREKSYECKECRKAFRQQSYLIQHLRIHTGERPYKCMECGKAFCRVGDLRVHHTIHAGERPYECKECGKAFRLHYHLTEHQRIHSGVKPYECKECGKAFSRVRDLRVHQTIHAGERPYECKECGKAFRLHYQLTEHQRIHT

SEQ ID NO: 33458 - protein, 58 aa, Homo sapiens
  MAP TO AC007842.1; EXPRESSED IN BONE MARROW, SIGNAL = 0.85; EXPRESSED IN LUNG, SIGNAL =   1; EXPRESSED IN HELA, SIGNAL = 1.1; EXPRESSED IN HEART, SIGNAL = 1.5; EXPRESSED IN PLACENTA, SIGNAL = 0.7; EXPRESSED IN BT474, SIGNAL = 1.4; EXPRESSED IN HBL100, SIGNAL = 1.2; EXPRESSED IN FETAL LIVER, SIGNAL = 0.85; EXPRESSED IN ADULT LIVER, SIGNAL =   1; EXPRESSED IN BRAIN, SIGNAL = 1.3; EST_HUMAN HIT: AA084272.1, EVALUE 7.00e-04; SWISSPROT HIT: P15870, EVALUE 4.50e+00
PRICFQKRMFAKSIYLNCRQGKKVKTPSMRTPFSEMVCSVNMNLRDKRDIRWDALVKC

SEQ ID NO: 33459 - protein, 65 aa, Homo sapiens
  MAP TO AC008133.1; EXPRESSED IN HEART, SIGNAL = 1.1; EXPRESSED IN ADULT LIVER, SIGNAL = 1.5; EXPRESSED IN BRAIN, SIGNAL = 1.4; EXPRESSED IN PLACENTA, SIGNAL = 1.1; EXPRESSED IN BONE MARROW, SIGNAL = 1.3; EXPRESSED IN HBL100, SIGNAL = 2.1; EXPRESSED IN FETAL LIVER, SIGNAL = 1.5; EXPRESSED IN HELA, SIGNAL = 2.6; EXPRESSED IN BT474, SIGNAL = 2.2; EXPRESSED IN LUNG, SIGNAL = 1.7; EST_HUMAN HIT: BF573994.1, EVALUE 1.70e-01; EST_HUMAN HIT: W69653.1, EVALUE 4.30e-01; SWISSPROT HIT: P49771, EVALUE 2.50e+00
  unsure 59
RLILAARWRIHWKSKKRAPRLVRSQVEPPGEEMGRSEWRGEKQGGRGVSGLHRQGRQQXLDLMNE

SEQ ID NO: 33460 - protein, 34 aa, Homo sapiens
  MAP TO AC008151.1; EXPRESSED IN PLACENTA, SIGNAL = 5.8; EXPRESSED IN BT474, SIGNAL = 4.5; EXPRESSED IN LUNG, SIGNAL = 6.4; EXPRESSED IN HELA, SIGNAL = 5.7; EXPRESSED IN HEART, SIGNAL = 6.3; EXPRESSED IN BONE MARROW, SIGNAL = 6.7; EXPRESSED IN HBL100, SIGNAL = 4.4; EXPRESSED IN FETAL LIVER, SIGNAL = 4.6; EXPRESSED IN ADULT LIVER, SIGNAL = 5.3; EXPRESSED IN BRAIN, SIGNAL = 7.6; SWISSPROT HIT: P16384, EVALUE 8.20e+00; EST_HUMAN HIT: BF129091.1, EVALUE 2.60e+00; EST_HUMAN HIT: T66331.1, EVALUE 1.70e+00
PGLCSSGTPCCTKKKLTWYLPWRGIHSWGEDERR

SEQ ID NO: 33461 - protein, 26 aa, Homo sapiens
  MAP TO AC008170.1; EXPRESSED IN BONE MARROW, SIGNAL =   9; EXPRESSED IN FETAL LIVER, SIGNAL =  13; EXPRESSED IN LUNG, SIGNAL = 7.6; EXPRESSED IN BRAIN, SIGNAL = 4.9; EXPRESSED IN PLACENTA, SIGNAL = 8.1; EXPRESSED IN BT474, SIGNAL =  13; EXPRESSED IN HBL100, SIGNAL =  14; EXPRESSED IN HELA, SIGNAL =  10; EXPRESSED IN ADULT LIVER, SIGNAL = 7.8; EXPRESSED IN HEART, SIGNAL = 3.7
QILMDPTAMLARHLAAIVFLLFTPKQ

SEQ ID NO: 33462 - protein, 26 aa, Homo sapiens
  MAP TO AC008170.1; EXPRESSED IN BONE MARROW, SIGNAL =   9; EXPRESSED IN FETAL LIVER, SIGNAL =  13; EXPRESSED IN LUNG, SIGNAL = 7.6; EXPRESSED IN BRAIN, SIGNAL = 4.9; EXPRESSED IN PLACENTA, SIGNAL = 8.1; EXPRESSED IN BT474, SIGNAL =  13; EXPRESSED IN HBL100, SIGNAL =  14; EXPRESSED IN HELA, SIGNAL =  10; EXPRESSED IN ADULT LIVER, SIGNAL = 7.8; EXPRESSED IN HEART, SIGNAL = 3.7; EST_HUMAN HIT: AW893706.1, EVALUE 1.40e+00
TRFSWTPLPCWPDILLPLFSCYLLPN

SEQ ID NO: 33463 - protein, 32 aa, Homo sapiens
  MAP TO AC008271.1; EXPRESSED IN BT474, SIGNAL = 8.8; EXPRESSED IN BONE MARROW, SIGNAL =  12; EXPRESSED IN HBL100, SIGNAL =  11; EXPRESSED IN HELA, SIGNAL =  12; EXPRESSED IN BRAIN, SIGNAL =  13; EXPRESSED IN PLACENTA, SIGNAL = 9.3; EXPRESSED IN FETAL LIVER, SIGNAL =  10; EXPRESSED IN LUNG, SIGNAL =  12; EXPRESSED IN ADULT LIVER, SIGNAL = 8.6; EXPRESSED IN HEART, SIGNAL = 9.4; EST_HUMAN HIT: R22982.1, EVALUE 1.40e-02; SWISSPROT HIT: P23963, EVALUE 1.10e-01
SSCDYRHAPPRVANLYLILSISFPVSYMEISD

SEQ ID NO: 33464 - protein, 34 aa, Homo sapiens
  MAP TO AC008272.1; EXPRESSED IN LUNG, SIGNAL = 1.7; EXPRESSED IN HELA, SIGNAL = 1.5; EXPRESSED IN ADULT LIVER, SIGNAL = 1.3; EXPRESSED IN PLACENTA, SIGNAL = 1.2; EXPRESSED IN BONE MARROW, SIGNAL = 1.6; EXPRESSED IN FETAL LIVER, SIGNAL = 1.4; EXPRESSED IN BRAIN, SIGNAL = 1.6; EXPRESSED IN HEART, SIGNAL = 4.3; EXPRESSED IN BT474, SIGNAL = 1.3; EXPRESSED IN HBL100, SIGNAL = 1.3; EST_HUMAN HIT: AI804347.1, EVALUE 2.00e-10; EST_HUMAN HIT: AA904982.1, EVALUE 3.00e-10
QTFKKQKGHSASRGQRGKLRSSLVRSLQTLKGLR

SEQ ID NO: 33465 - protein, 73 aa, Homo sapiens
  MAP TO AC008272.1; EXPRESSED IN PLACENTA, SIGNAL = 3.1; EXPRESSED IN BT474, SIGNAL = 3.4; EXPRESSED IN BONE MARROW, SIGNAL = 2.8; EXPRESSED IN HBL100, SIGNAL = 2.9; EXPRESSED IN FETAL LIVER, SIGNAL = 2.3; EXPRESSED IN LUNG, SIGNAL = 2.4; EXPRESSED IN HELA, SIGNAL = 1.7; EXPRESSED IN ADULT LIVER, SIGNAL = 1.4; EXPRESSED IN BRAIN, SIGNAL = 1.9; EXPRESSED IN HEART, SIGNAL = 2.2; EST_HUMAN HIT: BE295714.1, EVALUE 3.00e-33; SWISSPROT HIT: P21414, EVALUE 8.00e-16
TSAQLAALVALTRALELGKGKRINVYTDSKYAYLILHAHAAIWKEREFLTSGGTPVKCHKEIIELLHAMQKHK

SEQ ID NO: 33466 - protein, 109 aa, Homo sapiens
  MAP TO AC008272.1; EXPRESSED IN BONE MARROW, SIGNAL = 3.9; EXPRESSED IN HBL100, SIGNAL = 2.6; EXPRESSED IN LUNG, SIGNAL = 2.8; EXPRESSED IN ADULT LIVER, SIGNAL = 2.2; EXPRESSED IN PLACENTA, SIGNAL = 3.5; EXPRESSED IN BT474, SIGNAL = 2.6; EXPRESSED IN FETAL LIVER, SIGNAL = 2.6; EXPRESSED IN HELA, SIGNAL = 2.2; EXPRESSED IN BRAIN, SIGNAL = 3.4; EXPRESSED IN HEART, SIGNAL = 2.8; SWISSPROT HIT: P08548, EVALUE 2.00e-03; EST_HUMAN HIT: BE072452.1, EVALUE 1.00e-07
TIKTNLYDRKEISGCLRRGYMERDRKERLQRSTRIPFGMMFMFTILIGFMGIYVCQNLSNCTLDTYAVYFMSLILQNAVKTLTKLGMQGMFLNRINAILDKPTANIIPN

SEQ ID NO: 33467 - protein, 59 aa, Homo sapiens
  MAP TO AC009222.1; EXPRESSED IN HBL100, SIGNAL = 7.7; EXPRESSED IN LUNG, SIGNAL = 8.8; EXPRESSED IN BRAIN, SIGNAL =  10; EXPRESSED IN BT474, SIGNAL = 8.7; EXPRESSED IN PLACENTA, SIGNAL =  11; EXPRESSED IN HEART, SIGNAL = 7.3; EXPRESSED IN ADULT LIVER, SIGNAL = 6.3; EXPRESSED IN HELA, SIGNAL = 6.6; EXPRESSED IN FETAL LIVER, SIGNAL =   8; EXPRESSED IN BONE MARROW, SIGNAL = 9.3; EST_HUMAN HIT: AA720574.1, EVALUE 9.00e-21; SWISSPROT HIT: O73673, EVALUE 3.00e-01
WELPRDLEGSEDRQMWENLELPIDLLNGFDQNSDSDMDNEVQAEVVSDGDKDLFGNWRK

SEQ ID NO: 33468 - protein, 35 aa, Homo sapiens
  MAP TO AC009233.1; EXPRESSED IN BRAIN, SIGNAL =   9; EXPRESSED IN LUNG, SIGNAL = 7.1; EXPRESSED IN HELA, SIGNAL = 7.7; EXPRESSED IN ADULT LIVER, SIGNAL = 6.8; EXPRESSED IN PLACENTA, SIGNAL = 6.1; EXPRESSED IN BT474, SIGNAL =  11; EXPRESSED IN BONE MARROW, SIGNAL = 6.6; EXPRESSED IN HBL100, SIGNAL =  24; EXPRESSED IN HEART, SIGNAL = 4.8; EXPRESSED IN FETAL LIVER, SIGNAL = 7.9; EST_HUMAN HIT: BE254708.1, EVALUE 4.00e-04
EVSETKNPPEGINSRHILVTVKGHILVTVAGQLPS

SEQ ID NO: 33469 - protein, 18 aa, Homo sapiens
  MAP TO AC009233.1; EXPRESSED IN BRAIN, SIGNAL =   9; EXPRESSED IN LUNG, SIGNAL = 7.1; EXPRESSED IN HELA, SIGNAL = 7.7; EXPRESSED IN ADULT LIVER, SIGNAL = 6.8; EXPRESSED IN PLACENTA, SIGNAL = 6.1; EXPRESSED IN BT474, SIGNAL =  11; EXPRESSED IN BONE MARROW, SIGNAL = 6.6; EXPRESSED IN HBL100, SIGNAL =  24; EXPRESSED IN HEART, SIGNAL = 4.8; EXPRESSED IN FETAL LIVER, SIGNAL = 7.9; EST_HUMAN HIT: AW957429.1, EVALUE 2.10e+00; EST_HUMAN HIT: AA377655.1, EVALUE 1.50e+00
KSVKLRTHRKESTPDTSW

SEQ ID NO: 33470 - protein, 39 aa, Homo sapiens
  MAP TO AC009241.1; EXPRESSED IN BT474, SIGNAL = 1.8; EXPRESSED IN BONE MARROW, SIGNAL = 3.5; EXPRESSED IN FETAL LIVER, SIGNAL = 2.7; EXPRESSED IN ADULT LIVER, SIGNAL = 3.5; EXPRESSED IN BRAIN, SIGNAL = 3.5; EXPRESSED IN PLACENTA, SIGNAL = 3.2; EXPRESSED IN HBL100, SIGNAL = 2.9; EXPRESSED IN LUNG, SIGNAL = 3.4; EXPRESSED IN HELA, SIGNAL = 3.5; EXPRESSED IN HEART, SIGNAL =   3; EST_HUMAN HIT: AL119661.1, EVALUE 2.20e+00
VSCFQGLVQVTSWLCSRYYGCITQGSPTPGPWTSMICCL

SEQ ID NO: 33471 - protein, 96 aa, Homo sapiens
  MAP TO AC009291.1; EXPRESSED IN BT474, SIGNAL = 6.1; EXPRESSED IN HBL100, SIGNAL = 3.2; EXPRESSED IN HEART, SIGNAL = 2.4; EXPRESSED IN PLACENTA, SIGNAL = 2.1; EXPRESSED IN BRAIN, SIGNAL = 2.1; EXPRESSED IN ADULT LIVER, SIGNAL = 1.2; EXPRESSED IN HELA, SIGNAL =   2; EXPRESSED IN LUNG, SIGNAL = 1.9; EXPRESSED IN FETAL LIVER, SIGNAL = 2.6; EXPRESSED IN BONE MARROW, SIGNAL = 4.4; EST_HUMAN HIT: AW961150.1, EVALUE 1.00e-13; EST_HUMAN HIT: BF036881.1, EVALUE 3.00e-30
ESSRIPTSDTSSRSHIFRRESNEVVHLEAQNDPLGAAANRPQASAASSSATTGGSTSDSAQGGRNTGISGILPGSLFRFAVPPALGSNLTDNVMIT

SEQ ID NO: 33472 - protein, 49 aa, Homo sapiens
  MAP TO AF095901.1; EXPRESSED IN PLACENTA, SIGNAL = 1.7; EXPRESSED IN BT474, SIGNAL = 2.7; EXPRESSED IN LUNG, SIGNAL = 1.9; EXPRESSED IN BRAIN, SIGNAL = 1.4; EXPRESSED IN BONE MARROW, SIGNAL = 2.8; EXPRESSED IN HBL100, SIGNAL = 3.3; EXPRESSED IN FETAL LIVER, SIGNAL = 2.4; EXPRESSED IN HELA, SIGNAL = 2.5; EXPRESSED IN ADULT LIVER, SIGNAL = 1.5; EXPRESSED IN HEART, SIGNAL = 1.6; EST_HUMAN HIT: AA402697.1, EVALUE 1.00e-22; SWISSPROT HIT: P46055, EVALUE 2.00e-23; EST_HUMAN HIT: AA098888.1, EVALUE 2.00e-22
TGQEHELIESMPLLEWFANNYKKFGATLEIVTDKSQEGSQFVKGFGGIG

SEQ ID NO: 33473 - protein, 41 aa, Homo sapiens
  MAP TO AF095901.1; EXPRESSED IN PLACENTA, SIGNAL = 1.7; EXPRESSED IN BT474, SIGNAL = 2.7; EXPRESSED IN LUNG, SIGNAL = 1.9; EXPRESSED IN BRAIN, SIGNAL = 1.4; EXPRESSED IN BONE MARROW, SIGNAL = 2.8; EXPRESSED IN HBL100, SIGNAL = 3.3; EXPRESSED IN FETAL LIVER, SIGNAL = 2.4; EXPRESSED IN HELA, SIGNAL = 2.5; EXPRESSED IN ADULT LIVER, SIGNAL = 1.5; EXPRESSED IN HEART, SIGNAL = 1.6; EST_HUMAN HIT: AA402697.1, EVALUE 1.00e-18; EST_HUMAN HIT: BE887059.1, EVALUE 2.00e-18
PDRNMSLSRACPCWNGLLTTIKNLELRWKLSQINHKKGLSL

SEQ ID NO: 33474 - protein, 81 aa, Homo sapiens
  MAP TO AF111168.2; EXPRESSED IN PLACENTA, SIGNAL =  13; EXPRESSED IN BT474, SIGNAL = 0.85; EXPRESSED IN BONE MARROW, SIGNAL = 0.92; EXPRESSED IN HBL100, SIGNAL = 0.82; EXPRESSED IN FETAL LIVER, SIGNAL = 0.75; EXPRESSED IN LUNG, SIGNAL = 0.92; EXPRESSED IN ADULT LIVER, SIGNAL = 0.96; EXPRESSED IN BRAIN, SIGNAL =   1; EXPRESSED IN HELA, SIGNAL = 0.97; EXPRESSED IN HEART, SIGNAL = 1.4; EST_HUMAN HIT: BE281519.1, EVALUE 1.30e+00; EST_HUMAN HIT: BE731965.1, EVALUE 2.00e-31; SWISSPROT HIT: Q02817, EVALUE 5.30e+00
VSASPDPRPLKEEEEAPLLPRTHLQAEPHQHGCWTVTEPAAMTPGNATPPRTPEVTPLRLELQKLPGLANTTLSTPNPDTQ

SEQ ID NO: 33475 - protein, 268 aa, Homo sapiens
  MAP TO AF118808.1; EXPRESSED IN FETAL LIVER, SIGNAL = 1.2; EXPRESSED IN LUNG, SIGNAL = 0.87; EXPRESSED IN PLACENTA, SIGNAL =   1; EXPRESSED IN HEART, SIGNAL = 1.1; EXPRESSED IN BRAIN, SIGNAL = 1.2; EXPRESSED IN ADULT LIVER, SIGNAL = 1.4; EXPRESSED IN HELA, SIGNAL = 0.94; EXPRESSED IN HBL100, SIGNAL = 6.3; EXPRESSED IN BONE MARROW, SIGNAL = 0.74; EXPRESSED IN BT474, SIGNAL = 4.1; EST_HUMAN HIT: BE295973.1, EVALUE 5.00e-83; SWISSPROT HIT: P49910, EVALUE 7.00e-38
EKEEMIPKQDISEELESQRAKSEDHVRNIFKETEEMSKTEGKLENCWRKYAVEGVKNSFSQKSNFREITMRYVKTLSRENGQKFNAVGENCITDSNPAKHLRGSREESLHPSVSSVENLQQHEDLINLQSFQLGERAYQTDVLVKVPRQSSVLSENQRMNNPERWFESTGCGKTYNQNRAFNQHQRFHSGEKTYEHNECGKAFSWPSILSKHQRIHTGKKLYTCEDCGKSFSVHSYFIQHCKIHTREKPYECIKCGKAFSTHSSYVQH

SEQ ID NO: 33476 - protein, 439 aa, Homo sapiens
  MAP TO AF118808.1; EXPRESSED IN BT474, SIGNAL = 7.1; EXPRESSED IN FETAL LIVER, SIGNAL = 2.4; EXPRESSED IN PLACENTA, SIGNAL = 2.4; EXPRESSED IN BONE MARROW, SIGNAL = 2.4; EXPRESSED IN HBL100, SIGNAL = 6.7; EXPRESSED IN LUNG, SIGNAL = 2.6; EXPRESSED IN HELA, SIGNAL = 3.9; EXPRESSED IN ADULT LIVER, SIGNAL = 2.4; EXPRESSED IN BRAIN, SIGNAL = 5.4; EXPRESSED IN HEART, SIGNAL =   3; SWISSPROT HIT: P52742, EVALUE 0.00e+00; EST_HUMAN HIT: BE885790.1, EVALUE 1.00e-116; EST_HUMAN HIT: AF150239.1, EVALUE 1.00e-115
CETKGESQNTDLSPKPLISEQTVILGKTPLGRIDQENNETKQSFCLSPNSVDHREVQVLSQSMPLTPHQAVPSGERPYMCVECGKCFGRSSHLLQHQRIHTGEKPYVCSVCGKAFSQSSVLSKHRRIHTGEKPYECNECGKAFRVSSDLAQHHKIHTGEKPHECLECRKAFTQLSHLIQHQRIHTGERPYVCPLCGKAFNHSTVLRSHQRVHTGEKPHRCNECGKTFSVKRTLLQHQRIHTGENPYTCSECGKAFSDRSVLIQHHNVHTGEKPYECSECGKTFSHRSTLMNHERIHTEEKPYACYECGKAFVQHSHLIQHQRVHTGEKPYVCGECGHAFSARRSLIQHERIHTGEKPFQCTECGKAFSLKATLIVHLRTHTGEKPYECNSCGKAFSQYSVLIQHQRIHTGEKPYECGECGRAFNQHGHLIQHQKVHRKL

SEQ ID NO: 33477 - protein, 254 aa, Homo sapiens
  MAP TO AF118808.1; EXPRESSED IN PLACENTA, SIGNAL = 4.7; EXPRESSED IN BONE MARROW, SIGNAL = 1.6; EXPRESSED IN FETAL LIVER, SIGNAL =   2; EXPRESSED IN LUNG, SIGNAL = 1.3; EXPRESSED IN HELA, SIGNAL = 2.3; EXPRESSED IN BRAIN, SIGNAL = 1.4; EXPRESSED IN HEART, SIGNAL = 1.5; EXPRESSED IN BT474, SIGNAL = 3.9; EXPRESSED IN HBL100, SIGNAL = 3.8; EXPRESSED IN ADULT LIVER, SIGNAL = 1.6; EST_HUMAN HIT: AF150239.1, EVALUE 2.00e-89; SWISSPROT HIT: P51522, EVALUE 1.00e-107; EST_HUMAN HIT: AU141046.1, EVALUE 5.00e-92
RKHQRVHTGEKPYECNDCGKPFSRVSNLIKHHRVHTGEKPYKCSDCGKAFSQSSSLIQHRRIHTGEKPHVCNVCGKAFSYSSVLRKHQIIHTGEKPYRCSVCGKAFSHSSALIQHQGVHTGDKPYACHECGKTFGRSSNLILHQRVHTGEKPYECTECGKTFSQSSTLIQHQRIHNGLKPHECNQCGKAFNRSSNLIHHQKVHTGEKPYTCVECGKGFSQSSHLIQHQIIHTGERPYKCSECGKAFSQRSVLIQ

SEQ ID NO: 33478 - protein, 69 aa, Homo sapiens
  MAP TO AF165138.1; EXPRESSED IN BT474, SIGNAL = 0.86; EXPRESSED IN HBL100, SIGNAL = 0.69; EXPRESSED IN BRAIN, SIGNAL = 1.2; EXPRESSED IN PLACENTA, SIGNAL = 0.89; EXPRESSED IN BONE MARROW, SIGNAL = 2.5; EXPRESSED IN FETAL LIVER, SIGNAL = 1.2; EXPRESSED IN LUNG, SIGNAL = 1.5; EXPRESSED IN HELA, SIGNAL = 0.83; EXPRESSED IN ADULT LIVER, SIGNAL = 1.1; EXPRESSED IN HEART, SIGNAL = 1.2; EST_HUMAN HIT: BF210987.1, EVALUE 2.00e-24; EST_HUMAN HIT: AA323135.1, EVALUE 4.00e-11
KGDIIDIICKTPMGMWTGMLNNKVGNFKFIYVDVISEEEAAPKKIKANRRSNSKKSKTLQEFLERIHLQ

SEQ ID NO: 33479 - protein, 33 aa, Homo sapiens
  MAP TO AJ239321.2; EXPRESSED IN HBL100, SIGNAL = 2.8; EXPRESSED IN FETAL LIVER, SIGNAL = 2.9; EXPRESSED IN LUNG, SIGNAL = 2.6; EXPRESSED IN HELA, SIGNAL = 2.7; EXPRESSED IN BRAIN, SIGNAL =   4; EXPRESSED IN BT474, SIGNAL = 3.4; EXPRESSED IN PLACENTA, SIGNAL = 4.2; EXPRESSED IN HEART, SIGNAL = 2.6; EXPRESSED IN ADULT LIVER, SIGNAL = 2.7; EXPRESSED IN BONE MARROW, SIGNAL = 3.9; EST_HUMAN HIT: AA720574.1, EVALUE 2.00e-04
FPTSSSSPSETTSAWTLLSISLSVFWSEPFNKS

SEQ ID NO: 33480 - protein, 41 aa, Homo sapiens
  MAP TO AJ239321.2; EXPRESSED IN BONE MARROW, SIGNAL =  14; EXPRESSED IN ADULT LIVER, SIGNAL = 8.3; EXPRESSED IN BRAIN, SIGNAL =  30; EXPRESSED IN PLACENTA, SIGNAL =  27; EXPRESSED IN BT474, SIGNAL =  57; EXPRESSED IN HBL100, SIGNAL =  15; EXPRESSED IN FETAL LIVER, SIGNAL =  24; EXPRESSED IN LUNG, SIGNAL =  17; EXPRESSED IN HELA, SIGNAL = 7.3; EXPRESSED IN HEART, SIGNAL =  18; EST_HUMAN HIT: AU132789.1, EVALUE 3.00e-15; EST_HUMAN HIT: AW884543.1, EVALUE 2.00e-15; SWISSPROT HIT: P28160, EVALUE 2.00e-15
GEKPYKYQECGKAFKWSSNLTIHKRIHTGEKPCKCEECGKA

SEQ ID NO: 33481 - protein, 47 aa, Homo sapiens
  MAP TO AJ239321.2; EXPRESSED IN BONE MARROW, SIGNAL =  14; EXPRESSED IN ADULT LIVER, SIGNAL = 8.3; EXPRESSED IN BRAIN, SIGNAL =  30; EXPRESSED IN PLACENTA, SIGNAL =  27; EXPRESSED IN BT474, SIGNAL =  57; EXPRESSED IN HBL100, SIGNAL =  15; EXPRESSED IN FETAL LIVER, SIGNAL =  24; EXPRESSED IN LUNG, SIGNAL =  17; EXPRESSED IN HELA, SIGNAL = 7.3; EXPRESSED IN HEART, SIGNAL =  18; EST_HUMAN HIT: BE004937.1, EVALUE 3.00e-12
ETNPTNVKIVAKFLSGLRTLLYIREFIVERNPTNVKNVAKPLSNLQN

SEQ ID NO: 33482 - protein, 76 aa, Homo sapiens
  MAP TO AL020993.1; EXPRESSED IN BT474, SIGNAL = 8.4; EXPRESSED IN HELA, SIGNAL = 7.1; EXPRESSED IN ADULT LIVER, SIGNAL = 1.9; EXPRESSED IN PLACENTA, SIGNAL = 2.9; EXPRESSED IN BONE MARROW, SIGNAL = 1.4; EXPRESSED IN HBL100, SIGNAL = 8.8; EXPRESSED IN FETAL LIVER, SIGNAL = 4.5; EXPRESSED IN LUNG, SIGNAL = 5.1; EXPRESSED IN BRAIN, SIGNAL = 4.6; EXPRESSED IN HEART, SIGNAL = 3.6; EST_HUMAN HIT: BE878196.1, EVALUE 2.00e-39; EST_HUMAN HIT: BE294909.1, EVALUE 1.00e-39; SWISSPROT HIT: P49674, EVALUE 2.00e-40
ISRIEYIHSKNFIHRDVKPDNFLMGLGKKGNLVYIIDFGLAKKYRDARTHQHIPYRENKNLTGTARYASINTHLGI

SEQ ID NO: 33483 - protein, 24 aa, Homo sapiens
  MAP TO AL020993.1; EXPRESSED IN BT474, SIGNAL = 8.4; EXPRESSED IN HELA, SIGNAL = 7.1; EXPRESSED IN ADULT LIVER, SIGNAL = 1.9; EXPRESSED IN PLACENTA, SIGNAL = 2.9; EXPRESSED IN BONE MARROW, SIGNAL = 1.4; EXPRESSED IN HBL100, SIGNAL = 8.8; EXPRESSED IN FETAL LIVER, SIGNAL = 4.5; EXPRESSED IN LUNG, SIGNAL = 5.1; EXPRESSED IN BRAIN, SIGNAL = 4.6; EXPRESSED IN HEART, SIGNAL = 3.6
WSKAGLSPSAFPPLWPQPLPGPEC

SEQ ID NO: 33484 - protein, 60 aa, Homo sapiens
  MAP TO AL023513.1; EXPRESSED IN LUNG, SIGNAL = 0.68; EXPRESSED IN ADULT LIVER, SIGNAL =   1; EXPRESSED IN HEART, SIGNAL =   1; EXPRESSED IN PLACENTA, SIGNAL = 1.4; EXPRESSED IN HELA, SIGNAL = 0.62; EXPRESSED IN FETAL LIVER, SIGNAL = 0.75; EXPRESSED IN HBL100, SIGNAL = 0.68; EXPRESSED IN BONE MARROW, SIGNAL = 0.69; EXPRESSED IN BT474, SIGNAL = 0.63
MVTSGVIHHVLIKEGKLQQSRGVIKTTFILLTISTTVIVTSFVEPPGLGGFKDQLETILA

SEQ ID NO: 33485 - protein, 142 aa, Homo sapiens
  MAP TO AL023913.5; EXPRESSED IN FETAL LIVER, SIGNAL = 1.2; EXPRESSED IN LUNG, SIGNAL = 1.5; EXPRESSED IN PLACENTA, SIGNAL = 1.3; EXPRESSED IN BT474, SIGNAL = 1.4; EXPRESSED IN BONE MARROW, SIGNAL = 1.3; EXPRESSED IN HBL100, SIGNAL = 1.5; EXPRESSED IN ADULT LIVER, SIGNAL = 1.7; EXPRESSED IN BRAIN, SIGNAL = 2.6; EXPRESSED IN HEART, SIGNAL = 1.2; EXPRESSED IN HELA, SIGNAL = 1.8
FTNIIACPTTTTTNTSTAITSTITIPTPTNTTTASIITTLPFPLALPPPHHLNQHAHYLHLYYHHHYNHHHHLHHHHRSHCHHHHHHLTIHLLCQHHHHHFHHLCHLLHLSLCPHSSNADTFILVALVGCQIILSIKASLEV

SEQ ID NO: 33486 - protein, 57 aa, Homo sapiens
  MAP TO AL031431.8; EXPRESSED IN FETAL LIVER, SIGNAL = 3.5; EXPRESSED IN LUNG, SIGNAL = 3.6; EXPRESSED IN HELA, SIGNAL = 3.2; EXPRESSED IN ADULT LIVER, SIGNAL = 2.9; EXPRESSED IN BT474, SIGNAL = 3.3; EXPRESSED IN PLACENTA, SIGNAL = 4.3; EXPRESSED IN HEART, SIGNAL = 2.9; EXPRESSED IN BRAIN, SIGNAL = 3.6; EXPRESSED IN HBL100, SIGNAL = 3.4; EXPRESSED IN BONE MARROW, SIGNAL = 3.9; EST_HUMAN HIT: AU132886.1, EVALUE 8.00e-19; EST_HUMAN HIT: AA937099.1, EVALUE 6.00e-08
KYCHIRLAGSKDPRAYFKTKTWWLGLFLMLLGELGVFASYAFAPLSLIVPLSAVSVI

SEQ ID NO: 33487 - protein, 23 aa, Homo sapiens
  MAP TO AL031431.8; EXPRESSED IN FETAL LIVER, SIGNAL = 3.5; EXPRESSED IN LUNG, SIGNAL = 3.6; EXPRESSED IN HELA, SIGNAL = 3.2; EXPRESSED IN ADULT LIVER, SIGNAL = 2.9; EXPRESSED IN BT474, SIGNAL = 3.3; EXPRESSED IN PLACENTA, SIGNAL = 4.3; EXPRESSED IN HEART, SIGNAL = 2.9; EXPRESSED IN BRAIN, SIGNAL = 3.6; EXPRESSED IN HBL100, SIGNAL = 3.4; EXPRESSED IN BONE MARROW, SIGNAL = 3.9; EST_HUMAN HIT: AU132886.1, EVALUE 5.00e-08; EST_HUMAN HIT: AW162360.1, EVALUE 9.60e+00
SWVCSPPTPSRRCHSSCPSAQFL

SEQ ID NO: 33488 - protein, 95 aa, Homo sapiens
  MAP TO AL034371.16; EXPRESSED IN HBL100, SIGNAL = 9.7; EXPRESSED IN BRAIN, SIGNAL =   6; EXPRESSED IN PLACENTA, SIGNAL = 6.8; EXPRESSED IN HEART, SIGNAL = 4.3; EXPRESSED IN ADULT LIVER, SIGNAL = 2.9; EXPRESSED IN HELA, SIGNAL = 4.3; EXPRESSED IN LUNG, SIGNAL = 5.1; EXPRESSED IN FETAL LIVER, SIGNAL = 4.2; EXPRESSED IN BONE MARROW, SIGNAL = 4.9; EXPRESSED IN BT474, SIGNAL = 6.3; SWISSPROT HIT: P53288, EVALUE 1.20e+00; EST_HUMAN HIT: BE018970.1, EVALUE 3.00e-53
ELINLAMYCERIRRKFWPEWHHDDDNTIYESEESSEGSKTHTPLLDFSFYSRTETFEDEGAENSFSRTPDTDFTGHSLFDSDVDMDDYTDHEQCK

SEQ ID NO: 33489 - protein, 82 aa, Homo sapiens
  MAP TO AL034371.16; EXPRESSED IN HBL100, SIGNAL = 9.7; EXPRESSED IN BRAIN, SIGNAL =   6; EXPRESSED IN PLACENTA, SIGNAL = 6.8; EXPRESSED IN HEART, SIGNAL = 4.3; EXPRESSED IN ADULT LIVER, SIGNAL = 2.9; EXPRESSED IN HELA, SIGNAL = 4.3; EXPRESSED IN LUNG, SIGNAL = 5.1; EXPRESSED IN FETAL LIVER, SIGNAL = 4.2; EXPRESSED IN BONE MARROW, SIGNAL = 4.9; EXPRESSED IN BT474, SIGNAL = 6.3; EST_HUMAN HIT: BE018970.1, EVALUE 3.00e-37
GNFGQSGTTMMTIPSMSLRRAAKAAKPTPRCWILAFTQGQRPLKMREQKTVFPEPQTQILLDTHSLIRMWTWMTIQTTNSAS

SEQ ID NO: 33490 - protein, 27 aa, Homo sapiens
  MAP TO AL034402.9; EXPRESSED IN PLACENTA, SIGNAL =  36; EXPRESSED IN BONE MARROW, SIGNAL = 1.5e+02; EXPRESSED IN ADULT LIVER, SIGNAL =  34; EXPRESSED IN BRAIN, SIGNAL =  44; EXPRESSED IN HEART, SIGNAL = 1.2e+02; EXPRESSED IN BT474, SIGNAL = 1.3e+02; EXPRESSED IN HBL100, SIGNAL = 1.3e+02; EXPRESSED IN FETAL LIVER, SIGNAL =  46; EXPRESSED IN LUNG, SIGNAL =  68; EXPRESSED IN HELA, SIGNAL =  77; EST_HUMAN HIT: AA306269.1, EVALUE 6.00e-06; SWISSPROT HIT: P53473, EVALUE 1.00e-06; EST_HUMAN HIT: AL046833.2, EVALUE 3.00e-05
MEHSIVTKWDDMEIWHHNFYNKLCAAP

SEQ ID NO: 33491 - protein, 21 aa, Homo sapiens
  MAP TO AL034403.17; EXPRESSED IN BONE MARROW, SIGNAL = 2.6; EXPRESSED IN ADULT LIVER, SIGNAL = 1.6; EXPRESSED IN BRAIN, SIGNAL = 1.8; EXPRESSED IN PLACENTA, SIGNAL = 2.3; EXPRESSED IN HELA, SIGNAL = 2.2; EXPRESSED IN LUNG, SIGNAL = 2.3; EXPRESSED IN FETAL LIVER, SIGNAL = 2.6; EXPRESSED IN HBL100, SIGNAL = 2.5; EXPRESSED IN BT474, SIGNAL = 2.7; EXPRESSED IN HEART, SIGNAL = 2.5; EST_HUMAN HIT: H19343.1, EVALUE 1.10e+00; EST_HUMAN HIT: R59325.1, EVALUE 1.60e+00
LFNVKTRRMKTSMIIQGHLIN

SEQ ID NO: 33492 - protein, 183 aa, Homo sapiens
  MAP TO AL034553.12; EXPRESSED IN PLACENTA, SIGNAL = 2.4; EXPRESSED IN BT474, SIGNAL = 7.7; EXPRESSED IN BONE MARROW, SIGNAL = 4.4; EXPRESSED IN FETAL LIVER, SIGNAL = 2.9; EXPRESSED IN HELA, SIGNAL = 2.8; EXPRESSED IN ADULT LIVER, SIGNAL = 2.3; EXPRESSED IN BRAIN, SIGNAL =   3; EXPRESSED IN HBL100, SIGNAL = 4.2; EXPRESSED IN LUNG, SIGNAL = 2.9; EXPRESSED IN HEART, SIGNAL =   2; EST_HUMAN HIT: AW007743.1, EVALUE 2.00e-32; SWISSPROT HIT: P20662, EVALUE 3.00e-04
DYRTKPFCCSACPFSSKFFSAYKSHFRNVHSEDFENRILLNCPYCTFNADKKTLETHIKIFHAPNASAPSSSLSTFKDKNKNDGLKPKQADSVEQAVYYCKKCTYRDPLYEIVRKHIYREHFQHVAAPYIAKAGEKSLNGAVPLGSNAREESSIHCKRCLFMPKSYEALVQHVIEDHERIGYQ

SEQ ID NO: 33493 - protein, 92 aa, Homo sapiens
  MAP TO AL034553.12; EXPRESSED IN PLACENTA, SIGNAL = 2.4; EXPRESSED IN BT474, SIGNAL = 7.7; EXPRESSED IN BONE MARROW, SIGNAL = 4.4; EXPRESSED IN FETAL LIVER, SIGNAL = 2.9; EXPRESSED IN HELA, SIGNAL = 2.8; EXPRESSED IN ADULT LIVER, SIGNAL = 2.3; EXPRESSED IN BRAIN, SIGNAL =   3; EXPRESSED IN HBL100, SIGNAL = 4.2; EXPRESSED IN LUNG, SIGNAL = 2.9; EXPRESSED IN HEART, SIGNAL =   2; EST_HUMAN HIT: AW007743.1, EVALUE 1.00e-35; SWISSPROT HIT: P18105, EVALUE 2.00e+00
TIGQNLSAAALVHFPQNSSLPTKVISAMSIVKTLKIGFSLIAPTVPSMQTKRLWKHTLKYFMLRTPAHQVAASALSKIKTKMMALNLSRLTV

SEQ ID NO: 33494 - protein, 237 aa, Homo sapiens
  MAP TO AL035403.10; EXPRESSED IN BT474, SIGNAL = 3.6; EXPRESSED IN BONE MARROW, SIGNAL = 7.1; EXPRESSED IN FETAL LIVER, SIGNAL = 7.9; EXPRESSED IN HELA, SIGNAL = 2.6; EXPRESSED IN ADULT LIVER, SIGNAL = 2.7; EXPRESSED IN BRAIN, SIGNAL = 4.2; EXPRESSED IN HBL100, SIGNAL = 2.8; EXPRESSED IN LUNG, SIGNAL =  11; EXPRESSED IN PLACENTA, SIGNAL = 5.3; EXPRESSED IN HEART, SIGNAL = 4.6; EST_HUMAN HIT: BE222481.1, EVALUE 3.00e-83; SWISSPROT HIT: Q16570, EVALUE 1.00e-128
MASSGYVLQAELSPSTENSSQLDFEDVWNSSYGVNDSFPDGDYGANLEAAAPCHSCNLLDDSALPFFILTSVLGILASSTVLFMLFRPLFRWQLCPGWPVLAQLAVGSALFSIVVPVLAPGLGSTRSSALCSLGYCVWYGSAFAQALLLGCHASLGHRLGAGQVPGLTLGLTVGIWGVAALLTLPVTLASGASGGLCTLIYSTELKALQATHTVACLAIFVLLPLGLFGAKGLKKAL

SEQ ID NO: 33495 - protein, 43 aa, Homo sapiens
  MAP TO AL035461.11; EXPRESSED IN BT474, SIGNAL = 1.3; EXPRESSED IN BONE MARROW, SIGNAL = 0.97; EXPRESSED IN FETAL LIVER, SIGNAL = 1.7; EXPRESSED IN HELA, SIGNAL = 1.2; EXPRESSED IN PLACENTA, SIGNAL = 0.59; EXPRESSED IN HBL100, SIGNAL = 1.1; EXPRESSED IN LUNG, SIGNAL = 0.96; EXPRESSED IN ADULT LIVER, SIGNAL = 1.3; EXPRESSED IN BRAIN, SIGNAL = 0.81; EXPRESSED IN HEART, SIGNAL = 1.9; EST_HUMAN HIT: AI697857.1, EVALUE 2.00e-17; SWISSPROT HIT: P06978, EVALUE 1.00e-04; EST_HUMAN HIT: AI768573.1, EVALUE 2.00e-16
LDGFIARNWANQRSALGSALDPLADKILISILYVSLTYADLIP

SEQ ID NO: 33496 - protein, 74 aa, Homo sapiens
  MAP TO AL035541.12; EXPRESSED IN BT474, SIGNAL = 0.84; EXPRESSED IN FETAL LIVER, SIGNAL =  20; EXPRESSED IN LUNG, SIGNAL = 0.94; EXPRESSED IN ADULT LIVER, SIGNAL =  19; EXPRESSED IN HEART, SIGNAL = 1.1; EST_HUMAN HIT: R86197.1, EVALUE 4.00e-37; SWISSPROT HIT: P35558, EVALUE 1.00e-38
MPPQLQNGLNLSAKVVQGSLDSLPQAVREFLENNAELCQPDHIHICDGSEEENGRLLGQMEEEGILRRLKKYDN

SEQ ID NO: 33497 - protein, 136 aa, Homo sapiens
  MAP TO AL035563.18; EXPRESSED IN ADULT LIVER, SIGNAL =  30; EXPRESSED IN BONE MARROW, SIGNAL =  93; EXPRESSED IN BRAIN, SIGNAL = 8.2; EXPRESSED IN HEART, SIGNAL =  12; EXPRESSED IN PLACENTA, SIGNAL =  40; EXPRESSED IN BT474, SIGNAL =  78; EXPRESSED IN HBL100, SIGNAL = 1.1e+02; EXPRESSED IN LUNG, SIGNAL =  53; EXPRESSED IN HELA, SIGNAL =  60; EXPRESSED IN FETAL LIVER, SIGNAL =  84; EST_HUMAN HIT: BE562955.1, EVALUE 2.00e-35; EST_HUMAN HIT: AI042159.1, EVALUE 2.00e-35; SWISSPROT HIT: P10126, EVALUE 1.00e-35
GNLVGDSTNDPSMEAAGFTAQVITLNHQGQINTGCATVLDCHMALIACKFAELMEKIGHHSGEKVEDEPKFFKSGDAAIVDMVLCVESFSDRFLLGPFAVDDVIQTVAVDVIKAVDKKPAGAGKATKSAQKSQKAK

SEQ ID NO: 33498 - protein, 32 aa, Homo sapiens
  MAP TO AL035603.11; EXPRESSED IN HBL100, SIGNAL =  32; EXPRESSED IN ADULT LIVER, SIGNAL = 7.9; EXPRESSED IN FETAL LIVER, SIGNAL =  27; EXPRESSED IN LUNG, SIGNAL =  20; EXPRESSED IN HELA, SIGNAL =  50; EXPRESSED IN HEART, SIGNAL = 8.3; EXPRESSED IN PLACENTA, SIGNAL = 5.6; EXPRESSED IN BT474, SIGNAL =  27; EXPRESSED IN BONE MARROW, SIGNAL =   8; EXPRESSED IN BRAIN, SIGNAL = 7.5; EST_HUMAN HIT: BF683819.1, EVALUE 2.00e-08; EST_HUMAN HIT: BE394160.1, EVALUE 1.00e-08
CNTMYTKATLGVIDQTEIVSLVNADDIHKSSR

SEQ ID NO: 33499 - protein, 86 aa, Homo sapiens
  MAP TO AL035603.11; EXPRESSED IN HBL100, SIGNAL =  32; EXPRESSED IN ADULT LIVER, SIGNAL = 7.9; EXPRESSED IN FETAL LIVER, SIGNAL =  27; EXPRESSED IN LUNG, SIGNAL =  20; EXPRESSED IN HELA, SIGNAL =  50; EXPRESSED IN HEART, SIGNAL = 8.3; EXPRESSED IN PLACENTA, SIGNAL = 5.6; EXPRESSED IN BT474, SIGNAL =  27; EXPRESSED IN BONE MARROW, SIGNAL =   8; EXPRESSED IN BRAIN, SIGNAL = 7.5; SWISSPROT HIT: P79103, EVALUE 9.00e-30; EST_HUMAN HIT: W00563.1, EVALUE 5.00e-34
HNFCLIYDTKGCFGVHCITPEEVKYKLCKVRKILVGTKGIPHLVTHDACTICYPDPLIKVNETVQIDSETGKILISSSLMLVTSIW

SEQ ID NO: 33500 - protein, 41 aa, Homo sapiens
  MAP TO AL035652.5; EXPRESSED IN LUNG, SIGNAL = 1.6; EXPRESSED IN HEART, SIGNAL = 1.1; EXPRESSED IN BRAIN, SIGNAL = 1.1; EXPRESSED IN ADULT LIVER, SIGNAL = 1.2; EXPRESSED IN HELA, SIGNAL = 1.3; EXPRESSED IN HBL100, SIGNAL = 2.5; EXPRESSED IN BONE MARROW, SIGNAL = 1.9; EXPRESSED IN BT474, SIGNAL = 1.6; EXPRESSED IN PLACENTA, SIGNAL = 1.7; EXPRESSED IN FETAL LIVER, SIGNAL = 3.5; EST_HUMAN HIT: AI954577.1, EVALUE 1.00e-16; SWISSPROT HIT: P11387, EVALUE 1.00e-17
EMTNEEKNIITNLSKCDFTQMSQYFKAQTEARKQMSKEEKL

SEQ ID NO: 33501 - protein, 35 aa, Homo sapiens
  MAP TO AL035652.5; EXPRESSED IN ADULT LIVER, SIGNAL = 1.6; EXPRESSED IN PLACENTA, SIGNAL = 3.4; EXPRESSED IN BONE MARROW, SIGNAL = 2.8; EXPRESSED IN LUNG, SIGNAL = 2.7; EXPRESSED IN HELA, SIGNAL = 1.7; EXPRESSED IN BT474, SIGNAL = 2.8; EXPRESSED IN HBL100, SIGNAL = 3.2; EXPRESSED IN FETAL LIVER, SIGNAL = 3.9; EXPRESSED IN BRAIN, SIGNAL = 3.6; EXPRESSED IN HEART, SIGNAL = 2.9
DGKLKKPKNKDKDKKVPEPDNKKKKPKKEEEQKWK

SEQ ID NO: 33502 - protein, 22 aa, Homo sapiens
  MAP TO AL035652.5; EXPRESSED IN ADULT LIVER, SIGNAL = 1.6; EXPRESSED IN PLACENTA, SIGNAL = 3.4; EXPRESSED IN BONE MARROW, SIGNAL = 2.8; EXPRESSED IN LUNG, SIGNAL = 2.7; EXPRESSED IN HELA, SIGNAL = 1.7; EXPRESSED IN BT474, SIGNAL = 2.8; EXPRESSED IN HBL100, SIGNAL = 3.2; EXPRESSED IN FETAL LIVER, SIGNAL = 3.9; EXPRESSED IN BRAIN, SIGNAL = 3.6; EXPRESSED IN HEART, SIGNAL = 2.9
LQKCDQSLFKCFLTMFLCRMVN

SEQ ID NO: 33503 - protein, 47 aa, Homo sapiens
  MAP TO AL035681.13; EXPRESSED IN PLACENTA, SIGNAL = 1.3; EXPRESSED IN HEART, SIGNAL = 1.1; EXPRESSED IN BONE MARROW, SIGNAL = 2.3; EXPRESSED IN BT474, SIGNAL = 2.6; EXPRESSED IN BRAIN, SIGNAL =   2; EXPRESSED IN ADULT LIVER, SIGNAL = 1.4; EXPRESSED IN HELA, SIGNAL = 2.8; EXPRESSED IN LUNG, SIGNAL = 1.9; EXPRESSED IN FETAL LIVER, SIGNAL = 2.1; EXPRESSED IN HBL100, SIGNAL = 3.8; EST_HUMAN HIT: AL120419.1, EVALUE 3.00e-23; EST_HUMAN HIT: AL120211.1, EVALUE 2.00e-23; SWISSPROT HIT: P54725, EVALUE 2.70e+00
ISRGAHQPSQHGLGRHCQAGRDTCQDSGGRGTAEFQRQEPQTQHCRR

SEQ ID NO: 33504 - protein, 78 aa, Homo sapiens
  MAP TO AL035701.13; EXPRESSED IN HEART, SIGNAL = 1.3e+02; EXPRESSED IN PLACENTA, SIGNAL =  58; EXPRESSED IN BONE MARROW, SIGNAL = 3e+02; EXPRESSED IN HBL100, SIGNAL = 2.6e+02; EXPRESSED IN ADULT LIVER, SIGNAL =  68; EXPRESSED IN BRAIN, SIGNAL =  68; EXPRESSED IN BT474, SIGNAL = 3.1e+02; EXPRESSED IN FETAL LIVER, SIGNAL =  92; EXPRESSED IN LUNG, SIGNAL = 1e+02; EXPRESSED IN HELA, SIGNAL = 1.2e+02; EST_HUMAN HIT: AA302125.1, EVALUE 7.00e-20; EST_HUMAN HIT: AU120018.1, EVALUE 3.00e-23; SWISSPROT HIT: Q27250, EVALUE 1.00e-07
GVTTMYPGIPNRMQKEITALASSTMKIKISCPQSASTLCGSVAPSWPHCPPSSRCGLASRSTTSRAPPSSTANGLRAD

SEQ ID NO: 33505 - protein, 123 aa, Homo sapiens
  MAP TO AL035702.7; EXPRESSED IN HBL100, SIGNAL = 1.5; EXPRESSED IN LUNG, SIGNAL = 1.8; EXPRESSED IN HELA, SIGNAL = 2.2; EXPRESSED IN ADULT LIVER, SIGNAL = 5.8; EXPRESSED IN BRAIN, SIGNAL = 2.2; EXPRESSED IN HEART, SIGNAL = 2.2; EXPRESSED IN PLACENTA, SIGNAL = 1.7; EXPRESSED IN BT474, SIGNAL = 1.9; EXPRESSED IN BONE MARROW, SIGNAL = 1.7; EXPRESSED IN FETAL LIVER, SIGNAL = 3.6; EST_HUMAN HIT: AL042477.1, EVALUE 1.10e-02; SWISSPROT HIT: P49259, EVALUE 3.00e-04
VVQISGQTFMRFDQVMTWSSALLYCRSHHTDLADLQMVTDETGKEALRSIMSETEAWIGLYLNANSGSLSWSSDLGASIPSWLQVPMMVRGLCTALGIYMTYSPKVYSVNCSSLLPFFCFYGE

SEQ ID NO: 33506 - protein, 67 aa, Homo sapiens
  MAP TO AL035702.7; EXPRESSED IN HBL100, SIGNAL = 1.1; EXPRESSED IN ADULT LIVER, SIGNAL =   1; EXPRESSED IN BRAIN, SIGNAL =   1; EXPRESSED IN PLACENTA, SIGNAL = 1.6; EXPRESSED IN HEART, SIGNAL =   1; EXPRESSED IN HELA, SIGNAL = 0.76; EXPRESSED IN LUNG, SIGNAL = 0.92; EXPRESSED IN FETAL LIVER, SIGNAL = 0.94; EXPRESSED IN BT474, SIGNAL = 0.61; SWISSPROT HIT: P10587, EVALUE 1.10e+00; EST_HUMAN HIT: R32256.1, EVALUE 2.00e-11
YEQEITKLKERLRVSSRRLEEYERRLLVQEQQMQKLLLEYKARLEDSEERLRRQQEEKDSQMKSIIS

SEQ ID NO: 33507 - protein, 35 aa, Homo sapiens
  MAP TO AL049540.11; EXPRESSED IN HEART, SIGNAL =  12; EXPRESSED IN PLACENTA, SIGNAL =  20; EXPRESSED IN FETAL LIVER, SIGNAL =  57; EXPRESSED IN ADULT LIVER, SIGNAL =  29; EXPRESSED IN BT474, SIGNAL =  72; EXPRESSED IN BONE MARROW, SIGNAL =  87; EXPRESSED IN HBL100, SIGNAL = 1.8e+02; EXPRESSED IN LUNG, SIGNAL =  21; EXPRESSED IN HELA, SIGNAL =  52; EXPRESSED IN BRAIN, SIGNAL =  12; EST_HUMAN HIT: BE746020.1, EVALUE 6.60e-01; EST_HUMAN HIT: BE297714.1, EVALUE 5.10e+00
TPSAGPSSWASSPLSPCAEATGGARSASPTPSLVR

SEQ ID NO: 33508 - protein, 45 aa, Homo sapiens
  MAP TO AL049540.11; EXPRESSED IN ADULT LIVER, SIGNAL = 1.5; EXPRESSED IN BRAIN, SIGNAL = 1.7; EXPRESSED IN HEART, SIGNAL = 1.7; EXPRESSED IN PLACENTA, SIGNAL = 1.6; EXPRESSED IN BT474, SIGNAL = 1.3; EXPRESSED IN BONE MARROW, SIGNAL = 1.9; EXPRESSED IN HBL100, SIGNAL = 1.9; EXPRESSED IN LUNG, SIGNAL = 1.8; EXPRESSED IN HELA, SIGNAL = 1.8; EXPRESSED IN FETAL LIVER, SIGNAL = 1.4; EST_HUMAN HIT: AW999168.1, EVALUE 3.00e-16; EST_HUMAN HIT: BE253591.1, EVALUE 2.00e-16; SWISSPROT HIT: O08575, EVALUE 2.00e-17
SFVLRPNCVNVLVTTTQLIPALAKVLLYGLGSVFPIENIYSATKT

SEQ ID NO: 33509 - protein, 78 aa, Homo sapiens
  MAP TO AL049540.11; EXPRESSED IN FETAL LIVER, SIGNAL = 4.7; EXPRESSED IN ADULT LIVER, SIGNAL =   3; EXPRESSED IN BRAIN, SIGNAL = 3.7; EXPRESSED IN PLACENTA, SIGNAL = 3.1; EXPRESSED IN BT474, SIGNAL =  14; EXPRESSED IN BONE MARROW, SIGNAL = 4.3; EXPRESSED IN HBL100, SIGNAL =   3; EXPRESSED IN LUNG, SIGNAL = 4.3; EXPRESSED IN HELA, SIGNAL = 4.3; EXPRESSED IN HEART, SIGNAL = 2.8; EST_HUMAN HIT: AA689414.1, EVALUE 7.00e-44; SWISSPROT HIT: Q61909, EVALUE 1.10e-02
LTMAEMRQSLEQERDRLIAEVKKQLELEKQQAVDETKKKQWCANCKKEAIFYCCWNTSYCDYPCQQAHWPEHMKSCTQ

SEQ ID NO: 33510 - protein, 17 aa, Homo sapiens
  MAP TO AL049540.11; EXPRESSED IN FETAL LIVER, SIGNAL = 4.7; EXPRESSED IN ADULT LIVER, SIGNAL =   3; EXPRESSED IN BRAIN, SIGNAL = 3.7; EXPRESSED IN PLACENTA, SIGNAL = 3.1; EXPRESSED IN BT474, SIGNAL =  14; EXPRESSED IN BONE MARROW, SIGNAL = 4.3; EXPRESSED IN HBL100, SIGNAL =   3; EXPRESSED IN LUNG, SIGNAL = 4.3; EXPRESSED IN HELA, SIGNAL = 4.3; EXPRESSED IN HEART, SIGNAL = 2.8
PGWGQVMSGVLPLLHQS

SEQ ID NO: 33511 - protein, 72 aa, Homo sapiens
  MAP TO AL049591.12; EXPRESSED IN PLACENTA, SIGNAL = 1.9; EXPRESSED IN BT474, SIGNAL = 1.9; EXPRESSED IN LUNG, SIGNAL = 2.1; EXPRESSED IN BRAIN, SIGNAL = 2.4; EXPRESSED IN HBL100, SIGNAL = 2.6; EXPRESSED IN FETAL LIVER, SIGNAL = 1.9; EXPRESSED IN HELA, SIGNAL = 4.2; EXPRESSED IN ADULT LIVER, SIGNAL = 1.9; EXPRESSED IN BONE MARROW, SIGNAL = 1.3; EXPRESSED IN HEART, SIGNAL = 1.7; EST_HUMAN HIT: H42327.1, EVALUE 2.60e+00
KPPATVDASLSLLQGCQKTCCFSLTTSEKSVGLSTWSRASSSTATTSTRPHTLSWRPPSGLAAPTFSSSRTG

SEQ ID NO: 33512 - protein, 156 aa, Homo sapiens
  MAP TO AL049610.9; EXPRESSED IN HELA, SIGNAL =  13; EXPRESSED IN PLACENTA, SIGNAL = 7.7; EXPRESSED IN LUNG, SIGNAL = 4.2; EXPRESSED IN ADULT LIVER, SIGNAL = 4.9; EXPRESSED IN BRAIN, SIGNAL = 4.8; EXPRESSED IN HEART, SIGNAL = 2.9; EXPRESSED IN BT474, SIGNAL = 7.3; EXPRESSED IN BONE MARROW, SIGNAL = 3.9; EXPRESSED IN HBL100, SIGNAL =  28; EXPRESSED IN FETAL LIVER, SIGNAL = 8.9; EST_HUMAN HIT: AI084051.1, EVALUE 4.00e-78; EST_HUMAN HIT: BF679985.1, EVALUE 9.00e-86; SWISSPROT HIT: Q15014, EVALUE 9.00e-87
MEVKVKIPEELKPWLVEDWDLVTRQKQLFQLPAKKNVDAILEEYANCKKSQGNVDNKEYAVNEVVAGIKEYFNVMLGTQLLYKFERPQYAEILLAHPDAPMSQVYGAPHLLRLFVRIGAMLAYTPLDEKSLALLLGYLHDFLKYLAKNSASLFTAS

SEQ ID NO: 33513 - protein, 38 aa, Homo sapiens
  MAP TO AL049610.9; EXPRESSED IN HELA, SIGNAL =  13; EXPRESSED IN PLACENTA, SIGNAL = 7.7; EXPRESSED IN LUNG, SIGNAL = 4.2; EXPRESSED IN ADULT LIVER, SIGNAL = 4.9; EXPRESSED IN BRAIN, SIGNAL = 4.8; EXPRESSED IN HEART, SIGNAL = 2.9; EXPRESSED IN BT474, SIGNAL = 7.3; EXPRESSED IN BONE MARROW, SIGNAL = 3.9; EXPRESSED IN HBL100, SIGNAL =  28; EXPRESSED IN FETAL LIVER, SIGNAL = 8.9; EST_HUMAN HIT: BE542819.1, EVALUE 5.00e-18; SWISSPROT HIT: P09800, EVALUE 2.10e+00; EST_HUMAN HIT: AW955652.1, EVALUE 3.00e-18
REEDQKEQAEDSWKRRWWQYQRSTSAPSEEKGPGRPHC

SEQ ID NO: 33514 - protein, 30 aa, Homo sapiens
  MAP TO AL049642.5; EXPRESSED IN PLACENTA, SIGNAL = 5.6; EXPRESSED IN BT474, SIGNAL = 6.5; EXPRESSED IN BONE MARROW, SIGNAL = 6.6; EXPRESSED IN HEART, SIGNAL = 4.8; EXPRESSED IN ADULT LIVER, SIGNAL = 7.2; EXPRESSED IN HELA, SIGNAL = 8.2; EXPRESSED IN LUNG, SIGNAL = 7.8; EXPRESSED IN HBL100, SIGNAL = 5.9; EXPRESSED IN BRAIN, SIGNAL =   8; EXPRESSED IN FETAL LIVER, SIGNAL = 7.4; EST_HUMAN HIT: AW898344.1, EVALUE 3.00e-05
MRKSLELPRDLLNGLDQNADDDIDSEAQSE

SEQ ID NO: 33515 - protein, 17 aa, Homo sapiens
  MAP TO AL049651.2; EXPRESSED IN FETAL LIVER, SIGNAL = 1.7; EXPRESSED IN LUNG, SIGNAL = 1.5; EXPRESSED IN PLACENTA, SIGNAL = 5.1; EXPRESSED IN HELA, SIGNAL = 1.6; EXPRESSED IN HEART, SIGNAL = 1.5; EXPRESSED IN BRAIN, SIGNAL = 1.8; EXPRESSED IN ADULT LIVER, SIGNAL = 1.7; EXPRESSED IN HBL100, SIGNAL = 2.7; EXPRESSED IN BONE MARROW, SIGNAL = 1.6; EXPRESSED IN BT474, SIGNAL = 1.8
SNVACAFHTGTVQCEIS

SEQ ID NO: 33516 - protein, 134 aa, Homo sapiens
  MAP TO AL049710.18; EXPRESSED IN ADULT LIVER, SIGNAL = 4.3; EXPRESSED IN BRAIN, SIGNAL = 2.4; EXPRESSED IN HEART, SIGNAL = 3.1; EXPRESSED IN PLACENTA, SIGNAL = 1.3; EXPRESSED IN BT474, SIGNAL = 4.6; EXPRESSED IN FETAL LIVER, SIGNAL = 3.5; EXPRESSED IN HELA, SIGNAL = 5.4; EXPRESSED IN LUNG, SIGNAL = 1.6; EXPRESSED IN HBL100, SIGNAL = 4.1; EXPRESSED IN BONE MARROW, SIGNAL = 1.7; SWISSPROT HIT: P00506, EVALUE 2.00e-33; EST_HUMAN HIT: BF204147.1, EVALUE 7.00e-35; EST_HUMAN HIT: BE280303.1, EVALUE 8.00e-35
KVGGARLPSTLFCSYSTALLPSTMALPHSGYITSWITAAFQLGLAMAASNRTSFWRAHVDMGLPDPILGVTKAFKRDIDSKKVNLVIGANQDNNRKLYLLSNICKAEAQTATKNLDKEYLLIGVLAEFCKTSAG

SEQ ID NO: 33517 - protein, 78 aa, Homo sapiens
  MAP TO AL049712.12; EXPRESSED IN BONE MARROW, SIGNAL = 4.2; EXPRESSED IN HBL100, SIGNAL =   9; EXPRESSED IN FETAL LIVER, SIGNAL = 2.7; EXPRESSED IN ADULT LIVER, SIGNAL = 1.2; EXPRESSED IN PLACENTA, SIGNAL = 0.84; EXPRESSED IN BT474, SIGNAL = 3.5; EXPRESSED IN LUNG, SIGNAL = 0.87; EXPRESSED IN HELA, SIGNAL = 3.1; EXPRESSED IN BRAIN, SIGNAL = 1.5; EXPRESSED IN HEART, SIGNAL = 0.83; EST_HUMAN HIT: BE266706.1, EVALUE 2.00e-22; SWISSPROT HIT: O00567, EVALUE 1.00e-22
FLMKQLGQGVTVALCREWYGYHFPELVKIINDNATYCRLAQFIGNRRELNEDKLEKLEELTMDGAKAKAILDASRSSM

SEQ ID NO: 33518 - protein, 59 aa, Homo sapiens
  MAP TO AL049712.12; EXPRESSED IN HBL100, SIGNAL = 2.2; EXPRESSED IN FETAL LIVER, SIGNAL = 2.7; EXPRESSED IN LUNG, SIGNAL = 2.3; EXPRESSED IN HELA, SIGNAL = 2.1; EXPRESSED IN BRAIN, SIGNAL =   2; EXPRESSED IN PLACENTA, SIGNAL = 3.7; EXPRESSED IN BT474, SIGNAL = 2.4; EXPRESSED IN HEART, SIGNAL = 2.2; EXPRESSED IN ADULT LIVER, SIGNAL = 2.3; EXPRESSED IN BONE MARROW, SIGNAL = 3.3; EST_HUMAN HIT: AA535362.1, EVALUE 5.20e+00; SWISSPROT HIT: P97445, EVALUE 1.50e+00
ADPDTHPYSNPPDDADTDHRPDCVTLTLVPSPEPVSHSHVEPRSLRLKFMPKIKVKGKG

SEQ ID NO: 33519 - protein, 82 aa, Homo sapiens
  MAP TO AL049742.7; EXPRESSED IN HEART, SIGNAL = 9.3; EXPRESSED IN PLACENTA, SIGNAL =  12; EXPRESSED IN BT474, SIGNAL =  27; EXPRESSED IN BONE MARROW, SIGNAL =  51; EXPRESSED IN LUNG, SIGNAL =  14; EXPRESSED IN ADULT LIVER, SIGNAL =  21; EXPRESSED IN BRAIN, SIGNAL = 9.3; EXPRESSED IN HBL100, SIGNAL =  57; EXPRESSED IN FETAL LIVER, SIGNAL =  33; EXPRESSED IN HELA, SIGNAL =  28; EST_HUMAN HIT: AI687582.1, EVALUE 2.00e-33
PSVLAVMVTMTLKVGAPPMLFIQRSVVNSPSCSSESRTTVYFWPPSVSPFMTKLDQSLPTRTPTSAGVMLRKVFPGTVAQME

SEQ ID NO: 33520 - protein, 30 aa, Homo sapiens
  MAP TO AL049742.7; EXPRESSED IN HEART, SIGNAL = 9.3; EXPRESSED IN PLACENTA, SIGNAL =  12; EXPRESSED IN BT474, SIGNAL =  27; EXPRESSED IN BONE MARROW, SIGNAL =  51; EXPRESSED IN LUNG, SIGNAL =  14; EXPRESSED IN ADULT LIVER, SIGNAL =  21; EXPRESSED IN BRAIN, SIGNAL = 9.3; EXPRESSED IN HBL100, SIGNAL =  57; EXPRESSED IN FETAL LIVER, SIGNAL =  33; EXPRESSED IN HELA, SIGNAL =  28; EST_HUMAN HIT: AI587308.1, EVALUE 2.00e-13; EST_HUMAN HIT: AI687582.1, EVALUE 1.00e-13
LLGHGHCGQQGPTFHLCHRPRENLPQHHAS

SEQ ID NO: 33521 - protein, 54 aa, Homo sapiens
  MAP TO AL049780.2; EXPRESSED IN HEART, SIGNAL = 1.5; EXPRESSED IN PLACENTA, SIGNAL = 2.2; EXPRESSED IN BRAIN, SIGNAL =   5; EXPRESSED IN ADULT LIVER, SIGNAL = 2.7; EXPRESSED IN HELA, SIGNAL =   2; EXPRESSED IN FETAL LIVER, SIGNAL = 2.5; EXPRESSED IN HBL100, SIGNAL = 1.4; EXPRESSED IN BONE MARROW, SIGNAL = 1.7; EXPRESSED IN BT474, SIGNAL = 3.9; EXPRESSED IN LUNG, SIGNAL = 1.6; EST_HUMAN HIT: BE252804.1, EVALUE 2.00e-19; EST_HUMAN HIT: BE547173.1, EVALUE 3.00e-24; SWISSPROT HIT: P40265, EVALUE 7.70e+00
ELENAEFIPMPDSPSPLSAAFSESEKDTLPYEELQGLKVASEAPLEHKPQVEAS

SEQ ID NO: 33522 - protein, 777 aa, Homo sapiens
  MAP TO AL049780.2; EXPRESSED IN FETAL LIVER, SIGNAL = 1.9; EXPRESSED IN PLACENTA, SIGNAL = 1.9; EXPRESSED IN BT474, SIGNAL = 2.6; EXPRESSED IN BONE MARROW, SIGNAL = 1.6; EXPRESSED IN HBL100, SIGNAL = 1.9; EXPRESSED IN LUNG, SIGNAL = 1.9; EXPRESSED IN ADULT LIVER, SIGNAL = 1.6; EXPRESSED IN BRAIN, SIGNAL = 3.1; EXPRESSED IN HEART, SIGNAL = 1.9; EXPRESSED IN HELA, SIGNAL =   2; EST_HUMAN HIT: AW340308.1, EVALUE 4.00e-89
YDVCMEPAKTLIEFQNWDTLLFCIQEGVKMFLKQEKLFVELSGEDIKEFSEDNGFSLFDATLQKRVTSDERSNFQEACNNILDSYEMFNLQSKAVKRKTTAENVNTQSSRDSEATRKNTNDAFLYIYESGGPGHSKMTEPSLQNKDSSCSESKMLEQETIVASEAGENEKHKKSFLEHSSLENPCGTSLEMFLSPFQTPCHFEESGQDLEIWKESTTVNGMAANILKNNRIQNQPKRFKDATEVGCQPLPFATTLWGVHSAQTEKEKKKESSNCGRRNVFSYGRVKLCSTGFITHVVQNEKTKSTETEHSFKNYVRPGPTRAQETFGNRTRHSVETPDIKDLASTLSKESGQLPNKKNCRTNISYGLENEPTATYTMFSAFQEGSKKSQTDCILSDTSPSFPWYRHVSNDSRKTDKLIGFSKPIVRKKLSLSSQLGSLEKFKRQYGKVENPLDTEVEESNGVTTNLSLQVEPDILLKDKNRLENSDVCKITTMEHSDSDSSCQPASHILNSEKFPFSKDEDCLEQQMPSLRESPMTLKELSLFNRKPLDLEKSSESLASKLSRLKGSERETQTMGMMSRFNELPNSDSSRKDSKLCSVLTQDFCMLFNNKHEKTENGVIPTSDSATQDNSFNKNSKTHSNSNTTENCVISETPLVLPYNNSKVTGKDSDVLIRASEQQIGSLDSPSGMLMNPVEDATGDQNGICFQSEESKARACSETEESNTCCSDWQRHFDVALGRMVYVNKMTGLSTFIAPTEDIQAACTKDLTTVAVDVVLEN

SEQ ID NO: 33523 - protein, 74 aa, Homo sapiens
  MAP TO AL049872.3; EXPRESSED IN PLACENTA, SIGNAL = 4.5; EXPRESSED IN BONE MARROW, SIGNAL = 5.4; EXPRESSED IN HBL100, SIGNAL = 4.2; EXPRESSED IN FETAL LIVER, SIGNAL = 4.3; EXPRESSED IN LUNG, SIGNAL =   5; EXPRESSED IN HELA, SIGNAL = 3.7; EXPRESSED IN BT474, SIGNAL =   3; EXPRESSED IN BRAIN, SIGNAL = 4.7; EXPRESSED IN HEART, SIGNAL = 4.3; EXPRESSED IN ADULT LIVER, SIGNAL = 3.3; EST_HUMAN HIT: AI953521.1, EVALUE 6.00e-25; SWISSPROT HIT: P54252, EVALUE 4.00e-25
VMSKIEDWLQLLPVLLFFRVHKTDLERVLEANDGSGMLDEDEEDLQRALALSRQEIDMEDEEADLRRAIQLSMQ

SEQ ID NO: 33524 - protein, 59 aa, Homo sapiens
  MAP TO AL050310.5; EXPRESSED IN BONE MARROW, SIGNAL = 1.8; EXPRESSED IN ADULT LIVER, SIGNAL = 1.9; EXPRESSED IN HEART, SIGNAL = 1.1; EXPRESSED IN PLACENTA, SIGNAL = 6.1; EXPRESSED IN HBL100, SIGNAL =   1; EXPRESSED IN FETAL LIVER, SIGNAL = 4.8; EXPRESSED IN HELA, SIGNAL = 1.2; EXPRESSED IN BRAIN, SIGNAL = 0.72; EXPRESSED IN BT474, SIGNAL = 1.2; EXPRESSED IN LUNG, SIGNAL = 1.1; SWISSPROT HIT: Q9VIF0, EVALUE 3.00e-01; EST_HUMAN HIT: AI970136.1, EVALUE 4.00e-19
  unsure 27
TSTISPPTGPAAWYTATDTKEISTGKXPMVPTPVFNPTVFHCQQALTNLQLPQPAFIPA

SEQ ID NO: 33525 - protein, 112 aa, Homo sapiens
  MAP TO AL050310.5; EXPRESSED IN BT474, SIGNAL = 0.72; EXPRESSED IN BONE MARROW, SIGNAL = 1.5; EXPRESSED IN HELA, SIGNAL = 0.83; EXPRESSED IN ADULT LIVER, SIGNAL = 1.5; EXPRESSED IN PLACENTA, SIGNAL = 3.3; EXPRESSED IN HBL100, SIGNAL = 0.76; EXPRESSED IN FETAL LIVER, SIGNAL = 4.4; EXPRESSED IN LUNG, SIGNAL = 1.1; EXPRESSED IN HEART, SIGNAL = 0.92; EST_HUMAN HIT: AW404183.1, EVALUE 3.00e-27; EST_HUMAN HIT: AU139230.1, EVALUE 6.00e-28
  unsure 90
  unsure 105
YIITVTFTSKINKSQSASSHQCDACVCACVCSKVCREFQRGNCTRGENDCRYAHPTDASMIEASDNTVTICMDYIKGRCSREKCKYFHPXCTLASQTQGSSSSDXTIQLPLP

SEQ ID NO: 33526 - protein, 63 aa, Homo sapiens
  MAP TO AL050321.8; EXPRESSED IN FETAL LIVER, SIGNAL = 1.3; EXPRESSED IN LUNG, SIGNAL = 0.64; EXPRESSED IN HELA, SIGNAL = 0.69; EXPRESSED IN ADULT LIVER, SIGNAL = 3.3; EXPRESSED IN HEART, SIGNAL = 0.87; EXPRESSED IN BT474, SIGNAL = 0.61; EST_HUMAN HIT: Z45834.1, EVALUE 5.00e-30; EST_HUMAN HIT: AB040380.1, EVALUE 1.00e-30; SWISSPROT HIT: Q47158, EVALUE 7.60e-01
IDLSECLQYPDFSVVVLYKKVIIAFGFMVPDVKYNEAYISFLFVHPEWRRAGIATFMIYHLIQ

SEQ ID NO: 33527 - protein, 238 aa, Homo sapiens
  MAP TO AL050331.11; EXPRESSED IN BT474, SIGNAL =   4; EXPRESSED IN HBL100, SIGNAL = 3.4; EXPRESSED IN HELA, SIGNAL = 1.9; EXPRESSED IN ADULT LIVER, SIGNAL = 1.9; EXPRESSED IN PLACENTA, SIGNAL = 1.5; EXPRESSED IN BONE MARROW, SIGNAL = 1.5; EXPRESSED IN FETAL LIVER, SIGNAL = 2.6; EXPRESSED IN LUNG, SIGNAL = 2.4; EXPRESSED IN BRAIN, SIGNAL = 9.2; EXPRESSED IN HEART, SIGNAL = 2.5; EST_HUMAN HIT: BF346321.1, EVALUE 5.00e-62; EST_HUMAN HIT: AW390205.1, EVALUE 3.00e-60; SWISSPROT HIT: Q01105, EVALUE 3.00e-39
EKEGEAGAAMEEKKVVQKEKKVAGGVKEETRPRAPKINNCMDSLEAIDQELSNVNAQADRAFLQLERKFGRMRRLHMQRRSFIIQNIPGFWVTAFRNHPQLSPMISGQDEDMLRYMINLEVEELKHPRAGCKFKFIFQGNPYFRNEGLVKEYERRSSGRVVSLSTPIRWHRGQDPQAHIHRNREGNTIPSFFNWFSDHSLLEFDRIAEIIKGELWPNPLQYYLMGEGPRRGIRGPPRQ

SEQ ID NO: 33528 - protein, 364 aa, Homo sapiens
  MAP TO AL050331.11; EXPRESSED IN HELA, SIGNAL =   2; EXPRESSED IN BT474, SIGNAL = 4.6; EXPRESSED IN ADULT LIVER, SIGNAL = 2.5; EXPRESSED IN HEART, SIGNAL = 1.6; EXPRESSED IN PLACENTA, SIGNAL =   2; EXPRESSED IN FETAL LIVER, SIGNAL = 3.1; EXPRESSED IN LUNG, SIGNAL = 2.7; EXPRESSED IN BRAIN, SIGNAL = 3.5; EXPRESSED IN BONE MARROW, SIGNAL = 3.1; EXPRESSED IN HBL100, SIGNAL = 4.9; SWISSPROT HIT: Q01534, EVALUE 3.00e-37; EST_HUMAN HIT: AW937326.1, EVALUE 3.00e-76
IIISDQVPSDQDAHQYLRLRDQSEATQVMAEPGEGGSETVALPPPPPSEEGGVPQDAAGRGGTPQIRVVGGRGHVAIKAGQEEGQPPAEGLAAASVVMAADRSLKKGVQGGEKALEICGAQRSASELTAGAEAEAEEVKTGKCATVSAAVAERESAEVVKEGLAEKEVMEEQMEVEEQPPEGEEIEVAEEDRLEEEAREEEGPWPLHEALRMDPLEAIQLELDTVNAQADRAFQQLEHKFGRMRRHYLERRNYIIQNIPGFWMTAFRNHPQLSAMIRGQDAEMLRYITNLEVKELRHPRTGCKFKFFFRRNPYFRNKLIVKEYEVRSSGRVVSLSTPIIWRRGHEPQSFIRRNQDLICSFFTWF

SEQ ID NO: 33529 - protein, 64 aa, Homo sapiens
  MAP TO AL078593.9; EXPRESSED IN FETAL LIVER, SIGNAL = 0.68; EXPRESSED IN HEART, SIGNAL = 1.3; EXPRESSED IN ADULT LIVER, SIGNAL = 0.78; EXPRESSED IN PLACENTA, SIGNAL = 2.2; EXPRESSED IN LUNG, SIGNAL = 1.3; EST_HUMAN HIT: AW512694.1, EVALUE 2.00e-08
LTPGLMGESSESFSASEDEGHREYQANDSDSDGPILYTDDEDEDEDEDGSGESKTVFKRQGGAW

SEQ ID NO: 33530 - protein, 38 aa, Homo sapiens
  MAP TO AL078593.9; EXPRESSED IN BT474, SIGNAL = 3.6; EXPRESSED IN HBL100, SIGNAL = 4.4; EXPRESSED IN BRAIN, SIGNAL = 4.6; EXPRESSED IN PLACENTA, SIGNAL = 3.9; EXPRESSED IN BONE MARROW, SIGNAL = 4.5; EXPRESSED IN FETAL LIVER, SIGNAL = 3.9; EXPRESSED IN LUNG, SIGNAL = 4.2; EXPRESSED IN HELA, SIGNAL = 5.1; EXPRESSED IN ADULT LIVER, SIGNAL = 3.8; EXPRESSED IN HEART, SIGNAL = 4.1; EST_HUMAN HIT: AW295193.1, EVALUE 1.00e-06; EST_HUMAN HIT: AV721897.1, EVALUE 2.00e-06
IKLGNRPSKKELEDKNILQRTSEEERQEIRQQIGTKLV

SEQ ID NO: 33531 - protein, 66 aa, Homo sapiens
  MAP TO AL078612.8; EXPRESSED IN HBL100, SIGNAL = 7.7; EXPRESSED IN FETAL LIVER, SIGNAL = 2.9; EXPRESSED IN PLACENTA, SIGNAL = 2.8; EXPRESSED IN BT474, SIGNAL = 4.5; EXPRESSED IN LUNG, SIGNAL = 2.2; EXPRESSED IN ADULT LIVER, SIGNAL = 2.7; EXPRESSED IN HEART, SIGNAL = 1.5; EXPRESSED IN BONE MARROW, SIGNAL =   2; EXPRESSED IN BRAIN, SIGNAL = 1.6; EXPRESSED IN HELA, SIGNAL = 6.1; EST_HUMAN HIT: C17509.1, EVALUE 2.00e-35; SWISSPROT HIT: Q15293, EVALUE 3.00e-36
DMFSHEENGPEPDWVLSEREQFNEFRDLNKDGKLDKDEIRHWILPQDYDHAQAEARHLVYESDKNK

SEQ ID NO: 33532 - protein, 132 aa, Homo sapiens
  MAP TO AL079300.10; EXPRESSED IN LUNG, SIGNAL = 0.67; EXPRESSED IN FETAL LIVER, SIGNAL = 0.78; EXPRESSED IN HEART, SIGNAL = 3.4; EXPRESSED IN PLACENTA, SIGNAL = 0.89; EST_HUMAN HIT: BE246780.1, EVALUE 3.00e-18; SWISSPROT HIT: Q17103, EVALUE 1.60e+00
WANWRFWKTSGSFPRSGQPASSTEDSRHRLRGRSVGDNSMSLGVVGELSFLPMLGLDSKRDSQELNWVFDFSGSRVVPPTPSEEMHLRLVDLKRPPAAPSISRGDFAPTLSERFPSSLPALPLLSVEAPVVW

SEQ ID NO: 33533 - protein, 59 aa, Homo sapiens
  MAP TO AL079300.10; EXPRESSED IN LUNG, SIGNAL = 0.67; EXPRESSED IN FETAL LIVER, SIGNAL = 0.78; EXPRESSED IN HEART, SIGNAL = 3.4; EXPRESSED IN PLACENTA, SIGNAL = 0.89; EST_HUMAN HIT: T48103.1, EVALUE 9.00e-24; SWISSPROT HIT: P20749, EVALUE 3.40e+00
YFFIMLATSSSFLPVPGSLRSGDVRSPPSPASRGIPGRLLMLSALLKDTMEPEDEDESD

SEQ ID NO: 33534 - protein, 162 aa, Homo sapiens
  MAP TO AL079300.10; EXPRESSED IN LUNG, SIGNAL = 0.67; EXPRESSED IN FETAL LIVER, SIGNAL = 0.78; EXPRESSED IN HEART, SIGNAL = 3.4; EXPRESSED IN PLACENTA, SIGNAL = 0.89; EST_HUMAN HIT: BE246780.1, EVALUE 1.00e-57; SWISSPROT HIT: P08096, EVALUE 4.50e+00
CLESSVDDAGCPDLGKEPLVFQNRQFAHLMEEPLGSDPFSWKLPSLDYERKTKVDFDDFLPAIRKPQTPTSLAGSAKGGQDGSQRSSIHFETEEANRSFLSGIKTILKKSPEPKEDPAHLSDSSSSSGSIVSFKSADSIKSRPGIPRLAGDGGERTSPERRE

SEQ ID NO: 33535 - protein, 55 aa, Homo sapiens
  MAP TO AL079300.10; EXPRESSED IN HEART, SIGNAL = 1.6; EST_HUMAN HIT: AW663149.1, EVALUE 6.30e-01; SWISSPROT HIT: O67650, EVALUE 4.50e+00
SALRSLQFLSCPTPAEWKKVMDGQRNGRWTATREESVIWEPFGDMHIQRTRKEWL

SEQ ID NO: 33536 - protein, 32 aa, Homo sapiens
  MAP TO AL079301.14; EXPRESSED IN HBL100, SIGNAL = 7.8; EXPRESSED IN FETAL LIVER, SIGNAL = 5.2; EXPRESSED IN HELA, SIGNAL = 8.2; EXPRESSED IN BRAIN, SIGNAL = 8.4; EXPRESSED IN PLACENTA, SIGNAL = 4.7; EXPRESSED IN HEART, SIGNAL = 4.3; EXPRESSED IN ADULT LIVER, SIGNAL = 5.6; EXPRESSED IN LUNG, SIGNAL = 6.2; EXPRESSED IN BONE MARROW, SIGNAL = 7.8; EXPRESSED IN BT474, SIGNAL =   7
MTPITRSTTITILITTCIRMIQSRCIQRSFLE

SEQ ID NO: 33537 - protein, 195 aa, Homo sapiens
  MAP TO AL079301.14; EXPRESSED IN HBL100, SIGNAL = 7.8; EXPRESSED IN FETAL LIVER, SIGNAL = 5.2; EXPRESSED IN HELA, SIGNAL = 8.2; EXPRESSED IN BRAIN, SIGNAL = 8.4; EXPRESSED IN PLACENTA, SIGNAL = 4.7; EXPRESSED IN HEART, SIGNAL = 4.3; EXPRESSED IN ADULT LIVER, SIGNAL = 5.6; EXPRESSED IN LUNG, SIGNAL = 6.2; EXPRESSED IN BONE MARROW, SIGNAL = 7.8; EXPRESSED IN BT474, SIGNAL =   7
GDGCHGDGGGAAGNVVMVMMVVVIMVIIVMVVAVVLMMVLLVMVVMMVVIMMVIMVIIVMVVAVMLLVMGVLMVMVVLMVLVVLLLVMVVMVMVVMRMVVIVMVIMVIIVMVVVVVLMVMVVLLLVMVVMVMVMRMVVIVLVIMVIMVMVVVVVLMVMVVLMVMVVVLLVMVVVMVIIVMVVAVVPMVMVMVMVL

SEQ ID NO: 33538 - protein, 22 aa, Homo sapiens
  MAP TO AL079301.14; EXPRESSED IN HBL100, SIGNAL = 7.8; EXPRESSED IN FETAL LIVER, SIGNAL = 5.2; EXPRESSED IN HELA, SIGNAL = 8.2; EXPRESSED IN BRAIN, SIGNAL = 8.4; EXPRESSED IN PLACENTA, SIGNAL = 4.7; EXPRESSED IN HEART, SIGNAL = 4.3; EXPRESSED IN ADULT LIVER, SIGNAL = 5.6; EXPRESSED IN LUNG, SIGNAL = 6.2; EXPRESSED IN BONE MARROW, SIGNAL = 7.8; EXPRESSED IN BT474, SIGNAL =   7
SRKDLWMHLDWIMRMQVVMRMV

SEQ ID NO: 33539 - protein, 34 aa, Homo sapiens
  MAP TO AL079301.14; EXPRESSED IN ADULT LIVER, SIGNAL = 4.6; EXPRESSED IN BONE MARROW, SIGNAL = 5.3; EXPRESSED IN BRAIN, SIGNAL = 3.9; EXPRESSED IN HEART, SIGNAL = 3.4; EXPRESSED IN PLACENTA, SIGNAL = 5.9; EXPRESSED IN BT474, SIGNAL = 4.4; EXPRESSED IN FETAL LIVER, SIGNAL = 4.8; EXPRESSED IN LUNG, SIGNAL = 4.8; EXPRESSED IN HELA, SIGNAL = 5.1; EXPRESSED IN HBL100, SIGNAL =   7; EST_HUMAN HIT: AA813339.1, EVALUE 3.90e+00
TRYPKAAHPLLHHFLSKGGEPHPEIPLPKARLPR

SEQ ID NO: 33540 - protein, 62 aa, Homo sapiens
  MAP TO AL079301.14; EXPRESSED IN BRAIN, SIGNAL =  14; EXPRESSED IN HEART, SIGNAL = 4.6; EXPRESSED IN PLACENTA, SIGNAL =  14; EXPRESSED IN HBL100, SIGNAL =  20; EXPRESSED IN FETAL LIVER, SIGNAL = 9.3; EXPRESSED IN HELA, SIGNAL =  13; EXPRESSED IN ADULT LIVER, SIGNAL = 9.4; EXPRESSED IN BT474, SIGNAL =  13; EXPRESSED IN BONE MARROW, SIGNAL =  13; EXPRESSED IN LUNG, SIGNAL =  11
MITIIITTITTIITITTTIITTTTTIITTTITITTLITTTIIITITTTTTTIIIIITTTKGP

SEQ ID NO: 33541 - protein, 109 aa, Homo sapiens
  MAP TO AL079301.14; EXPRESSED IN BRAIN, SIGNAL =  14; EXPRESSED IN HEART, SIGNAL = 4.6; EXPRESSED IN PLACENTA, SIGNAL =  14; EXPRESSED IN HBL100, SIGNAL =  20; EXPRESSED IN FETAL LIVER, SIGNAL = 9.3; EXPRESSED IN HELA, SIGNAL =  13; EXPRESSED IN ADULT LIVER, SIGNAL = 9.4; EXPRESSED IN BT474, SIGNAL =  13; EXPRESSED IN BONE MARROW, SIGNAL =  13; EXPRESSED IN LUNG, SIGNAL =  11
PWPPDQMERCEGHASSALTGPFVVVMMMMMVVVVVVMVMMMVVVMRVVMVMVVVMMVVVVVMMVVVMVMMVVMVVMMMVIMMMVMVVMVVMMVMMMVMVVVMVMMMIVM

SEQ ID NO: 33542 - protein, 20 aa, Homo sapiens
  MAP TO AL079301.14; EXPRESSED IN HBL100, SIGNAL =   2; EXPRESSED IN HELA, SIGNAL = 2.4; EXPRESSED IN FETAL LIVER, SIGNAL = 2.2; EXPRESSED IN LUNG, SIGNAL = 2.1; EXPRESSED IN ADULT LIVER, SIGNAL = 1.6; EXPRESSED IN HEART, SIGNAL = 1.8; EXPRESSED IN PLACENTA, SIGNAL = 2.4; EXPRESSED IN BT474, SIGNAL = 2.5; EXPRESSED IN BONE MARROW, SIGNAL = 2.6; EXPRESSED IN BRAIN, SIGNAL = 2.2
AAEEGVWRPQDQQCVCRWGE

SEQ ID NO: 33543 - protein, 33 aa, Homo sapiens
  MAP TO AL079340.7; EXPRESSED IN LUNG, SIGNAL = 1.7; EXPRESSED IN HEART, SIGNAL =   3; EXPRESSED IN ADULT LIVER, SIGNAL = 2.1; EXPRESSED IN HELA, SIGNAL = 3.3; EXPRESSED IN FETAL LIVER, SIGNAL = 2.6; EXPRESSED IN BONE MARROW, SIGNAL = 2.6; EXPRESSED IN BT474, SIGNAL = 8.2; EXPRESSED IN PLACENTA, SIGNAL = 1.5; EXPRESSED IN BRAIN, SIGNAL =   3; EXPRESSED IN HBL100, SIGNAL = 2.1
FSSLHQEAKGQIYKPSDQAHVQQGNLKPVFLSC

SEQ ID NO: 33544 - protein, 39 aa, Homo sapiens
  MAP TO AL079352.2; EXPRESSED IN BONE MARROW, SIGNAL = 1.7; EXPRESSED IN FETAL LIVER, SIGNAL = 4.8; EXPRESSED IN LUNG, SIGNAL = 2.7; EXPRESSED IN PLACENTA, SIGNAL = 2.5; EXPRESSED IN BT474, SIGNAL =   5; EXPRESSED IN HBL100, SIGNAL = 4.7; EXPRESSED IN HELA, SIGNAL = 2.5; EXPRESSED IN ADULT LIVER, SIGNAL = 4.5; EXPRESSED IN BRAIN, SIGNAL = 3.7; EXPRESSED IN HEART, SIGNAL = 2.6; EST_HUMAN HIT: BE175488.1, EVALUE 2.00e-10; SWISSPROT HIT: P36218, EVALUE 3.60e+00; EST_HUMAN HIT: BE545487.1, EVALUE 3.00e-10
MADFIVFINWTASSSAPLVMEGRYHMLQIMAQLVIIRSR

SEQ ID NO: 33545 - protein, 26 aa, Homo sapiens
  MAP TO AL079352.2; EXPRESSED IN BONE MARROW, SIGNAL = 1.7; EXPRESSED IN FETAL LIVER, SIGNAL = 4.8; EXPRESSED IN LUNG, SIGNAL = 2.7; EXPRESSED IN PLACENTA, SIGNAL = 2.5; EXPRESSED IN BT474, SIGNAL =   5; EXPRESSED IN HBL100, SIGNAL = 4.7; EXPRESSED IN HELA, SIGNAL = 2.5; EXPRESSED IN ADULT LIVER, SIGNAL = 4.5; EXPRESSED IN BRAIN, SIGNAL = 3.7; EXPRESSED IN HEART, SIGNAL = 2.6; EST_HUMAN HIT: H15965.1, EVALUE 4.00e-05; EST_HUMAN HIT: BE175537.1, EVALUE 3.00e-05
RDDDLPAANDDQLGHYLQHVVPAFHD

SEQ ID NO: 33546 - protein, 56 aa, Homo sapiens
  MAP TO AL096772.5; EXPRESSED IN LUNG, SIGNAL = 2.1; EXPRESSED IN HEART, SIGNAL =   1; SWISSPROT HIT: P10033, EVALUE 5.90e+00; EST_HUMAN HIT: BE007080.1, EVALUE 1.00e-11
ATKSPTAEEYTVNIEISFENASFLDPIKAYLNSLSFPIHGNNTDQITDILSINVTT

SEQ ID NO: 33547 - protein, 17 aa, Homo sapiens
  MAP TO AL096772.5; EXPRESSED IN LUNG, SIGNAL = 2.1; EXPRESSED IN HEART, SIGNAL =   1; EST_HUMAN HIT: BE007080.1, EVALUE 9.00e-03
LRSVLKMHPSWILSKPT

SEQ ID NO: 33548 - protein, 56 aa, Homo sapiens
  MAP TO AL096772.5; EXPRESSED IN PLACENTA, SIGNAL = 1.7; EXPRESSED IN BONE MARROW, SIGNAL = 0.89; EXPRESSED IN BT474, SIGNAL =   1; EXPRESSED IN HBL100, SIGNAL =   1; EXPRESSED IN FETAL LIVER, SIGNAL = 1.6; EXPRESSED IN LUNG, SIGNAL =   6; EXPRESSED IN HELA, SIGNAL = 0.97; EXPRESSED IN ADULT LIVER, SIGNAL = 1.1; EXPRESSED IN HEART, SIGNAL = 2.5; EXPRESSED IN BRAIN, SIGNAL = 0.87; EST_HUMAN HIT: BF513128.1, EVALUE 3.00e-26; EST_HUMAN HIT: BE394572.1, EVALUE 9.30e+00; SWISSPROT HIT: Q07488, EVALUE 4.50e+00
TPETDIDSSCSRYTLKADGTQCPSGSSGTTVIYTCEFISAYGARGSANIKVTFISV

SEQ ID NO: 33549 - protein, 35 aa, Homo sapiens
  MAP TO AL096772.5; EXPRESSED IN PLACENTA, SIGNAL = 1.7; EXPRESSED IN BONE MARROW, SIGNAL = 0.89; EXPRESSED IN BT474, SIGNAL =   1; EXPRESSED IN HBL100, SIGNAL =   1; EXPRESSED IN FETAL LIVER, SIGNAL = 1.6; EXPRESSED IN LUNG, SIGNAL =   6; EXPRESSED IN HELA, SIGNAL = 0.97; EXPRESSED IN ADULT LIVER, SIGNAL = 1.1; EXPRESSED IN HEART, SIGNAL = 2.5; EXPRESSED IN BRAIN, SIGNAL = 0.87; EST_HUMAN HIT: BF513128.1, EVALUE 8.00e-12
PSRLMEPSAQAGRLEQQSSTLVSSSVPMEPEAVQT

SEQ ID NO: 33550 - protein, 75 aa, Homo sapiens
  MAP TO AL096772.5; EXPRESSED IN FETAL LIVER, SIGNAL = 0.65; EXPRESSED IN PLACENTA, SIGNAL = 0.68; EXPRESSED IN LUNG, SIGNAL = 3.1; EXPRESSED IN ADULT LIVER, SIGNAL = 0.64; EXPRESSED IN HEART, SIGNAL = 1.4; EST_HUMAN HIT: BE243820.1, EVALUE 2.50e+00; SWISSPROT HIT: Q61188, EVALUE 6.40e-01
HVLSTVNVILGKPVLNTWKVLQQQWTNQSSQLLHSVERFSQALQSGDSPPLSFSQTNVQMSSMVIKSSHPETYQQ

SEQ ID NO: 33551 - protein, 124 aa, Homo sapiens
  MAP TO AL109618.1; EXPRESSED IN BONE MARROW, SIGNAL = 3.1; EXPRESSED IN HBL100, SIGNAL =  16; EXPRESSED IN ADULT LIVER, SIGNAL = 7.5; EXPRESSED IN BRAIN, SIGNAL =   4; EXPRESSED IN PLACENTA, SIGNAL = 7.5; EXPRESSED IN HEART, SIGNAL = 4.7; EXPRESSED IN HELA, SIGNAL = 6.9; EXPRESSED IN LUNG, SIGNAL = 5.5; EXPRESSED IN FETAL LIVER, SIGNAL = 9.6; EXPRESSED IN BT474, SIGNAL =  23; EST_HUMAN HIT: BE222562.1, EVALUE 2.00e-30; EST_HUMAN HIT: AI625087.1, EVALUE 2.00e-30
PPTRDGGRGGRGGYGYPPDYYGYEDYYDYYGYDYHNYRGGYEDPYYGYEDFQVGAREGVVEEQGVLLHPEVVGLLFPVVEPVIHREEDLDQQEAFEVREEVPNNKEAAGREKGSRLVLTCYNED

SEQ ID NO: 33552 - protein, 76 aa, Homo sapiens
  MAP TO AL109618.1; EXPRESSED IN HELA, SIGNAL = 1.3; EXPRESSED IN BT474, SIGNAL = 0.95; EXPRESSED IN HBL100, SIGNAL = 0.88; EXPRESSED IN FETAL LIVER, SIGNAL = 2.2; EXPRESSED IN LUNG, SIGNAL = 1.6; EXPRESSED IN BRAIN, SIGNAL = 2.1; EXPRESSED IN PLACENTA, SIGNAL = 2.1; EXPRESSED IN ADULT LIVER, SIGNAL =   1; EXPRESSED IN HEART, SIGNAL = 1.3; EST_HUMAN HIT: R85021.1, EVALUE 4.90e-01; SWISSPROT HIT: O32810, EVALUE 3.50e+00
GMVTVQGNHTLHDQAPLLVSQLDAQCDAFHGTPQSSSTRRPGSRVVSGQAVNAKMLGGRYSQQLLGHPLRPSPGVQ

SEQ ID NO: 33553 - protein, 43 aa, Homo sapiens
  MAP TO AP000030.1; EXPRESSED IN HEART, SIGNAL = 2.1; EXPRESSED IN PLACENTA, SIGNAL = 1.9; EXPRESSED IN FETAL LIVER, SIGNAL = 1.5; EXPRESSED IN HELA, SIGNAL =   2; EXPRESSED IN BT474, SIGNAL = 1.5; EXPRESSED IN BONE MARROW, SIGNAL = 2.3; EXPRESSED IN HBL100, SIGNAL = 1.6; EXPRESSED IN LUNG, SIGNAL = 2.1; EXPRESSED IN ADULT LIVER, SIGNAL = 2.8; EXPRESSED IN BRAIN, SIGNAL = 2.5; SWISSPROT HIT: P52549, EVALUE 3.60e+00; EST_HUMAN HIT: AL042482.1, EVALUE 2.70e+00; EST_HUMAN HIT: BE961543.1, EVALUE 3.10e+00
GRLLVEARRLLIHTEPSAVPTSWSAALRIPRTNLQDPGPLAWK

SEQ ID NO: 33554 - protein, 60 aa, Homo sapiens
  MAP TO AP000031.1; EXPRESSED IN LUNG, SIGNAL = 1.1; EXPRESSED IN BT474, SIGNAL = 2.1; EXPRESSED IN BONE MARROW, SIGNAL =   1; EXPRESSED IN HBL100, SIGNAL = 2.3; EXPRESSED IN HELA, SIGNAL = 0.96; EXPRESSED IN ADULT LIVER, SIGNAL = 1.3; EXPRESSED IN BRAIN, SIGNAL = 1.1; EXPRESSED IN HEART, SIGNAL = 1.2; EXPRESSED IN PLACENTA, SIGNAL = 1.6; EXPRESSED IN FETAL LIVER, SIGNAL = 2.4; EST_HUMAN HIT: L25488.1, EVALUE 3.00e+00; SWISSPROT HIT: O95104, EVALUE 9.00e-07
KLLDRFDYDDEPEAVEESKKEDTTAVTTTAPAAAVPPAPTATVPAAAAPAAASPPPPQAP

SEQ ID NO: 33555 - protein, 31 aa, Homo sapiens
  MAP TO AP000032.1; EXPRESSED IN BRAIN, SIGNAL = 4.2; EXPRESSED IN HEART, SIGNAL = 3.4; EXPRESSED IN PLACENTA, SIGNAL = 3.3; EXPRESSED IN BT474, SIGNAL = 3.4; EXPRESSED IN BONE MARROW, SIGNAL = 4.2; EXPRESSED IN HBL100, SIGNAL = 4.1; EXPRESSED IN FETAL LIVER, SIGNAL = 3.5; EXPRESSED IN HELA, SIGNAL = 5.3; EXPRESSED IN ADULT LIVER, SIGNAL =   4; EXPRESSED IN LUNG, SIGNAL = 4.6
NNKNDDDDDDDDDILEELEMLFYSISALKPH

SEQ ID NO: 33556 - protein, 90 aa, Homo sapiens
  MAP TO AP000033.1; EXPRESSED IN BONE MARROW, SIGNAL = 9.2; EXPRESSED IN FETAL LIVER, SIGNAL = 8.6; EXPRESSED IN PLACENTA, SIGNAL = 7.3; EXPRESSED IN BT474, SIGNAL = 6.6; EXPRESSED IN HBL100, SIGNAL = 8.3; EXPRESSED IN LUNG, SIGNAL =  20; EXPRESSED IN HELA, SIGNAL = 7.5; EXPRESSED IN ADULT LIVER, SIGNAL = 6.1; EXPRESSED IN BRAIN, SIGNAL = 9.9; EXPRESSED IN HEART, SIGNAL = 6.2; EST_HUMAN HIT: AW001114.1, EVALUE 4.00e-28; SWISSPROT HIT: O60287, EVALUE 5.00e-29
VLLWGPAAVEHHKTCRSLGRSLWQQPSVGDILRLLDRDRMMQTILHFPQNRRLLPPEVGLLLFCPYPPLHPSLRGSICTLSFVFLVIYLF

SEQ ID NO: 33557 - protein, 132 aa, Homo sapiens
  MAP TO AP000033.1; EXPRESSED IN PLACENTA, SIGNAL = 4.6; EXPRESSED IN HEART, SIGNAL = 3.8; EXPRESSED IN HBL100, SIGNAL = 3.8; EXPRESSED IN FETAL LIVER, SIGNAL = 4.9; EXPRESSED IN LUNG, SIGNAL = 3.3; EXPRESSED IN HELA, SIGNAL = 4.1; EXPRESSED IN BRAIN, SIGNAL = 3.8; EXPRESSED IN BT474, SIGNAL =   3; EXPRESSED IN BONE MARROW, SIGNAL = 3.5; EXPRESSED IN ADULT LIVER, SIGNAL = 3.2; SWISSPROT HIT: O60287, EVALUE 4.00e-59; EST_HUMAN HIT: H14174.1, EVALUE 1.00e-26
MLKDKNKPVMPARAKGPRGRKRRPGEAEEMADPELMASTLETCKGLLRSILTYWRPVIPGPDPTQEPVDSASPESDAPGPVYAAASLAVSWVLRSVAEHPLSRAEAAGLIGWLKSHILPHPVVVADLLKDSA

SEQ ID NO: 33558 - protein, 56 aa, Homo sapiens
  MAP TO AP000041.1; EXPRESSED IN HBL100, SIGNAL = 1.4; EXPRESSED IN FETAL LIVER, SIGNAL = 1.8; EXPRESSED IN BRAIN, SIGNAL = 1.4; EXPRESSED IN PLACENTA, SIGNAL = 1.7; EXPRESSED IN HEART, SIGNAL = 1.9; EXPRESSED IN ADULT LIVER, SIGNAL = 1.4; EXPRESSED IN HELA, SIGNAL = 1.2; EXPRESSED IN LUNG, SIGNAL = 1.5; EXPRESSED IN BONE MARROW, SIGNAL = 1.7; EXPRESSED IN BT474, SIGNAL = 1.6; EST_HUMAN HIT: AA166901.1, EVALUE 7.10e+00; SWISSPROT HIT: P39736, EVALUE 7.70e+00; EST_HUMAN HIT: BF246333.1, EVALUE 4.80e+00
QEKGRTREHHKRSPPCGLLYFISETKKAPGLSPASRFSFINKSEARESHSDMAEAS

SEQ ID NO: 33559 - protein, 46 aa, Homo sapiens
  MAP TO AP000041.1; EXPRESSED IN HBL100, SIGNAL = 1.4; EXPRESSED IN FETAL LIVER, SIGNAL = 1.8; EXPRESSED IN BRAIN, SIGNAL = 1.4; EXPRESSED IN PLACENTA, SIGNAL = 1.7; EXPRESSED IN HEART, SIGNAL = 1.9; EXPRESSED IN ADULT LIVER, SIGNAL = 1.4; EXPRESSED IN HELA, SIGNAL = 1.2; EXPRESSED IN LUNG, SIGNAL = 1.5; EXPRESSED IN BONE MARROW, SIGNAL = 1.7; EXPRESSED IN BT474, SIGNAL = 1.6
EASAISEWLSLASDLLMKLKRLAGERPGAFFVSEMKYNRPQGGDLL

SEQ ID NO: 33560 - protein, 232 aa, Homo sapiens
  MAP TO AP000043.1; EXPRESSED IN BONE MARROW, SIGNAL = 2.1; EXPRESSED IN HBL100, SIGNAL = 1.5; EXPRESSED IN PLACENTA, SIGNAL = 1.2; EXPRESSED IN BRAIN, SIGNAL = 1.7; EXPRESSED IN HELA, SIGNAL = 1.8; EXPRESSED IN FETAL LIVER, SIGNAL = 1.8; EXPRESSED IN BT474, SIGNAL =   1; EXPRESSED IN HEART, SIGNAL = 1.5; EXPRESSED IN ADULT LIVER, SIGNAL = 1.5; EXPRESSED IN LUNG, SIGNAL =   2; SWISSPROT HIT: P48551, EVALUE 1.00e-123; EST_HUMAN HIT: BE315520.1, EVALUE 5.00e-56
NFHNFLAWPFPNLPPLEAMDMVEVIYINRKKKVWDYNYDDESDSDTEAAPRTSGGGYTMHGLTVRPLGQASATSTESQLIDPESEEEPDLPEVDVELPTMPKDSPQQLELLSGPCERRKSPLQDPFPEEDYSSTEGSGGRITFNVDLNSVFLRVLDDEDSDDLEAPLMLSSHLEEMVDPEDPDNVQSNHLLASGEGTQPTFPSPSSEGLWSEDAPSDQSDTSESDVDLGDGY

SEQ ID NO: 33561 - protein, 68 aa, Homo sapiens [sequence omitted]

SEQ ID NO: 33562 - protein, 64 aa, Homo sapiens
  MAP TO AP000051.1; EXPRESSED IN PLACENTA, SIGNAL = 4.2; EXPRESSED IN FETAL LIVER, SIGNAL = 2.6; EXPRESSED IN ADULT LIVER, SIGNAL = 2.5; EXPRESSED IN BT474, SIGNAL = 3.2; EXPRESSED IN HEART, SIGNAL = 2.8; EXPRESSED IN BRAIN, SIGNAL = 4.4; EXPRESSED IN HELA, SIGNAL = 3.7; EXPRESSED IN LUNG, SIGNAL = 3.6; EXPRESSED IN HBL100, SIGNAL = 4.3; EXPRESSED IN BONE MARROW, SIGNAL =   6; EST_HUMAN HIT: AA412497.1, EVALUE 3.00e-07; SWISSPROT HIT: P07688, EVALUE 8.70e+00
VRWYLTVALFCIFLMISVVEHLFMCILAICILRMYNVSIFLWRAGHPKWPGAHVYCLNVLCALP

SEQ ID NO: 33563 - protein, 29 aa, Homo sapiens
  MAP TO AP000052.1; EXPRESSED IN ADULT LIVER, SIGNAL =   6; EXPRESSED IN LUNG, SIGNAL =  12; EXPRESSED IN HELA, SIGNAL = 8.7; EXPRESSED IN PLACENTA, SIGNAL = 8.6; EXPRESSED IN BT474, SIGNAL = 6.6; EXPRESSED IN BONE MARROW, SIGNAL =  11; EXPRESSED IN FETAL LIVER, SIGNAL = 9.3; EXPRESSED IN BRAIN, SIGNAL = 8.1; EXPRESSED IN HEART, SIGNAL = 5.4; EXPRESSED IN HBL100, SIGNAL = 8.8
HRQAVEGMNVHRAVDGTDVSAFQSQQQQT

SEQ ID NO: 33564 - protein, 43 aa, Homo sapiens
  MAP TO AP000090.1; EXPRESSED IN HBL100, SIGNAL = 2.9; EXPRESSED IN ADULT LIVER, SIGNAL = 2.7; EXPRESSED IN HEART, SIGNAL = 4.4; EXPRESSED IN PLACENTA, SIGNAL = 2.4; EXPRESSED IN BT474, SIGNAL = 4.7; EXPRESSED IN BRAIN, SIGNAL = 9.3; EXPRESSED IN HELA, SIGNAL = 7.3; EXPRESSED IN LUNG, SIGNAL = 5.5; EXPRESSED IN FETAL LIVER, SIGNAL = 3.3; EXPRESSED IN BONE MARROW, SIGNAL = 1.8; EST_HUMAN HIT: BE170851.1, EVALUE 5.00e-21; SWISSPROT HIT: P05067, EVALUE 6.00e-22; EST_HUMAN HIT: BE871614.1, EVALUE 7.00e-21
VYPELQITNVVEANQPVTIQNWCKRGRKQCKTHPHFVIPYRCL

SEQ ID NO: 33565 - protein, 50 aa, Homo sapiens
  MAP TO AP000091.1; EXPRESSED IN BONE MARROW, SIGNAL =   9; EXPRESSED IN LUNG, SIGNAL =  12; EXPRESSED IN PLACENTA, SIGNAL =  12; EXPRESSED IN BT474, SIGNAL = 7.5; EXPRESSED IN HBL100, SIGNAL =   9; EXPRESSED IN FETAL LIVER, SIGNAL =  12; EXPRESSED IN HELA, SIGNAL = 8.7; EXPRESSED IN ADULT LIVER, SIGNAL = 9.5; EXPRESSED IN BRAIN, SIGNAL =  15; EXPRESSED IN HEART, SIGNAL =  11; EST_HUMAN HIT: AI890146.1, EVALUE 3.40e+00; SWISSPROT HIT: Q61282, EVALUE 6.00e+00; EST_HUMAN HIT: AA932293.1, EVALUE 5.10e+00
FKNQESGVCACIRCCGSVHVQSHSRLLTHSRNSIRIGRLIRSECLECQEF

SEQ ID NO: 33566 - protein, 52 aa, Homo sapiens
  MAP TO AP000100.1; EXPRESSED IN BRAIN, SIGNAL = 5.6; EXPRESSED IN HEART, SIGNAL = 4.5; EXPRESSED IN BT474, SIGNAL = 3.7; EXPRESSED IN BONE MARROW, SIGNAL = 3.1; EXPRESSED IN LUNG, SIGNAL = 7.6; EXPRESSED IN PLACENTA, SIGNAL = 3.6; EXPRESSED IN ADULT LIVER, SIGNAL =   5; EXPRESSED IN HELA, SIGNAL = 5.6; EXPRESSED IN FETAL LIVER, SIGNAL = 4.8; EXPRESSED IN HBL100, SIGNAL = 3.4; EST_HUMAN HIT: AI798411.1, EVALUE 7.40e+00
VPPNDMLLVTCPAQGLALNMWIQPHLLGLSWLEFFIGLEGLNQSFIRVELSL

SEQ ID NO: 33567 - protein, 58 aa, Homo sapiens
  MAP TO AP000102.1; EXPRESSED IN BT474, SIGNAL = 1.7; EXPRESSED IN BONE MARROW, SIGNAL = 1.5; EXPRESSED IN FETAL LIVER, SIGNAL = 1.6; EXPRESSED IN LUNG, SIGNAL =   2; EXPRESSED IN HELA, SIGNAL = 2.2; EXPRESSED IN PLACENTA, SIGNAL = 1.4; EXPRESSED IN HBL100, SIGNAL = 1.6; EXPRESSED IN ADULT LIVER, SIGNAL = 1.5; EXPRESSED IN BRAIN, SIGNAL = 2.9; EXPRESSED IN HEART, SIGNAL = 1.7; EST_HUMAN HIT: BF334583.1, EVALUE 4.00e-23; SWISSPROT HIT: P48313, EVALUE 7.60e+00
LDSTSVRHTALSLISVILKRALKTVDHCLNKEVWQESGVYTAVMMEEFVQLFREALSK

SEQ ID NO: 33568 - protein, 52 aa, Homo sapiens
  MAP TO AP000110.1; EXPRESSED IN PLACENTA, SIGNAL =   5; EXPRESSED IN ADULT LIVER, SIGNAL = 3.1; EXPRESSED IN HEART, SIGNAL = 2.6; EXPRESSED IN BT474, SIGNAL = 2.7; EXPRESSED IN BONE MARROW, SIGNAL = 3.3; EXPRESSED IN HBL100, SIGNAL = 2.8; EXPRESSED IN FETAL LIVER, SIGNAL = 2.3; EXPRESSED IN LUNG, SIGNAL = 3.5; EXPRESSED IN HELA, SIGNAL =   3; EXPRESSED IN BRAIN, SIGNAL = 3.8; EST_HUMAN HIT: N23035.1, EVALUE 2.50e+00; SWISSPROT HIT: P08170, EVALUE 4.50e+00
GGGGGGRGAGFVPFACFRWLHSHASSAVLVPHSHGQKVQPIYESLSVHRCPV

SEQ ID NO: 33569 - protein, 33 aa, Homo sapiens
  MAP TO AP000110.1; EXPRESSED IN ADULT LIVER, SIGNAL = 1.3; EXPRESSED IN BRAIN, SIGNAL = 0.9; EXPRESSED IN HEART, SIGNAL = 1.2; EXPRESSED IN BT474, SIGNAL = 1.9; EXPRESSED IN BONE MARROW, SIGNAL = 1.4; EXPRESSED IN HBL100, SIGNAL =   2; EXPRESSED IN HELA, SIGNAL = 2.5; EXPRESSED IN PLACENTA, SIGNAL = 1.5; EXPRESSED IN FETAL LIVER, SIGNAL = 1.7; EXPRESSED IN LUNG, SIGNAL = 1.5; SWISSPROT HIT: Q05556, EVALUE 6.30e+00
SLILLDPLADWICSYHGIGRSTRERARPHKYFP

SEQ ID NO: 33570 - protein, 47 aa, Homo sapiens
  MAP TO AP000111.1; EXPRESSED IN BT474, SIGNAL = 0.92; EXPRESSED IN HELA, SIGNAL = 1.1; EXPRESSED IN ADULT LIVER, SIGNAL = 0.82; EXPRESSED IN PLACENTA, SIGNAL = 0.87; EXPRESSED IN BONE MARROW, SIGNAL = 0.98; EXPRESSED IN HBL100, SIGNAL = 1.2; EXPRESSED IN FETAL LIVER, SIGNAL = 0.98; EXPRESSED IN LUNG, SIGNAL = 1.1; EXPRESSED IN BRAIN, SIGNAL = 1.6; EXPRESSED IN HEART, SIGNAL = 1.2; EST_HUMAN HIT: AA757099.1, EVALUE 6.00e-06; SWISSPROT HIT: Q10411, EVALUE 2.70e+00
EEEIRTQTQRGDHVKTQKSAIYEPRREISEGTNSADTLISDFQSPEL

SEQ ID NO: 33571 - protein, 48 aa, Homo sapiens
  MAP TO AP000111.1; EXPRESSED IN PLACENTA, SIGNAL =   4; EXPRESSED IN BONE MARROW, SIGNAL = 4.6; EXPRESSED IN HBL100, SIGNAL = 5.1; EXPRESSED IN FETAL LIVER, SIGNAL = 3.5; EXPRESSED IN ADULT LIVER, SIGNAL = 4.1; EXPRESSED IN BRAIN, SIGNAL = 8.5; EXPRESSED IN BT474, SIGNAL = 3.2; EXPRESSED IN LUNG, SIGNAL = 4.7; EXPRESSED IN HELA, SIGNAL =   6; EXPRESSED IN HEART, SIGNAL = 4.3; EST_HUMAN HIT: BF109229.1, EVALUE 1.00e-17; EST_HUMAN HIT: AI738554.1, EVALUE 6.00e-13; SWISSPROT HIT: P48551, EVALUE 2.00e-21
SFEPPEFEIVGFTNHINVMVKFPSIVEEELQFDLSLVIEEQSEGIVKK

SEQ ID NO: 33572 - protein, 26 aa, Homo sapiens
  MAP TO AP000112.1; EXPRESSED IN LUNG, SIGNAL = 1.6; EXPRESSED IN ADULT LIVER, SIGNAL = 1.8; EXPRESSED IN BRAIN, SIGNAL = 1.1; EXPRESSED IN HEART, SIGNAL = 1.7; EXPRESSED IN PLACENTA, SIGNAL = 1.6; EXPRESSED IN BT474, SIGNAL =   3; EXPRESSED IN BONE MARROW, SIGNAL = 2.7; EXPRESSED IN HBL100, SIGNAL = 2.5; EXPRESSED IN FETAL LIVER, SIGNAL = 1.9; EXPRESSED IN HELA, SIGNAL = 1.8; EST_HUMAN HIT: AA207225.1, EVALUE 2.00e-07; EST_HUMAN HIT: AW403715.1, EVALUE 1.00e-07
HGLPGTPRLLRLAVVRLQEDKVRLLP

SEQ ID NO: 33573 - protein, 39 aa, Homo sapiens
  MAP TO AP000113.1; EXPRESSED IN BONE MARROW, SIGNAL = 2.6; EXPRESSED IN HBL100, SIGNAL = 4.4; EXPRESSED IN FETAL LIVER, SIGNAL = 3.4; EXPRESSED IN ADULT LIVER, SIGNAL =   2; EXPRESSED IN BRAIN, SIGNAL = 2.9; EXPRESSED IN HEART, SIGNAL =   2; EXPRESSED IN PLACENTA, SIGNAL = 3.1; EXPRESSED IN HELA, SIGNAL = 2.6; EXPRESSED IN LUNG, SIGNAL = 3.7; EXPRESSED IN BT474, SIGNAL = 2.7; EST_HUMAN HIT: BE732802.1, EVALUE 4.00e-16; EST_HUMAN HIT: BE390182.1, EVALUE 2.00e-16; SWISSPROT HIT: P38484, EVALUE 8.00e-17
LPAPQHPKIRLYNAEQVLSWEPVALSNSTRPVVYQVQFK

SEQ ID NO: 33574 - protein, 54 aa, Homo sapiens
  MAP TO AP000121.1; EXPRESSED IN PLACENTA, SIGNAL = 1.6; EXPRESSED IN BT474, SIGNAL = 1.3; EXPRESSED IN BONE MARROW, SIGNAL = 1.6; EXPRESSED IN FETAL LIVER, SIGNAL = 2.1; EXPRESSED IN LUNG, SIGNAL = 2.1; EXPRESSED IN HELA, SIGNAL = 2.3; EXPRESSED IN BRAIN, SIGNAL =   2; EXPRESSED IN HEART, SIGNAL = 1.3; EXPRESSED IN HBL100, SIGNAL =   2; EXPRESSED IN ADULT LIVER, SIGNAL = 1.9; EST_HUMAN HIT: AW901266.1, EVALUE 1.00e-23; SWISSPROT HIT: P50469, EVALUE 4.00e-01; EST_HUMAN HIT: AV712933.1, EVALUE 2.00e-23
VLEHVPLLLYILAAKTLILCLTFAGVKMYQRKRLEAKQQKLEAERKKQSEKKDN

SEQ ID NO: 33575 - protein, 102 aa, Homo sapiens
  MAP TO AP000130.1; EXPRESSED IN PLACENTA, SIGNAL = 2.6; EXPRESSED IN HBL100, SIGNAL = 1.8; EXPRESSED IN FETAL LIVER, SIGNAL = 1.7; EXPRESSED IN HELA, SIGNAL = 1.2; EXPRESSED IN ADULT LIVER, SIGNAL = 1.5; EXPRESSED IN BRAIN, SIGNAL = 2.3; EXPRESSED IN BONE MARROW, SIGNAL = 2.2; EXPRESSED IN HEART, SIGNAL =   4; EXPRESSED IN BT474, SIGNAL = 1.8; EXPRESSED IN LUNG, SIGNAL = 1.6; EST_HUMAN HIT: BE180472.1, EVALUE 3.00e-30; SWISSPROT HIT: Q13009, EVALUE 6.00e-37
LKAGDEILEINNRAADALNSSMLKDFLSQPSLGLLVRTYPELEEGVELLESPPHRVDGPADLGESPLAFLTSNPGMAVQGAGGESELRCATTRGVYHAACVF

SEQ ID NO: 33576 - protein, 74 aa, Homo sapiens
  MAP TO AP000130.1; EXPRESSED IN LUNG, SIGNAL = 1.2; EXPRESSED IN PLACENTA, SIGNAL =   1; EXPRESSED IN BT474, SIGNAL = 1.6; EXPRESSED IN BONE MARROW, SIGNAL = 1.2; EXPRESSED IN HBL100, SIGNAL = 2.4; EXPRESSED IN FETAL LIVER, SIGNAL = 0.93; EXPRESSED IN ADULT LIVER, SIGNAL = 1.1; EXPRESSED IN BRAIN, SIGNAL = 2.2; EXPRESSED IN HELA, SIGNAL = 1.3; EXPRESSED IN HEART, SIGNAL = 1.1; EST_HUMAN HIT: AW197823.1, EVALUE 9.00e-11; SWISSPROT HIT: Q13009, EVALUE 5.00e-27
TTSQTELENWITAIHSACATAVARHHHKEDTLRLLKSEIKKLEQKIDMDEKMKKMGEMQLSSVTDSKKKKTILD

SEQ ID NO: 33577 - protein, 48 aa, Homo sapiens
  MAP TO AP000130.1; EXPRESSED IN LUNG, SIGNAL = 1.2; EXPRESSED IN PLACENTA, SIGNAL =   1; EXPRESSED IN BT474, SIGNAL = 1.6; EXPRESSED IN BONE MARROW, SIGNAL = 1.2; EXPRESSED IN HBL100, SIGNAL = 2.4; EXPRESSED IN FETAL LIVER, SIGNAL = 0.93; EXPRESSED IN ADULT LIVER, SIGNAL = 1.1; EXPRESSED IN BRAIN, SIGNAL = 2.2; EXPRESSED IN HELA, SIGNAL = 1.3; EXPRESSED IN HEART, SIGNAL = 1.1; EST_HUMAN HIT: AW197823.1, EVALUE 4.00e-03
KRCLFLPAPSSWYRPLARRSLKTGSPPSTLPAPLRSRGTTTRKTRSDS

SEQ ID NO: 33578 - protein, 199 aa, Homo sapiens
  MAP TO AP000131.1; EXPRESSED IN FETAL LIVER, SIGNAL = 1.3; EXPRESSED IN LUNG, SIGNAL = 1.2; EXPRESSED IN HELA, SIGNAL = 1.3; EXPRESSED IN BRAIN, SIGNAL = 1.7; EXPRESSED IN BT474, SIGNAL = 1.4; EXPRESSED IN BONE MARROW, SIGNAL = 1.2; EXPRESSED IN PLACENTA, SIGNAL = 1.4; EXPRESSED IN HEART, SIGNAL = 1.1; EXPRESSED IN ADULT LIVER, SIGNAL = 1.3; EXPRESSED IN HBL100, SIGNAL = 1.5; EST_HUMAN HIT: R14902.1, EVALUE 3.00e-31; SWISSPROT HIT: Q13009, EVALUE 1.00e-106
VDSSIVLTAASVQSMPDTEESRLYGDDATYLAEGGRRQHSYTSNGPTFMETASFKKKRSKSADIWREDSLEFSLSDLSQEHLTSNEEILGSAEEKDCEEARGMETRASPRQLSTCQRANSLGDLYAQKNSGVTANGGPGSKFAGYCRNLVSDIPNLANHKMPPAAAEETPPYSNYNTLPCRKSHCLSEGATNPQISHSN

SEQ ID NO: 33579 - protein, 22 aa, Homo sapiens
  MAP TO AP000131.1; EXPRESSED IN FETAL LIVER, SIGNAL = 1.3; EXPRESSED IN LUNG, SIGNAL = 1.2; EXPRESSED IN HELA, SIGNAL = 1.3; EXPRESSED IN BRAIN, SIGNAL = 1.7; EXPRESSED IN BT474, SIGNAL = 1.4; EXPRESSED IN BONE MARROW, SIGNAL = 1.2; EXPRESSED IN PLACENTA, SIGNAL = 1.4; EXPRESSED IN HEART, SIGNAL = 1.1; EXPRESSED IN ADULT LIVER, SIGNAL = 1.3; EXPRESSED IN HBL100, SIGNAL = 1.5
ILPFPPALLQTIKPWETQKVNM

SEQ ID NO: 33580 - protein, 29 aa, Homo sapiens
  MAP TO AP000132.1; EXPRESSED IN HEART, SIGNAL = 1.5; EXPRESSED IN BT474, SIGNAL = 2.5; EXPRESSED IN BONE MARROW, SIGNAL = 1.1; EXPRESSED IN HBL100, SIGNAL = 1.2; EXPRESSED IN LUNG, SIGNAL = 0.6; EXPRESSED IN ADULT LIVER, SIGNAL =   1; EXPRESSED IN BRAIN, SIGNAL = 0.93; EXPRESSED IN PLACENTA, SIGNAL = 0.69; EXPRESSED IN FETAL LIVER, SIGNAL = 0.81; EXPRESSED IN HELA, SIGNAL = 1.2
MLLLPEGAVVGDGSFEDMGGVGRGRGNDQ

SEQ ID NO: 33581 - protein, 245 aa, Homo sapiens
  MAP TO AP000133.1; EXPRESSED IN BONE MARROW, SIGNAL = 3.6; EXPRESSED IN HBL100, SIGNAL = 2.1; EXPRESSED IN BRAIN, SIGNAL = 3.1; EXPRESSED IN HEART, SIGNAL = 2.6; EXPRESSED IN PLACENTA, SIGNAL = 1.9; EXPRESSED IN BT474, SIGNAL = 2.1; EXPRESSED IN FETAL LIVER, SIGNAL =   2; EXPRESSED IN LUNG, SIGNAL = 2.2; EXPRESSED IN HELA, SIGNAL = 2.4; EXPRESSED IN ADULT LIVER, SIGNAL = 2.2; EST_HUMAN HIT: AI796739.1, EVALUE 5.00e-44; SWISSPROT HIT: Q57814, EVALUE 2.70e+00; EST_HUMAN HIT: AV716401.1, EVALUE 4.00e-48
SKTLFRNNNNKRKVISAMAMTSVKLLAIVLRKPDTWIGLWGVLRGTPSSHKLCTSWNRYSTKLCAPNYKRLIHNIFSLKFSGLLISPEYIFPFSIRLKSNKSSNKSTTKSLQKVEDEEDSEEDSNHDEMSEQEEELEDDPTIVKDYQDLEKAVQSFWYDDVLKTGLDIGRNKVEDAFYKGELRLNGEKLWKKNRTVKVGDTLDLLIGDLLDPMYLGDILDLLFGEDKEGGTETVMRILLKKVFED

SEQ ID NO: 33582 - protein, 49 aa, Homo sapiens
  MAP TO AP000140.1; EXPRESSED IN PLACENTA, SIGNAL = 1.7; EXPRESSED IN BT474, SIGNAL = 3.4; EXPRESSED IN HBL100, SIGNAL = 3.1; EXPRESSED IN HEART, SIGNAL = 1.9; EXPRESSED IN ADULT LIVER, SIGNAL = 2.4; EXPRESSED IN BRAIN, SIGNAL = 7.2; EXPRESSED IN BONE MARROW, SIGNAL = 1.3; EXPRESSED IN FETAL LIVER, SIGNAL = 2.1; EXPRESSED IN LUNG, SIGNAL = 3.3; EXPRESSED IN HELA, SIGNAL = 3.8; EST_HUMAN HIT: AW607850.1, EVALUE 2.00e-09; SWISSPROT HIT: Q95241, EVALUE 4.00e-10; EST_HUMAN HIT: AU117224.1, EVALUE 5.00e-09
VFFAEDVGSNKGAIIGLMVGGVVIATVIVITLVMLKKKQYTSIHHGVVE

SEQ ID NO: 33583 - protein, 41 aa, Homo sapiens
  MAP TO AP000140.1; EXPRESSED IN PLACENTA, SIGNAL = 1.7; EXPRESSED IN BT474, SIGNAL = 3.4; EXPRESSED IN HBL100, SIGNAL = 3.1; EXPRESSED IN HEART, SIGNAL = 1.9; EXPRESSED IN ADULT LIVER, SIGNAL = 2.4; EXPRESSED IN BRAIN, SIGNAL = 7.2; EXPRESSED IN BONE MARROW, SIGNAL = 1.3; EXPRESSED IN FETAL LIVER, SIGNAL = 2.1; EXPRESSED IN LUNG, SIGNAL = 3.3; EXPRESSED IN HELA, SIGNAL = 3.8; EST_HUMAN HIT: W26672.1, EVALUE 1.00e-21; SWISSPROT HIT: P54704, EVALUE 2.70e+00; EST_HUMAN HIT: BE164420.1, EVALUE 2.00e-21
VLCRRCGFKQRCNHWTHGGRCCHSDSDRHHLGDAEEETVHI

SEQ ID NO: 33584 - protein, 56 aa, Homo sapiens
  MAP TO AP000141.1; EXPRESSED IN BT474, SIGNAL = 1.5; EXPRESSED IN FETAL LIVER, SIGNAL = 1.3; EXPRESSED IN LUNG, SIGNAL = 3.2; EXPRESSED IN ADULT LIVER, SIGNAL = 1.5; EXPRESSED IN PLACENTA, SIGNAL = 2.1; EXPRESSED IN BONE MARROW, SIGNAL = 0.9; EXPRESSED IN HBL100, SIGNAL = 1.5; EXPRESSED IN HELA, SIGNAL = 1.5; EXPRESSED IN BRAIN, SIGNAL = 3.5; EXPRESSED IN HEART, SIGNAL = 2.3; EST_HUMAN HIT: BE712768.1, EVALUE 4.00e-25; EST_HUMAN HIT: BE167331.1, EVALUE 3.00e-25; SWISSPROT HIT: Q95241, EVALUE 3.00e-26
ELLQKEQNYSDDVLANMISEPRISYGNDALMPSLTETKTTVELLPVNGEFSLDDLQ

SEQ ID NO: 33585 - protein, 19 aa, Homo sapiens
  MAP TO AP000141.1; EXPRESSED IN BT474, SIGNAL = 1.5; EXPRESSED IN FETAL LIVER, SIGNAL = 1.3; EXPRESSED IN LUNG, SIGNAL = 3.2; EXPRESSED IN ADULT LIVER, SIGNAL = 1.5; EXPRESSED IN PLACENTA, SIGNAL = 2.1; EXPRESSED IN BONE MARROW, SIGNAL = 0.9; EXPRESSED IN HBL100, SIGNAL = 1.5; EXPRESSED IN HELA, SIGNAL = 1.5; EXPRESSED IN BRAIN, SIGNAL = 3.5; EXPRESSED IN HEART, SIGNAL = 2.3
AAAVVIVVTHQRDGFVWFR

SEQ ID NO: 33586 - protein, 53 aa, Homo sapiens
  MAP TO AP000141.1; EXPRESSED IN HELA, SIGNAL =  10; EXPRESSED IN BT474, SIGNAL =  12; EXPRESSED IN FETAL LIVER, SIGNAL = 6.4; EXPRESSED IN LUNG, SIGNAL = 9.5; EXPRESSED IN PLACENTA, SIGNAL = 6.1; EXPRESSED IN BONE MARROW, SIGNAL = 6.6; EXPRESSED IN HBL100, SIGNAL =  11; EXPRESSED IN ADULT LIVER, SIGNAL = 6.4; EXPRESSED IN BRAIN, SIGNAL =  33; EXPRESSED IN HEART, SIGNAL = 9.5; SWISSPROT HIT: Q95241, EVALUE 4.00e-24; EST_HUMAN HIT: AW815546.1, EVALUE 5.00e-23; EST_HUMAN HIT: BE077194.1, EVALUE 3.00e-23
HFQEKVESLEQEAANERQQLVETHMARVEAMLNDRRRLALENYITALQAVPPR

SEQ ID NO: 33587 - protein, 38 aa, Homo sapiens
  MAP TO AP000141.1; EXPRESSED IN HELA, SIGNAL =  10; EXPRESSED IN BT474, SIGNAL =  12; EXPRESSED IN FETAL LIVER, SIGNAL = 6.4; EXPRESSED IN LUNG, SIGNAL = 9.5; EXPRESSED IN PLACENTA, SIGNAL = 6.1; EXPRESSED IN BONE MARROW, SIGNAL = 6.6; EXPRESSED IN HBL100, SIGNAL =  11; EXPRESSED IN ADULT LIVER, SIGNAL = 6.4; EXPRESSED IN BRAIN, SIGNAL =  33; EXPRESSED IN HEART, SIGNAL = 9.5; EST_HUMAN HIT: AW391307.1, EVALUE 1.00e-12; EST_HUMAN HIT: AW582315.1, EVALUE 2.00e-12; SWISSPROT HIT: P48837, EVALUE 8.10e+00
VFMMAAFPGESGIFGTGSSQRETAAGGDTHGQSGSHAQ

SEQ ID NO: 33588 - protein, 55 aa, Homo sapiens
  MAP TO AP000142.1; EXPRESSED IN BRAIN, SIGNAL = 4.5; EXPRESSED IN BONE MARROW, SIGNAL =   4; EXPRESSED IN ADULT LIVER, SIGNAL = 3.6; EXPRESSED IN PLACENTA, SIGNAL = 4.1; EXPRESSED IN BT474, SIGNAL = 4.6; EXPRESSED IN HBL100, SIGNAL = 5.3; EXPRESSED IN LUNG, SIGNAL =   4; EXPRESSED IN HELA, SIGNAL = 4.7; EXPRESSED IN HEART, SIGNAL = 3.4; EXPRESSED IN FETAL LIVER, SIGNAL = 3.2; EST_HUMAN HIT: AU131304.1, EVALUE 1.00e-29; EST_HUMAN HIT: BE175729.1, EVALUE 9.00e-30; SWISSPROT HIT: P05067, EVALUE 1.00e-30
VCSEQAETGPCRAMISRWYFDVTEGKCAPFFYGGCGGNRNNFDTEEYCMAVCGSA

SEQ ID NO: 33589 - protein, 67 aa, Homo sapiens
  MAP TO AP000142.1; EXPRESSED IN HELA, SIGNAL =  20; EXPRESSED IN BRAIN, SIGNAL =  22; EXPRESSED IN HEART, SIGNAL =  14; EXPRESSED IN BT474, SIGNAL =  15; EXPRESSED IN HBL100, SIGNAL =  16; EXPRESSED IN FETAL LIVER, SIGNAL =  15; EXPRESSED IN ADULT LIVER, SIGNAL =  13; EXPRESSED IN PLACENTA, SIGNAL =  15; EXPRESSED IN BONE MARROW, SIGNAL =  16; EXPRESSED IN LUNG, SIGNAL =  20
EDKVVEVAEEEEVAEVEEEEADDDEDDEDGDEVEEEAEEPYEEATERTTSIATTTTTTTESVEEVVR

SEQ ID NO: 33590 - protein, 64 aa, Homo sapiens
  MAP TO AP000142.1; EXPRESSED IN LUNG, SIGNAL = 4.6; EXPRESSED IN HELA, SIGNAL = 4.5; EXPRESSED IN ADULT LIVER, SIGNAL = 2.9; EXPRESSED IN BRAIN, SIGNAL =  11; EXPRESSED IN HEART, SIGNAL = 2.9; EXPRESSED IN BT474, SIGNAL = 4.5; EXPRESSED IN FETAL LIVER, SIGNAL = 2.8; EXPRESSED IN PLACENTA, SIGNAL = 2.6; EXPRESSED IN HBL100, SIGNAL = 3.9; EXPRESSED IN BONE MARROW, SIGNAL = 1.6; EST_HUMAN HIT: AW369335.1, EVALUE 3.00e-22; SWISSPROT HIT: P08592, EVALUE 5.00e-23
TCSEKSTNLHDYGMLLPCGIDKFRGVEFVCCPLAEESDNVDSADAEEDDSDVWWGGADTDYADG

SEQ ID NO: 33591 - protein, 47 aa, Homo sapiens
  MAP TO AP000143.1; EXPRESSED IN PLACENTA, SIGNAL = 3.3; EXPRESSED IN HEART, SIGNAL = 1.9; EXPRESSED IN BRAIN, SIGNAL = 1.8; EXPRESSED IN ADULT LIVER, SIGNAL =   2; EXPRESSED IN HELA, SIGNAL = 3.1; EXPRESSED IN LUNG, SIGNAL = 2.3; EXPRESSED IN FETAL LIVER, SIGNAL = 2.7; EXPRESSED IN HBL100, SIGNAL = 5.5; EXPRESSED IN BONE MARROW, SIGNAL = 1.8; EXPRESSED IN BT474, SIGNAL = 5.7
KGITILHCSLGSLTVREVISCHVLRHLVLKPGKFLAKYTGSPYLTNQ

SEQ ID NO: 33592 - protein, 42 aa, Homo sapiens
  MAP TO AP000150.1; EXPRESSED IN BONE MARROW, SIGNAL = 0.65; EXPRESSED IN HBL100, SIGNAL = 2.2; EXPRESSED IN LUNG, SIGNAL = 0.94; EXPRESSED IN ADULT LIVER, SIGNAL = 1.9; EXPRESSED IN BRAIN, SIGNAL = 1.2; EXPRESSED IN PLACENTA, SIGNAL = 1.1; EXPRESSED IN BT474, SIGNAL = 2.2; EXPRESSED IN FETAL LIVER, SIGNAL = 1.4; EXPRESSED IN HELA, SIGNAL = 1.3; EXPRESSED IN HEART, SIGNAL = 1.7; EST_HUMAN HIT: BF695531.1, EVALUE 1.00e-07; EST_HUMAN HIT: BE275469.1, EVALUE 9.00e-08
NYAKNQQQKKYQEEAIPALRDISISEVNQMFFLAAKELYTKN

SEQ ID NO: 33593 - protein, 48 aa, Homo sapiens
  MAP TO AP000150.1; EXPRESSED IN BT474, SIGNAL = 1.6; EXPRESSED IN HELA, SIGNAL = 1.1; EXPRESSED IN BRAIN, SIGNAL = 1.6; EXPRESSED IN PLACENTA, SIGNAL = 1.1; EXPRESSED IN HBL100, SIGNAL =   1; EXPRESSED IN FETAL LIVER, SIGNAL = 1.1; EXPRESSED IN LUNG, SIGNAL = 1.2; EXPRESSED IN ADULT LIVER, SIGNAL =   1; EXPRESSED IN BONE MARROW, SIGNAL = 1.5; EXPRESSED IN HEART, SIGNAL = 1.2; SWISSPROT HIT: P53804, EVALUE 3.00e-24; EST_HUMAN HIT: AW805010.1, EVALUE 4.00e-22
MDNFAEGDFTVADYALLEDCPHVDDCVFAAEFMSNDYVRVTQLYCDGV

SEQ ID NO: 33594 - protein, 142 aa, Homo sapiens; identical to SEQ ID NO: 33327
  MAP TO AP000151.1; EXPRESSED IN FETAL LIVER, SIGNAL = 2.2; EXPRESSED IN HELA, SIGNAL = 3.3; EXPRESSED IN ADULT LIVER, SIGNAL = 2.2; EXPRESSED IN BRAIN, SIGNAL = 3.3; EXPRESSED IN BT474, SIGNAL = 5.3; EXPRESSED IN BONE MARROW, SIGNAL = 1.7; EXPRESSED IN LUNG, SIGNAL = 2.2; EXPRESSED IN HEART, SIGNAL = 1.1; EXPRESSED IN PLACENTA, SIGNAL = 1.2; EXPRESSED IN HBL100, SIGNAL = 2.4; EST_HUMAN HIT: AA403192.1, EVALUE 2.00e-76; SWISSPROT HIT: P53804, EVALUE 9.00e-80

SEQ ID NO: 33595 - protein, 17 aa, Homo sapiens
  MAP TO AP000151.1; EXPRESSED IN FETAL LIVER, SIGNAL = 2.2; EXPRESSED IN HELA, SIGNAL = 3.3; EXPRESSED IN ADULT LIVER, SIGNAL = 2.2; EXPRESSED IN BRAIN, SIGNAL = 3.3; EXPRESSED IN BT474, SIGNAL = 5.3; EXPRESSED IN BONE MARROW, SIGNAL = 1.7; EXPRESSED IN LUNG, SIGNAL = 2.2; EXPRESSED IN HEART, SIGNAL = 1.1; EXPRESSED IN PLACENTA, SIGNAL = 1.2; EXPRESSED IN HBL100, SIGNAL = 2.4; EST_HUMAN HIT: AW386743.1, EVALUE 2.00e-03; EST_HUMAN HIT: W19246.1, EVALUE 3.00e-03
RFAPVHQHIYTLGQPFS

SEQ ID NO: 33596 - protein, 72 aa, Homo sapiens
  MAP TO AP000151.1; EXPRESSED IN BONE MARROW, SIGNAL = 4.5; EXPRESSED IN HBL100, SIGNAL =   8; EXPRESSED IN FETAL LIVER, SIGNAL =   6; EXPRESSED IN ADULT LIVER, SIGNAL =   3; EXPRESSED IN BRAIN, SIGNAL = 3.3; EXPRESSED IN PLACENTA, SIGNAL = 3.1; EXPRESSED IN BT474, SIGNAL = 6.5; EXPRESSED IN LUNG, SIGNAL = 3.9; EXPRESSED IN HELA, SIGNAL = 6.1; EXPRESSED IN HEART, SIGNAL = 5.9; EST_HUMAN HIT: BE386363.1, EVALUE 2.00e-22; SWISSPROT HIT: O33395, EVALUE 7.30e+00
KCLKSMNTCLEGRFQMLVPSCSSLEAQLRRSVQATGLEERPALPERLQQEGSEEAGGLSGAEAALPRRARGS

SEQ ID NO: 33597 - protein, 36 aa, Homo sapiens
  MAP TO AP000152.1; EXPRESSED IN PLACENTA, SIGNAL =  11; EXPRESSED IN LUNG, SIGNAL =  14; EXPRESSED IN HELA, SIGNAL =  16; EXPRESSED IN BT474, SIGNAL =  14; EXPRESSED IN HBL100, SIGNAL =  14; EXPRESSED IN FETAL LIVER, SIGNAL =  12; EXPRESSED IN BRAIN, SIGNAL =  16; EXPRESSED IN BONE MARROW, SIGNAL =  20; EXPRESSED IN ADULT LIVER, SIGNAL = 9.6; EXPRESSED IN HEART, SIGNAL =  10; EST_HUMAN HIT: C18939.1, EVALUE 8.00e-09; SWISSPROT HIT: P33191, EVALUE 8.20e+00
MHSHSSGLGWSIGLAVVEQGAALVGEARAAQEPTEA

SEQ ID NO: 33598 - protein, 126 aa, Homo sapiens
  MAP TO AP000160.1; EXPRESSED IN FETAL LIVER, SIGNAL = 7.9; EXPRESSED IN HELA, SIGNAL = 9.3; EXPRESSED IN BRAIN, SIGNAL =  14; EXPRESSED IN PLACENTA, SIGNAL =  10; EXPRESSED IN BT474, SIGNAL =  13; EXPRESSED IN BONE MARROW, SIGNAL =   6; EXPRESSED IN HEART, SIGNAL = 3.8; EXPRESSED IN ADULT LIVER, SIGNAL = 8.6; EXPRESSED IN LUNG, SIGNAL = 8.8; EXPRESSED IN HBL100, SIGNAL = 8.8
YAGIERNLRDESLLTMCLVQRLCHNHSPPTTSLLNTSNAATPITSITTITISTTTTTTMIITTTASQATPSPISPPSPPPTITTTITITITITITAPTPTSITTFTSCSISTIMVTVTSMSIFLPP

SEQ ID NO: 33599 - protein, 101 aa, Homo sapiens
  MAP TO AP000161.1; EXPRESSED IN BT474, SIGNAL = 2.3; EXPRESSED IN HBL100, SIGNAL = 2.3; EXPRESSED IN LUNG, SIGNAL = 1.6; EXPRESSED IN BRAIN, SIGNAL = 1.9; EXPRESSED IN PLACENTA, SIGNAL =   3; EXPRESSED IN BONE MARROW, SIGNAL =   2; EXPRESSED IN FETAL LIVER, SIGNAL = 1.9; EXPRESSED IN HELA, SIGNAL = 2.4; EXPRESSED IN ADULT LIVER, SIGNAL = 3.7; EXPRESSED IN HEART, SIGNAL =   2
KKKKRRKRRKKRKKKEEEEGREEEGGRGGGGGGGSGGGGGGGGGGGGGGGGGGGGGGRRRKKRKEEEERRRKKKEEEEERRRKKKKEEEEHCLVGAIFQAP

SEQ ID NO: 33600 - protein, 74 aa, Homo sapiens
  MAP TO AP000161.1; EXPRESSED IN BRAIN, SIGNAL = 1.5; EXPRESSED IN HBL100, SIGNAL = 1.1; EXPRESSED IN FETAL LIVER, SIGNAL = 1.6; EXPRESSED IN HEART, SIGNAL = 1.4; EXPRESSED IN BT474, SIGNAL = 1.1; EXPRESSED IN BONE MARROW, SIGNAL = 1.5; EXPRESSED IN HELA, SIGNAL = 1.5; EXPRESSED IN ADULT LIVER, SIGNAL = 1.6; EXPRESSED IN PLACENTA, SIGNAL = 1.3; EXPRESSED IN LUNG, SIGNAL = 1.5; EST_HUMAN HIT: R60268.1, EVALUE 9.00e-07; SWISSPROT HIT: O42778, EVALUE 9.10e+00
KKMTTFKPRNAQGYQKPEKRPGTDSSSLLSEGTNPASTLILDFQPQNCVTMNVHYLRHSLSVLCHSNPRELIQE

SEQ ID NO: 33601 - protein, 109 aa, Homo sapiens
  MAP TO AP000161.1; EXPRESSED IN HELA, SIGNAL = 2.2; EXPRESSED IN HEART, SIGNAL = 2.2; EXPRESSED IN PLACENTA, SIGNAL =   2; EXPRESSED IN FETAL LIVER, SIGNAL = 3.8; EXPRESSED IN LUNG, SIGNAL = 2.9; EXPRESSED IN ADULT LIVER, SIGNAL = 2.8; EXPRESSED IN BRAIN, SIGNAL = 2.2; EXPRESSED IN BT474, SIGNAL = 9.7; EXPRESSED IN BONE MARROW, SIGNAL = 5.2; EXPRESSED IN HBL100, SIGNAL = 4.5; EST_HUMAN HIT: AW804759.1, EVALUE 1.00e-50; SWISSPROT HIT: P37512, EVALUE 8.90e-01
KDWMDKCVCLVTAFSQHMHHVPVALPEMVRALSAQQQTLRQITICGDRQAKDTKVLVQCVHPVYIPNMVLILADGDPSSFLSHWLPFLSTLRRQEDQATAYVCENQACS

SEQ ID NO: 33602 - protein, 103 aa, Homo sapiens
  MAP TO AP000162.1; EXPRESSED IN BRAIN, SIGNAL = 6.7; EXPRESSED IN FETAL LIVER, SIGNAL = 6.4; EXPRESSED IN LUNG, SIGNAL =   8; EXPRESSED IN HELA, SIGNAL = 8.2; EXPRESSED IN ADULT LIVER, SIGNAL = 5.7; EXPRESSED IN PLACENTA, SIGNAL = 5.6; EXPRESSED IN BT474, SIGNAL = 5.3; EXPRESSED IN BONE MARROW, SIGNAL = 7.7; EXPRESSED IN HBL100, SIGNAL = 5.4; EXPRESSED IN HEART, SIGNAL = 5.3; EST_HUMAN HIT: BE162586.1, EVALUE 6.00e-55; SWISSPROT HIT: Q99712, EVALUE 6.00e-53
CFQSLAMDAIHIGMSSTPLVKHTAGAGLKANRPRVMSKSGHSNVRIDKVDGIYLLYLQDLWTTVIDMKWRYKLTLFAATFVMTWFLFGVIYYAIAFIHGDLEP

SEQ ID NO: 33603 - protein, 39 aa, Homo sapiens
  MAP TO AP000162.1; EXPRESSED IN BRAIN, SIGNAL = 6.7; EXPRESSED IN FETAL LIVER, SIGNAL = 6.4; EXPRESSED IN LUNG, SIGNAL =   8; EXPRESSED IN HELA, SIGNAL = 8.2; EXPRESSED IN ADULT LIVER, SIGNAL = 5.7; EXPRESSED IN PLACENTA, SIGNAL = 5.6; EXPRESSED IN BT474, SIGNAL = 5.3; EXPRESSED IN BONE MARROW, SIGNAL = 7.7; EXPRESSED IN HBL100, SIGNAL = 5.4; EXPRESSED IN HEART, SIGNAL = 5.3; EST_HUMAN HIT: BF105170.1, EVALUE 1.00e-20; EST_HUMAN HIT: BE162586.1, EVALUE 2.00e-20; SWISSPROT HIT: P28167, EVALUE 8.10e+00
GCHSHRHVQHPPGEAHCWGWAQGQQTPRHVQEWAQQREN

SEQ ID NO: 33604 - protein, 67 aa, Homo sapiens
  MAP TO AP000162.1; EXPRESSED IN BT474, SIGNAL = 0.76; EXPRESSED IN BONE MARROW, SIGNAL = 1.6; EXPRESSED IN LUNG, SIGNAL = 3.8; EXPRESSED IN ADULT LIVER, SIGNAL = 1.1; EXPRESSED IN PLACENTA, SIGNAL = 1.3; EXPRESSED IN HBL100, SIGNAL = 0.83; EXPRESSED IN FETAL LIVER, SIGNAL =   1; EXPRESSED IN HELA, SIGNAL = 0.65; EXPRESSED IN HEART, SIGNAL = 0.91; SWISSPROT HIT: P52950, EVALUE 4.80e-01; EST_HUMAN HIT: BF028418.1, EVALUE 2.00e-35; EST_HUMAN HIT: BE162777.1, EVALUE 1.00e-16
DHQVQPLCSHHQAEWEAVLGDSGSQYEEEPLDSVPALWQAPADPRHQGGGADSPQPSHCQIPRGLLL

SEQ ID NO: 33605 - protein, 67 aa, Homo sapiens
  MAP TO AP000170.1; EXPRESSED IN FETAL LIVER, SIGNAL = 2.4; EXPRESSED IN LUNG, SIGNAL = 2.9; EXPRESSED IN HELA, SIGNAL = 2.6; EXPRESSED IN BRAIN, SIGNAL = 2.7; EXPRESSED IN BT474, SIGNAL = 2.4; EXPRESSED IN ADULT LIVER, SIGNAL = 2.8; EXPRESSED IN PLACENTA, SIGNAL =   3; EXPRESSED IN HEART, SIGNAL = 2.6; EXPRESSED IN HBL100, SIGNAL = 1.8; EXPRESSED IN BONE MARROW, SIGNAL = 2.9; EST_HUMAN HIT: AI003369.1, EVALUE 5.00e-06; SWISSPROT HIT: P35543, EVALUE 2.60e+00
STLHSSRSLKFMVKDVDLMKQICGHGFEKWLSTRGDFALHGSSGNVWAHVLVSMIGGCYWRLVGRGQ

SEQ ID NO: 33606 - protein, 44 aa, Homo sapiens
  MAP TO AP000171.1; EXPRESSED IN PLACENTA, SIGNAL =  16; EXPRESSED IN HELA, SIGNAL =  11; EXPRESSED IN FETAL LIVER, SIGNAL =  12; EXPRESSED IN BT474, SIGNAL =  11; EXPRESSED IN BONE MARROW, SIGNAL =  18; EXPRESSED IN HBL100, SIGNAL =  11; EXPRESSED IN LUNG, SIGNAL =  13; EXPRESSED IN ADULT LIVER, SIGNAL = 8.8; EXPRESSED IN BRAIN, SIGNAL =  13; EXPRESSED IN HEART, SIGNAL = 9.4; EST_HUMAN HIT: AW816405.1, EVALUE 4.00e-19; SWISSPROT HIT: Q9Y696, EVALUE 2.00e-14
NSPLPDEIDAYSTEDVTVSGRKFLDGDELTLADCNLLPKLHIIK

SEQ ID NO: 33607 - protein, 36 aa, Homo sapiens
  MAP TO AP000171.1; EXPRESSED IN PLACENTA, SIGNAL = 2.9; EXPRESSED IN HBL100, SIGNAL = 2.8; EXPRESSED IN LUNG, SIGNAL = 2.9; EXPRESSED IN HELA, SIGNAL = 2.4; EXPRESSED IN BRAIN, SIGNAL =   3; EXPRESSED IN BT474, SIGNAL = 2.6; EXPRESSED IN BONE MARROW, SIGNAL = 3.1; EXPRESSED IN FETAL LIVER, SIGNAL = 2.7; EXPRESSED IN ADULT LIVER, SIGNAL = 2.2; EXPRESSED IN HEART, SIGNAL = 2.9; EST_HUMAN HIT: AW816405.1, EVALUE 2.00e-15; SWISSPROT HIT: Q9Y696, EVALUE 3.00e-12
IWRYLNNAYARDEFTNTCPADQEIEHAYSDVAKRMK

SEQ ID NO: 33608 - protein, 31 aa, Homo sapiens
  MAP TO AP000171.1; EXPRESSED IN BT474, SIGNAL =  24; EXPRESSED IN HELA, SIGNAL =  28; EXPRESSED IN PLACENTA, SIGNAL =  30; EXPRESSED IN BONE MARROW, SIGNAL =  25; EXPRESSED IN FETAL LIVER, SIGNAL =  28; EXPRESSED IN LUNG, SIGNAL =  31; EXPRESSED IN ADULT LIVER, SIGNAL =  25; EXPRESSED IN BRAIN, SIGNAL =  44; EXPRESSED IN HBL100, SIGNAL =  24; EXPRESSED IN HEART, SIGNAL =  29
ILICVRNTEAVQKFKFEPNAEFKGVAPKNIR

SEQ ID NO: 33609 - protein, 55 aa, Homo sapiens
  MAP TO AP000182.1; EXPRESSED IN HEART, SIGNAL = 2.9; EXPRESSED IN FETAL LIVER, SIGNAL = 3.3; EXPRESSED IN ADULT LIVER, SIGNAL = 3.3; EXPRESSED IN BRAIN, SIGNAL = 3.8; EXPRESSED IN BONE MARROW, SIGNAL = 4.4; EXPRESSED IN LUNG, SIGNAL = 4.8; EXPRESSED IN HELA, SIGNAL = 4.6; EXPRESSED IN PLACENTA, SIGNAL = 3.1; EXPRESSED IN BT474, SIGNAL =   3; EXPRESSED IN HBL100, SIGNAL = 3.2; EST_HUMAN HIT: AA758234.1, EVALUE 3.00e-10; SWISSPROT HIT: O43426, EVALUE 3.00e-23
AGKLKDGARSVTRTIQNNFFDSSKQEAIDVLLLGNTLNSDLADKARALLTTGSLR

SEQ ID NO: 33610 - protein, 62 aa, Homo sapiens
  MAP TO AP000182.1; EXPRESSED IN BONE MARROW, SIGNAL = 0.99; EXPRESSED IN HBL100, SIGNAL = 1.1; EXPRESSED IN ADULT LIVER, SIGNAL = 1.1; EXPRESSED IN BRAIN, SIGNAL = 1.4; EXPRESSED IN PLACENTA, SIGNAL = 0.97; EXPRESSED IN BT474, SIGNAL = 0.77; EXPRESSED IN FETAL LIVER, SIGNAL = 0.77; EXPRESSED IN LUNG, SIGNAL = 0.93; EXPRESSED IN HELA, SIGNAL = 0.7; EXPRESSED IN HEART, SIGNAL = 1.3; EST_HUMAN HIT: AI827156.1, EVALUE 6.00e-11; SWISSPROT HIT: O43426, EVALUE 3.00e-29
TGCMSVGKIQESEVFRVTSTEFISLRIDSSDEDRISEVRKVLNSGNFYFAWSASGISLDLSL

SEQ ID NO: 33611 - protein, 72 aa, Homo sapiens
  MAP TO AP000182.1; EXPRESSED IN HELA, SIGNAL = 1.8; EXPRESSED IN PLACENTA, SIGNAL =   2; EXPRESSED IN BT474, SIGNAL = 2.5; EXPRESSED IN HBL100, SIGNAL = 2.4; EXPRESSED IN FETAL LIVER, SIGNAL = 1.6; EXPRESSED IN LUNG, SIGNAL = 2.6; EXPRESSED IN BRAIN, SIGNAL = 1.9; EXPRESSED IN BONE MARROW, SIGNAL = 2.8; EXPRESSED IN ADULT LIVER, SIGNAL = 1.9; EXPRESSED IN HEART, SIGNAL = 1.9; EST_HUMAN HIT: BF215569.1, EVALUE 3.00e-27
VQASQPAEVNMYYQNTYQTMPYGSSYGIPYSYTAYGSSDAKSQKTDNTVPFKTPSNEMTPVTIDLVKKQLKD

SEQ ID NO: 33612 - protein, 29 aa, Homo sapiens
  MAP TO AP000182.1; EXPRESSED IN HELA, SIGNAL = 1.8; EXPRESSED IN PLACENTA, SIGNAL =   2; EXPRESSED IN BT474, SIGNAL = 2.5; EXPRESSED IN HBL100, SIGNAL = 2.4; EXPRESSED IN FETAL LIVER, SIGNAL = 1.6; EXPRESSED IN LUNG, SIGNAL = 2.6; EXPRESSED IN BRAIN, SIGNAL = 1.9; EXPRESSED IN BONE MARROW, SIGNAL = 2.8; EXPRESSED IN ADULT LIVER, SIGNAL = 1.9; EXPRESSED IN HEART, SIGNAL = 1.9; EST_HUMAN HIT: BF215569.1, EVALUE 8.00e-10
SSQSTRRSEYVLPEHLPDNALRLILWHSL

SEQ ID NO: 33613 - protein, 246 aa, Homo sapiens
  MAP TO AP000190.1; EXPRESSED IN PLACENTA, SIGNAL = 5.2; EXPRESSED IN BONE MARROW, SIGNAL = 3.7; EXPRESSED IN HBL100, SIGNAL = 5.2; EXPRESSED IN FETAL LIVER, SIGNAL = 8.1; EXPRESSED IN LUNG, SIGNAL = 5.4; EXPRESSED IN HELA, SIGNAL = 3.6; EXPRESSED IN ADULT LIVER, SIGNAL = 3.1; EXPRESSED IN BRAIN, SIGNAL =   5; EXPRESSED IN BT474, SIGNAL =  14; EXPRESSED IN HEART, SIGNAL =   4; EST_HUMAN HIT: BE256886.1, EVALUE 3.00e-24; SWISSPROT HIT: P18583, EVALUE 7.00e-59; EST_HUMAN HIT: BE614046.1, EVALUE 1.00e-35
RSMMSPMAERSMMSAYERSMMSAYERSMMSPMADRSMMSMGADRSMMSSYSAADRSMMSSYSAADRSMMSSYTADRSMMSMAADSYTDSYTDTYTEAYMVPPLPPEEPPTMPPLPPEEPPMTPPLPPEEPPEGPALPTEQSALTAENTWPTEVPSSPSEESVSQPEPPVSQSEISEPSAVPTDYSVSASDPSVLVSEAAVTVPEPPPEPESSITLTPVESAVVAEEHEVVPERPVTCMVSETPAMS

SEQ ID NO: 33614 - protein, 361 aa, Homo sapiens
  MAP TO AP000190.1; EXPRESSED IN PLACENTA, SIGNAL = 4.3; EXPRESSED IN BT474, SIGNAL = 7.1; EXPRESSED IN LUNG, SIGNAL =   4; EXPRESSED IN HELA, SIGNAL = 3.8; EXPRESSED IN BRAIN, SIGNAL = 4.6; EXPRESSED IN BONE MARROW, SIGNAL =  15; EXPRESSED IN HBL100, SIGNAL =   5; EXPRESSED IN FETAL LIVER, SIGNAL = 4.4; EXPRESSED IN ADULT LIVER, SIGNAL = 3.1; EXPRESSED IN HEART, SIGNAL = 3.1; EST_HUMAN HIT: AW502403.1, EVALUE 5.00e-42; SWISSPROT HIT: P18583, EVALUE 8.00e-43
AALLSPKESSGGEKEVPPPPKETLPDSGFSANIEDINEADLVRPLLPKDMERLTSLRAGIEGPLLASDVGRDRSAASPVVSSMPERASESSSEEKDDYEIFVKVKDTHEKSKKNKNRDKGEKEKKRDSSLRSRSKRSKSSEHKSRKRTSESRSRARKRSSKSKSHRSQTRSRSRSRRRRRSSRSRSKSRGRRSVSKEKRKRSPKHRSKSRERKRKRSSSRDNRKTVRARSRTPSRRSRSHTPSRRRRSRSVGRRRSFSISPSRRSRTPSRRSRTPSRRSRTPSRRSRTPSRRSRTPSRRSRTPSRRRRSRSVVRRRSFSISPVRLRRSRTPLRRRFSRSPIRRKRSRSSERGRSPKRLTDL

SEQ ID NO: 33615 - protein, 83 aa, Homo sapiens
  MAP TO AP000190.1; EXPRESSED IN LUNG, SIGNAL = 0.63; EXPRESSED IN HEART, SIGNAL =   2; EXPRESSED IN BT474, SIGNAL = 0.93; EXPRESSED IN BONE MARROW, SIGNAL = 0.8; EXPRESSED IN HBL100, SIGNAL =   2; EXPRESSED IN FETAL LIVER, SIGNAL = 0.99; EXPRESSED IN HELA, SIGNAL = 0.88; EXPRESSED IN ADULT LIVER, SIGNAL = 0.76; EST_HUMAN HIT: AU131027.1, EVALUE 1.00e-42; EST_HUMAN HIT: AI363299.1, EVALUE 3.00e-31; SWISSPROT HIT: P22102, EVALUE 1.00e-43
GETAEMPDMYPPGEYDLAGFAVGAMERDQKLPHLERITEGDVVVGIASSGLHSNGFSLVRKIVAKSSLQYSSPAPDGCGDQTL

SEQ ID NO: 33616 - protein, 91 aa, Homo sapiens
  MAP TO AP000190.1; EXPRESSED IN PLACENTA, SIGNAL =  20; EXPRESSED IN LUNG, SIGNAL =  18; EXPRESSED IN HEART, SIGNAL =  13; EXPRESSED IN BT474, SIGNAL =  17; EXPRESSED IN BONE MARROW, SIGNAL =  23; EXPRESSED IN HBL100, SIGNAL =  21; EXPRESSED IN FETAL LIVER, SIGNAL =  19; EXPRESSED IN HELA, SIGNAL =  22; EXPRESSED IN ADULT LIVER, SIGNAL =  13; EXPRESSED IN BRAIN, SIGNAL =  19; SWISSPROT HIT: P18583, EVALUE 4.00e-14; EST_HUMAN HIT: BF339176.1, EVALUE 2.00e-13; EST_HUMAN HIT: AL135124.1, EVALUE 1.00e-13
ETAETFDSMRASGHVASEVSTSLLVPAVTTPVLAESILEPPAMAAPESSAMAVLESSAVTVLESSTVTVLESSTVTVLEPSVVTVPEPPVV

SEQ ID NO: 33617 - protein, 62 aa, Homo sapiens
  MAP TO AP000191.1; EXPRESSED IN PLACENTA, SIGNAL = 2.2; EXPRESSED IN LUNG, SIGNAL = 2.7; EXPRESSED IN HELA, SIGNAL = 2.2; EXPRESSED IN ADULT LIVER, SIGNAL = 2.4; EXPRESSED IN BT474, SIGNAL = 2.5; EXPRESSED IN BONE MARROW, SIGNAL = 2.6; EXPRESSED IN HBL100, SIGNAL = 2.4; EXPRESSED IN FETAL LIVER, SIGNAL = 2.2; EXPRESSED IN BRAIN, SIGNAL = 3.3; EXPRESSED IN HEART, SIGNAL =   3; EST_HUMAN HIT: AW898470.1, EVALUE 3.90e+00; EST_HUMAN HIT: BE783852.1, EVALUE 4.50e+00; SWISSPROT HIT: P34498, EVALUE 4.40e+00
EHDGRCSSETGCHGVLDSLASPTPPFRSDERPDQWEQGAGSLTKDWKVAVVKVQAVGAAQRQ

SEQ ID NO: 33618 - protein, 59 aa, Homo sapiens
  MAP TO AP000192.1; EXPRESSED IN FETAL LIVER, SIGNAL = 1.6; EXPRESSED IN LUNG, SIGNAL = 1.8; EXPRESSED IN HELA, SIGNAL = 1.6; EXPRESSED IN ADULT LIVER, SIGNAL =   2; EXPRESSED IN BRAIN, SIGNAL = 1.9; EXPRESSED IN BONE MARROW, SIGNAL = 1.4; EXPRESSED IN PLACENTA, SIGNAL = 1.5; EXPRESSED IN BT474, SIGNAL = 1.3; EXPRESSED IN HEART, SIGNAL = 1.5; EXPRESSED IN HBL100, SIGNAL = 1.2; EST_HUMAN HIT: AI580905.1, EVALUE 5.00e-28; SWISSPROT HIT: Q50360, EVALUE 2.00e-02
MGGIASMPPLTAVAPVPMGSIPVVGMSPTLVSSVPTAAVPPLANGAPPVIQPLPAFAHP

SEQ ID NO: 33619 - protein, 66 aa, Homo sapiens
  MAP TO AP000193.1; EXPRESSED IN BT474, SIGNAL = 1.7; EXPRESSED IN BONE MARROW, SIGNAL = 1.5; EXPRESSED IN HBL100, SIGNAL = 1.6; EXPRESSED IN FETAL LIVER, SIGNAL = 2.5; EXPRESSED IN LUNG, SIGNAL = 1.2; EXPRESSED IN ADULT LIVER, SIGNAL = 2.3; EXPRESSED IN BRAIN, SIGNAL = 1.3; EXPRESSED IN PLACENTA, SIGNAL = 1.7; EXPRESSED IN HELA, SIGNAL = 1.2; EXPRESSED IN HEART, SIGNAL = 1.4; EST_HUMAN HIT: AI632369.1, EVALUE 3.00e-04; EST_HUMAN HIT: AI671143.1, EVALUE 4.00e-05; SWISSPROT HIT: P04843, EVALUE 2.50e+00
AAKRELERQRQLEWERNRRQELLNQRNKEQEDIVVLKAKKKTLEFELEALVSEVWLYFENILRWNH

SEQ ID NO: 33620 - protein, 90 aa, Homo sapiens
  MAP TO AP000193.1; EXPRESSED IN HBL100, SIGNAL = 2.2; EXPRESSED IN HELA, SIGNAL = 1.6; EXPRESSED IN BRAIN, SIGNAL = 2.3; EXPRESSED IN PLACENTA, SIGNAL = 1.6; EXPRESSED IN BT474, SIGNAL =   2; EXPRESSED IN BONE MARROW, SIGNAL = 1.8; EXPRESSED IN FETAL LIVER, SIGNAL = 3.2; EXPRESSED IN LUNG, SIGNAL = 1.6; EXPRESSED IN ADULT LIVER, SIGNAL = 2.7; EXPRESSED IN HEART, SIGNAL = 2.2; EST_HUMAN HIT: AA773823.1, EVALUE 2.00e-37; SWISSPROT HIT: Q15811, EVALUE 2.00e-45
VDESQTGEPGWLGGELKGKTGWFPANYAEKIPENEVPAPVKPVTDSTSAPAPKLALRETPAPLAVTSSEPSTTPNNWADFSSTYVLVGSF

SEQ ID NO: 33621 - protein, 66 aa, Homo sapiens
  MAP TO AP000193.1; EXPRESSED IN BRAIN, SIGNAL = 1.6; EXPRESSED IN HBL100, SIGNAL = 1.2; EXPRESSED IN FETAL LIVER, SIGNAL = 1.5; EXPRESSED IN LUNG, SIGNAL = 1.5; EXPRESSED IN HEART, SIGNAL = 1.5; EXPRESSED IN PLACENTA, SIGNAL = 1.5; EXPRESSED IN BT474, SIGNAL = 1.1; EXPRESSED IN BONE MARROW, SIGNAL = 1.5; EXPRESSED IN HELA, SIGNAL = 1.5; EXPRESSED IN ADULT LIVER, SIGNAL = 1.5; SWISSPROT HIT: P52374, EVALUE 1.90e+00; EST_HUMAN HIT: H54945.1, EVALUE 2.00e-09
ALRVRKKMSGEKMPVKMIGDILSAQLPHMQPYIRFCSRQLNGAALIQQKTDEAPDFKEFVKVRSQA

SEQ ID NO: 33622 - protein, 69 aa, Homo sapiens
  MAP TO AP000201.1; EXPRESSED IN BT474, SIGNAL = 1.9; EXPRESSED IN BONE MARROW, SIGNAL = 1.9; EXPRESSED IN FETAL LIVER, SIGNAL =   2; EXPRESSED IN LUNG, SIGNAL =   2; EXPRESSED IN ADULT LIVER, SIGNAL = 1.3; EXPRESSED IN BRAIN, SIGNAL = 1.2; EXPRESSED IN HEART, SIGNAL = 1.4; EXPRESSED IN PLACENTA, SIGNAL = 2.2; EXPRESSED IN HBL100, SIGNAL = 1.8; EXPRESSED IN HELA, SIGNAL = 1.5; EST_HUMAN HIT: AA789199.1, EVALUE 1.00e-22; SWISSPROT HIT: O14867, EVALUE 1.00e-34
VKLPFNAQRIISLSRNDFQSLLKMHKLTPEQLDCIHDIRRRSKNRIAAQRCRKRKLDCIQNLESEIEKL

SEQ ID NO: 33623 - protein, 78 aa, Homo sapiens
  MAP TO AP000201.1; EXPRESSED IN HBL100, SIGNAL =   1; EXPRESSED IN LUNG, SIGNAL = 1.2; EXPRESSED IN BRAIN, SIGNAL = 0.83; EXPRESSED IN PLACENTA, SIGNAL = 1.8; EXPRESSED IN BT474, SIGNAL = 1.3; EXPRESSED IN BONE MARROW, SIGNAL = 0.96; EXPRESSED IN FETAL LIVER, SIGNAL = 1.8; EXPRESSED IN HELA, SIGNAL = 1.1; EXPRESSED IN ADULT LIVER, SIGNAL =  26; EXPRESSED IN HEART, SIGNAL =   1; EST_HUMAN HIT: AA402241.1, EVALUE 9.00e-34; SWISSPROT HIT: O14867, EVALUE 3.00e-39
MSLSENSVFAYESSVHSTNVLLSLNDQRKKDVLCDVTIFVEGQRFRAHRSVLAACSSYFHSRIVGQADGELNITLPEE

SEQ ID NO: 33624 - protein, 60 aa, Homo sapiens; identical to SEQ ID NO: 33554
  MAP TO AP000213.1; EXPRESSED IN HBL100, SIGNAL = 3.2; EXPRESSED IN FETAL LIVER, SIGNAL = 2.9; EXPRESSED IN PLACENTA, SIGNAL = 3.6; EXPRESSED IN BT474, SIGNAL = 2.2; EXPRESSED IN LUNG, SIGNAL =  41; EXPRESSED IN ADULT LIVER, SIGNAL = 2.9; EXPRESSED IN BRAIN, SIGNAL = 2.7; EXPRESSED IN HEART, SIGNAL = 2.7; EXPRESSED IN BONE MARROW, SIGNAL = 3.1; EXPRESSED IN HELA, SIGNAL = 2.9; EST_HUMAN HIT: L25488.1, EVALUE 3.00e+00; SWISSPROT HIT: O95104, EVALUE 9.00e-07

SEQ ID NO: 33625 - protein, 34 aa, Homo sapiens
  MAP TO AP000085.1; EXPRESSED IN BRAIN, SIGNAL = 2.3; EXPRESSED IN HEART, SIGNAL = 2.2; EXPRESSED IN BT474, SIGNAL = 1.7; EXPRESSED IN BONE MARROW, SIGNAL = 2.1; EXPRESSED IN HBL100, SIGNAL = 1.9; EXPRESSED IN HELA, SIGNAL = 2.1; EXPRESSED IN ADULT LIVER, SIGNAL = 1.7; EXPRESSED IN PLACENTA, SIGNAL = 1.8; EXPRESSED IN FETAL LIVER, SIGNAL = 1.8; EXPRESSED IN LUNG, SIGNAL = 2.3
LILWNKQKQDDSQLESDCRDSLPQHPDLTLAQRK

SEQ ID NO: 33626 - protein, 35 aa, Homo sapiens
  MAP TO AP000223.1; EXPRESSED IN LUNG, SIGNAL = 2.9; EXPRESSED IN HELA, SIGNAL = 5.2; EXPRESSED IN ADULT LIVER, SIGNAL = 2.2; EXPRESSED IN BRAIN, SIGNAL = 3.1; EXPRESSED IN HEART, SIGNAL = 2.7; EXPRESSED IN PLACENTA, SIGNAL = 2.3; EXPRESSED IN BT474, SIGNAL = 1.7; EXPRESSED IN BONE MARROW, SIGNAL = 2.5; EXPRESSED IN HBL100, SIGNAL = 2.3; EXPRESSED IN FETAL LIVER, SIGNAL = 2.3
LILWNKQKQDDSQLESDCRDSLPQHPDLTLAQRKV

SEQ ID NO: 33627 - protein, 25 aa, Homo sapiens
  MAP TO AP000223.1; EXPRESSED IN LUNG, SIGNAL = 2.9; EXPRESSED IN HELA, SIGNAL = 5.2; EXPRESSED IN ADULT LIVER, SIGNAL = 2.2; EXPRESSED IN BRAIN, SIGNAL = 3.1; EXPRESSED IN HEART, SIGNAL = 2.7; EXPRESSED IN PLACENTA, SIGNAL = 2.3; EXPRESSED IN BT474, SIGNAL = 1.7; EXPRESSED IN BONE MARROW, SIGNAL = 2.5; EXPRESSED IN HBL100, SIGNAL = 2.3; EXPRESSED IN FETAL LIVER, SIGNAL = 2.3
VLRKRVPAVRLQLAVVLLLLIPQNE

SEQ ID NO: 33628 - protein, 98 aa, Homo sapiens
  MAP TO AP000230.1; EXPRESSED IN LUNG, SIGNAL =  11; EXPRESSED IN BT474, SIGNAL =  13; EXPRESSED IN HBL100, SIGNAL = 9.4; EXPRESSED IN FETAL LIVER, SIGNAL =  10; EXPRESSED IN BRAIN, SIGNAL = 9.4; EXPRESSED IN PLACENTA, SIGNAL =  14; EXPRESSED IN BONE MARROW, SIGNAL =  13; EXPRESSED IN HELA, SIGNAL = 9.3; EXPRESSED IN ADULT LIVER, SIGNAL = 8.4; EXPRESSED IN HEART, SIGNAL = 6.7; EST_HUMAN HIT: BE390947.1, EVALUE 3.00e-36; SWISSPROT HIT: P45604, EVALUE 5.00e+00
MAERGQHRARIVASEGASCKPWQLPCGVEPASAQKSKIGVWEPLPRFQKMYGNAWMPWQKSAVGEGPSWRISARAVQKGNVGSEPQHRIPTGAPPSGA

SEQ ID NO: 33629 - protein, 24 aa, Homo sapiens
  MAP TO AP000241.1; EXPRESSED IN HELA, SIGNAL = 1.1; EXPRESSED IN ADULT LIVER, SIGNAL = 0.7; EXPRESSED IN HEART, SIGNAL = 0.9; EXPRESSED IN BT474, SIGNAL = 1.9; EXPRESSED IN BONE MARROW, SIGNAL = 2.8; EXPRESSED IN FETAL LIVER, SIGNAL = 1.6; EXPRESSED IN LUNG, SIGNAL = 1.1; EXPRESSED IN PLACENTA, SIGNAL = 1.2; EXPRESSED IN HBL100, SIGNAL = 2.9
LGDDSETDTEGDSESCSAREQECE

SEQ ID NO: 33630 - protein, 156 aa, Homo sapiens
  MAP TO AP000241.1; EXPRESSED IN HELA, SIGNAL = 1.1; EXPRESSED IN ADULT LIVER, SIGNAL = 0.7; EXPRESSED IN HEART, SIGNAL = 0.9; EXPRESSED IN BT474, SIGNAL = 1.9; EXPRESSED IN BONE MARROW, SIGNAL = 2.8; EXPRESSED IN FETAL LIVER, SIGNAL = 1.6; EXPRESSED IN LUNG, SIGNAL = 1.1; EXPRESSED IN PLACENTA, SIGNAL = 1.2; EXPRESSED IN HBL100, SIGNAL = 2.9; EST_HUMAN HIT: AI652927.1, EVALUE 9.00e-25; SWISSPROT HIT: O14867, EVALUE 2.00e-89; EST_HUMAN HIT: AU134963.1, EVALUE 1.00e-69
NVDEVCKCVEFLSVHNIEESCFQFLKFKFLDSTADQQECPRKKCFSSHCQKTDLKLSLLDQRDLETDEVEEFLENKNVQTPQCKLRRYQGNAKASPPLQDSASQTYESMCLEKDAALALPSLCPKYRKFQKAFGTDRVRTGESSVKDIHASVQPNE

SEQ ID NO: 33631 - protein, 218 aa, Homo sapiens
  MAP TO AP000260.1; EXPRESSED IN BT474, SIGNAL = 3.2; EXPRESSED IN HELA, SIGNAL = 3.8; EXPRESSED IN ADULT LIVER, SIGNAL = 3.3; EXPRESSED IN BRAIN, SIGNAL =   5; EXPRESSED IN PLACENTA, SIGNAL = 4.1; EXPRESSED IN BONE MARROW, SIGNAL = 4.9; EXPRESSED IN HBL100, SIGNAL = 3.8; EXPRESSED IN FETAL LIVER, SIGNAL = 3.8; EXPRESSED IN LUNG, SIGNAL = 5.4; EXPRESSED IN HEART, SIGNAL = 4.2; EST_HUMAN HIT: AA368352.1, EVALUE 3.00e-25; SWISSPROT HIT: P08461, EVALUE 1.00e+00; EST_HUMAN HIT: BF529471.1, EVALUE 2.00e-87
SFGCRNIFRKTSDSNCVASSSMEFIPVPPPRTPRIVKKPEPHQPGPGSTGIPHKEDPLMLDMVRSFESVDRDDHVEVLSPSHHYRILNSPVSLARRNSSERTLSPGLPSGSMSPLHTPLHPTLVSFAHEDKNSPPKEEGLCCPPPVPSNGPMQPLGSPNCVKSRGRFPMMGIGQMLRKRHQSLQPSADRPLEASLPPLQPLAPVNLAFDMADGVKTQC

SEQ ID NO: 33632 - protein, 105 aa, Homo sapiens
  MAP TO AP000263.1; EXPRESSED IN PLACENTA, SIGNAL = 1.2; EXPRESSED IN LUNG, SIGNAL = 1.5; EXPRESSED IN HELA, SIGNAL = 1.4; EXPRESSED IN ADULT LIVER, SIGNAL = 1.2; EXPRESSED IN BRAIN, SIGNAL = 1.5; EXPRESSED IN HEART, SIGNAL = 1.4; EXPRESSED IN BT474, SIGNAL = 1.2; EXPRESSED IN BONE MARROW, SIGNAL = 1.1; EXPRESSED IN HBL100, SIGNAL = 1.1; EXPRESSED IN FETAL LIVER, SIGNAL = 1.2; EST_HUMAN HIT: AW063720.1, EVALUE 6.90e+00; EST_HUMAN HIT: BE544540.1, EVALUE 1.60e+00; SWISSPROT HIT: P33515, EVALUE 3.20e+00
WLYPHIQSQALGRAGDKEHVIWGNLALSEIITVNSLLAVSEFRLILILVFNEHPEVFLMSPLHSDEIAFSVLGGRVVQSMGVELRDVHSTPGFTLKSSVRWNELF

SEQ ID NO: 33633 - protein, 44 aa, Homo sapiens
  MAP TO AP000184.1; EXPRESSED IN ADULT LIVER, SIGNAL = 2.1; EXPRESSED IN BONE MARROW, SIGNAL = 3.1; EXPRESSED IN BRAIN, SIGNAL = 1.8; EXPRESSED IN PLACENTA, SIGNAL = 3.8; EXPRESSED IN BT474, SIGNAL = 3.3; EXPRESSED IN LUNG, SIGNAL = 3.2; EXPRESSED IN HELA, SIGNAL =   3; EXPRESSED IN HEART, SIGNAL = 2.9; EXPRESSED IN HBL100, SIGNAL = 2.8; EXPRESSED IN FETAL LIVER, SIGNAL = 4.6; EST_HUMAN HIT: BE041369.1, EVALUE 6.00e-07; EST_HUMAN HIT: AA191596.1, EVALUE 8.00e-07
VLPEEIDIEVGGLGEENPPFMWVGTIQSAASKARAEQTQKEKVQ

SEQ ID NO: 33634 - protein, 44 aa, Homo sapiens; identical to SEQ ID NO: 33633
  MAP TO AP000282.1; EXPRESSED IN PLACENTA, SIGNAL = 1.8; EXPRESSED IN BT474, SIGNAL = 2.7; EXPRESSED IN BONE MARROW, SIGNAL = 2.4; EXPRESSED IN ADULT LIVER, SIGNAL = 2.2; EXPRESSED IN HELA, SIGNAL = 3.1; EXPRESSED IN LUNG, SIGNAL = 4.2; EXPRESSED IN FETAL LIVER, SIGNAL = 2.1; EXPRESSED IN HBL100, SIGNAL = 2.8; EXPRESSED IN HEART, SIGNAL = 2.8; EXPRESSED IN BRAIN, SIGNAL =   3; EST_HUMAN HIT: BE041369.1, EVALUE 6.00e-07; EST_HUMAN HIT: AA191596.1, EVALUE 8.00e-07

SEQ ID NO: 33635 - protein, 99 aa, Homo sapiens
  MAP TO AP000311.1; EXPRESSED IN HEART, SIGNAL = 2.2; EXPRESSED IN HBL100, SIGNAL = 3.2; EXPRESSED IN FETAL LIVER, SIGNAL =   3; EXPRESSED IN BRAIN, SIGNAL = 2.6; EXPRESSED IN PLACENTA, SIGNAL = 2.3; EXPRESSED IN BT474, SIGNAL = 2.2; EXPRESSED IN BONE MARROW, SIGNAL = 3.4; EXPRESSED IN HELA, SIGNAL = 3.7; EXPRESSED IN ADULT LIVER, SIGNAL =   3; EXPRESSED IN LUNG, SIGNAL = 2.2; SWISSPROT HIT: O35601, EVALUE 2.80e-01; EST_HUMAN HIT: AA815076.1, EVALUE 1.00e-08
TFEDKKRENFERGNLELEKRRQALLEQQRKEQERLAQLERAEQERKERERQEQERKRQLELEKQLEKQRELERQREEERRKEIERREVSRREWSHPELV

SEQ ID NO: 33636 - protein, 47 aa, Homo sapiens
  MAP TO AP000330.1; EXPRESSED IN BONE MARROW, SIGNAL = 3.9; EXPRESSED IN FETAL LIVER, SIGNAL = 4.1; EXPRESSED IN ADULT LIVER, SIGNAL = 3.4; EXPRESSED IN PLACENTA, SIGNAL = 3.7; EXPRESSED IN BT474, SIGNAL = 3.2; EXPRESSED IN HBL100, SIGNAL = 4.2; EXPRESSED IN LUNG, SIGNAL = 5.2; EXPRESSED IN HELA, SIGNAL = 3.6; EXPRESSED IN BRAIN, SIGNAL =   5; EXPRESSED IN HEART, SIGNAL = 3.6; EST_HUMAN HIT: AW816405.1, EVALUE 4.00e-21; SWISSPROT HIT: Q9Y696, EVALUE 9.00e-16
NYLNSPLPDEIDAYSTEDVTVSGRKFLDGDELTLADCNLLPKLHIIK

SEQ ID NO: 33637 - protein, 39 aa, Homo sapiens
  MAP TO AP000330.1; EXPRESSED IN PLACENTA, SIGNAL = 2.3; EXPRESSED IN LUNG, SIGNAL = 2.6; EXPRESSED IN HEART, SIGNAL = 2.1; EXPRESSED IN HBL100, SIGNAL = 1.8; EXPRESSED IN FETAL LIVER, SIGNAL = 1.9; EXPRESSED IN HELA, SIGNAL = 2.1; EXPRESSED IN BRAIN, SIGNAL = 2.6; EXPRESSED IN BT474, SIGNAL = 2.1; EXPRESSED IN BONE MARROW, SIGNAL = 2.4; EXPRESSED IN ADULT LIVER, SIGNAL = 2.3; EST_HUMAN HIT: AW816405.1, EVALUE 2.00e-17; SWISSPROT HIT: Q9Y696, EVALUE 4.00e-14
MTGIWRYLNNAYARDEFTNTCPADQEIEHAYSDVAKRMK

SEQ ID NO: 33638 - protein, 31 aa, Homo sapiens; identical to SEQ ID NO: 33608
  MAP TO AP000330.1; EXPRESSED IN HBL100, SIGNAL =  22; EXPRESSED IN ADULT LIVER, SIGNAL =  26; EXPRESSED IN BT474, SIGNAL =  17; EXPRESSED IN BONE MARROW, SIGNAL =  28; EXPRESSED IN HELA, SIGNAL =  21; EXPRESSED IN BRAIN, SIGNAL =  21; EXPRESSED IN HEART, SIGNAL =  20; EXPRESSED IN PLACENTA, SIGNAL =  25; EXPRESSED IN FETAL LIVER, SIGNAL =  27; EXPRESSED IN LUNG, SIGNAL =  33

SEQ ID NO: 33639 - protein, 75 aa, Homo sapiens
  MAP TO AP000341.1; EXPRESSED IN PLACENTA, SIGNAL = 4.6; EXPRESSED IN BONE MARROW, SIGNAL = 5.2; EXPRESSED IN ADULT LIVER, SIGNAL = 3.2; EXPRESSED IN BRAIN, SIGNAL = 4.3; EXPRESSED IN BT474, SIGNAL = 5.2; EXPRESSED IN HBL100, SIGNAL = 4.6; EXPRESSED IN FETAL LIVER, SIGNAL = 4.4; EXPRESSED IN LUNG, SIGNAL = 4.9; EXPRESSED IN HELA, SIGNAL = 3.8; EXPRESSED IN HEART, SIGNAL = 3.2; EST_HUMAN HIT: BE735833.1, EVALUE 5.80e-02; EST_HUMAN HIT: BE265978.1, EVALUE 5.80e-01; SWISSPROT HIT: P81270, EVALUE 1.80e+00
FLAAAGVSASGVGWLSAGAPKLARRGACSPPPEAESRRGHSRAAPKWLLASPVPAGELEPYAVPGVTSWPLATSY

SEQ ID NO: 33640 - protein, 48 aa, Homo sapiens; identical to SEQ ID NO: 33593
  MAP TO D83253.1; EXPRESSED IN PLACENTA, SIGNAL = 3.2; EXPRESSED IN FETAL LIVER, SIGNAL = 2.1; EXPRESSED IN LUNG, SIGNAL = 2.8; EXPRESSED IN BT474, SIGNAL = 2.5; EXPRESSED IN HEART, SIGNAL = 3.7; EXPRESSED IN BRAIN, SIGNAL = 4.4; EXPRESSED IN ADULT LIVER, SIGNAL =   3; EXPRESSED IN HELA, SIGNAL = 2.9; EXPRESSED IN HBL100, SIGNAL = 1.9; EXPRESSED IN BONE MARROW, SIGNAL = 2.6; EST_HUMAN HIT: AW805010.1, EVALUE 4.00e-22; SWISSPROT HIT: P53804, EVALUE 3.00e-24

SEQ ID NO: 33641 - protein, 18 aa, Homo sapiens
  MAP TO D83253.1; EXPRESSED IN PLACENTA, SIGNAL = 3.2; EXPRESSED IN FETAL LIVER, SIGNAL = 2.1; EXPRESSED IN LUNG, SIGNAL = 2.8; EXPRESSED IN BT474, SIGNAL = 2.5; EXPRESSED IN HEART, SIGNAL = 3.7; EXPRESSED IN BRAIN, SIGNAL = 4.4; EXPRESSED IN ADULT LIVER, SIGNAL =   3; EXPRESSED IN HELA, SIGNAL = 2.9; EXPRESSED IN HBL100, SIGNAL = 1.9; EXPRESSED IN BONE MARROW, SIGNAL = 2.6; EST_HUMAN HIT: AW805010.1, EVALUE 3.00e-04
GRFHCGGLCLVRRLPSRG

SEQ ID NO: 33642 - protein, 54 aa, Homo sapiens
  MAP TO D83253.1; EXPRESSED IN PLACENTA, SIGNAL = 1.9; EXPRESSED IN BT474, SIGNAL = 2.3; EXPRESSED IN BONE MARROW, SIGNAL = 2.5; EXPRESSED IN HBL100, SIGNAL = 1.8; EXPRESSED IN HEART, SIGNAL = 2.4; EXPRESSED IN FETAL LIVER, SIGNAL = 2.1; EXPRESSED IN LUNG, SIGNAL = 2.7; EXPRESSED IN HELA, SIGNAL = 2.4; EXPRESSED IN ADULT LIVER, SIGNAL = 2.8; EXPRESSED IN BRAIN, SIGNAL = 3.1; EST_HUMAN HIT: AU143698.1, EVALUE 3.00e-26; EST_HUMAN HIT: AL044261.1, EVALUE 2.00e-26; SWISSPROT HIT: P53804, EVALUE 2.00e-27
GHYRYCDALSMLGEYDWALQANIKAQKLCKNDPEGIKDLIQQHVKLQKQIEDLQ

SEQ ID NO: 33643 - protein, 206 aa, Homo sapiens
  MAP TO AB016897.1; EXPRESSED IN PLACENTA, SIGNAL = 4.4; EXPRESSED IN FETAL LIVER, SIGNAL = 5.4; EXPRESSED IN BT474, SIGNAL = 5.9; EXPRESSED IN HEART, SIGNAL = 3.7; EXPRESSED IN BRAIN, SIGNAL = 2.7; EXPRESSED IN ADULT LIVER, SIGNAL = 3.4; EXPRESSED IN HELA, SIGNAL = 1.9; EXPRESSED IN LUNG, SIGNAL = 6.2; EXPRESSED IN HBL100, SIGNAL = 2.3; EXPRESSED IN BONE MARROW, SIGNAL = 0.86; EST_HUMAN HIT: AI418780.1, EVALUE 2.00e-69; SWISSPROT HIT: P55196, EVALUE 4.00e-92
LPSAQVAAAERRKREEHQRWYEKEKARLEEERERKRREQERKLGQMRTQSLNPAPFSPLTAQQMKPEKPSTLQRPQETVIRELQPQQQPRTIERRDLQYITVSKEELSSGDSLSPDPWKRDAKEKLEKQQQMHIVDMLSKEIQELQSKPDRSAEESDRLRKLMLEWQFQKRLQESKQKDEDDEEEEDDDVDTMLIMQRLEAERRAR

SEQ ID NO: 33644 - protein, 91 aa, Homo sapiens
  MAP TO Z98946.15; EXPRESSED IN PLACENTA, SIGNAL = 0.74; EXPRESSED IN BONE MARROW, SIGNAL = 2.5; EXPRESSED IN LUNG, SIGNAL = 2.1; EXPRESSED IN HELA, SIGNAL = 1.1; EXPRESSED IN HEART, SIGNAL = 0.86; EXPRESSED IN HBL100, SIGNAL = 1.6; EXPRESSED IN FETAL LIVER, SIGNAL = 1.1; EXPRESSED IN ADULT LIVER, SIGNAL = 0.71; EST_HUMAN HIT: BE907487.1, EVALUE 7.00e-47; EST_HUMAN HIT: BE274627.1, EVALUE 5.00e-47; SWISSPROT HIT: P26041, EVALUE 8.00e-48
VTAQDVRKESPLLFKFRAKFYPEDVSEELIQDITQRLFFLQVKEGILNDDIYCPPETAVLLASYAVQSKYGDFNKEVHKSGYLAGDKLLPQ

SEQ ID NO: 33645 - protein, 28 aa, Homo sapiens
  MAP TO Z98742.5; EXPRESSED IN BONE MARROW, SIGNAL = 1.3; EXPRESSED IN ADULT LIVER, SIGNAL =   1; EXPRESSED IN PLACENTA, SIGNAL = 1.7; EXPRESSED IN BT474, SIGNAL = 2.1; EXPRESSED IN HBL100, SIGNAL = 1.4; EXPRESSED IN FETAL LIVER, SIGNAL = 1.8; EXPRESSED IN LUNG, SIGNAL = 1.9; EXPRESSED IN HELA, SIGNAL = 1.4; EXPRESSED IN BRAIN, SIGNAL = 1.4; EXPRESSED IN HEART, SIGNAL = 1.4
VDEGDKENNFIHSFTQKSYLHVKYQSLR

SEQ ID NO: 33646 - protein, 32 aa, Homo sapiens
  MAP TO Z98051.6; EXPRESSED IN ADULT LIVER, SIGNAL = 4.3; EXPRESSED IN HEART, SIGNAL = 2.9; EXPRESSED IN BONE MARROW, SIGNAL = 6.1; EXPRESSED IN BRAIN, SIGNAL = 1.1; EXPRESSED IN PLACENTA, SIGNAL = 3.2; EXPRESSED IN BT474, SIGNAL = 7.1; EXPRESSED IN FETAL LIVER, SIGNAL = 8.8; EXPRESSED IN LUNG, SIGNAL = 4.1; EXPRESSED IN HELA, SIGNAL = 7.3; EXPRESSED IN HBL100, SIGNAL =  12; EST_HUMAN HIT: AA403255.1, EVALUE 6.00e-03
MDPGVAHVSAQEGTSRKPWWHPHGDNSAGPHK

SEQ ID NO: 33647 - protein, 25 aa, Homo sapiens
  MAP TO Z98051.6; EXPRESSED IN ADULT LIVER, SIGNAL = 4.3; EXPRESSED IN HEART, SIGNAL = 2.9; EXPRESSED IN BONE MARROW, SIGNAL = 6.1; EXPRESSED IN BRAIN, SIGNAL = 1.1; EXPRESSED IN PLACENTA, SIGNAL = 3.2; EXPRESSED IN BT474, SIGNAL = 7.1; EXPRESSED IN FETAL LIVER, SIGNAL = 8.8; EXPRESSED IN LUNG, SIGNAL = 4.1; EXPRESSED IN HELA, SIGNAL = 7.3; EXPRESSED IN HBL100, SIGNAL =  12; EST_HUMAN HIT: AA403255.1, EVALUE 1.90e-02
ASTALTLCGPAELSPCGCHQGLRLV

SEQ ID NO: 33648 - protein, 61 aa, Homo sapiens
  MAP TO Z93930.10; EXPRESSED IN BT474, SIGNAL =  43; EXPRESSED IN HBL100, SIGNAL =  11; EXPRESSED IN FETAL LIVER, SIGNAL =  20; EXPRESSED IN LUNG, SIGNAL = 8.8; EXPRESSED IN HEART, SIGNAL = 3.8; EXPRESSED IN PLACENTA, SIGNAL = 4.6; EXPRESSED IN BONE MARROW, SIGNAL = 3.1; EXPRESSED IN BRAIN, SIGNAL = 1.7; EXPRESSED IN HELA, SIGNAL =  22; EXPRESSED IN ADULT LIVER, SIGNAL =  25; EST_HUMAN HIT: BE081556.1, EVALUE 1.00e-34; SWISSPROT HIT: P17861, EVALUE 2.00e-35; EST_HUMAN HIT: AW996402.1, EVALUE 2.00e-34
LISCWAFWTTWTQSCSSNALPQSLPAWRSSQRSTQKDPVPYQPPFLCQWGRHQPSWKPLMN

SEQ ID NO: 33649 - protein, 49 aa, Homo sapiens
  MAP TO Z86090.10; EXPRESSED IN LUNG, SIGNAL =  26; EXPRESSED IN ADULT LIVER, SIGNAL =  23; EXPRESSED IN BRAIN, SIGNAL =  17; EXPRESSED IN HEART, SIGNAL = 8.4; EXPRESSED IN PLACENTA, SIGNAL =  16; EXPRESSED IN BONE MARROW, SIGNAL =  23; EXPRESSED IN HBL100, SIGNAL =  65; EXPRESSED IN HELA, SIGNAL =  50; EXPRESSED IN BT474, SIGNAL =  40; EXPRESSED IN FETAL LIVER, SIGNAL =  33; EST_HUMAN HIT: AA228987.1, EVALUE 4.00e-05; EST_HUMAN HIT: AW610216.1, EVALUE 6.00e-05
CCWCCWCCWCWCWCCCCCCHRRRCLIHLEFVVAGLAKPGVAEHGLCIWV

SEQ ID NO: 33650 - protein, 44 aa, Homo sapiens
  MAP TO Z86090.10; EXPRESSED IN LUNG, SIGNAL =  26; EXPRESSED IN ADULT LIVER, SIGNAL =  23; EXPRESSED IN BRAIN, SIGNAL =  17; EXPRESSED IN HEART, SIGNAL = 8.4; EXPRESSED IN PLACENTA, SIGNAL =  16; EXPRESSED IN BONE MARROW, SIGNAL =  23; EXPRESSED IN HBL100, SIGNAL =  65; EXPRESSED IN HELA, SIGNAL =  50; EXPRESSED IN BT474, SIGNAL =  40; EXPRESSED IN FETAL LIVER, SIGNAL =  33; EST_HUMAN HIT: BE300570.1, EVALUE 4.70e-02
PLVLLVLLVLLVLVLVLLLLLPPPPLPYPPGVCGCWPGKAWCCR

SEQ ID NO: 33651 - protein, 88 aa, Homo sapiens
  MAP TO Z86090.10; EXPRESSED IN PLACENTA, SIGNAL =  32; EXPRESSED IN BRAIN, SIGNAL = 1e+02; EXPRESSED IN BT474, SIGNAL = 3.3e+02; EXPRESSED IN BONE MARROW, SIGNAL =  56; EXPRESSED IN HBL100, SIGNAL = 2.2e+02; EXPRESSED IN FETAL LIVER, SIGNAL = 1.2e+02; EXPRESSED IN LUNG, SIGNAL =  26; EXPRESSED IN HELA, SIGNAL = 1.1e+02; EXPRESSED IN ADULT LIVER, SIGNAL =  90; EXPRESSED IN HEART, SIGNAL = 1.2e+02; EST_HUMAN HIT: AW246819.1, EVALUE 1.00e-30; EST_HUMAN HIT: C03040.1, EVALUE 6.00e-30; SWISSPROT HIT: P04406, EVALUE 2.00e-31
MLVMDLTCHLEKPAKYSDIKRMVKQALREILKGILGCTEHKVVSSDFDSDTHSSIFNAGAGIALNNDFVKLISWYDRVVNLMVHMASK

SEQ ID NO: 33652 - protein, 138 aa, Homo sapiens
  MAP TO Z86090.10; EXPRESSED IN PLACENTA, SIGNAL =  32; EXPRESSED IN BRAIN, SIGNAL = 1e+02; EXPRESSED IN BT474, SIGNAL = 3.3e+02; EXPRESSED IN BONE MARROW, SIGNAL =  56; EXPRESSED IN HBL100, SIGNAL = 2.2e+02; EXPRESSED IN FETAL LIVER, SIGNAL = 1.2e+02; EXPRESSED IN LUNG, SIGNAL =  26; EXPRESSED IN HELA, SIGNAL = 1.1e+02; EXPRESSED IN ADULT LIVER, SIGNAL =  90; EXPRESSED IN HEART, SIGNAL = 1.2e+02; EST_HUMAN HIT: BE742115.1, EVALUE 2.00e-49; EST_HUMAN HIT: BE299019.1, EVALUE 3.00e-49; SWISSPROT HIT: O43683, EVALUE 5.60e-01
ASPSIEDGRMGVTVKVRGDDLVLSTAQDALEDLPQCLLHHPLDVTVFGRFLQMAGQVHDQHVGGGDVEGHASELPIQLGDDFAHRLGRNDVLESPAAITLQFPRGTISSLLGGTEGMNCGHESFHGAKVVMDDLGQGG

SEQ ID NO: 33653 - protein, 525 aa, Homo sapiens
  MAP TO Z84476.6; EXPRESSED IN HEART, SIGNAL = 0.8; EXPRESSED IN LUNG, SIGNAL = 1.6; EXPRESSED IN HELA, SIGNAL = 1.9; EXPRESSED IN ADULT LIVER, SIGNAL = 1.2; EXPRESSED IN BRAIN, SIGNAL = 1.4; EXPRESSED IN PLACENTA, SIGNAL = 0.96; EXPRESSED IN BT474, SIGNAL = 2.6; EXPRESSED IN BONE MARROW, SIGNAL = 1.2; EXPRESSED IN HBL100, SIGNAL = 2.3; EXPRESSED IN FETAL LIVER, SIGNAL = 1.5; EST_HUMAN HIT: AF150239.1, EVALUE 1.00e-106; EST_HUMAN HIT: AF150239.1, EVALUE 1.00e-106
DKMWPENEKASSQQEIFENGEAYWMKFNSLLKVDSRDPKVREVCVQDVKLENQWETSIREKLREEKEGSEEVTCKKGKNQKVLSKNLNPNSKHSQCNKVLIAQKLHECARCGKNFSWHSDLILHEQIHSGEKPHVCNECGKAFKTRNQLSMHRIIHTGEKPFNCTQCGKAFNSRSALCRHKKTHSGEKPHECRDCGKAFKTRNRLCMHQLIHTGEKPYKCNCCGKAFQFKHSLTIHGRIHTGEKPYECEECGKAFSGSSDLTKHIRIHTGERPYECSKCGRAFSRSSDLSKHKRIHTREKHYGCPQCGKDFSIKAELTKHRRIHTEEKRYRCEECGKAFRHNCKRRAHEREHTGEKPYQCRDCGKTFQDKHCLTIHQRIHTGEKPYKCLECGKAFSGKSNLTNHRRIHTGEKPHKCEVCGMAFHHSSVLRQHKRIHTGEKPYTCSECGTSFRQGSALIGHKRVHTGEKPYECEECGKAFRVSSNLTGHKKRKHQVWSTHELDGSRKSLSPVTVSQTSVVSILTSA

SEQ ID NO: 33654 - protein, 33 aa, Homo sapiens
  MAP TO AP000337.1; EXPRESSED IN ADULT LIVER, SIGNAL = 5.6; EXPRESSED IN BONE MARROW, SIGNAL = 6.1; EXPRESSED IN HBL100, SIGNAL = 5.3; EXPRESSED IN BRAIN, SIGNAL = 6.9; EXPRESSED IN HEART, SIGNAL =   6; EXPRESSED IN PLACENTA, SIGNAL = 5.6; EXPRESSED IN BT474, SIGNAL =   5; EXPRESSED IN LUNG, SIGNAL = 6.5; EXPRESSED IN HELA, SIGNAL = 7.2; EXPRESSED IN FETAL LIVER, SIGNAL = 5.4; SWISSPROT HIT: Q43909, EVALUE 3.70e+00; EST_HUMAN HIT: AA036833.1, EVALUE 1.00e+00; EST_HUMAN HIT: AA036833.1, EVALUE 1.00e+00; EST_HUMAN HIT: BE965484.2, EVALUE 8.80e-01
ADQGHAAALHTPSPGPPLSGQWSPGHRCPQDTL

SEQ ID NO: 33655 - protein, 37 aa, Homo sapiens
  MAP TO AP000326.1; EXPRESSED IN PLACENTA, SIGNAL = 2.7; EXPRESSED IN BT474, SIGNAL = 2.5; EXPRESSED IN BONE MARROW, SIGNAL = 3.4; EXPRESSED IN BRAIN, SIGNAL =   3; EXPRESSED IN ADULT LIVER, SIGNAL =   3; EXPRESSED IN HBL100, SIGNAL = 2.5; EXPRESSED IN FETAL LIVER, SIGNAL = 3.4; EXPRESSED IN LUNG, SIGNAL = 4.1; EXPRESSED IN HELA, SIGNAL = 4.5; EXPRESSED IN HEART, SIGNAL = 2.8; EST_HUMAN HIT: AI669711.1, EVALUE 1.00e-08; SWISSPROT HIT: P39188, EVALUE 7.00e-05
LSPGWSVVAQPQLTTVLTSWAQAIFLPWPPTVLKLQT

SEQ ID NO: 33656 - protein, 41 aa, Homo sapiens
  MAP TO AP000317.1; EXPRESSED IN LUNG, SIGNAL =   4; EXPRESSED IN BRAIN, SIGNAL = 3.5; EXPRESSED IN HEART, SIGNAL = 1.7; EXPRESSED IN PLACENTA, SIGNAL = 4.4; EXPRESSED IN HBL100, SIGNAL =   4; EXPRESSED IN HELA, SIGNAL = 4.9; EXPRESSED IN ADULT LIVER, SIGNAL = 2.7; EXPRESSED IN BT474, SIGNAL = 3.3; EXPRESSED IN BONE MARROW, SIGNAL = 4.7; EXPRESSED IN FETAL LIVER, SIGNAL = 3.8; EST_HUMAN HIT: BE165760.1, EVALUE 8.20e+00; EST_HUMAN HIT: BE744306.1, EVALUE 3.20e+00
MCILAICILRMYNVSIFLWRAGHPKWPGAHVYCLNVLCALP

SEQ ID NO: 33657 - protein, 80 aa, Homo sapiens
  MAP TO AP000266.1; EXPRESSED IN PLACENTA, SIGNAL = 2.7; EXPRESSED IN BT474, SIGNAL = 2.9; EXPRESSED IN BONE MARROW, SIGNAL = 2.5; EXPRESSED IN FETAL LIVER, SIGNAL = 2.6; EXPRESSED IN HELA, SIGNAL = 2.5; EXPRESSED IN ADULT LIVER, SIGNAL = 2.5; EXPRESSED IN HEART, SIGNAL = 2.1; EXPRESSED IN LUNG, SIGNAL = 2.1; EXPRESSED IN HBL100, SIGNAL = 2.6; EXPRESSED IN BRAIN, SIGNAL = 2.4; EST_HUMAN HIT: AW956935.1, EVALUE 1.00e-38; SWISSPROT HIT: O60287, EVALUE 2.00e-39
PTLAPVQLTNFFGTLDSVLRYRATVIQAFRDMNRFTVNETVLSTKDVLVLLHKWSLIERDLKLQEDLRAAIEKAQARELM

SEQ ID NO: 33658 - protein, 20 aa, Homo sapiens
  MAP TO AP000266.1; EXPRESSED IN PLACENTA, SIGNAL = 2.7; EXPRESSED IN BT474, SIGNAL = 2.9; EXPRESSED IN BONE MARROW, SIGNAL = 2.5; EXPRESSED IN FETAL LIVER, SIGNAL = 2.6; EXPRESSED IN HELA, SIGNAL = 2.5; EXPRESSED IN ADULT LIVER, SIGNAL = 2.5; EXPRESSED IN HEART, SIGNAL = 2.1; EXPRESSED IN LUNG, SIGNAL = 2.1; EXPRESSED IN HBL100, SIGNAL = 2.6; EXPRESSED IN BRAIN, SIGNAL = 2.4; EST_HUMAN HIT: W52599.1, EVALUE 1.10e-01; EST_HUMAN HIT: AW956935.1, EVALUE 7.60e-02
LTPKQAHLGPRPADQLLRDT

SEQ ID NO: 33659 - protein, 199 aa, Homo sapiens
  MAP TO AP000266.1; EXPRESSED IN BONE MARROW, SIGNAL = 2.9; EXPRESSED IN FETAL LIVER, SIGNAL = 2.9; EXPRESSED IN LUNG, SIGNAL = 2.7; EXPRESSED IN ADULT LIVER, SIGNAL = 2.6; EXPRESSED IN PLACENTA, SIGNAL = 2.5; EXPRESSED IN BT474, SIGNAL = 2.9; EXPRESSED IN HBL100, SIGNAL = 3.3; EXPRESSED IN HELA, SIGNAL =   4; EXPRESSED IN BRAIN, SIGNAL = 3.8; EXPRESSED IN HEART, SIGNAL = 3.4; SWISSPROT HIT: O60287, EVALUE 3.00e-94; EST_HUMAN HIT: H14174.1, EVALUE 2.00e-28
MLKDKNKPVMPARAKGPRGRKRRPGEAEEMADPELMASTLETCKGLLRSILTYWRPVIPGPDPTQEPVDSASPESDAPGPVYAAASLAVSWVLRSVAEHPLSRAEAAGLIGWLKSHILPHPVVVADLLKDSAVRSSIFRLYSRLCGAEGLAGPVQEVACLFNTVMLQLVAAQGRAGSPFHPAMEALSLSSLSEKDEATQ

SEQ ID NO: 33660 - protein, 102 aa, Homo sapiens; identical to SEQ ID NO: 33575
  MAP TO AP000247.1; EXPRESSED IN BT474, SIGNAL =   2; EXPRESSED IN LUNG, SIGNAL = 1.8; EXPRESSED IN ADULT LIVER, SIGNAL =   2; EXPRESSED IN PLACENTA, SIGNAL = 2.6; EXPRESSED IN BONE MARROW, SIGNAL = 2.1; EXPRESSED IN HBL100, SIGNAL = 1.7; EXPRESSED IN FETAL LIVER, SIGNAL = 1.6; EXPRESSED IN HELA, SIGNAL = 1.2; EXPRESSED IN BRAIN, SIGNAL = 2.1; EXPRESSED IN HEART, SIGNAL = 1.5; EST_HUMAN HIT: BE180472.1, EVALUE 3.00e-30; SWISSPROT HIT: Q13009, EVALUE 6.00e-37

SEQ ID NO: 33661 - protein, 199 aa, Homo sapiens; identical to SEQ ID NO: 33578
  MAP TO AP000247.1; EXPRESSED IN FETAL LIVER, SIGNAL = 0.74; EXPRESSED IN LUNG, SIGNAL = 0.91; EXPRESSED IN PLACENTA, SIGNAL =   1; EXPRESSED IN BT474, SIGNAL = 1.1; EXPRESSED IN BONE MARROW, SIGNAL = 0.87; EXPRESSED IN HBL100, SIGNAL = 1.1; EXPRESSED IN ADULT LIVER, SIGNAL = 0.88; EXPRESSED IN BRAIN, SIGNAL = 2.3; EXPRESSED IN HEART, SIGNAL = 0.89; EXPRESSED IN HELA, SIGNAL = 0.8; EST_HUMAN HIT: R14902.1, EVALUE 3.00e-31; SWISSPROT HIT: Q13009, EVALUE 1.00e-106

SEQ ID NO: 33662 - protein, 50 aa, Homo sapiens
  MAP TO AP000246.1; EXPRESSED IN HBL100, SIGNAL =   1; EXPRESSED IN LUNG, SIGNAL = 1.8; EXPRESSED IN BRAIN, SIGNAL = 2.2; EXPRESSED IN PLACENTA, SIGNAL = 1.9; EXPRESSED IN BT474, SIGNAL = 1.2; EXPRESSED IN BONE MARROW, SIGNAL =   2; EXPRESSED IN FETAL LIVER, SIGNAL =   2; EXPRESSED IN HELA, SIGNAL = 2.2; EXPRESSED IN ADULT LIVER, SIGNAL = 1.3; EXPRESSED IN HEART, SIGNAL = 1.5; EST_HUMAN HIT: AA858243.1, EVALUE 2.00e-12; SWISSPROT HIT: P08548, EVALUE 2.00e-06
EQSEKESNPIYTSYRSKNKALGINLIDQVKDLYSENYKTLMKEIEEDTKK

SEQ ID NO: 33663 - protein, 20 aa, Homo sapiens
  MAP TO AP000246.1; EXPRESSED IN HBL100, SIGNAL =   1; EXPRESSED IN LUNG, SIGNAL = 1.8; EXPRESSED IN BRAIN, SIGNAL = 2.2; EXPRESSED IN PLACENTA, SIGNAL = 1.9; EXPRESSED IN BT474, SIGNAL = 1.2; EXPRESSED IN BONE MARROW, SIGNAL =   2; EXPRESSED IN FETAL LIVER, SIGNAL =   2; EXPRESSED IN HELA, SIGNAL = 2.2; EXPRESSED IN ADULT LIVER, SIGNAL = 1.3; EXPRESSED IN HEART, SIGNAL = 1.5
NNLKRKAIPFILATEAKTKP

SEQ ID NO: 33664 - protein, 81 aa, Homo sapiens
  MAP TO AP000226.1; EXPRESSED IN FETAL LIVER, SIGNAL = 1.3; EXPRESSED IN LUNG, SIGNAL = 1.6; EXPRESSED IN HELA, SIGNAL = 1.9; EXPRESSED IN ADULT LIVER, SIGNAL = 1.3; EXPRESSED IN BT474, SIGNAL = 1.8; EXPRESSED IN PLACENTA, SIGNAL = 1.6; EXPRESSED IN HEART, SIGNAL = 1.4; EXPRESSED IN BRAIN, SIGNAL = 0.94; EXPRESSED IN HBL100, SIGNAL = 1.4; EXPRESSED IN BONE MARROW, SIGNAL = 0.9; EST_HUMAN HIT: AU140126.1, EVALUE 5.00e-23; SWISSPROT HIT: Q06546, EVALUE 2.00e-41; EST_HUMAN HIT: AA831159.1, EVALUE 6.80e+00
IEPKLNILEIVKPADTVEVVIDPDAHHAESEAHLVEEAQVITLDGTKHITTISDETSEQVTRWAAALEGYRKEQERLGIPY

SEQ ID NO: 33665 - protein, 83 aa, Homo sapiens
  MAP TO AP000216.1; EXPRESSED IN BT474, SIGNAL = 2.7; EXPRESSED IN HBL100, SIGNAL = 2.2; EXPRESSED IN BRAIN, SIGNAL = 4.1; EXPRESSED IN PLACENTA, SIGNAL =   2; EXPRESSED IN HEART, SIGNAL = 1.4; EXPRESSED IN ADULT LIVER, SIGNAL = 1.4; EXPRESSED IN HELA, SIGNAL = 1.2; EXPRESSED IN LUNG, SIGNAL = 1.5; EXPRESSED IN FETAL LIVER, SIGNAL = 1.9; EXPRESSED IN BONE MARROW, SIGNAL = 1.9; EST_HUMAN HIT: BE783710.1, EVALUE 5.00e-16; EST_HUMAN HIT: AW675549.1, EVALUE 4.00e-16; SWISSPROT HIT: Q14689, EVALUE 1.00e-18
AVFTWTNLLVVVVELDGLEQDALDLVALVTNVVLEEHYLVVGVVVIVDPGVIPINSRGEKQRMHLRDGFLADQLDPIYVAYNM

SEQ ID NO: 33666 - protein, 44 aa, Homo sapiens
  MAP TO AP000216.1; EXPRESSED IN PLACENTA, SIGNAL = 0.81; EXPRESSED IN BT474, SIGNAL = 0.96; EXPRESSED IN LUNG, SIGNAL = 0.8; EXPRESSED IN HELA, SIGNAL =   1; EXPRESSED IN BRAIN, SIGNAL =   1; EXPRESSED IN HBL100, SIGNAL = 0.75; EXPRESSED IN FETAL LIVER, SIGNAL = 0.71; EXPRESSED IN ADULT LIVER, SIGNAL = 0.83; EXPRESSED IN BONE MARROW, SIGNAL = 1.4; EXPRESSED IN HEART, SIGNAL = 1.6; EST_HUMAN HIT: AL040229.1, EVALUE 2.00e-06; SWISSPROT HIT: Q9Y2E4, EVALUE 2.40e-01
PPKDWHPLAQDTGTGTAYIEVMTVPNLENVKTCPTGLSLAFHKN

SEQ ID NO: 33667 - protein, 52 aa, Homo sapiens
  MAP TO AP000207.1; EXPRESSED IN BT474, SIGNAL = 5.2; EXPRESSED IN LUNG, SIGNAL = 2.1; EXPRESSED IN BRAIN, SIGNAL =   2; EXPRESSED IN PLACENTA, SIGNAL =   2; EXPRESSED IN HBL100, SIGNAL = 2.4; EXPRESSED IN FETAL LIVER, SIGNAL =   2; EXPRESSED IN HELA, SIGNAL = 1.8; EXPRESSED IN ADULT LIVER, SIGNAL = 1.7; EXPRESSED IN BONE MARROW, SIGNAL = 1.2; EXPRESSED IN HEART, SIGNAL = 1.8; EST_HUMAN HIT: AW779776.1, EVALUE 1.00e-07; SWISSPROT HIT: Q05086, EVALUE 2.00e-09; EST_HUMAN HIT: BE564683.1, EVALUE 3.00e-08
FPLNCVIGRVFSSAEALVESFWKAKQHTKEELKSLQAKDEEKNENEKAKAAC

SEQ ID NO: 33668 - protein, 24 aa, Homo sapiens
  MAP TO AP000196.1; EXPRESSED IN HBL100, SIGNAL =  14; EXPRESSED IN HELA, SIGNAL =  12; EXPRESSED IN BRAIN, SIGNAL =  14; EXPRESSED IN BT474, SIGNAL =  11; EXPRESSED IN BONE MARROW, SIGNAL =  17; EXPRESSED IN FETAL LIVER, SIGNAL =  14; EXPRESSED IN LUNG, SIGNAL =  14; EXPRESSED IN ADULT LIVER, SIGNAL = 8.8; EXPRESSED IN PLACENTA, SIGNAL =  12; EXPRESSED IN HEART, SIGNAL =  10; EST_HUMAN HIT: BE244891.1, EVALUE 2.00e-03
GLDRSSNQPQEPLKPKPNPQQGHQ

SEQ ID NO: 33669 - protein, 67 aa, Homo sapiens
  MAP TO AP000187.1; EXPRESSED IN BONE MARROW, SIGNAL =   4; EXPRESSED IN FETAL LIVER, SIGNAL = 3.8; EXPRESSED IN LUNG, SIGNAL = 4.4; EXPRESSED IN HELA, SIGNAL = 4.1; EXPRESSED IN PLACENTA, SIGNAL = 3.3; EXPRESSED IN BT474, SIGNAL = 3.6; EXPRESSED IN HBL100, SIGNAL = 2.8; EXPRESSED IN HEART, SIGNAL = 3.2; EXPRESSED IN ADULT LIVER, SIGNAL = 5.4; EXPRESSED IN BRAIN, SIGNAL =   4; EST_HUMAN HIT: BE162737.1, EVALUE 4.00e-05; SWISSPROT HIT: P56396, EVALUE 8.60e+00
MDRAVHEDPHRQILLQELTQDHTRKTKRNHRPFEGGELLLQALCPLQNAYGEILAPNVMLLGGGAFG

SEQ ID NO: 33670 - protein, 40 aa, Homo sapiens
  MAP TO AP000187.1; EXPRESSED IN BONE MARROW, SIGNAL =   4; EXPRESSED IN FETAL LIVER, SIGNAL = 3.8; EXPRESSED IN LUNG, SIGNAL = 4.4; EXPRESSED IN HELA, SIGNAL = 4.1; EXPRESSED IN PLACENTA, SIGNAL = 3.3; EXPRESSED IN BT474, SIGNAL = 3.6; EXPRESSED IN HBL100, SIGNAL = 2.8; EXPRESSED IN HEART, SIGNAL = 3.2; EXPRESSED IN ADULT LIVER, SIGNAL = 5.4; EXPRESSED IN BRAIN, SIGNAL =   4; EST_HUMAN HIT: AW205950.1, EVALUE 1.90e-01
PNSITLGARISPYAFCRGHRACSSNSPPSKGLWFLLVFLV

SEQ ID NO: 33671 - protein, 42 aa, Homo sapiens
  MAP TO AP000146.1; EXPRESSED IN BT474, SIGNAL =   3; EXPRESSED IN BONE MARROW, SIGNAL =   3; EXPRESSED IN LUNG, SIGNAL = 3.8; EXPRESSED IN ADULT LIVER, SIGNAL = 2.2; EXPRESSED IN BRAIN, SIGNAL = 2.7; EXPRESSED IN PLACENTA, SIGNAL = 4.2; EXPRESSED IN HBL100, SIGNAL = 2.5; EXPRESSED IN FETAL LIVER, SIGNAL = 3.6; EXPRESSED IN HELA, SIGNAL = 2.2; EXPRESSED IN HEART, SIGNAL = 2.6; SWISSPROT HIT: P20629, EVALUE 8.00e+00
ATSFSQSLLFGRWIISLLSTHTMYQNHLWRNQGRTLRDMAST

SEQ ID NO: 33672 - protein, 30 aa, Homo sapiens
  MAP TO AP000146.1; EXPRESSED IN BT474, SIGNAL =   3; EXPRESSED IN BONE MARROW, SIGNAL =   3; EXPRESSED IN LUNG, SIGNAL = 3.8; EXPRESSED IN ADULT LIVER, SIGNAL = 2.2; EXPRESSED IN BRAIN, SIGNAL = 2.7; EXPRESSED IN PLACENTA, SIGNAL = 4.2; EXPRESSED IN HBL100, SIGNAL = 2.5; EXPRESSED IN FETAL LIVER, SIGNAL = 3.6; EXPRESSED IN HELA, SIGNAL = 2.2; EXPRESSED IN HEART, SIGNAL = 2.6
SNLFFPKSVIWEMDYITTINSHYVSESPVE

SEQ ID NO: 33673 - protein, 54 aa, Homo sapiens
  MAP TO AP000146.1; EXPRESSED IN HBL100, SIGNAL = 1.5; EXPRESSED IN BRAIN, SIGNAL = 1.8; EXPRESSED IN BT474, SIGNAL = 1.1; EXPRESSED IN BONE MARROW, SIGNAL = 1.9; EXPRESSED IN FETAL LIVER, SIGNAL = 1.8; EXPRESSED IN HELA, SIGNAL = 1.4; EXPRESSED IN ADULT LIVER, SIGNAL = 1.6; EXPRESSED IN PLACENTA, SIGNAL = 1.9; EXPRESSED IN LUNG, SIGNAL = 1.6; EXPRESSED IN HEART, SIGNAL = 2.4; SWISSPROT HIT: P39936, EVALUE 8.90e-01; EST_HUMAN HIT: AA621255.1, EVALUE 1.00e-03
TTVVFHLQKKKLSIKWRQETHNSQNNLENKEQGRSTSQFQNFLQSNDSQHSVMP

SEQ ID NO: 33674 - protein, 28 aa, Homo sapiens
  MAP TO AP000137.1; EXPRESSED IN HELA, SIGNAL = 2.7; EXPRESSED IN HEART, SIGNAL = 1.6; EXPRESSED IN BT474, SIGNAL =   2; EXPRESSED IN FETAL LIVER, SIGNAL = 1.7; EXPRESSED IN LUNG, SIGNAL = 2.2; EXPRESSED IN ADULT LIVER, SIGNAL = 1.8; EXPRESSED IN BRAIN, SIGNAL = 2.4; EXPRESSED IN PLACENTA, SIGNAL = 1.2; EXPRESSED IN BONE MARROW, SIGNAL = 1.7; EXPRESSED IN HBL100, SIGNAL = 2.6
FELFSLLLLLLHLFCLQLEKALCFEGFM

SEQ ID NO: 33675 - protein, 37 aa, Homo sapiens
  MAP TO AP000117.1; EXPRESSED IN BONE MARROW, SIGNAL = 1.9; EXPRESSED IN HBL100, SIGNAL = 8.3; EXPRESSED IN LUNG, SIGNAL = 2.2; EXPRESSED IN ADULT LIVER, SIGNAL = 4.5; EXPRESSED IN BRAIN, SIGNAL = 4.5; EXPRESSED IN PLACENTA, SIGNAL = 1.7; EXPRESSED IN BT474, SIGNAL = 5.7; EXPRESSED IN FETAL LIVER, SIGNAL = 5.6; EXPRESSED IN HELA, SIGNAL = 4.5; EXPRESSED IN HEART, SIGNAL =  18; EST_HUMAN HIT: AW337400.1, EVALUE 2.00e-13; SWISSPROT HIT: P48047, EVALUE 2.00e-14; EST_HUMAN HIT: AI932349.1, EVALUE 2.00e-13
TDPSILGGMIVRIGEKYVDMSVKTKIQKLGRAMREIV

SEQ ID NO: 33676 - protein, 72 aa, Homo sapiens; identical to SEQ ID NO: 33611
  MAP TO AP000106.1; EXPRESSED IN BT474, SIGNAL =   3; EXPRESSED IN BONE MARROW, SIGNAL = 1.1; EXPRESSED IN HBL100, SIGNAL =   2; EXPRESSED IN FETAL LIVER, SIGNAL =   2; EXPRESSED IN LUNG, SIGNAL = 1.4; EXPRESSED IN HELA, SIGNAL = 1.3; EXPRESSED IN ADULT LIVER, SIGNAL = 1.4; EXPRESSED IN BRAIN, SIGNAL = 1.4; EXPRESSED IN PLACENTA, SIGNAL = 2.3; EXPRESSED IN HEART, SIGNAL = 1.2; EST_HUMAN HIT: BF215569.1, EVALUE 3.00e-27

SEQ ID NO: 33677 - protein, 111 aa, Homo sapiens
  MAP TO AP000097.1; EXPRESSED IN PLACENTA, SIGNAL = 3.4; EXPRESSED IN HELA, SIGNAL = 2.7; EXPRESSED IN HEART, SIGNAL = 1.1; EXPRESSED IN LUNG, SIGNAL = 3.1; EXPRESSED IN BT474, SIGNAL = 4.4; EXPRESSED IN BONE MARROW, SIGNAL = 2.4; EXPRESSED IN HBL100, SIGNAL = 2.2; EXPRESSED IN FETAL LIVER, SIGNAL = 3.8; EXPRESSED IN ADULT LIVER, SIGNAL = 1.4; EXPRESSED IN BRAIN, SIGNAL = 1.1; EST_HUMAN HIT: AI652927.1, EVALUE 5.00e-25; SWISSPROT HIT: O14867, EVALUE 2.00e-60; EST_HUMAN HIT: AU134963.1, EVALUE 2.00e-59
SSHCQKTDLKLSLLDQRDLETDEVEEFLENKNVQTPQCKLRRYQGNAKASPPLQDSASQTYESMCLEKDAALALPSLCPKYRKFQKAFGTDRVRTGESSVKDIHASVQPNE

SEQ ID NO: 33678 - protein, 52 aa, Homo sapiens
  MAP TO AP000097.1; EXPRESSED IN BT474, SIGNAL = 2.8; EXPRESSED IN HBL100, SIGNAL =   2; EXPRESSED IN HELA, SIGNAL = 2.2; EXPRESSED IN ADULT LIVER, SIGNAL = 1.8; EXPRESSED IN BRAIN, SIGNAL =   2; EXPRESSED IN PLACENTA, SIGNAL = 1.7; EXPRESSED IN BONE MARROW, SIGNAL = 2.2; EXPRESSED IN FETAL LIVER, SIGNAL = 2.2; EXPRESSED IN LUNG, SIGNAL = 1.5; EXPRESSED IN HEART, SIGNAL = 2.3; EST_HUMAN HIT: AA577847.1, EVALUE 1.00e-16; SWISSPROT HIT: P31792, EVALUE 4.00e-09
PQPVAYLSKEIDVVAKGWPHSLRVVVAVAILVSEAIKIIQGKDLTVWTTHDV

SEQ ID NO: 33679 - protein, 23 aa, Homo sapiens
  MAP TO AP000097.1; EXPRESSED IN PLACENTA, SIGNAL = 1.3; EXPRESSED IN BT474, SIGNAL = 2.1; EXPRESSED IN BONE MARROW, SIGNAL = 1.9; EXPRESSED IN HBL100, SIGNAL = 1.3; EXPRESSED IN FETAL LIVER, SIGNAL = 1.7; EXPRESSED IN LUNG, SIGNAL = 1.5; EXPRESSED IN HELA, SIGNAL = 1.3; EXPRESSED IN ADULT LIVER, SIGNAL = 0.74; EXPRESSED IN BRAIN, SIGNAL = 0.83; EXPRESSED IN HEART, SIGNAL = 0.98
LGDDSETDTEGDSESCSAREQEC

SEQ ID NO: 33680 - protein, 61 aa, Homo sapiens
  MAP TO AP000087.1; EXPRESSED IN HBL100, SIGNAL = 1.2; EXPRESSED IN FETAL LIVER, SIGNAL = 1.2; EXPRESSED IN LUNG, SIGNAL = 1.2; EXPRESSED IN BRAIN, SIGNAL =   1; EXPRESSED IN PLACENTA, SIGNAL = 1.7; EXPRESSED IN HEART, SIGNAL =   1; EXPRESSED IN ADULT LIVER, SIGNAL = 0.94; EXPRESSED IN HELA, SIGNAL = 0.88; EXPRESSED IN BONE MARROW, SIGNAL =   1; EXPRESSED IN BT474, SIGNAL = 1.3; EST_HUMAN HIT: AW385237.1, EVALUE 4.00e-28; EST_HUMAN HIT: AW003233.1, EVALUE 6.00e-28; SWISSPROT HIT: Q06546, EVALUE 5.00e-29
RFVYKFVCDLKTLIGYSAAELNRLVTECEQKKLAKMQLHGIAQPVTAVALATASLQTEKDN

SEQ ID NO: 33681 - protein, 47 aa, Homo sapiens
  MAP TO AC007912.2; EXPRESSED IN HBL100, SIGNAL = 0.83; EXPRESSED IN LUNG, SIGNAL = 1.1; EXPRESSED IN ADULT LIVER, SIGNAL = 1.5; EXPRESSED IN BRAIN, SIGNAL = 1.1; EXPRESSED IN HEART, SIGNAL = 0.9; EXPRESSED IN PLACENTA, SIGNAL = 1.4; EXPRESSED IN BT474, SIGNAL = 0.87; EXPRESSED IN BONE MARROW, SIGNAL = 0.98; EXPRESSED IN FETAL LIVER, SIGNAL = 0.91; EXPRESSED IN HELA, SIGNAL =   1; SWISSPROT HIT: O17482, EVALUE 6.00e+00
LKGGELGVVPEPEKERCVATLQETVSLQEEGFVEKSSDFESKDTTRP

SEQ ID NO: 33682 - protein, 70 aa, Homo sapiens
  MAP TO AC007912.2; EXPRESSED IN PLACENTA, SIGNAL = 2.3; EXPRESSED IN BONE MARROW, SIGNAL = 2.8; EXPRESSED IN LUNG, SIGNAL =   3; EXPRESSED IN ADULT LIVER, SIGNAL = 2.7; EXPRESSED IN BRAIN, SIGNAL = 3.7; EXPRESSED IN BT474, SIGNAL = 2.4; EXPRESSED IN HBL100, SIGNAL = 2.3; EXPRESSED IN FETAL LIVER, SIGNAL = 2.5; EXPRESSED IN HELA, SIGNAL = 3.2; EXPRESSED IN HEART, SIGNAL =   4; EST_HUMAN HIT: AI681944.1, EVALUE 2.00e-07; SWISSPROT HIT: Q04725, EVALUE 3.10e+00; EST_HUMAN HIT: F08736.1, EVALUE 1.00e-06
SGGWKSKIKVSAGSVSGEGSLPGLQMAVFLWPIFSAYAERDLFLFLKSPTLMSSSNPNHLPKAPSLKPPH

SEQ ID NO: 33683 - protein, 30 aa, Homo sapiens
  MAP TO AC007912.2; EXPRESSED IN PLACENTA, SIGNAL = 2.3; EXPRESSED IN BONE MARROW, SIGNAL = 2.8; EXPRESSED IN LUNG, SIGNAL =   3; EXPRESSED IN ADULT LIVER, SIGNAL = 2.7; EXPRESSED IN BRAIN, SIGNAL = 3.7; EXPRESSED IN BT474, SIGNAL = 2.4; EXPRESSED IN HBL100, SIGNAL = 2.3; EXPRESSED IN FETAL LIVER, SIGNAL = 2.5; EXPRESSED IN HELA, SIGNAL = 3.2; EXPRESSED IN HEART, SIGNAL =   4; EST_HUMAN HIT: U46273.1, EVALUE 8.90e-01; EST_HUMAN HIT: AA776778.1, EVALUE 6.10e-01
QEEISLCICTENRPQEDGHLQARKRALTRD

SEQ ID NO: 33684 - protein, 28 aa, Homo sapiens
  MAP TO AC007842.1; EXPRESSED IN PLACENTA, SIGNAL = 1.3; EXPRESSED IN FETAL LIVER, SIGNAL = 2.4; EXPRESSED IN LUNG, SIGNAL = 1.6; EXPRESSED IN BT474, SIGNAL = 4.7; EXPRESSED IN HEART, SIGNAL = 3.4; EXPRESSED IN BRAIN, SIGNAL = 1.8; EXPRESSED IN ADULT LIVER, SIGNAL = 1.9; EXPRESSED IN HELA, SIGNAL = 2.8; EXPRESSED IN HBL100, SIGNAL = 3.1; EXPRESSED IN BONE MARROW, SIGNAL = 2.9; EST_HUMAN HIT: AW754180.1, EVALUE 8.10e-01
SPPPPQECSTMSLGRIVFWMKMKMNFRD

SEQ ID NO: 33685 - protein, 33 aa, Homo sapiens
  MAP TO AC007842.1; EXPRESSED IN BRAIN, SIGNAL =   1; EXPRESSED IN HEART, SIGNAL = 1.5; EXPRESSED IN PLACENTA, SIGNAL = 1.2; EXPRESSED IN BONE MARROW, SIGNAL = 2.2; EXPRESSED IN HELA, SIGNAL = 2.8; EXPRESSED IN BT474, SIGNAL = 2.5; EXPRESSED IN ADULT LIVER, SIGNAL = 2.1; EXPRESSED IN LUNG, SIGNAL = 1.4; EXPRESSED IN FETAL LIVER, SIGNAL = 2.6; EXPRESSED IN HBL100, SIGNAL = 4.2; EST_HUMAN HIT: BE786903.1, EVALUE 4.00e-12; SWISSPROT HIT: Q63570, EVALUE 3.00e-13; EST_HUMAN HIT: BE271289.1, EVALUE 3.00e-12
DEIPALSVSRPQTGLSFLGPEPEDLEDLYSRYK

SEQ ID NO: 33686 - protein, 38 aa, Homo sapiens
  MAP TO AC007842.1; EXPRESSED IN BRAIN, SIGNAL =   1; EXPRESSED IN HEART, SIGNAL = 1.5; EXPRESSED IN PLACENTA, SIGNAL = 1.2; EXPRESSED IN BONE MARROW, SIGNAL = 2.2; EXPRESSED IN HELA, SIGNAL = 2.8; EXPRESSED IN BT474, SIGNAL = 2.5; EXPRESSED IN ADULT LIVER, SIGNAL = 2.1; EXPRESSED IN LUNG, SIGNAL = 1.4; EXPRESSED IN FETAL LIVER, SIGNAL = 2.6; EXPRESSED IN HBL100, SIGNAL = 4.2; EST_HUMAN HIT: BF032707.1, EVALUE 3.00e-10; EST_HUMAN HIT: AW245751.1, EVALUE 2.00e-10; SWISSPROT HIT: Q28295, EVALUE 8.10e+00
CPGPRPACPSWALSLRTWRTCTAATRYIRPPTQTLHRT

SEQ ID NO: 33687 - protein, 109 aa, Homo sapiens
  MAP TO AC007842.1; EXPRESSED IN PLACENTA, SIGNAL = 2.2; EXPRESSED IN BT474, SIGNAL = 2.7; EXPRESSED IN BONE MARROW, SIGNAL = 1.3; EXPRESSED IN FETAL LIVER, SIGNAL =   2; EXPRESSED IN LUNG, SIGNAL = 2.3; EXPRESSED IN HELA, SIGNAL =  12; EXPRESSED IN ADULT LIVER, SIGNAL = 1.3; EXPRESSED IN BRAIN, SIGNAL = 1.6; EXPRESSED IN HBL100, SIGNAL = 1.1; EXPRESSED IN HEART, SIGNAL = 1.4; SWISSPROT HIT: Q28983, EVALUE 1.00e-11; EST_HUMAN HIT: AW863406.1, EVALUE 1.00e-23
GVTCRPQETCKEQGGQGVCLPNYEATCWLWGDPHYHSFDGRKFDFQGTCNYVLATTGCPGVSTQGLTPFTVTTKNQNRGNPAVSYVRVVTVAALGTNISIHKDEIGKVR

SEQ ID NO: 33688 - protein, 172 aa, Homo sapiens
  MAP TO AC007842.1; EXPRESSED IN BONE MARROW, SIGNAL = 2.2; EXPRESSED IN LUNG, SIGNAL = 2.9; EXPRESSED IN HELA, SIGNAL = 2.3; EXPRESSED IN PLACENTA, SIGNAL = 2.3; EXPRESSED IN BT474, SIGNAL = 2.2; EXPRESSED IN HBL100, SIGNAL =   2; EXPRESSED IN FETAL LIVER, SIGNAL = 2.2; EXPRESSED IN ADULT LIVER, SIGNAL = 2.2; EXPRESSED IN BRAIN, SIGNAL = 2.5; EXPRESSED IN HEART, SIGNAL =   2; EST_HUMAN HIT: AI904493.1, EVALUE 3.40e+00; SWISSPROT HIT: Q04833, EVALUE 1.60e+00; EST_HUMAN HIT: BE541547.1, EVALUE 6.00e-01
ALNAKPDTAELTLLRPIQALGTEYFVLTPPGTSARNVKEFAVVAGAAGASVSVTLKGSVTFNGKFYPAGDVLRVTLQPYNVAQLQSSVDLSGSKVTASSPVAVLSGHSCAQKHTTCNHVVEQLLPTSAWGTHYVVPTLASQSRYDLAFVVASQATKLTYNHGGITGSRGLQA

SEQ ID NO: 33689 - protein, 29 aa, Homo sapiens
  MAP TO AC007842.1; EXPRESSED IN BONE MARROW, SIGNAL = 2.2; EXPRESSED IN LUNG, SIGNAL = 2.9; EXPRESSED IN HELA, SIGNAL = 2.3; EXPRESSED IN PLACENTA, SIGNAL = 2.3; EXPRESSED IN BT474, SIGNAL = 2.2; EXPRESSED IN HBL100, SIGNAL =   2; EXPRESSED IN FETAL LIVER, SIGNAL = 2.2; EXPRESSED IN ADULT LIVER, SIGNAL = 2.2; EXPRESSED IN BRAIN, SIGNAL = 2.5; EXPRESSED IN HEART, SIGNAL =   2; EST_HUMAN HIT: BE387060.1, EVALUE 7.00e+00
PASLSPVCQRAPLQSPSSARQTTPQRRSQ

SEQ ID NO: 33690 - protein, 192 aa, Homo sapiens
  MAP TO AC007842.1; EXPRESSED IN BONE MARROW, SIGNAL = 1.2; EXPRESSED IN FETAL LIVER, SIGNAL = 1.1; EXPRESSED IN HELA, SIGNAL = 1.2; EXPRESSED IN ADULT LIVER, SIGNAL = 1.4; EXPRESSED IN BRAIN, SIGNAL = 1.2; EXPRESSED IN PLACENTA, SIGNAL = 2.2; EXPRESSED IN BT474, SIGNAL = 1.9; EXPRESSED IN HBL100, SIGNAL = 1.2; EXPRESSED IN LUNG, SIGNAL = 1.6; EXPRESSED IN HEART, SIGNAL = 1.2; EST_HUMAN HIT: AU136813.1, EVALUE 8.00e-38; EST_HUMAN HIT: AW859265.1, EVALUE 1.00e-17; SWISSPROT HIT: Q28983, EVALUE 3.00e-28
VDNQRSRLPVSLSEGRLRVYQSGPRAVVELVFGLVVTYDWDCQLALSLPARFQDQVCGLCGNYNGDPADDFLTPDGALAPDAVEFASSWKLDDGDYLCEDGCQNNCPACTPGQAQHYEGDRLCGMLTKLDGPFAVCHDTLDPRPFLEQCVYDLCVVGGERLSLCRGLSAYAQACLELGISVGDWRSPANCRE

SEQ ID NO: 33691 - protein, 208 aa, Homo sapiens [sequence omitted]

SEQ ID NO: 33692 - protein, 33 aa, Homo sapiens
  MAP TO AC007842.1; EXPRESSED IN BT474, SIGNAL =   2; EXPRESSED IN BONE MARROW, SIGNAL = 1.3; EXPRESSED IN ADULT LIVER, SIGNAL = 1.4; EXPRESSED IN HEART, SIGNAL = 1.6; EXPRESSED IN PLACENTA, SIGNAL = 1.4; EXPRESSED IN HBL100, SIGNAL = 1.2; EXPRESSED IN FETAL LIVER, SIGNAL = 1.5; EXPRESSED IN LUNG, SIGNAL = 1.7; EXPRESSED IN HELA, SIGNAL = 1.6; EXPRESSED IN BRAIN, SIGNAL = 1.4; EST_HUMAN HIT: BF375493.1, EVALUE 4.40e+00
WMTSFSICPSKQQMGRCRCSDRAGMPSCARTLA

SEQ ID NO: 33693 - protein, 191 aa, Homo sapiens
  MAP TO AC007842.1; EXPRESSED IN HBL100, SIGNAL = 3.6; EXPRESSED IN BT474, SIGNAL = 3.3; EXPRESSED IN BONE MARROW, SIGNAL = 3.1; EXPRESSED IN HELA, SIGNAL = 3.5; EXPRESSED IN ADULT LIVER, SIGNAL = 2.6; EXPRESSED IN BRAIN, SIGNAL = 2.8; EXPRESSED IN PLACENTA, SIGNAL = 2.5; EXPRESSED IN FETAL LIVER, SIGNAL = 2.9; EXPRESSED IN LUNG, SIGNAL =   3; EXPRESSED IN HEART, SIGNAL = 2.4; EST_HUMAN HIT: AW380407.1, EVALUE 2.00e-60; SWISSPROT HIT: Q28983, EVALUE 6.00e-26
VNGVLTALPVSVADGRISVTQGASKALLVADFGLQVSYDWNWRVDVTLPSSYHGAVCGLCGNMDRNPNNDQVFPNGTLAPSIPIWGGSWRAPGWDPLCWDECRGSCPTCPEDRLEQYEGPGFCGPLAPGTGGPFTTCHAHVPPESFFKGCVLDVCMGGGDRDILCKALASYVAACQAAGVVIEDWRAQVGC

SEQ ID NO: 33694 - protein, 178 aa, Homo sapiens
  MAP TO AC007842.1; EXPRESSED IN BT474, SIGNAL = 1.6; EXPRESSED IN BONE MARROW, SIGNAL = 0.65; EXPRESSED IN ADULT LIVER, SIGNAL = 0.65; EXPRESSED IN PLACENTA, SIGNAL = 1.9; EXPRESSED IN FETAL LIVER, SIGNAL = 0.8; EXPRESSED IN LUNG, SIGNAL = 1.2; EXPRESSED IN BRAIN, SIGNAL = 0.84; EXPRESSED IN HELA, SIGNAL = 0.61; EXPRESSED IN HEART, SIGNAL = 0.9; EST_HUMAN HIT: BE294466.1, EVALUE 2.00e-11; SWISSPROT HIT: Q28983, EVALUE 5.00e-20; EST_HUMAN HIT: BF341070.1, EVALUE 3.00e-20
VNGVDMKLPVVLANGQIRASQHGSDVVIETDFGLRVAYDLVYYVRVTVPGNYYQLMCGLCGNYNGDPKDDFQKPNGSQAGNANEFGNSWEEVVPDSPCLPPPTCPPGSEGCIPSEECPPELEKKYQKEEFCGLLSSPTGPLSSCHKLVDPQGPLKDCIFDLCLGGGNLSILCSNIHAY

SEQ ID NO: 33695 - protein, 126 aa, Homo sapiens
  MAP TO AC007732.1; EXPRESSED IN BONE MARROW, SIGNAL = 2.7; EXPRESSED IN HBL100, SIGNAL = 3.8; EXPRESSED IN ADULT LIVER, SIGNAL = 1.4; EXPRESSED IN HEART, SIGNAL = 0.84; EXPRESSED IN PLACENTA, SIGNAL = 0.96; EXPRESSED IN BT474, SIGNAL = 3.2; EXPRESSED IN LUNG, SIGNAL = 1.4; EXPRESSED IN HELA, SIGNAL = 1.8; EXPRESSED IN BRAIN, SIGNAL = 1.3; EXPRESSED IN FETAL LIVER, SIGNAL = 1.7; EST_HUMAN HIT: BF530978.1, EVALUE 2.00e-36; EST_HUMAN HIT: AW188008.1, EVALUE 1.00e-22; SWISSPROT HIT: P08775, EVALUE 4.00e-18
CWALKPCGRPWSGSCTTSSPLMAPMSITDTLALLCDTMTCRGHLMAITRHGVNRQDTGPLMKCSFEETVTVEFLNRAEGGSSVRRRAHTLGSWAVVMGQSGAVCGGVSWGRSALFRWTCLWKQPHT

SEQ ID NO: 33696 - protein, 24 aa, Homo sapiens
  MAP TO AC007732.1; EXPRESSED IN BONE MARROW, SIGNAL = 2.7; EXPRESSED IN HBL100, SIGNAL = 3.8; EXPRESSED IN ADULT LIVER, SIGNAL = 1.4; EXPRESSED IN HEART, SIGNAL = 0.84; EXPRESSED IN PLACENTA, SIGNAL = 0.96; EXPRESSED IN BT474, SIGNAL = 3.2; EXPRESSED IN LUNG, SIGNAL = 1.4; EXPRESSED IN HELA, SIGNAL = 1.8; EXPRESSED IN BRAIN, SIGNAL = 1.3; EXPRESSED IN FETAL LIVER, SIGNAL = 1.7
CVEGSHGAGLLCSGGRAYGSSRTR

SEQ ID NO: 33697 - protein, 54 aa, Homo sapiens
  MAP TO AC007722.1; EXPRESSED IN ADULT LIVER, SIGNAL = 1.7; EXPRESSED IN PLACENTA, SIGNAL = 1.4; EXPRESSED IN BONE MARROW, SIGNAL = 3.1; EXPRESSED IN LUNG, SIGNAL = 1.7; EXPRESSED IN HELA, SIGNAL = 1.4; EXPRESSED IN BT474, SIGNAL = 1.5; EXPRESSED IN HBL100, SIGNAL =   2; EXPRESSED IN FETAL LIVER, SIGNAL =   4; EXPRESSED IN BRAIN, SIGNAL =   2; EXPRESSED IN HEART, SIGNAL = 1.3; EST_HUMAN HIT: AW996127.1, EVALUE 1.70e-01; SWISSPROT HIT: P08514, EVALUE 2.00e-18
  unsure 49
DEADFRDKLSPIVLSLNVSLPPTEAGMAPAVVLHGDTHVQEQVGTGRDXAREVQ

SEQ ID NO: 33698 - protein, 43 aa, Homo sapiens
  MAP TO AC007722.1; EXPRESSED IN PLACENTA, SIGNAL = 1.1; EXPRESSED IN LUNG, SIGNAL = 0.88; EXPRESSED IN HBL100, SIGNAL =   2; EXPRESSED IN FETAL LIVER, SIGNAL = 1.1; EXPRESSED IN HELA, SIGNAL = 0.98; EXPRESSED IN BRAIN, SIGNAL = 1.6; EXPRESSED IN BT474, SIGNAL = 2.2; EXPRESSED IN BONE MARROW, SIGNAL = 1.1; EXPRESSED IN ADULT LIVER, SIGNAL =   1; EXPRESSED IN HEART, SIGNAL =   1
DEGGSSPLCFLPPWSWELLPPPPSSFLPLLPSSAGRDLRWESS

SEQ ID NO: 33699 - protein, 44 aa, Homo sapiens
  MAP TO AC007722.1; EXPRESSED IN PLACENTA, SIGNAL = 1.1; EXPRESSED IN LUNG, SIGNAL = 0.88; EXPRESSED IN HBL100, SIGNAL =   2; EXPRESSED IN FETAL LIVER, SIGNAL = 1.1; EXPRESSED IN HELA, SIGNAL = 0.98; EXPRESSED IN BRAIN, SIGNAL = 1.6; EXPRESSED IN BT474, SIGNAL = 2.2; EXPRESSED IN BONE MARROW, SIGNAL = 1.1; EXPRESSED IN ADULT LIVER, SIGNAL =   1; EXPRESSED IN HEART, SIGNAL =   1
QDDSQRRSLPAEEGSSGKKDEGGGGSSSQDHGGRKHKGELPPSS

SEQ ID NO: 33700 - protein, 21 aa, Homo sapiens
  MAP TO AC007683.2; EXPRESSED IN PLACENTA, SIGNAL =  28; EXPRESSED IN BT474, SIGNAL =  80; EXPRESSED IN LUNG, SIGNAL =  41; EXPRESSED IN HBL100, SIGNAL =  92; EXPRESSED IN BRAIN, SIGNAL =  16; EXPRESSED IN BONE MARROW, SIGNAL =  23; EXPRESSED IN FETAL LIVER, SIGNAL =  57; EXPRESSED IN HELA, SIGNAL =  51; EXPRESSED IN ADULT LIVER, SIGNAL =  21; EXPRESSED IN HEART, SIGNAL =  19; EST_HUMAN HIT: AA576162.1, EVALUE 1.90e-01; EST_HUMAN HIT: BE222509.1, EVALUE 1.30e-01
PLRRASPGETSLTTMLSQSFL

SEQ ID NO: 33701 - protein, 134 aa, Homo sapiens
  MAP TO AC007683.2; EXPRESSED IN PLACENTA, SIGNAL = 0.77; EXPRESSED IN LUNG, SIGNAL = 0.92; EXPRESSED IN BT474, SIGNAL = 0.89; EXPRESSED IN HBL100, SIGNAL = 0.74; EXPRESSED IN FETAL LIVER, SIGNAL = 1.3; EXPRESSED IN HELA, SIGNAL = 0.89; EXPRESSED IN ADULT LIVER, SIGNAL = 1.2; EXPRESSED IN BRAIN, SIGNAL = 1.7; EXPRESSED IN BONE MARROW, SIGNAL = 1.2; EXPRESSED IN HEART, SIGNAL = 1.1; EST_HUMAN HIT: AI857635.1, EVALUE 7.00e-33; SWISSPROT HIT: Q10562, EVALUE 1.00e-23
AVLISHNHYDHLDYNSVIALNERFGNELRWFVPLGLLDWMQKCGCENVIELDWWEENCVPGHDKVTFVFTPSQHWCKRTLMDDNKVLWGSWSVLGPWNRFFFAGDTGYCPAFEEIGKRFGPFDLAAIPIGAYEP

SEQ ID NO: 33702 - protein, 20 aa, Homo sapiens
  MAP TO AC007683.2; EXPRESSED IN PLACENTA, SIGNAL = 0.77; EXPRESSED IN LUNG, SIGNAL = 0.92; EXPRESSED IN BT474, SIGNAL = 0.89; EXPRESSED IN HBL100, SIGNAL = 0.74; EXPRESSED IN FETAL LIVER, SIGNAL = 1.3; EXPRESSED IN HELA, SIGNAL = 0.89; EXPRESSED IN ADULT LIVER, SIGNAL = 1.2; EXPRESSED IN BRAIN, SIGNAL = 1.7; EXPRESSED IN BONE MARROW, SIGNAL = 1.2; EXPRESSED IN HEART, SIGNAL = 1.1
MRSLSVTTTMTIWTTILSLL

SEQ ID NO: 33703 - protein, 55 aa, Homo sapiens
  MAP TO AC007653.1; EXPRESSED IN PLACENTA, SIGNAL = 0.73; EXPRESSED IN BT474, SIGNAL = 0.76; EXPRESSED IN BONE MARROW, SIGNAL = 0.68; EXPRESSED IN HBL100, SIGNAL = 0.87; EXPRESSED IN FETAL LIVER, SIGNAL = 0.74; EXPRESSED IN LUNG, SIGNAL = 0.85; EXPRESSED IN HELA, SIGNAL = 1.1; EXPRESSED IN ADULT LIVER, SIGNAL = 0.7; EXPRESSED IN BRAIN, SIGNAL = 0.87; EXPRESSED IN HEART, SIGNAL = 1.5; EST_HUMAN HIT: AI090876.1, EVALUE 2.00e-24; SWISSPROT HIT: P50542, EVALUE 2.00e-11
SVLEGVKELYLEAAHQNGDMIDPDLQTGLGVLFHLSGEFNRAIDAFNAALTVRPE

SEQ ID NO: 33704 - protein, 30 aa, Homo sapiens
  MAP TO AC007653.1; EXPRESSED IN PLACENTA, SIGNAL = 0.73; EXPRESSED IN BT474, SIGNAL = 0.76; EXPRESSED IN BONE MARROW, SIGNAL = 0.68; EXPRESSED IN HBL100, SIGNAL = 0.87; EXPRESSED IN FETAL LIVER, SIGNAL = 0.74; EXPRESSED IN LUNG, SIGNAL = 0.85; EXPRESSED IN HELA, SIGNAL = 1.1; EXPRESSED IN ADULT LIVER, SIGNAL = 0.7; EXPRESSED IN BRAIN, SIGNAL = 0.87; EXPRESSED IN HEART, SIGNAL = 1.5; EST_HUMAN HIT: AI090876.1, EVALUE 7.00e-13
ISGSCPPKWRYDRPRPADRSRGSVPPEWRI

SEQ ID NO: 33705 - protein, 20 aa, Homo sapiens
  MAP TO AC007632.4; EXPRESSED IN HBL100, SIGNAL = 4.9; EXPRESSED IN HELA, SIGNAL = 8.6; EXPRESSED IN ADULT LIVER, SIGNAL = 9.6; EXPRESSED IN HEART, SIGNAL = 5.8; EXPRESSED IN PLACENTA, SIGNAL = 3.6; EXPRESSED IN BRAIN, SIGNAL = 6.6; EXPRESSED IN LUNG, SIGNAL = 7.7; EXPRESSED IN FETAL LIVER, SIGNAL = 5.2; EXPRESSED IN BONE MARROW, SIGNAL = 5.2; EXPRESSED IN BT474, SIGNAL = 5.2; EST_HUMAN HIT: AI961087.1, EVALUE 1.50e+00
GPAARHAYPCRGLLQGPSLP

SEQ ID NO: 33706 - protein, 58 aa, Homo sapiens
  MAP TO AC007603.1; EXPRESSED IN BRAIN, SIGNAL = 2.2; EXPRESSED IN HELA, SIGNAL = 2.2; EXPRESSED IN ADULT LIVER, SIGNAL = 1.9; EXPRESSED IN PLACENTA, SIGNAL = 2.4; EXPRESSED IN BT474, SIGNAL =   2; EXPRESSED IN BONE MARROW, SIGNAL = 2.5; EXPRESSED IN HBL100, SIGNAL = 1.9; EXPRESSED IN FETAL LIVER, SIGNAL = 1.8; EXPRESSED IN LUNG, SIGNAL = 2.7; EXPRESSED IN HEART, SIGNAL =   2; EST_HUMAN HIT: BE892160.1, EVALUE 9.30e-01; SWISSPROT HIT: Q58659, EVALUE 3.40e+00; EST_HUMAN HIT: BE258214.1, EVALUE 4.00e+00
NLEKDGENPIQQMSPLQANPMNELKRRLKTVCRPSGILLGPLFTGCPGKPLSLMGIQS

SEQ ID NO: 33707 - protein, 33 aa, Homo sapiens
  MAP TO AC007603.1; EXPRESSED IN BRAIN, SIGNAL = 2.2; EXPRESSED IN HELA, SIGNAL = 2.2; EXPRESSED IN ADULT LIVER, SIGNAL = 1.9; EXPRESSED IN PLACENTA, SIGNAL = 2.4; EXPRESSED IN BT474, SIGNAL =   2; EXPRESSED IN BONE MARROW, SIGNAL = 2.5; EXPRESSED IN HBL100, SIGNAL = 1.9; EXPRESSED IN FETAL LIVER, SIGNAL = 1.8; EXPRESSED IN LUNG, SIGNAL = 2.7; EXPRESSED IN HEART, SIGNAL =   2; EST_HUMAN HIT: AI800127.1, EVALUE 5.20e+00
PRGDCSVPFPPFRTWRKMGRIQSSRCPLCKQIP

SEQ ID NO: 33708 - protein, 133 aa, Homo sapiens
  MAP TO AC007603.1; EXPRESSED IN FETAL LIVER, SIGNAL = 5.6; EXPRESSED IN HELA, SIGNAL = 6.1; EXPRESSED IN HEART, SIGNAL = 5.2; EXPRESSED IN BT474, SIGNAL = 5.9; EXPRESSED IN BONE MARROW, SIGNAL =   7; EXPRESSED IN LUNG, SIGNAL = 7.7; EXPRESSED IN ADULT LIVER, SIGNAL = 4.2; EXPRESSED IN BRAIN, SIGNAL =   7; EXPRESSED IN PLACENTA, SIGNAL = 6.2; EXPRESSED IN HBL100, SIGNAL = 5.1; EST_HUMAN HIT: AA323547.1, EVALUE 5.00e-04; SWISSPROT HIT: P39194, EVALUE 4.70e+00
PKLPASSYLLSQPPGCRDYRHEPPHPAQESFLKPPPQKFCLERNNDMKRFHKHTQGFRALQHSFFFLASHVAEFGRPWNVHRPQSQDPTSHSANIKTFQDANPEATNKARPEFILAGPGFPLAVSDPSSQSCP

SEQ ID NO: 33709 - protein, 41 aa, Homo sapiens
  MAP TO AC007603.1; EXPRESSED IN FETAL LIVER, SIGNAL = 5.6; EXPRESSED IN HELA, SIGNAL = 6.1; EXPRESSED IN HEART, SIGNAL = 5.2; EXPRESSED IN BT474, SIGNAL = 5.9; EXPRESSED IN BONE MARROW, SIGNAL =   7; EXPRESSED IN LUNG, SIGNAL = 7.7; EXPRESSED IN ADULT LIVER, SIGNAL = 4.2; EXPRESSED IN BRAIN, SIGNAL =   7; EXPRESSED IN PLACENTA, SIGNAL = 6.2; EXPRESSED IN HBL100, SIGNAL = 5.1; EST_HUMAN HIT: H56736.1, EVALUE 3.00e-03; SWISSPROT HIT: P23963, EVALUE 1.10e-01
FPNSRPQAISCLSPQGAGITGMSHHTQLRKAFLNLLLRNSA

SEQ ID NO: 33710 - protein, 27 aa, Homo sapiens
  MAP TO AC007563.1; EXPRESSED IN FETAL LIVER, SIGNAL =  12; EXPRESSED IN PLACENTA, SIGNAL = 1.9; EXPRESSED IN BT474, SIGNAL = 3.1; EXPRESSED IN BONE MARROW, SIGNAL = 0.89; EXPRESSED IN HBL100, SIGNAL = 1.2; EXPRESSED IN LUNG, SIGNAL = 1.6; EXPRESSED IN ADULT LIVER, SIGNAL = 8.3; EXPRESSED IN BRAIN, SIGNAL = 1.3; EXPRESSED IN HEART, SIGNAL = 2.2; EXPRESSED IN HELA, SIGNAL = 0.67; EST_HUMAN HIT: BF316189.1, EVALUE 8.00e-06; EST_HUMAN HIT: AI752281.1, EVALUE 6.00e-06
FLPFLSWQTMAMTTQKEAWWRTTWTAP

SEQ ID NO: 33711 - protein, 54 aa, Homo sapiens
  MAP TO AC007562.2; EXPRESSED IN BT474, SIGNAL =   5; EXPRESSED IN HBL100, SIGNAL = 3.7; EXPRESSED IN FETAL LIVER, SIGNAL =   2; EXPRESSED IN HELA, SIGNAL = 2.5; EXPRESSED IN BRAIN, SIGNAL = 2.8; EXPRESSED IN PLACENTA, SIGNAL = 1.5; EXPRESSED IN BONE MARROW, SIGNAL = 2.3; EXPRESSED IN LUNG, SIGNAL = 3.1; EXPRESSED IN ADULT LIVER, SIGNAL = 1.4; EXPRESSED IN HEART, SIGNAL = 1.5; EST_HUMAN HIT: AI929065.1, EVALUE 1.00e-13
PVPRRSKACAASPWLTQWPHPRKSQRQRPQPQRLGVNLCVGTPTGPCRRPWRSC

SEQ ID NO: 33712 - protein, 56 aa, Homo sapiens
  MAP TO AP000087.1; EXPRESSED IN HELA, SIGNAL = 2.3; EXPRESSED IN ADULT LIVER, SIGNAL =   3; EXPRESSED IN BRAIN, SIGNAL = 1.5; EXPRESSED IN HEART, SIGNAL = 6.2; EXPRESSED IN PLACENTA, SIGNAL = 1.6; EXPRESSED IN LUNG, SIGNAL = 1.2; EXPRESSED IN FETAL LIVER, SIGNAL = 3.6; EXPRESSED IN HBL100, SIGNAL = 4.9; EXPRESSED IN BONE MARROW, SIGNAL = 2.5; EXPRESSED IN BT474, SIGNAL = 1.9; SWISSPROT HIT: P18859, EVALUE 5.00e-24; EST_HUMAN HIT: AA128761.1, EVALUE 5.00e-24
ISMILQRLFRFSSVIRSAVSVHLRRNIGVTAVAFNKELDPIQKLFVDKIREYKSKR

SEQ ID NO: 33713 - protein, 66 aa, Homo sapiens
  MAP TO AP000056.1; EXPRESSED IN BT474, SIGNAL =  13; EXPRESSED IN HELA, SIGNAL =  10; EXPRESSED IN HEART, SIGNAL = 7.2; EXPRESSED IN BRAIN, SIGNAL = 8.4; EXPRESSED IN ADULT LIVER, SIGNAL = 6.7; EXPRESSED IN LUNG, SIGNAL =  12; EXPRESSED IN HBL100, SIGNAL =   9; EXPRESSED IN BONE MARROW, SIGNAL =  15; EXPRESSED IN PLACENTA, SIGNAL =  14; EXPRESSED IN FETAL LIVER, SIGNAL =  11; EST_HUMAN HIT: BF665788.1, EVALUE 3.30e+00; SWISSPROT HIT: P21092, EVALUE 8.60e+00
MELTVGIRYRMNDVIKGKCQIMAQTVSLGDCLKDAEAAMGQQCFVEKMGIVLSLEGCCFWNKLKDN

SEQ ID NO: 33714 - protein, 32 aa, Homo sapiens
  MAP TO AP000047.1; EXPRESSED IN PLACENTA, SIGNAL = 1.3; EXPRESSED IN BONE MARROW, SIGNAL = 1.9; EXPRESSED IN LUNG, SIGNAL = 1.4; EXPRESSED IN HELA, SIGNAL = 1.4; EXPRESSED IN BRAIN, SIGNAL = 1.3; EXPRESSED IN HEART, SIGNAL = 1.3; EXPRESSED IN BT474, SIGNAL = 1.1; EXPRESSED IN HBL100, SIGNAL = 1.6; EXPRESSED IN FETAL LIVER, SIGNAL = 1.6; EXPRESSED IN ADULT LIVER, SIGNAL = 1.2; EST_HUMAN HIT: D80278.1, EVALUE 6.00e-11; EST_HUMAN HIT: AA812537.1, EVALUE 4.00e-11; SWISSPROT HIT: O95825, EVALUE 4.00e-12
RVIDVSNGKVHVAESCLEETGGLGVDIVLDAG

SEQ ID NO: 33715 - protein, 43 aa, Homo sapiens
  MAP TO AP000046.1; EXPRESSED IN PLACENTA, SIGNAL = 5.2; EXPRESSED IN BT474, SIGNAL = 5.3; EXPRESSED IN FETAL LIVER, SIGNAL = 4.9; EXPRESSED IN HELA, SIGNAL = 2.4; EXPRESSED IN ADULT LIVER, SIGNAL =   3; EXPRESSED IN BONE MARROW, SIGNAL = 3.2; EXPRESSED IN HBL100, SIGNAL = 5.1; EXPRESSED IN LUNG, SIGNAL = 3.8; EXPRESSED IN BRAIN, SIGNAL = 3.7; EXPRESSED IN HEART, SIGNAL = 2.8; SWISSPROT HIT: P18583, EVALUE 1.00e-06; EST_HUMAN HIT: BE258012.1, EVALUE 3.00e-11; EST_HUMAN HIT: AL041891.1, EVALUE 4.00e-11
PSFASPNKKHAKATAATVVLQAMGLVPKDLMANATCFRSASRR

SEQ ID NO: 33716 - protein, 112 aa, Homo sapiens
  MAP TO AP000046.1; EXPRESSED IN BONE MARROW, SIGNAL = 7.7; EXPRESSED IN ADULT LIVER, SIGNAL = 5.2; EXPRESSED IN PLACENTA, SIGNAL = 7.6; EXPRESSED IN BT474, SIGNAL = 7.8; EXPRESSED IN HBL100, SIGNAL = 7.9; EXPRESSED IN LUNG, SIGNAL = 8.2; EXPRESSED IN HELA, SIGNAL = 7.1; EXPRESSED IN BRAIN, SIGNAL = 8.3; EXPRESSED IN FETAL LIVER, SIGNAL = 8.9; EXPRESSED IN HEART, SIGNAL = 5.4; EST_HUMAN HIT: BE168161.1, EVALUE 1.00e-50; SWISSPROT HIT: P18583, EVALUE 1.00e-52; EST_HUMAN HIT: AU123890.1, EVALUE 2.00e-51
GEEPHAEEHLKGDFYESEHGINIDLNINNHLIAKEMEHNTVCAAGTSPVGEIGEEKILPTSETKQRTVLDTYPGVSEADAGETLSSTGPFALEPDATGTSKGIEFTTASTLS

SEQ ID NO: 33717 - protein, 71 aa, Homo sapiens
  MAP TO AP000046.1; EXPRESSED IN PLACENTA, SIGNAL = 1.1; EXPRESSED IN BT474, SIGNAL = 2.5; EXPRESSED IN BONE MARROW, SIGNAL = 2.8; EXPRESSED IN ADULT LIVER, SIGNAL = 1.5; EXPRESSED IN HEART, SIGNAL =   1; EXPRESSED IN HBL100, SIGNAL = 7.2; EXPRESSED IN FETAL LIVER, SIGNAL =   2; EXPRESSED IN LUNG, SIGNAL =   1; EXPRESSED IN HELA, SIGNAL = 2.5; EXPRESSED IN BRAIN, SIGNAL = 1.5; EST_HUMAN HIT: BE265029.1, EVALUE 3.00e-33; SWISSPROT HIT: P22102, EVALUE 4.00e-34
FPEAQALGLEVFHAGTALKNGKVVTHGGRVLAVTAIRENLISALEEAKKGLAAIKFEGAIYRKDVGFRAIA

SEQ ID NO: 33718 - protein, 321 aa, Homo sapiens
  MAP TO AP000046.1; EXPRESSED IN PLACENTA, SIGNAL = 2.8; EXPRESSED IN BT474, SIGNAL = 6.4; EXPRESSED IN BONE MARROW, SIGNAL = 1.9; EXPRESSED IN BRAIN, SIGNAL = 3.9; EXPRESSED IN HELA, SIGNAL = 7.3; EXPRESSED IN HBL100, SIGNAL = 3.5; EXPRESSED IN FETAL LIVER, SIGNAL = 5.5; EXPRESSED IN LUNG, SIGNAL = 3.7; EXPRESSED IN ADULT LIVER, SIGNAL = 2.7; EXPRESSED IN HEART, SIGNAL = 2.4; EST_HUMAN HIT: BE300756.1, EVALUE 2.00e-29; EST_HUMAN HIT: BE835673.1, EVALUE 2.00e-29; SWISSPROT HIT: P18583, EVALUE 3.00e-30
LVRPLLPKDMERLTSLRAGIEGPLLASDVGRDRSAASPVVSSMPERASESSSEEKDDYEIFVKVKDTHEKSKKNKNRDKGEKEKKRDSSLRSRSKRSKSSEHKSRKRTSESRSRARKRSSKSKSHRSQTRSRSRSRRRRRSSRSRSKSRGRRSVSKEKRKRSPKHRSKSRERKRKRSSSRDNRKTVRARSRTPSRRSRSHTPSRRRRSRSVGRRRSFSISPSRRSRTPSRRSRTPSRRSRTPSRRSRTPSRRSRTPSRRSRTPSRRRRSRSVVRRRSFSISPVRLRRSRTPLRRRFSRSPIRRKRSRSSERGRSPKRLTDL

SEQ ID NO: 33719 - protein, 304 aa, Homo sapiens
  MAP TO AP000046.1; EXPRESSED IN HBL100, SIGNAL = 6.4; EXPRESSED IN FETAL LIVER, SIGNAL =  10; EXPRESSED IN HELA, SIGNAL = 4.6; EXPRESSED IN BRAIN, SIGNAL = 5.5; EXPRESSED IN HEART, SIGNAL = 4.7; EXPRESSED IN ADULT LIVER, SIGNAL = 3.2; EXPRESSED IN LUNG, SIGNAL = 8.6; EXPRESSED IN BONE MARROW, SIGNAL = 3.7; EXPRESSED IN BT474, SIGNAL =  16; EXPRESSED IN PLACENTA, SIGNAL =  18; EST_HUMAN HIT: BE256579.1, EVALUE 5.00e-43; SWISSPROT HIT: P18583, EVALUE 5.00e-66; EST_HUMAN HIT: AW162837.1, EVALUE 2.00e-44
SMGADRSMMSSYSAADRSMMSSYSAADRSMMSSYTADRSMMSMAADSYTDSYTDTYTEAYMVPPLPPEEPPTMPPLPPEEPPMTPPLPPEEPPEGPALPTEQSALTAENTWPTEVPSSPSEESVSQPEPPVSQSEISEPSAVPTDYSVSASDPSVLVSEAAVTVPEPPPEPESSITLTPVESAVVAEEHEVVPERPVTCMVSETPAMSAEPTVLASEPPVMSETAETFDSMRASGHVASEVSTSLLVPAVTTPVLAESILEPPAMAAPESSAMAVLESSAVTVLESSTVTVLESSTVTVLEPSV

SEQ ID NO: 33720 - protein, 20 aa, Homo sapiens
  MAP TO AP000046.1; EXPRESSED IN HBL100, SIGNAL = 6.4; EXPRESSED IN FETAL LIVER, SIGNAL =  10; EXPRESSED IN HELA, SIGNAL = 4.6; EXPRESSED IN BRAIN, SIGNAL = 5.5; EXPRESSED IN HEART, SIGNAL = 4.7; EXPRESSED IN ADULT LIVER, SIGNAL = 3.2; EXPRESSED IN LUNG, SIGNAL = 8.6; EXPRESSED IN BONE MARROW, SIGNAL = 3.7; EXPRESSED IN BT474, SIGNAL =  16; EXPRESSED IN PLACENTA, SIGNAL =  18
LRNLTLTHRRLRLRYRLFRW

SEQ ID NO: 33721 - protein, 139 aa, Homo sapiens
  MAP TO AP000046.1; EXPRESSED IN BONE MARROW, SIGNAL = 4.5; EXPRESSED IN ADULT LIVER, SIGNAL = 2.2; EXPRESSED IN PLACENTA, SIGNAL = 4.2; EXPRESSED IN BT474, SIGNAL =   6; EXPRESSED IN FETAL LIVER, SIGNAL = 5.3; EXPRESSED IN LUNG, SIGNAL = 4.3; EXPRESSED IN HELA, SIGNAL = 3.5; EXPRESSED IN BRAIN, SIGNAL =   4; EXPRESSED IN HBL100, SIGNAL = 3.8; EXPRESSED IN HEART, SIGNAL = 3.5; EST_HUMAN HIT: AA853678.1, EVALUE 2.00e-21
HRCLRLPQQPCCRCHLRMPRMFHRCHPHRLLQLCRRHRLFGQLHCYCYRRLLWQLYCCCHQRQPWQLLCHHRWLWYLLWWLQPHGWCWKPWQFLRQLWHWCHRGPWQLRHCCRRGPWQLRHWGRKGPWQLWHRGSRGPR

SEQ ID NO: 33722 - protein, 54 aa, Homo sapiens
  MAP TO AP000036.1; EXPRESSED IN BT474, SIGNAL = 1.2; EXPRESSED IN BONE MARROW, SIGNAL = 1.2; EXPRESSED IN FETAL LIVER, SIGNAL = 1.3; EXPRESSED IN HELA, SIGNAL = 1.1; EXPRESSED IN ADULT LIVER, SIGNAL = 1.2; EXPRESSED IN PLACENTA, SIGNAL = 1.4; EXPRESSED IN HBL100, SIGNAL = 1.2; EXPRESSED IN LUNG, SIGNAL = 1.5; EXPRESSED IN BRAIN, SIGNAL = 1.7; EXPRESSED IN HEART, SIGNAL = 1.3; EST_HUMAN HIT: AA418916.1, EVALUE 4.00e-24; SWISSPROT HIT: P47651, EVALUE 3.40e+00
ISLEDLSPSVVLHMTEKLGYKNSDVINTVLSNRACHILAIYFLLNKKLERYLSG

SEQ ID NO: 33723 - protein, 75 aa, Homo sapiens
  MAP TO AP000036.1; EXPRESSED IN BT474, SIGNAL = 1.2; EXPRESSED IN BONE MARROW, SIGNAL = 1.2; EXPRESSED IN FETAL LIVER, SIGNAL = 1.3; EXPRESSED IN HELA, SIGNAL = 1.1; EXPRESSED IN ADULT LIVER, SIGNAL = 1.2; EXPRESSED IN PLACENTA, SIGNAL = 1.4; EXPRESSED IN HBL100, SIGNAL = 1.2; EXPRESSED IN LUNG, SIGNAL = 1.5; EXPRESSED IN BRAIN, SIGNAL = 1.7; EXPRESSED IN HEART, SIGNAL = 1.3; EST_HUMAN HIT: AA418916.1, EVALUE 2.00e-15; SWISSPROT HIT: Q04891, EVALUE 5.10e+00
VLSLCTSQDFSGRSEPERRAAHDREAGLQEQRRDQHCALQPRLPHPGHLLPLKQETGALFVRGKCDPRGDRLCCL

SEQ ID NO: 33724 - protein, 140 aa, Homo sapiens
  MAP TO AP000036.1; EXPRESSED IN BT474, SIGNAL = 3.1; EXPRESSED IN BONE MARROW, SIGNAL = 3.3; EXPRESSED IN HELA, SIGNAL = 4.7; EXPRESSED IN HEART, SIGNAL = 4.4; EXPRESSED IN PLACENTA, SIGNAL = 3.8; EXPRESSED IN HBL100, SIGNAL = 3.2; EXPRESSED IN FETAL LIVER, SIGNAL = 3.7; EXPRESSED IN LUNG, SIGNAL = 5.6; EXPRESSED IN ADULT LIVER, SIGNAL =   5; EXPRESSED IN BRAIN, SIGNAL = 4.6; EST_HUMAN HIT: AW890583.1, EVALUE 1.50e-01; SWISSPROT HIT: O02491, EVALUE 2.60e+00; EST_HUMAN HIT: BE841675.1, EVALUE 1.70e-01
FLHPGLFHPGLFHPGPFHRDPLHPDPLHPGPLHSGPLHPGPLYPGPLHPGPLYPGPLHPSEFHPGPLHPSELHPGALHPGALHPDSLHPDPLYLGPLHPSPLHPGPIHPDPLHPSPLHPDPLHPGPLHPGALHSGPLHPG

SEQ ID NO: 33725 - protein, 28 aa, Homo sapiens
  MAP TO AL096757.1; EXPRESSED IN HBL100, SIGNAL = 1.4; EXPRESSED IN LUNG, SIGNAL = 1.6; EXPRESSED IN ADULT LIVER, SIGNAL = 1.8; EXPRESSED IN PLACENTA, SIGNAL = 1.6; EXPRESSED IN BT474, SIGNAL = 1.3; EXPRESSED IN HEART, SIGNAL = 1.2; EXPRESSED IN BRAIN, SIGNAL = 1.4; EXPRESSED IN HELA, SIGNAL = 1.4; EXPRESSED IN FETAL LIVER, SIGNAL = 1.4; EXPRESSED IN BONE MARROW, SIGNAL = 1.7; EST_HUMAN HIT: BE217913.1, EVALUE 3.00e-09
AYLLLSELRDKEHGVWELSLQSCLRSSP

SEQ ID NO: 33726 - protein, 49 aa, Homo sapiens
  MAP TO AL096757.1; EXPRESSED IN PLACENTA, SIGNAL = 1.4; EXPRESSED IN BONE MARROW, SIGNAL = 1.7; EXPRESSED IN FETAL LIVER, SIGNAL = 1.3; EXPRESSED IN ADULT LIVER, SIGNAL = 1.2; EXPRESSED IN BRAIN, SIGNAL = 1.3; EXPRESSED IN BT474, SIGNAL = 1.6; EXPRESSED IN HBL100, SIGNAL = 1.3; EXPRESSED IN LUNG, SIGNAL = 1.3; EXPRESSED IN HELA, SIGNAL = 1.1; EXPRESSED IN HEART, SIGNAL = 1.4; SWISSPROT HIT: Q15746, EVALUE 2.00e+00; EST_HUMAN HIT: AW297639.1, EVALUE 3.90e-01
MGTLSLREKNDVARVPQRGCGRIRIGTQTCLTPELSGTRILSARLSLSP

SEQ ID NO: 33727 - protein, 87 aa, Homo sapiens
  MAP TO AL096757.1; EXPRESSED IN PLACENTA, SIGNAL = 1.8; EXPRESSED IN BT474, SIGNAL = 2.1; EXPRESSED IN BONE MARROW, SIGNAL =   1; EXPRESSED IN HBL100, SIGNAL = 2.2; EXPRESSED IN FETAL LIVER, SIGNAL = 1.7; EXPRESSED IN LUNG, SIGNAL = 1.8; EXPRESSED IN HELA, SIGNAL = 1.9; EXPRESSED IN ADULT LIVER, SIGNAL = 1.6; EXPRESSED IN BRAIN, SIGNAL = 2.3; EXPRESSED IN HEART, SIGNAL = 1.8
PSPSSSPSLLSSPSPSSPSPLPSLSSPSSLHHHHHHHHRHHHHHHYQHHHHYHHHHHHHHYHHHHHHHHHHHHHHHHCFVATHPGGH

SEQ ID NO: 33728 - protein, 29 aa, Homo sapiens
  MAP TO AL078477.5; EXPRESSED IN HEART, SIGNAL =   5; EXPRESSED IN PLACENTA, SIGNAL = 5.4; EXPRESSED IN FETAL LIVER, SIGNAL = 4.5; EXPRESSED IN LUNG, SIGNAL = 7.2; EXPRESSED IN HELA, SIGNAL = 4.3; EXPRESSED IN BT474, SIGNAL = 3.7; EXPRESSED IN BONE MARROW, SIGNAL = 4.8; EXPRESSED IN HBL100, SIGNAL = 5.4; EXPRESSED IN ADULT LIVER, SIGNAL = 4.4; EXPRESSED IN BRAIN, SIGNAL = 9.6
SEGNPLEEYPKDKQDRAQVPILLPESLQF

SEQ ID NO: 33729 - protein, 49 aa, Homo sapiens
  MAP TO AL078477.5; EXPRESSED IN ADULT LIVER, SIGNAL = 0.86; EXPRESSED IN BONE MARROW, SIGNAL = 1.4; EXPRESSED IN PLACENTA, SIGNAL = 0.88; EXPRESSED IN BT474, SIGNAL = 1.4; EXPRESSED IN LUNG, SIGNAL = 0.73; EXPRESSED IN HELA, SIGNAL = 1.6; EXPRESSED IN HEART, SIGNAL = 0.82; EXPRESSED IN HBL100, SIGNAL = 3.4; EXPRESSED IN FETAL LIVER, SIGNAL = 1.2; EST_HUMAN HIT: BE907607.1, EVALUE 2.00e-21; EST_HUMAN HIT: Z45780.1, EVALUE 3.00e-19
SNPQQAAELRAYLKSKGAEISEENSEGGLHVDLAQIIEACDVCLKEDDK

SEQ ID NO: 33730 - protein, 19 aa, Homo sapiens
  MAP TO AL078477.5; EXPRESSED IN ADULT LIVER, SIGNAL = 0.86; EXPRESSED IN BONE MARROW, SIGNAL = 1.4; EXPRESSED IN PLACENTA, SIGNAL = 0.88; EXPRESSED IN BT474, SIGNAL = 1.4; EXPRESSED IN LUNG, SIGNAL = 0.73; EXPRESSED IN HELA, SIGNAL = 1.6; EXPRESSED IN HEART, SIGNAL = 0.82; EXPRESSED IN HBL100, SIGNAL = 3.4; EXPRESSED IN FETAL LIVER, SIGNAL = 1.2; EST_HUMAN HIT: AW858856.1, EVALUE 1.00e-03
DCALSFVVSFIIEQSSTGC

SEQ ID NO: 33731 - protein, 347 aa, Homo sapiens
  MAP TO AL078477.5; EXPRESSED IN PLACENTA, SIGNAL = 1.4; EXPRESSED IN FETAL LIVER, SIGNAL = 0.69; EXPRESSED IN HELA, SIGNAL = 0.94; EXPRESSED IN BT474, SIGNAL = 0.82; EXPRESSED IN BONE MARROW, SIGNAL = 1.1; EXPRESSED IN HBL100, SIGNAL = 0.67; EXPRESSED IN LUNG, SIGNAL = 0.67; EXPRESSED IN ADULT LIVER, SIGNAL = 0.69; EXPRESSED IN HEART, SIGNAL = 0.94; EST_HUMAN HIT: BE179075.1, EVALUE 2.00e+00; SWISSPROT HIT: P54675, EVALUE 3.00e-03
LQLFEKSFKNEIDTVVSQDENQSEISLSKTLSLDKEVISQGQTSNVTDNRKSVTTEIKDKICLEKDNGCTEFKSPNNHFVVLDTAIETEKIHLERTRGLDVHHTDVNLEVENNKTSFNSILNETAHNTYHNNNKDVSENEPFKQFRLLPGTREHALEKEITNSDQTKADLDSSLDIKKNPVPCQKYSLRNSSNVMLDDKQCKIKQIQLLTKKSECSILLSKQTSDFLQVCNDTLEKSELTVPCDIVIDHHVSYAAFSANSKLLLKNSDKNVHSMSMLVKPNSSPGGKTMCKNMSDMQNSQFNNCLGYLENTNVNISHLHLNNENSHASQAKDVKTAVHMKTCTETEF

SEQ ID NO: 33732 - protein, 57 aa, Homo sapiens
  MAP TO AL050337.6; EXPRESSED IN LUNG, SIGNAL = 2.3; EXPRESSED IN HEART, SIGNAL = 1.7; EXPRESSED IN BRAIN, SIGNAL = 1.4; EXPRESSED IN PLACENTA, SIGNAL = 2.4; EXPRESSED IN BT474, SIGNAL = 1.4; EXPRESSED IN BONE MARROW, SIGNAL = 1.2; EXPRESSED IN HBL100, SIGNAL = 1.6; EXPRESSED IN FETAL LIVER, SIGNAL = 1.6; EXPRESSED IN HELA, SIGNAL = 0.84; EXPRESSED IN ADULT LIVER, SIGNAL = 1.6; EST_HUMAN HIT: BE045736.1, EVALUE 3.60e-01; SWISSPROT HIT: P15260, EVALUE 7.00e-30; EST_HUMAN HIT: AU143746.1, EVALUE 9.00e-29
VKNSEWIDACINISHHYCNISDHVGDPSNSLWVRVKARVGQKESAYAKSEEFAVCRD

SEQ ID NO: 33733 - protein, 43 aa, Homo sapiens
  MAP TO AL050337.6; EXPRESSED IN LUNG, SIGNAL = 2.3; EXPRESSED IN HEART, SIGNAL = 1.7; EXPRESSED IN BRAIN, SIGNAL = 1.4; EXPRESSED IN PLACENTA, SIGNAL = 2.4; EXPRESSED IN BT474, SIGNAL = 1.4; EXPRESSED IN BONE MARROW, SIGNAL = 1.2; EXPRESSED IN HBL100, SIGNAL = 1.6; EXPRESSED IN FETAL LIVER, SIGNAL = 1.6; EXPRESSED IN HELA, SIGNAL = 0.84; EXPRESSED IN ADULT LIVER, SIGNAL = 1.6; EST_HUMAN HIT: AU143746.1, EVALUE 3.00e-07
LRIQNGLMPASIFLIIIVIFLIMLVIHQILFGSELKPGLDKKN

SEQ ID NO: 33734 - protein, 184 aa, Homo sapiens
  MAP TO AL050337.6; EXPRESSED IN PLACENTA, SIGNAL = 4.4; EXPRESSED IN LUNG, SIGNAL = 4.2; EXPRESSED IN HEART, SIGNAL =   2; EXPRESSED IN HBL100, SIGNAL = 3.9; EXPRESSED IN FETAL LIVER, SIGNAL =   3; EXPRESSED IN HELA, SIGNAL = 1.3; EXPRESSED IN BRAIN, SIGNAL =   2; EXPRESSED IN BT474, SIGNAL = 1.9; EXPRESSED IN BONE MARROW, SIGNAL = 6.5; EXPRESSED IN ADULT LIVER, SIGNAL = 3.8; EST_HUMAN HIT: AA024625.1, EVALUE 3.00e-50; SWISSPROT HIT: P15260, EVALUE 5.00e-81; EST_HUMAN HIT: AU117692.1, EVALUE 3.00e-70
ISVVRSATLETKPESKYVSLITSYQPFSLEKEVVCEEPLSPATVPGMHTEDNPGKVEHTEELSSITEVVTTEENIPDVVPGSHLTPIERESSSPLSSNQSEPGSIALNSYHSRNCSESDHSRNGFDTDSSCLESHSSLSDSEFPPNNKGEIKTEGQELITVIKAPTSFGYDKPHVLVDLLVDDS

SEQ ID NO: 33735 - protein, 46 aa, Homo sapiens
  MAP TO AL050327.6; EXPRESSED IN HBL100, SIGNAL = 1.7; EXPRESSED IN HELA, SIGNAL = 2.4; EXPRESSED IN ADULT LIVER, SIGNAL = 2.8; EXPRESSED IN PLACENTA, SIGNAL = 2.2; EXPRESSED IN BONE MARROW, SIGNAL = 1.9; EXPRESSED IN BT474, SIGNAL = 2.6; EXPRESSED IN HEART, SIGNAL = 1.8; EXPRESSED IN BRAIN, SIGNAL = 1.7; EXPRESSED IN LUNG, SIGNAL = 2.4; EXPRESSED IN FETAL LIVER, SIGNAL = 2.7; SWISSPROT HIT: P22448, EVALUE 3.50e+00; EST_HUMAN HIT: AW842621.1, EVALUE 4.60e+00; EST_HUMAN HIT: BF131312.1, EVALUE 5.20e+00
MNYYSDIVAGPSAIPYSLLFPAALGTADPGLFAGCPHPPVGGGQDK

SEQ ID NO: 33736 - protein, 56 aa, Homo sapiens
  MAP TO AL050327.6; EXPRESSED IN HBL100, SIGNAL = 0.92; EXPRESSED IN FETAL LIVER, SIGNAL = 1.1; EXPRESSED IN LUNG, SIGNAL = 0.92; EXPRESSED IN HELA, SIGNAL = 0.77; EXPRESSED IN BRAIN, SIGNAL = 0.9; EXPRESSED IN PLACENTA, SIGNAL = 1.4; EXPRESSED IN HEART, SIGNAL = 1.2; EXPRESSED IN ADULT LIVER, SIGNAL = 0.93; EXPRESSED IN BONE MARROW, SIGNAL = 1.3; EXPRESSED IN BT474, SIGNAL = 1.3; EST_HUMAN HIT: T71741.1, EVALUE 5.40e+00; SWISSPROT HIT: P14605, EVALUE 2.00e+00
MNKETLNSKRQKRNVYKIPQNSLLNFRGNDWVIFFQCCQKAKILSWEKDCFKVLQD

SEQ ID NO: 33737 - protein, 25 aa, Homo sapiens
  MAP TO AL050326.3; EXPRESSED IN LUNG, SIGNAL = 6.9; EXPRESSED IN ADULT LIVER, SIGNAL = 4.8; EXPRESSED IN BRAIN, SIGNAL = 6.5; EXPRESSED IN BT474, SIGNAL = 4.3; EXPRESSED IN HEART, SIGNAL = 4.4; EXPRESSED IN PLACENTA, SIGNAL =   5; EXPRESSED IN HELA, SIGNAL = 5.9; EXPRESSED IN FETAL LIVER, SIGNAL = 4.4; EXPRESSED IN HBL100, SIGNAL = 4.4; EXPRESSED IN BONE MARROW, SIGNAL = 4.6
DIVMMMVTMVVIMMIAMVMMTVMMM

SEQ ID NO: 33738 - protein, 286 aa, Homo sapiens
  MAP TO AL050306.5; EXPRESSED IN ADULT LIVER, SIGNAL = 1.5; EXPRESSED IN HBL100, SIGNAL = 1.5; EXPRESSED IN LUNG, SIGNAL = 2.1; EXPRESSED IN HELA, SIGNAL = 2.6; EXPRESSED IN PLACENTA, SIGNAL = 1.4; EXPRESSED IN BT474, SIGNAL = 2.7; EXPRESSED IN BONE MARROW, SIGNAL = 1.8; EXPRESSED IN FETAL LIVER, SIGNAL = 1.7; EXPRESSED IN BRAIN, SIGNAL = 1.7; EXPRESSED IN HEART, SIGNAL = 1.5; SWISSPROT HIT: P38898, EVALUE 1.10e-02; EST_HUMAN HIT: AI903744.1, EVALUE 2.00e-14
DFSKLNINSMHNREYYMAEVDRGVYARNPNLCSDSRVSHTRNDNYSSYNNVYLAVADTHPEGNLKLHRSASQNRLQPFPHGYHEALTRVQSYGPEDSKQGPHKQSVPHLALHAQHPSTGTRSSCPADYPMPPNIHPGATPQPGRALVMTRMDSISDSRLYESNPVRQRRPPLCREQHASWDPLPCTTDSYGYHSYPLSNSLMQPCYEPVMVRSVPEKMEQLWRNPWVGMCNDSREHMIPEHQYQTYKNLCNIFPSNIVLAVMEKNPHTADAQQLAALIVAKLRAAR

SEQ ID NO: 33739 - protein, 35 aa, Homo sapiens
  MAP TO AL050305.9; EXPRESSED IN FETAL LIVER, SIGNAL = 1.4; EXPRESSED IN HEART, SIGNAL = 3.8; EXPRESSED IN PLACENTA, SIGNAL = 0.75; EXPRESSED IN BT474, SIGNAL = 0.97; EXPRESSED IN BONE MARROW, SIGNAL = 0.78; EXPRESSED IN HBL100, SIGNAL = 1.5; EXPRESSED IN LUNG, SIGNAL = 0.91; EXPRESSED IN HELA, SIGNAL = 1.6; EXPRESSED IN ADULT LIVER, SIGNAL =   1; EXPRESSED IN BRAIN, SIGNAL = 1.2
DDVVTSCYKQTGPTCATHIVLIKHMNILALQKMGT

SEQ ID NO: 33740 - protein, 52 aa, Homo sapiens
  MAP TO AL049837.3; EXPRESSED IN PLACENTA, SIGNAL = 3.3; EXPRESSED IN BT474, SIGNAL = 3.2; EXPRESSED IN BONE MARROW, SIGNAL = 2.1; EXPRESSED IN FETAL LIVER, SIGNAL = 2.2; EXPRESSED IN HELA, SIGNAL = 2.2; EXPRESSED IN ADULT LIVER, SIGNAL = 1.8; EXPRESSED IN BRAIN, SIGNAL = 2.1; EXPRESSED IN HEART, SIGNAL = 2.4; EXPRESSED IN HBL100, SIGNAL = 2.5; EXPRESSED IN LUNG, SIGNAL = 2.9; EST_HUMAN HIT: BE061177.1, EVALUE 2.00e-15; SWISSPROT HIT: P07572, EVALUE 1.20e+00
GYINSLALCHNLIRSNLDCFLLLQDITLVHYTDDIMLIGSSEQEVANTLDLL

SEQ ID NO: 33741 - protein, 21 aa, Homo sapiens
  MAP TO AL049836.2; EXPRESSED IN HELA, SIGNAL = 3.6; EXPRESSED IN ADULT LIVER, SIGNAL = 2.7; EXPRESSED IN BT474, SIGNAL = 3.1; EXPRESSED IN HBL100, SIGNAL = 2.5; EXPRESSED IN FETAL LIVER, SIGNAL = 2.8; EXPRESSED IN LUNG, SIGNAL = 3.7; EXPRESSED IN HEART, SIGNAL = 3.4; EXPRESSED IN PLACENTA, SIGNAL = 2.6; EXPRESSED IN BONE MARROW, SIGNAL = 3.3; EXPRESSED IN BRAIN, SIGNAL = 3.7; EST_HUMAN HIT: AI866347.1, EVALUE 9.00e-03
LALIRHQICQHLDLGLPSLQN

SEQ ID NO: 33742 - protein, 18 aa, Homo sapiens
  MAP TO AL049776.2; EXPRESSED IN BT474, SIGNAL = 2.9; EXPRESSED IN HELA, SIGNAL = 3.7; EXPRESSED IN PLACENTA, SIGNAL = 1.6; EXPRESSED IN BONE MARROW, SIGNAL = 3.4; EXPRESSED IN HBL100, SIGNAL = 4.6; EXPRESSED IN FETAL LIVER, SIGNAL = 2.4; EXPRESSED IN LUNG, SIGNAL = 1.8; EXPRESSED IN ADULT LIVER, SIGNAL = 1.9; EXPRESSED IN BRAIN, SIGNAL =   3; EXPRESSED IN HEART, SIGNAL = 4.5; EST_HUMAN HIT: BE384475.1, EVALUE 9.90e-02; EST_HUMAN HIT: AW244134.1, EVALUE 1.40e-01
MAQVKVFGAGYPSLATMT

SEQ ID NO: 33743 - protein, 54 aa, Homo sapiens
  MAP TO AL049767.9; EXPRESSED IN BT474, SIGNAL = 1.8; EXPRESSED IN ADULT LIVER, SIGNAL = 1.5; EXPRESSED IN HEART, SIGNAL = 2.1; EXPRESSED IN BONE MARROW, SIGNAL = 2.3; EXPRESSED IN BRAIN, SIGNAL = 1.9; EXPRESSED IN HELA, SIGNAL = 2.2; EXPRESSED IN PLACENTA, SIGNAL = 2.2; EXPRESSED IN LUNG, SIGNAL = 2.2; EXPRESSED IN FETAL LIVER, SIGNAL = 1.6; EXPRESSED IN HBL100, SIGNAL = 1.7; SWISSPROT HIT: Q03699, EVALUE 1.50e+00; EST_HUMAN HIT: AW440237.1, EVALUE 4.00e-11
DLWLFTRGTVYWGKGNDQTFQGLLDTGSELTLIPGDPKHHCGPPGPKVRAYGDQ

SEQ ID NO: 33744 - protein, 27 aa, Homo sapiens
  MAP TO AL049767.9; EXPRESSED IN ADULT LIVER, SIGNAL =   5; EXPRESSED IN BRAIN, SIGNAL = 7.7; EXPRESSED IN PLACENTA, SIGNAL = 5.3; EXPRESSED IN BT474, SIGNAL = 4.9; EXPRESSED IN HEART, SIGNAL = 5.4; EXPRESSED IN FETAL LIVER, SIGNAL = 7.6; EXPRESSED IN HELA, SIGNAL = 6.1; EXPRESSED IN LUNG, SIGNAL = 6.5; EXPRESSED IN HBL100, SIGNAL = 5.2; EXPRESSED IN BONE MARROW, SIGNAL = 6.8; EST_HUMAN HIT: AA001415.1, EVALUE 9.00e-07
PNGAVRRGPPSCRPQNGRSTDSLQCAP

SEQ ID NO: 33745 - protein, 47 aa, Homo sapiens
  MAP TO AL049745.9; EXPRESSED IN BT474, SIGNAL =   1; EXPRESSED IN BONE MARROW, SIGNAL = 1.4; EXPRESSED IN HBL100, SIGNAL =   1; EXPRESSED IN BRAIN, SIGNAL = 1.5; EXPRESSED IN ADULT LIVER, SIGNAL = 1.3; EXPRESSED IN LUNG, SIGNAL = 1.4; EXPRESSED IN PLACENTA, SIGNAL = 1.1; EXPRESSED IN HEART, SIGNAL = 1.1; EXPRESSED IN HELA, SIGNAL = 1.5; EXPRESSED IN FETAL LIVER, SIGNAL = 1.2; EST_HUMAN HIT: BE897253.1, EVALUE 8.90e+00
GGVVEGQWNEEAEDLARLVEMIALGAQNHSFLPIRFVSVLPGRVGLP

SEQ ID NO: 33746 - protein, 39 aa, Homo sapiens
  MAP TO AL049737.4; EXPRESSED IN BT474, SIGNAL = 1.5; EXPRESSED IN HBL100, SIGNAL = 1.8; EXPRESSED IN FETAL LIVER, SIGNAL = 1.5; EXPRESSED IN LUNG, SIGNAL = 1.4; EXPRESSED IN BRAIN, SIGNAL = 1.5; EXPRESSED IN PLACENTA, SIGNAL =   2; EXPRESSED IN HEART, SIGNAL = 1.5; EXPRESSED IN ADULT LIVER, SIGNAL = 1.5; EXPRESSED IN HELA, SIGNAL = 1.3; EXPRESSED IN BONE MARROW, SIGNAL = 1.8
LSAYQLSSMMLVLRIQKGAKQESSALKEPRVPVPRSVKE

SEQ ID NO: 33747 - protein, 105 aa, Homo sapiens
  MAP TO AL049636.21; EXPRESSED IN BT474, SIGNAL =   4; EXPRESSED IN BONE MARROW, SIGNAL = 2.2; EXPRESSED IN HBL100, SIGNAL = 9.2; EXPRESSED IN HELA, SIGNAL = 3.1; EXPRESSED IN ADULT LIVER, SIGNAL = 3.8; EXPRESSED IN BRAIN, SIGNAL = 5.6; EXPRESSED IN PLACENTA, SIGNAL = 2.3; EXPRESSED IN FETAL LIVER, SIGNAL = 4.9; EXPRESSED IN LUNG, SIGNAL = 2.6; EXPRESSED IN HEART, SIGNAL = 3.6; EST_HUMAN HIT: BE767589.1, EVALUE 5.00e-20; SWISSPROT HIT: Q99615, EVALUE 2.00e-31; EST_HUMAN HIT: AW959429.1, EVALUE 3.00e-15
DTYLKACLRRAQCYMNTKQYEEAVHNYEKVYQTEKTKEHKQLLKNAQLKLKKSKKKDYYKILGVDNNASEDETKKAYHKWALMHHPDWHSGGSAEVQKEEGKFKE

SEQ ID NO: 33748 - protein, 24 aa, Homo sapiens
  MAP TO AL049595.5; EXPRESSED IN HEART, SIGNAL = 3.2; EXPRESSED IN BONE MARROW, SIGNAL = 3.5; EXPRESSED IN FETAL LIVER, SIGNAL = 4.3; EXPRESSED IN HELA, SIGNAL = 6.1; EXPRESSED IN ADULT LIVER, SIGNAL = 4.2; EXPRESSED IN BRAIN, SIGNAL = 3.1; EXPRESSED IN PLACENTA, SIGNAL = 3.4; EXPRESSED IN BT474, SIGNAL = 3.4; EXPRESSED IN HBL100, SIGNAL = 5.9; EXPRESSED IN LUNG, SIGNAL = 3.5; SWISSPROT HIT: P28222, EVALUE 1.00e-07
AKAEEEVSECVVNTDHILYTVYST

SEQ ID NO: 33749 - protein, 45 aa, Homo sapiens
  MAP TO AL049595.5; EXPRESSED IN HEART, SIGNAL = 3.2; EXPRESSED IN BONE MARROW, SIGNAL = 3.5; EXPRESSED IN FETAL LIVER, SIGNAL = 4.3; EXPRESSED IN HELA, SIGNAL = 6.1; EXPRESSED IN ADULT LIVER, SIGNAL = 4.2; EXPRESSED IN BRAIN, SIGNAL = 3.1; EXPRESSED IN PLACENTA, SIGNAL = 3.4; EXPRESSED IN BT474, SIGNAL = 3.4; EXPRESSED IN HBL100, SIGNAL = 5.9; EXPRESSED IN LUNG, SIGNAL = 3.5
LPGLHLPTLESTAGYAIGAHHLGHHALQCLCDCHSVPDPETAHPG

SEQ ID NO: 33750 - protein, 49 aa, Homo sapiens
  MAP TO AL049575.7; EXPRESSED IN PLACENTA, SIGNAL = 1.1; EXPRESSED IN FETAL LIVER, SIGNAL = 1.4; EXPRESSED IN LUNG, SIGNAL = 1.6; EXPRESSED IN HELA, SIGNAL = 1.4; EXPRESSED IN BRAIN, SIGNAL = 1.5; EXPRESSED IN HEART, SIGNAL = 0.96; EXPRESSED IN BT474, SIGNAL = 1.3; EXPRESSED IN BONE MARROW, SIGNAL = 1.3; EXPRESSED IN ADULT LIVER, SIGNAL = 1.1; EXPRESSED IN HBL100, SIGNAL = 1.2
GQEAADVSGLPLTSMLPSLSTVPSGTSFSAVPPSQPVWAGTSSISKHPP

SEQ ID NO: 33751 - protein, 30 aa, Homo sapiens
  MAP TO AL049575.7; EXPRESSED IN PLACENTA, SIGNAL = 1.1; EXPRESSED IN FETAL LIVER, SIGNAL = 1.4; EXPRESSED IN LUNG, SIGNAL = 1.6; EXPRESSED IN HELA, SIGNAL = 1.4; EXPRESSED IN BRAIN, SIGNAL = 1.5; EXPRESSED IN HEART, SIGNAL = 0.96; EXPRESSED IN BT474, SIGNAL = 1.3; EXPRESSED IN BONE MARROW, SIGNAL = 1.3; EXPRESSED IN ADULT LIVER, SIGNAL = 1.1; EXPRESSED IN HBL100, SIGNAL = 1.2
TALKDVPDGTVDNEGSMLVRGKPDTSAASC

SEQ ID NO: 33752 - protein, 46 aa, Homo sapiens
  MAP TO AL049575.7; EXPRESSED IN BT474, SIGNAL =   3; EXPRESSED IN BONE MARROW, SIGNAL =   2; EXPRESSED IN HBL100, SIGNAL = 1.7; EXPRESSED IN FETAL LIVER, SIGNAL = 2.1; EXPRESSED IN ADULT LIVER, SIGNAL = 1.5; EXPRESSED IN BRAIN, SIGNAL =   2; EXPRESSED IN PLACENTA, SIGNAL = 2.8; EXPRESSED IN HELA, SIGNAL = 1.7; EXPRESSED IN HEART, SIGNAL = 1.5; EXPRESSED IN LUNG, SIGNAL =   2; SWISSPROT HIT: P47794, EVALUE 4.60e+00
VLGEGETDGTVLPWGSKTQVWMNLLNGDPLLGTARNAILLRIQKHL

SEQ ID NO: 33753 - protein, 67 aa, Homo sapiens
  MAP TO AL049575.7; EXPRESSED IN BRAIN, SIGNAL = 2.3; EXPRESSED IN BT474, SIGNAL = 1.4; EXPRESSED IN HBL100, SIGNAL = 1.5; EXPRESSED IN HELA, SIGNAL = 1.3; EXPRESSED IN ADULT LIVER, SIGNAL = 1.4; EXPRESSED IN PLACENTA, SIGNAL = 1.7; EXPRESSED IN BONE MARROW, SIGNAL = 2.1; EXPRESSED IN FETAL LIVER, SIGNAL = 1.6; EXPRESSED IN LUNG, SIGNAL = 1.6; EXPRESSED IN HEART, SIGNAL = 1.5
CLSCPSCWLFPTAVVKNPPNNLWIIAAVLAPIAVVTVIIIIITAVLCRKNKNDFKPDTMINLPQRAK

SEQ ID NO: 33754 - protein, 20 aa, Homo sapiens
  MAP TO AL049575.7; EXPRESSED IN BRAIN, SIGNAL = 2.3; EXPRESSED IN BT474, SIGNAL = 1.4; EXPRESSED IN HBL100, SIGNAL = 1.5; EXPRESSED IN HELA, SIGNAL = 1.3; EXPRESSED IN ADULT LIVER, SIGNAL = 1.4; EXPRESSED IN PLACENTA, SIGNAL = 1.7; EXPRESSED IN BONE MARROW, SIGNAL = 2.1; EXPRESSED IN FETAL LIVER, SIGNAL = 1.6; EXPRESSED IN LUNG, SIGNAL = 1.6; EXPRESSED IN HEART, SIGNAL = 1.5
LLVMSLLLALSHSRGEEPAQ

SEQ ID NO: 33755 - protein, 31 aa, Homo sapiens
  MAP TO AL049557.19; EXPRESSED IN PLACENTA, SIGNAL =   1; EXPRESSED IN BONE MARROW, SIGNAL = 1.9; EXPRESSED IN HBL100, SIGNAL = 1.3; EXPRESSED IN ADULT LIVER, SIGNAL = 0.97; EXPRESSED IN BRAIN, SIGNAL = 1.4; EXPRESSED IN HEART, SIGNAL = 1.5; EXPRESSED IN HELA, SIGNAL = 0.96; EXPRESSED IN BT474, SIGNAL = 1.1; EXPRESSED IN FETAL LIVER, SIGNAL = 1.6; EXPRESSED IN LUNG, SIGNAL = 1.4; EST_HUMAN HIT: BF693446.1, EVALUE 6.00e-10; EST_HUMAN HIT: AI114678.1, EVALUE 4.00e-10; SWISSPROT HIT: P10113, EVALUE 5.00e-11
FALVYSITAQSTFNDLQDLREQILRVKDTED

SEQ ID NO: 33756 - protein, 91 aa, Homo sapiens
  MAP TO AL049557.19; EXPRESSED IN BRAIN, SIGNAL = 1.2; EXPRESSED IN BONE MARROW, SIGNAL = 2.8; EXPRESSED IN ADULT LIVER, SIGNAL =  15; EXPRESSED IN PLACENTA, SIGNAL =  22; EXPRESSED IN BT474, SIGNAL =  56; EXPRESSED IN HBL100, SIGNAL =  21; EXPRESSED IN FETAL LIVER, SIGNAL =  11; EXPRESSED IN LUNG, SIGNAL = 5.6; EXPRESSED IN HELA, SIGNAL =  15; EXPRESSED IN HEART, SIGNAL = 1.3; EST_HUMAN HIT: BE908641.1, EVALUE 2.00e-34; EST_HUMAN HIT: BE396234.1, EVALUE 1.00e-34; SWISSPROT HIT: P05783, EVALUE 2.00e-35
IDNAHLATDDFRVKYETELAMCQSVESDIHGLHKVNDDINVTWLQLKPEIEALNEELFFMKKNHKGEVKGLQAQIASSGLTMEADAPKSQD

SEQ ID NO: 33757 - protein, 48 aa, Homo sapiens
  MAP TO AL049557.19; EXPRESSED IN BRAIN, SIGNAL = 1.2; EXPRESSED IN BONE MARROW, SIGNAL = 2.8; EXPRESSED IN ADULT LIVER, SIGNAL =  15; EXPRESSED IN PLACENTA, SIGNAL =  22; EXPRESSED IN BT474, SIGNAL =  56; EXPRESSED IN HBL100, SIGNAL =  21; EXPRESSED IN FETAL LIVER, SIGNAL =  11; EXPRESSED IN LUNG, SIGNAL = 5.6; EXPRESSED IN HELA, SIGNAL =  15; EXPRESSED IN HEART, SIGNAL = 1.3; EST_HUMAN HIT: AA130795.1, EVALUE 1.00e-11; EST_HUMAN HIT: AA131161.1, EVALUE 8.00e-12; SWISSPROT HIT: P24538, EVALUE 9.10e-01
PQCLASYLDRVRAWKPRTGSWRAKSRSTWRRRDPSSGTGAITSRPSRT

SEQ ID NO: 33758 - protein, 46 aa, Homo sapiens
  MAP TO AL035697.18; EXPRESSED IN BT474, SIGNAL = 2.4; EXPRESSED IN BONE MARROW, SIGNAL =   3; EXPRESSED IN FETAL LIVER, SIGNAL = 3.2; EXPRESSED IN HELA, SIGNAL = 3.4; EXPRESSED IN ADULT LIVER, SIGNAL = 4.5; EXPRESSED IN HEART, SIGNAL = 2.3; EXPRESSED IN PLACENTA, SIGNAL = 4.3; EXPRESSED IN HBL100, SIGNAL = 2.8; EXPRESSED IN LUNG, SIGNAL = 3.5; EXPRESSED IN BRAIN, SIGNAL =   4; SWISSPROT HIT: Q22931, EVALUE 6.00e+00; EST_HUMAN HIT: BF130171.1, EVALUE 3.00e+00; EST_HUMAN HIT: AA948127.1, EVALUE 3.50e+00
GKAESKMLECREKRSEQPTHWQARLQEESPQDLGEVDPHLQAQEQD

SEQ ID NO: 33759 - protein, 42 aa, Homo sapiens
  MAP TO AL035696.14; EXPRESSED IN FETAL LIVER, SIGNAL = 1.2; EXPRESSED IN HELA, SIGNAL = 1.5; EXPRESSED IN BRAIN, SIGNAL = 1.5; EXPRESSED IN HEART, SIGNAL = 1.2; EXPRESSED IN BT474, SIGNAL = 1.4; EXPRESSED IN BONE MARROW, SIGNAL = 1.2; EXPRESSED IN PLACENTA, SIGNAL = 1.4; EXPRESSED IN ADULT LIVER, SIGNAL = 1.2; EXPRESSED IN LUNG, SIGNAL = 4.4; EXPRESSED IN HBL100, SIGNAL = 1.1
GDSLYREAAGRGAGESEGRHGSLSQYRSSLPACATAEAHSEI

SEQ ID NO: 33760 - protein, 70 aa, Homo sapiens
  MAP TO AL035696.14; EXPRESSED IN BONE MARROW, SIGNAL = 3.5; EXPRESSED IN ADULT LIVER, SIGNAL = 2.3; EXPRESSED IN HEART, SIGNAL = 2.1; EXPRESSED IN LUNG, SIGNAL = 2.8; EXPRESSED IN HELA, SIGNAL = 3.5; EXPRESSED IN PLACENTA, SIGNAL = 2.7; EXPRESSED IN BT474, SIGNAL = 2.8; EXPRESSED IN HBL100, SIGNAL = 5.1; EXPRESSED IN FETAL LIVER, SIGNAL = 2.9; EXPRESSED IN BRAIN, SIGNAL = 1.8; EST_HUMAN HIT: AW022776.1, EVALUE 4.90e-02
FLVIFEPWIPHFHLAMGPANPVAGPGQACLLELTGWRLVLHPCWSLSWPMLVMWTFNTCMNHPSHKYRSR

SEQ ID NO: 33761 - protein, 105 aa, Homo sapiens
  MAP TO AL035687.13; EXPRESSED IN PLACENTA, SIGNAL =  50; EXPRESSED IN BT474, SIGNAL =  81; EXPRESSED IN BONE MARROW, SIGNAL =  83; EXPRESSED IN LUNG, SIGNAL =  57; EXPRESSED IN ADULT LIVER, SIGNAL =  35; EXPRESSED IN BRAIN, SIGNAL =  16; EXPRESSED IN HBL100, SIGNAL = 1.3e+02; EXPRESSED IN FETAL LIVER, SIGNAL =  84; EXPRESSED IN HELA, SIGNAL =  79; EXPRESSED IN HEART, SIGNAL =  14; EST_HUMAN HIT: BE387666.1, EVALUE 7.00e-40; EST_HUMAN HIT: AV758391.1, EVALUE 6.00e-40; SWISSPROT HIT: P10126, EVALUE 3.00e-40
ICCDNVAGGSKNDLQMEAAGFTAQVIILNKPDQITGGYVPVLDCHTAHIVCTSAELKEKIEYYSGNKLEDGPKFLKSDDAAIVDMVPDKPMCVDSLSDYSLLGRF

SEQ ID NO: 33762 - protein, 35 aa, Homo sapiens
  MAP TO AL035686.11; EXPRESSED IN PLACENTA, SIGNAL = 2.8; EXPRESSED IN FETAL LIVER, SIGNAL = 1.8; EXPRESSED IN LUNG, SIGNAL = 2.5; EXPRESSED IN HELA, SIGNAL =   1; EXPRESSED IN BT474, SIGNAL = 1.1; EXPRESSED IN BONE MARROW, SIGNAL = 2.2; EXPRESSED IN HBL100, SIGNAL = 1.9; EXPRESSED IN ADULT LIVER, SIGNAL = 2.3; EXPRESSED IN BRAIN, SIGNAL = 1.8; EXPRESSED IN HEART, SIGNAL =   2; EST_HUMAN HIT: AU127463.1, EVALUE 9.80e+00
TAGVPDIITTFQPSGRKSQRHKSTHHLLLNIFPGS

SEQ ID NO: 33763 - protein, 76 aa, Homo sapiens
  MAP TO AL035610.2; EXPRESSED IN FETAL LIVER, SIGNAL = 2.6; EXPRESSED IN LUNG, SIGNAL = 3.3; EXPRESSED IN HELA, SIGNAL =   3; EXPRESSED IN PLACENTA, SIGNAL = 4.1; EXPRESSED IN BT474, SIGNAL = 4.4; EXPRESSED IN BONE MARROW, SIGNAL = 2.7; EXPRESSED IN HBL100, SIGNAL = 2.9; EXPRESSED IN ADULT LIVER, SIGNAL = 2.1; EXPRESSED IN BRAIN, SIGNAL = 2.6; EXPRESSED IN HEART, SIGNAL = 2.3; EST_HUMAN HIT: AW498580.1, EVALUE 1.00e-04; EST_HUMAN HIT: T07425.1, EVALUE 3.00e-05; SWISSPROT HIT: P03177, EVALUE 6.60e+00
MVSGAASTSPPDCWTHETWIYRRNTTIYWTLIQSKLSLQENFAQPCKVLSLVGIVIVISKGHSTILSMLLQDDGEQ

SEQ ID NO: 33764 - protein, 91 aa, Homo sapiens
  MAP TO AL035610.2; EXPRESSED IN BT474, SIGNAL = 5.2; EXPRESSED IN FETAL LIVER, SIGNAL = 5.1; EXPRESSED IN HELA, SIGNAL = 7.2; EXPRESSED IN PLACENTA, SIGNAL = 5.9; EXPRESSED IN BONE MARROW, SIGNAL = 6.8; EXPRESSED IN HBL100, SIGNAL = 5.4; EXPRESSED IN LUNG, SIGNAL = 6.8; EXPRESSED IN ADULT LIVER, SIGNAL = 5.7; EXPRESSED IN BRAIN, SIGNAL = 9.3; EXPRESSED IN HEART, SIGNAL =   7; SWISSPROT HIT: P43527, EVALUE 6.10e+00; EST_HUMAN HIT: AA746130.1, EVALUE 1.00e-50
GKSRPAESSGPHRSPVLDSSGPQTSDSTFFSFWTHGLTPVVCQGLLSLWSQTEGYTVSFSNFEVLGLRLIHHWLPCSSTCRWLLTGLDFMI

SEQ ID NO: 33765 - protein, 45 aa, Homo sapiens
  MAP TO AL035610.2; EXPRESSED IN BT474, SIGNAL = 5.2; EXPRESSED IN FETAL LIVER, SIGNAL = 5.1; EXPRESSED IN HELA, SIGNAL = 7.2; EXPRESSED IN PLACENTA, SIGNAL = 5.9; EXPRESSED IN BONE MARROW, SIGNAL = 6.8; EXPRESSED IN HBL100, SIGNAL = 5.4; EXPRESSED IN LUNG, SIGNAL = 6.8; EXPRESSED IN ADULT LIVER, SIGNAL = 5.7; EXPRESSED IN BRAIN, SIGNAL = 9.3; EXPRESSED IN HEART, SIGNAL =   7; EST_HUMAN HIT: AA746130.1, EVALUE 2.00e-14
ERADLLSLLALTVLPCWILLALKHQTPRSSAFGLMDLHQWCARAS

SEQ ID NO: 33766 - protein, 17 aa, Homo sapiens
  MAP TO AL035610.2; EXPRESSED IN ADULT LIVER, SIGNAL = 2.6; EXPRESSED IN BRAIN, SIGNAL = 2.8; EXPRESSED IN BT474, SIGNAL = 2.1; EXPRESSED IN PLACENTA, SIGNAL = 2.3; EXPRESSED IN HEART, SIGNAL = 2.1; EXPRESSED IN HELA, SIGNAL =   3; EXPRESSED IN LUNG, SIGNAL = 2.7; EXPRESSED IN FETAL LIVER, SIGNAL = 2.3; EXPRESSED IN HBL100, SIGNAL = 2.3; EXPRESSED IN BONE MARROW, SIGNAL = 2.1
PSLKHSCILCTYKVNTM

SEQ ID NO: 33767 - protein, 34 aa, Homo sapiens
  MAP TO AL035417.15; EXPRESSED IN HELA, SIGNAL = 7.4; EXPRESSED IN BT474, SIGNAL =  10; EXPRESSED IN HBL100, SIGNAL = 8.8; EXPRESSED IN FETAL LIVER, SIGNAL = 9.4; EXPRESSED IN LUNG, SIGNAL = 9.4; EXPRESSED IN BRAIN, SIGNAL =  10; EXPRESSED IN PLACENTA, SIGNAL =  12; EXPRESSED IN BONE MARROW, SIGNAL =  13; EXPRESSED IN ADULT LIVER, SIGNAL = 6.3; EXPRESSED IN HEART, SIGNAL = 7.5; EST_HUMAN HIT: BE865684.1, EVALUE 9.90e+00
MACFGANIISTATCSYCSIEAFHPFSFPSLTSYS

SEQ ID NO: 33768 - protein, 48 aa, Homo sapiens
  MAP TO AL035086.12; EXPRESSED IN PLACENTA, SIGNAL = 0.98; EXPRESSED IN LUNG, SIGNAL = 1.1; EXPRESSED IN HELA, SIGNAL = 1.5; EXPRESSED IN ADULT LIVER, SIGNAL = 1.1; EXPRESSED IN BT474, SIGNAL =   2; EXPRESSED IN BONE MARROW, SIGNAL = 1.7; EXPRESSED IN HBL100, SIGNAL = 1.2; EXPRESSED IN FETAL LIVER, SIGNAL = 1.1; EXPRESSED IN BRAIN, SIGNAL = 1.7; EXPRESSED IN HEART, SIGNAL = 1.4; EST_HUMAN HIT: AA668498.1, EVALUE 7.00e-16; SWISSPROT HIT: P10267, EVALUE 6.00e-19
YCYPPICLGRAPGCLMPTTQNWLVEVPTVSATSGFTYHRVSGMSLRPQ

SEQ ID NO: 33769 - protein, 35 aa, Homo sapiens
  MAP TO AL035086.12; EXPRESSED IN PLACENTA, SIGNAL = 0.98; EXPRESSED IN LUNG, SIGNAL = 1.1; EXPRESSED IN HELA, SIGNAL = 1.5; EXPRESSED IN ADULT LIVER, SIGNAL = 1.1; EXPRESSED IN BT474, SIGNAL =   2; EXPRESSED IN BONE MARROW, SIGNAL = 1.7; EXPRESSED IN HBL100, SIGNAL = 1.2; EXPRESSED IN FETAL LIVER, SIGNAL = 1.1; EXPRESSED IN BRAIN, SIGNAL = 1.7; EXPRESSED IN HEART, SIGNAL = 1.4; EST_HUMAN HIT: AA668498.1, EVALUE 3.00e-10
VLLSSYLPGEGTRMLNAYNPKLVGRSTYCQCHQWI

SEQ ID NO: 33770 - protein, 254 aa, Homo sapiens
  MAP TO AL035086.12; EXPRESSED IN LUNG, SIGNAL = 4.9; EXPRESSED IN HELA, SIGNAL = 2.8; EXPRESSED IN ADULT LIVER, SIGNAL = 5.8; EXPRESSED IN PLACENTA, SIGNAL = 4.3; EXPRESSED IN BT474, SIGNAL = 3.5; EXPRESSED IN BONE MARROW, SIGNAL = 3.9; EXPRESSED IN HBL100, SIGNAL = 3.1; EXPRESSED IN FETAL LIVER, SIGNAL =   6; EXPRESSED IN BRAIN, SIGNAL = 3.5; EXPRESSED IN HEART, SIGNAL = 2.6; EST_HUMAN HIT: AI268119.1, EVALUE 2.00e-13; SWISSPROT HIT: P24043, EVALUE 1.40e-01; EST_HUMAN HIT: BE674115.1, EVALUE 2.00e-15
SLQLSEDEAPYHQATPDHGYLSLLYDSPSGNLSMPHKPVSDKLSEEVDEIWNDLENYIKKNEDKARDRLLAAFPVSKDDVPDRLHAESTPELSRDVGRSVSTLSLPESQALLTPVKSRAGRASRANCPFEEDLISKEGSFMSLNRLSLASEMPLMDNPYDLANSGLSQTDPENPDLGMEATDKTKSRVFMMARQYSQKIKKANQLLKVKSLELEQPPASQHQKSMHKDLAAILEEKKQGGPAIGMCTLPFFLLQ

SEQ ID NO: 33771 - protein, 28 aa, Homo sapiens
  MAP TO AL034420.16; EXPRESSED IN PLACENTA, SIGNAL = 1.8; EXPRESSED IN FETAL LIVER, SIGNAL = 1.5; EXPRESSED IN LUNG, SIGNAL = 1.3; EXPRESSED IN HEART, SIGNAL = 0.92; EXPRESSED IN HBL100, SIGNAL = 1.1; EXPRESSED IN BRAIN, SIGNAL = 1.2; EXPRESSED IN BT474, SIGNAL =   1; EXPRESSED IN BONE MARROW, SIGNAL = 1.4; EXPRESSED IN HELA, SIGNAL = 0.83; EXPRESSED IN ADULT LIVER, SIGNAL =   6
LRAVMGKNEILNPKALEEMFFNYASEVS

SEQ ID NO: 33772 - protein, 28 aa, Homo sapiens
  MAP TO AL034420.16; EXPRESSED IN BRAIN, SIGNAL =   2; EXPRESSED IN BONE MARROW, SIGNAL = 1.8; EXPRESSED IN PLACENTA, SIGNAL = 1.8; EXPRESSED IN BT474, SIGNAL = 1.7; EXPRESSED IN HEART, SIGNAL = 1.6; EXPRESSED IN ADULT LIVER, SIGNAL = 1.6; EXPRESSED IN HELA, SIGNAL = 1.9; EXPRESSED IN LUNG, SIGNAL = 1.8; EXPRESSED IN FETAL LIVER, SIGNAL = 2.1; EXPRESSED IN HBL100, SIGNAL = 1.8
SRGSSSRSCVCSSSSYSRSSSPSRSASR

SEQ ID NO: 33773 - protein, 51 aa, Homo sapiens
  MAP TO AL034406.1; EXPRESSED IN BT474, SIGNAL = 8.8; EXPRESSED IN BONE MARROW, SIGNAL = 1.3; EXPRESSED IN FETAL LIVER, SIGNAL = 2.6; EXPRESSED IN LUNG, SIGNAL = 1.8; EXPRESSED IN HELA, SIGNAL = 3.4; EXPRESSED IN ADULT LIVER, SIGNAL = 2.4; EXPRESSED IN BRAIN, SIGNAL =   1; EXPRESSED IN HEART, SIGNAL = 1.5; EXPRESSED IN PLACENTA, SIGNAL = 4.5; EXPRESSED IN HBL100, SIGNAL = 2.6; SWISSPROT HIT: P28044, EVALUE 7.80e+00
ITAAAMAEAMKLQKMKLMAMNTLQGNGSQNGTESEPDDLNSNTGECLPESQ

SEQ ID NO: 33774 - protein, 55 aa, Homo sapiens
  MAP TO AL031770.12; EXPRESSED IN ADULT LIVER, SIGNAL = 1.2; EXPRESSED IN BRAIN, SIGNAL = 1.5; EXPRESSED IN BONE MARROW, SIGNAL = 1.7; EXPRESSED IN HBL100, SIGNAL = 1.3; EXPRESSED IN LUNG, SIGNAL = 1.6; EXPRESSED IN HELA, SIGNAL = 1.7; EXPRESSED IN PLACENTA, SIGNAL = 1.8; EXPRESSED IN BT474, SIGNAL = 1.6; EXPRESSED IN FETAL LIVER, SIGNAL = 1.3; EXPRESSED IN HEART, SIGNAL = 1.5; EST_HUMAN HIT: AW503458.1, EVALUE 6.00e-19; EST_HUMAN HIT: BE279925.1, EVALUE 4.00e-19; SWISSPROT HIT: Q90922, EVALUE 7.70e+00
YLSDLHASGDPAWQCIGAQHKWILQLMHSCKEGYVKDLKGKDFSSNVLCDSFMSF

SEQ ID NO: 33775 - protein, 47 aa, Homo sapiens
  MAP TO AL031770.12; EXPRESSED IN PLACENTA, SIGNAL = 1.8; EXPRESSED IN BONE MARROW, SIGNAL = 1.1; EXPRESSED IN HBL100, SIGNAL = 1.2; EXPRESSED IN ADULT LIVER, SIGNAL = 0.91; EXPRESSED IN BRAIN, SIGNAL = 1.1; EXPRESSED IN HEART, SIGNAL = 1.2; EXPRESSED IN BT474, SIGNAL = 1.4; EXPRESSED IN HELA, SIGNAL = 0.96; EXPRESSED IN FETAL LIVER, SIGNAL = 0.92; EXPRESSED IN LUNG, SIGNAL =   1; SWISSPROT HIT: Q12730, EVALUE 2.00e+00; EST_HUMAN HIT: AA826350.1, EVALUE 7.00e-22
VSMASLKELDQRLFENYIELKADPIVGSLEPGIYAGYFDWKDCLPPT

SEQ ID NO: 33776 - protein, 36 aa, Homo sapiens
  MAP TO AL031676.2; EXPRESSED IN HBL100, SIGNAL = 1.6; EXPRESSED IN FETAL LIVER, SIGNAL = 1.7; EXPRESSED IN ADULT LIVER, SIGNAL = 1.6; EXPRESSED IN BRAIN, SIGNAL = 1.6; EXPRESSED IN HEART, SIGNAL = 1.4; EXPRESSED IN PLACENTA, SIGNAL = 1.8; EXPRESSED IN BT474, SIGNAL = 1.4; EXPRESSED IN HELA, SIGNAL = 1.7; EXPRESSED IN LUNG, SIGNAL = 2.4; EXPRESSED IN BONE MARROW, SIGNAL = 1.8
VTFVQGDILRITIVGEDDGRGEERRERRREGRERRK

SEQ ID NO: 33777 - protein, 33 aa, Homo sapiens
  MAP TO AL031587.3; EXPRESSED IN BT474, SIGNAL = 2.5; EXPRESSED IN BONE MARROW, SIGNAL =   4; EXPRESSED IN FETAL LIVER, SIGNAL = 3.4; EXPRESSED IN LUNG, SIGNAL = 3.5; EXPRESSED IN ADULT LIVER, SIGNAL = 3.7; EXPRESSED IN PLACENTA, SIGNAL = 3.4; EXPRESSED IN HBL100, SIGNAL =   3; EXPRESSED IN BRAIN, SIGNAL = 4.5; EXPRESSED IN HEART, SIGNAL =   3; EXPRESSED IN HELA, SIGNAL = 2.5; EST_HUMAN HIT: AA382780.1, EVALUE 7.00e-10
VKEIQERKEFLADMEALGQGKQYRGIILAEISQ

SEQ ID NO: 33778 - protein, 92 aa, Homo sapiens
  MAP TO AL031390.4; EXPRESSED IN BRAIN, SIGNAL = 2.7; EXPRESSED IN HBL100, SIGNAL = 4.4; EXPRESSED IN LUNG, SIGNAL = 2.3; EXPRESSED IN HELA, SIGNAL = 3.5; EXPRESSED IN ADULT LIVER, SIGNAL = 3.1; EXPRESSED IN PLACENTA, SIGNAL = 1.7; EXPRESSED IN BT474, SIGNAL = 3.2; EXPRESSED IN BONE MARROW, SIGNAL = 1.6; EXPRESSED IN FETAL LIVER, SIGNAL = 6.3; EXPRESSED IN HEART, SIGNAL = 2.2; EST_HUMAN HIT: BE385144.1, EVALUE 8.00e-52; SWISSPROT HIT: Q09215, EVALUE 1.10e+00; EST_HUMAN HIT: AV721893.1, EVALUE 1.00e-51
EGESGEMTDRYTIHSQLEHLQSKYIGTGHADTTKWEWLVNQHRDSYCSYMGHFDLLNYFAIAENESKARVRFNLMEKMLQPCGPPADKPEEN

SEQ ID NO: 33779 - protein, 112 aa, Homo sapiens
  MAP TO AL031320.6; EXPRESSED IN HEART, SIGNAL = 1.1; EXPRESSED IN FETAL LIVER, SIGNAL = 1.9; EXPRESSED IN PLACENTA, SIGNAL = 1.7; EXPRESSED IN BONE MARROW, SIGNAL = 1.9; EXPRESSED IN HBL100, SIGNAL = 4.8; EXPRESSED IN LUNG, SIGNAL = 1.3; EXPRESSED IN ADULT LIVER, SIGNAL =   2; EXPRESSED IN BRAIN, SIGNAL = 1.1; EXPRESSED IN BT474, SIGNAL = 1.3; EXPRESSED IN HELA, SIGNAL = 1.9; EST_HUMAN HIT: BE907046.1, EVALUE 2.00e-65; EST_HUMAN HIT: AW938825.1, EVALUE 3.00e-63; SWISSPROT HIT: P17164, EVALUE 9.00e-38
FTLWGSEYSWNWNAIDEGPKRDIVKELEVAIRNRTDLRFGLYYSLFEWFHPLFLEDESSSFHKRQFPVSKTLPELYELVNNYQPEVLWSDGDGGAPDQYWNSTGFLAWLYNE

SEQ ID NO: 33780 - protein, 38 aa, Homo sapiens
  MAP TO AL031320.6; EXPRESSED IN BT474, SIGNAL =  14; EXPRESSED IN LUNG, SIGNAL =   4; EXPRESSED IN HELA, SIGNAL =  18; EXPRESSED IN ADULT LIVER, SIGNAL = 6.6; EXPRESSED IN BRAIN, SIGNAL =  14; EXPRESSED IN HEART, SIGNAL = 2.7; EXPRESSED IN PLACENTA, SIGNAL = 2.6; EXPRESSED IN BONE MARROW, SIGNAL = 8.2; EXPRESSED IN FETAL LIVER, SIGNAL =  10; EXPRESSED IN HBL100, SIGNAL =  30; EST_HUMAN HIT: BF690030.1, EVALUE 8.00e-06; EST_HUMAN HIT: BE139462.1, EVALUE 1.00e-04
PPVWPLSNRGCHFQGLDVHEGGRGENASCPNQEQQLLC

SEQ ID NO: 33781 - protein, 253 aa, Homo sapiens
  MAP TO AL031297.4; EXPRESSED IN LUNG, SIGNAL = 1.1; EXPRESSED IN HELA, SIGNAL = 1.1; EXPRESSED IN BRAIN, SIGNAL = 1.3; EXPRESSED IN HEART, SIGNAL = 1.1; EXPRESSED IN BT474, SIGNAL = 2.7; EXPRESSED IN BONE MARROW, SIGNAL = 1.5; EXPRESSED IN PLACENTA, SIGNAL = 1.8; EXPRESSED IN ADULT LIVER, SIGNAL = 1.4; EXPRESSED IN FETAL LIVER, SIGNAL = 1.3; EXPRESSED IN HBL100, SIGNAL = 1.5; SWISSPROT HIT: P16884, EVALUE 2.10e-02; EST_HUMAN HIT: AW377800.1, EVALUE 1.00e-92
LTFNQYFMRIIIFPTGDPFSQPIKFPINGLSDVKNTSEDSENFPSSSKKSEEWPDWSEPEEPENQTVNIQIWPREPCDDVKSQCTTLDVEESSWDDCEPSSLDTKVNPGGGITATKPVTSGEQKPIPALLSLTEESMPWKSSLPQKISLVQRGDDADQIEPPKVSSQERPLKVPSELGLGEEFTIQVKKKPVKDPEMDWFADMIPEIKPSAAFLILPELRTEMVPKKDDVSPVMQFSSKFAAAEITEVSTFME

SEQ ID NO: 33782 - protein, 86 aa, Homo sapiens
  MAP TO AL031287.3; EXPRESSED IN ADULT LIVER, SIGNAL = 1.2; EXPRESSED IN BRAIN, SIGNAL = 1.3; EXPRESSED IN HEART, SIGNAL = 1.6; EXPRESSED IN PLACENTA, SIGNAL = 0.95; EXPRESSED IN BT474, SIGNAL = 1.3; EXPRESSED IN HELA, SIGNAL = 1.1; EXPRESSED IN LUNG, SIGNAL = 1.1; EXPRESSED IN FETAL LIVER, SIGNAL = 1.4; EXPRESSED IN HBL100, SIGNAL = 0.81; EXPRESSED IN BONE MARROW, SIGNAL = 0.9; EST_HUMAN HIT: Z38367.1, EVALUE 5.00e-25; SWISSPROT HIT: Q64752, EVALUE 3.10e+00; EST_HUMAN HIT: BE867206.1, EVALUE 5.00e-29
GTSQSDISTLPTVPSSPDLEVSETAMEVDTPAEQFLQPSTSSTMSAQAHSTSSPTESPHSTPLLSSPDSEQRQSVEASGHHTHHQS

SEQ ID NO: 33783 - protein, 62 aa, Homo sapiens
  MAP TO AL031287.3; EXPRESSED IN FETAL LIVER, SIGNAL = 1.8; EXPRESSED IN LUNG, SIGNAL = 1.2; EXPRESSED IN HELA, SIGNAL = 1.1; EXPRESSED IN PLACENTA, SIGNAL = 1.2; EXPRESSED IN BT474, SIGNAL =   2; EXPRESSED IN BONE MARROW, SIGNAL = 1.4; EXPRESSED IN HBL100, SIGNAL = 1.4; EXPRESSED IN ADULT LIVER, SIGNAL = 1.3; EXPRESSED IN BRAIN, SIGNAL = 1.3; EXPRESSED IN HEART, SIGNAL = 4.2; EST_HUMAN HIT: BE019684.1, EVALUE 5.00e-32; EST_HUMAN HIT: BE180609.1, EVALUE 8.00e-32; SWISSPROT HIT: P54311, EVALUE 9.90e+00
VLTTIRSGHRANIFSAKFLPCTNDKQIVSCSGDGVIFYTNVEQDAETNRQCQFTCHYGTTYE

SEQ ID NO: 33784 - protein, 46 aa, Homo sapiens
  MAP TO AL023807.6; EXPRESSED IN ADULT LIVER, SIGNAL = 9.3; EXPRESSED IN HEART, SIGNAL = 5.3; EXPRESSED IN BT474, SIGNAL =  12; EXPRESSED IN BONE MARROW, SIGNAL =  11; EXPRESSED IN HBL100, SIGNAL =  18; EXPRESSED IN FETAL LIVER, SIGNAL =  12; EXPRESSED IN HELA, SIGNAL =  17; EXPRESSED IN BRAIN, SIGNAL = 4.3; EXPRESSED IN PLACENTA, SIGNAL = 7.1; EXPRESSED IN LUNG, SIGNAL =  13; EST_HUMAN HIT: AI277260.1, EVALUE 2.30e-01
GCLPGVSHTIIQGIPLTCLLCGISYFSIFLPFFLVSCLHFVEHILQ

SEQ ID NO: 33785 - protein, 19 aa, Homo sapiens
  MAP TO AL023807.6; EXPRESSED IN ADULT LIVER, SIGNAL = 9.3; EXPRESSED IN HEART, SIGNAL = 5.3; EXPRESSED IN BT474, SIGNAL =  12; EXPRESSED IN BONE MARROW, SIGNAL =  11; EXPRESSED IN HBL100, SIGNAL =  18; EXPRESSED IN FETAL LIVER, SIGNAL =  12; EXPRESSED IN HELA, SIGNAL =  17; EXPRESSED IN BRAIN, SIGNAL = 4.3; EXPRESSED IN PLACENTA, SIGNAL = 7.1; EXPRESSED IN LUNG, SIGNAL =  13
TEGCALQNGGRKPRRREGK

SEQ ID NO: 33786 - protein, 68 aa, Homo sapiens
  MAP TO AL023656.8; EXPRESSED IN PLACENTA, SIGNAL = 0.87; EXPRESSED IN LUNG, SIGNAL = 0.85; EXPRESSED IN HBL100, SIGNAL = 0.69; EXPRESSED IN FETAL LIVER, SIGNAL = 0.8; EXPRESSED IN HELA, SIGNAL = 0.69; EXPRESSED IN BRAIN, SIGNAL = 1.8; EXPRESSED IN BT474, SIGNAL = 0.77; EXPRESSED IN BONE MARROW, SIGNAL = 0.92; EXPRESSED IN ADULT LIVER, SIGNAL = 0.77; EXPRESSED IN HEART, SIGNAL = 0.89; SWISSPROT HIT: Q04652, EVALUE 2.00e-03; EST_HUMAN HIT: AU120580.1, EVALUE 3.00e-04; EST_HUMAN HIT: BE314811.1, EVALUE 2.00e-04
NKWISRSPMLQRRVYHSMAAVQRKLYVLGGNDLDYNNDRILVRHIDSYNIDTDQWTRCNFNLLTGKYL

SEQ ID NO: 33787 - protein, 17 aa, Homo sapiens
  MAP TO AL023656.8; EXPRESSED IN PLACENTA, SIGNAL = 0.87; EXPRESSED IN LUNG, SIGNAL = 0.85; EXPRESSED IN HBL100, SIGNAL = 0.69; EXPRESSED IN FETAL LIVER, SIGNAL = 0.8; EXPRESSED IN HELA, SIGNAL = 0.69; EXPRESSED IN BRAIN, SIGNAL = 1.8; EXPRESSED IN BT474, SIGNAL = 0.77; EXPRESSED IN BONE MARROW, SIGNAL = 0.92; EXPRESSED IN ADULT LIVER, SIGNAL = 0.77; EXPRESSED IN HEART, SIGNAL = 0.89
LPFHGCCTKEALCSWRQ

SEQ ID NO: 33788 - protein, 25 aa, Homo sapiens
  MAP TO AL022397.1; EXPRESSED IN PLACENTA, SIGNAL = 2.1; EXPRESSED IN BONE MARROW, SIGNAL = 1.9; EXPRESSED IN HBL100, SIGNAL = 1.6; EXPRESSED IN FETAL LIVER, SIGNAL = 2.3; EXPRESSED IN ADULT LIVER, SIGNAL = 2.2; EXPRESSED IN BRAIN, SIGNAL = 1.5; EXPRESSED IN BT474, SIGNAL =   2; EXPRESSED IN LUNG, SIGNAL = 2.1; EXPRESSED IN HELA, SIGNAL = 1.4; EXPRESSED IN HEART, SIGNAL =   2
EPQKYLRVLHKSQVPTEKDDEAEEL

SEQ ID NO: 33789 - protein, 71 aa, Homo sapiens
  MAP TO AL022240.8; EXPRESSED IN HBL100, SIGNAL = 7.2; EXPRESSED IN FETAL LIVER, SIGNAL = 5.8; EXPRESSED IN HEART, SIGNAL = 5.1; EXPRESSED IN PLACENTA, SIGNAL = 3.2; EXPRESSED IN BT474, SIGNAL =  11; EXPRESSED IN BONE MARROW, SIGNAL = 4.5; EXPRESSED IN LUNG, SIGNAL = 5.6; EXPRESSED IN HELA, SIGNAL = 7.4; EXPRESSED IN ADULT LIVER, SIGNAL =  14; EXPRESSED IN BRAIN, SIGNAL = 5.7; SWISSPROT HIT: P13654, EVALUE 1.50e-02; EST_HUMAN HIT: AW160820.1, EVALUE 2.00e-34
QYKVLVHAQERELTQLREKLREGRDASRSLNEHLQALLTPDEPDKSQGQDLQEQLAEGCRLAQHLVQKLSP

SEQ ID NO: 33790 - protein, 57 aa, Homo sapiens
  MAP TO AL022240.8; EXPRESSED IN HEART, SIGNAL = 2.6; EXPRESSED IN FETAL LIVER, SIGNAL = 7.6; EXPRESSED IN PLACENTA, SIGNAL = 7.8; EXPRESSED IN BT474, SIGNAL =  19; EXPRESSED IN BONE MARROW, SIGNAL =  17; EXPRESSED IN HBL100, SIGNAL =  17; EXPRESSED IN LUNG, SIGNAL =   7; EXPRESSED IN HELA, SIGNAL =  11; EXPRESSED IN ADULT LIVER, SIGNAL =  14; EXPRESSED IN BRAIN, SIGNAL = 4.3; EST_HUMAN HIT: AL040954.1, EVALUE 9.00e-26; SWISSPROT HIT: P75870, EVALUE 2.00e+00; EST_HUMAN HIT: AA503391.1, EVALUE 1.00e-25
LSRELLDEKEPEVLQDSLGRCYSTPSGYLELPDLGQPYSSAVYSLEEQYLGLALDVD

SEQ ID NO: 33791 - protein, 83 aa, Homo sapiens
  MAP TO AJ010597.1; EXPRESSED IN PLACENTA, SIGNAL = 4.4; EXPRESSED IN BONE MARROW, SIGNAL = 5.3; EXPRESSED IN FETAL LIVER, SIGNAL = 4.9; EXPRESSED IN BRAIN, SIGNAL = 5.4; EXPRESSED IN HEART, SIGNAL = 3.9; EXPRESSED IN BT474, SIGNAL = 5.2; EXPRESSED IN HBL100, SIGNAL = 4.2; EXPRESSED IN LUNG, SIGNAL =   7; EXPRESSED IN HELA, SIGNAL = 6.3; EXPRESSED IN ADULT LIVER, SIGNAL = 5.8; EST_HUMAN HIT: BE390947.1, EVALUE 1.00e-28; EST_HUMAN HIT: BE728616.1, EVALUE 2.00e-28; SWISSPROT HIT: O85709, EVALUE 1.60e+00
GASPKPWHLPRGVEPAGAQKSRSEVWAPPPRFQKMYRNAWMSRQKFATELGSSWTTSARAVRKRNVGLEPTQRVPTGAPPSGT

SEQ ID NO: 33792 - protein, 87 aa, Homo sapiens
  MAP TO AC009307.1; EXPRESSED IN LUNG, SIGNAL = 1.4; EXPRESSED IN ADULT LIVER, SIGNAL =   1; EXPRESSED IN BRAIN, SIGNAL = 1.1; EXPRESSED IN HEART, SIGNAL = 1.6; EXPRESSED IN PLACENTA, SIGNAL =   1; EXPRESSED IN BT474, SIGNAL = 2.7; EXPRESSED IN BONE MARROW, SIGNAL = 0.97; EXPRESSED IN HBL100, SIGNAL =   1; EXPRESSED IN HELA, SIGNAL = 1.7; EXPRESSED IN FETAL LIVER, SIGNAL = 0.92; EST_HUMAN HIT: BE178586.1, EVALUE 2.00e-08
TITSSSENDDRSGSSLEWNKDGNLRLGVQKGVLHDRRADNCSPVAEEETTGSAESTLPKAESSAGDGPVPYSQGSSSLIMPRPNSVA

SEQ ID NO: 33793 - protein, 96 aa, Homo sapiens
  MAP TO AC009307.1; EXPRESSED IN BT474, SIGNAL = 1.6; EXPRESSED IN BONE MARROW, SIGNAL = 1.1; EXPRESSED IN HEART, SIGNAL = 2.3; EXPRESSED IN ADULT LIVER, SIGNAL = 1.1; EXPRESSED IN HELA, SIGNAL = 2.9; EXPRESSED IN LUNG, SIGNAL = 1.6; EXPRESSED IN FETAL LIVER, SIGNAL = 1.8; EXPRESSED IN PLACENTA, SIGNAL = 1.2; EXPRESSED IN BRAIN, SIGNAL = 1.1; EXPRESSED IN HBL100, SIGNAL = 0.97; SWISSPROT HIT: Q23445, EVALUE 3.80e+00; EST_HUMAN HIT: AU119728.1, EVALUE 1.00e-38; EST_HUMAN HIT: BE069876.1, EVALUE 8.00e-03
CNMKFMTQSAFERALPILNVALASLHPMTDEQIFQAINAGHIQGEQGWEDFQQRMDALSCFLIKRRDKTRMFCHPSFREWLVWRADGENTAFLCEP

SEQ ID NO: 33794 - protein, 35 aa, Homo sapiens
  MAP TO AC009307.1; EXPRESSED IN BT474, SIGNAL =  24; EXPRESSED IN HELA, SIGNAL =  35; EXPRESSED IN ADULT LIVER, SIGNAL =  27; EXPRESSED IN PLACENTA, SIGNAL =  28; EXPRESSED IN BONE MARROW, SIGNAL =  26; EXPRESSED IN FETAL LIVER, SIGNAL =  26; EXPRESSED IN LUNG, SIGNAL =  37; EXPRESSED IN HBL100, SIGNAL =  23; EXPRESSED IN BRAIN, SIGNAL =  48; EXPRESSED IN HEART, SIGNAL =  37; EST_HUMAN HIT: AW189533.1, EVALUE 6.00e-12; SWISSPROT HIT: P77736, EVALUE 1.60e-02
AVVQYLVEEGAAIDQTDKNGRTPLDLAAFYGDAET

SEQ ID NO: 33795 - protein, 237 aa, Homo sapiens
  MAP TO AC009307.1; EXPRESSED IN BT474, SIGNAL =   2; EXPRESSED IN FETAL LIVER, SIGNAL = 1.3; EXPRESSED IN HELA, SIGNAL = 1.5; EXPRESSED IN HEART, SIGNAL =   2; EXPRESSED IN PLACENTA, SIGNAL = 1.6; EXPRESSED IN BONE MARROW, SIGNAL = 1.2; EXPRESSED IN HBL100, SIGNAL = 1.9; EXPRESSED IN LUNG, SIGNAL = 1.9; EXPRESSED IN ADULT LIVER, SIGNAL =   1; EXPRESSED IN BRAIN, SIGNAL = 1.3; EST_HUMAN HIT: BE081527.1, EVALUE 8.00e-54; SWISSPROT HIT: P00519, EVALUE 8.40e-01; EST_HUMAN HIT: BF516518.1, EVALUE 5.00e-58
QFVAALADLQEAVKLCPTNQEVKRLLARVEEECKQLQRSQQQKQQGPLPAPLNDSENEEDTPTPGLSDHFHSEETEEEETSPQEESVSPTPRSQPSSSVPSSYIRNLQEGLQSKGRPVSPQSRAGIGKSLREPVAQSGLLLQPSKQAQIVKTSQHLGSGQSAVRNGSMKVQISSQNPPPSPMPGRIAATPAGSRTQHLEGTGTFTTRAGCGHFGDRLAPARMSACSVVRMALHTLYQ

SEQ ID NO: 33796 - protein, 19 aa, Homo sapiens
  MAP TO AC009306.1; EXPRESSED IN PLACENTA, SIGNAL = 9.2; EXPRESSED IN LUNG, SIGNAL = 3.9; EXPRESSED IN ADULT LIVER, SIGNAL = 2.7; EXPRESSED IN BONE MARROW, SIGNAL = 3.7; EXPRESSED IN HBL100, SIGNAL = 3.6; EXPRESSED IN FETAL LIVER, SIGNAL = 3.4; EXPRESSED IN HELA, SIGNAL = 3.7; EXPRESSED IN BRAIN, SIGNAL = 3.5; EXPRESSED IN BT474, SIGNAL = 5.5; EXPRESSED IN HEART, SIGNAL =   3; EST_HUMAN HIT: AA169483.1, EVALUE 1.00e-03
MRPELPTTNWVFSDPSNHK

SEQ ID NO: 33797 - protein, 67 aa, Homo sapiens
  MAP TO AC009277.1; EXPRESSED IN HBL100, SIGNAL = 0.78; EXPRESSED IN LUNG, SIGNAL = 1.2; EXPRESSED IN ADULT LIVER, SIGNAL = 0.9; EXPRESSED IN BRAIN, SIGNAL = 1.5; EXPRESSED IN PLACENTA, SIGNAL =   1; EXPRESSED IN BT474, SIGNAL = 1.4; EXPRESSED IN HEART, SIGNAL = 1.2; EXPRESSED IN HELA, SIGNAL = 0.95; EXPRESSED IN FETAL LIVER, SIGNAL = 0.93; EXPRESSED IN BONE MARROW, SIGNAL =  13; EST_HUMAN HIT: AV752839.1, EVALUE 1.00e-19; SWISSPROT HIT: Q09441, EVALUE 7.50e-02
VTEDADPYVQPEDENYENDSVRQLENELQMEEYLKQKLQDEAYQVQGSRPTPPHLFCLNPLVAGSLT

SEQ ID NO: 33798 - protein, 39 aa, Homo sapiens
  MAP TO AC009266.1; EXPRESSED IN BT474, SIGNAL =   1; EXPRESSED IN FETAL LIVER, SIGNAL = 0.97; EXPRESSED IN LUNG, SIGNAL = 0.98; EXPRESSED IN PLACENTA, SIGNAL = 1.4; EXPRESSED IN HEART, SIGNAL = 1.2; EXPRESSED IN BRAIN, SIGNAL =   1; EXPRESSED IN ADULT LIVER, SIGNAL = 1.2; EXPRESSED IN HELA, SIGNAL = 0.74; EXPRESSED IN HBL100, SIGNAL = 1.2; EXPRESSED IN BONE MARROW, SIGNAL = 1.4; SWISSPROT HIT: P43735, EVALUE 6.20e+00
WAVHGRDYQPATQDSLGHAAQSQQGGEGDSELLLLAGYS

SEQ ID NO: 33799 - protein, 36 aa, Homo sapiens
  MAP TO AC009266.1; EXPRESSED IN PLACENTA, SIGNAL = 1.9; EXPRESSED IN BT474, SIGNAL = 2.3; EXPRESSED IN BONE MARROW, SIGNAL = 2.9; EXPRESSED IN HBL100, SIGNAL = 1.9; EXPRESSED IN LUNG, SIGNAL = 2.7; EXPRESSED IN HELA, SIGNAL = 1.6; EXPRESSED IN BRAIN, SIGNAL = 2.8; EXPRESSED IN FETAL LIVER, SIGNAL = 3.2; EXPRESSED IN HEART, SIGNAL = 1.9; EXPRESSED IN ADULT LIVER, SIGNAL = 1.9; EST_HUMAN HIT: AA569229.1, EVALUE 2.90e+00
  unsure 4
  unsure 14
  unsure 26
  unsure 32
  unsure 33
SSLXSTKAEVQESXSWLTATLATWAXDVPPIXXPPK

SEQ ID NO: 33800 - protein, 19 aa, Homo sapiens
  MAP TO AC009266.1; EXPRESSED IN BT474, SIGNAL = 0.67; EXPRESSED IN HBL100, SIGNAL = 0.68; EXPRESSED IN HELA, SIGNAL = 0.78; EXPRESSED IN BRAIN, SIGNAL = 3.2; EXPRESSED IN PLACENTA, SIGNAL = 0.63; EXPRESSED IN BONE MARROW, SIGNAL = 0.93; EXPRESSED IN LUNG, SIGNAL = 0.82; EXPRESSED IN ADULT LIVER, SIGNAL = 0.94; EXPRESSED IN HEART, SIGNAL = 0.83
  unsure 7
  unsure 14
QYQGSPXGLPAMDXAVDDL

SEQ ID NO: 33801 - protein, 147 aa, Homo sapiens
  MAP TO AC009237.1; EXPRESSED IN PLACENTA, SIGNAL = 1.2; EXPRESSED IN BONE MARROW, SIGNAL = 1.6; EXPRESSED IN HBL100, SIGNAL = 1.9; EXPRESSED IN LUNG, SIGNAL = 1.8; EXPRESSED IN BT474, SIGNAL = 1.4; EXPRESSED IN FETAL LIVER, SIGNAL = 1.3; EXPRESSED IN HELA, SIGNAL = 1.1; EXPRESSED IN ADULT LIVER, SIGNAL = 1.5; EXPRESSED IN BRAIN, SIGNAL = 1.1; EXPRESSED IN HEART, SIGNAL = 1.1; EST_HUMAN HIT: AA042813.1, EVALUE 2.00e-40; EST_HUMAN HIT: BF345274.1, EVALUE 2.00e-45; SWISSPROT HIT: Q95157, EVALUE 9.00e-47
CPRHTEPWNLTGISEFLLLGLSEDPELQPVLPGLSLSMYLVTVLRNLLIILAVSSDSHLHTPMCFFLSNLCWADIGFTSAMVPKMIVDMQSHSRVISYAGCLTQMSFFVLFACIEDMLLTVMAYDRFVAICHPLHYPVIMNPHLGVF

SEQ ID NO: 33802 - protein, 54 aa, Homo sapiens
  MAP TO AC009236.1; EXPRESSED IN BT474, SIGNAL = 1.6; EXPRESSED IN HELA, SIGNAL = 1.6; EXPRESSED IN ADULT LIVER, SIGNAL = 1.5; EXPRESSED IN PLACENTA, SIGNAL = 1.8; EXPRESSED IN BONE MARROW, SIGNAL = 1.9; EXPRESSED IN HBL100, SIGNAL = 1.4; EXPRESSED IN FETAL LIVER, SIGNAL = 1.8; EXPRESSED IN LUNG, SIGNAL = 1.7; EXPRESSED IN BRAIN, SIGNAL = 1.8; EXPRESSED IN HEART, SIGNAL = 1.5
RKARAGWCQGQKTCLPGLYLHELNSQELRPLLSLISVLKALSPVSSLSSPNPLH

SEQ ID NO: 33803 - protein, 27 aa, Homo sapiens
  MAP TO AC009236.1; EXPRESSED IN BT474, SIGNAL = 1.6; EXPRESSED IN HELA, SIGNAL = 1.6; EXPRESSED IN ADULT LIVER, SIGNAL = 1.5; EXPRESSED IN PLACENTA, SIGNAL = 1.8; EXPRESSED IN BONE MARROW, SIGNAL = 1.9; EXPRESSED IN HBL100, SIGNAL = 1.4; EXPRESSED IN FETAL LIVER, SIGNAL = 1.8; EXPRESSED IN LUNG, SIGNAL = 1.7; EXPRESSED IN BRAIN, SIGNAL = 1.8; EXPRESSED IN HEART, SIGNAL = 1.5
ERPGLAGAKDRRPASLACTCTNSTPRN

SEQ ID NO: 33804 - protein, 42 aa, Homo sapiens
  MAP TO AC009236.1; EXPRESSED IN FETAL LIVER, SIGNAL = 1.6; EXPRESSED IN BRAIN, SIGNAL =   2; EXPRESSED IN HEART, SIGNAL = 1.4; EXPRESSED IN PLACENTA, SIGNAL = 1.9; EXPRESSED IN BT474, SIGNAL = 1.3; EXPRESSED IN BONE MARROW, SIGNAL = 1.4; EXPRESSED IN ADULT LIVER, SIGNAL = 1.6; EXPRESSED IN HELA, SIGNAL = 1.8; EXPRESSED IN LUNG, SIGNAL = 1.5; EXPRESSED IN HBL100, SIGNAL = 1.4; EST_HUMAN HIT: BF437574.1, EVALUE 2.00e-18; EST_HUMAN HIT: AA634445.1, EVALUE 1.00e-18; SWISSPROT HIT: P19351, EVALUE 1.60e+00
YRRNKDKDEISPVMERQAKFYLTSQEEEVCCARGNRRKLHGR

SEQ ID NO: 33805 - protein, 38 aa, Homo sapiens
  MAP TO AC009227.1; EXPRESSED IN PLACENTA, SIGNAL = 1.9; EXPRESSED IN FETAL LIVER, SIGNAL =  56; EXPRESSED IN LUNG, SIGNAL = 3.4; EXPRESSED IN HELA, SIGNAL = 2.3; EXPRESSED IN ADULT LIVER, SIGNAL = 1.4e+02; EXPRESSED IN BRAIN, SIGNAL = 2.2; EXPRESSED IN HEART, SIGNAL = 2.2; EXPRESSED IN BT474, SIGNAL = 1.7; EXPRESSED IN HBL100, SIGNAL = 1.7; EXPRESSED IN BONE MARROW, SIGNAL = 2.2
LSSNCRRSMMETSISIRRQTSSLIFRLGHEKDGLDRTV

SEQ ID NO: 33806 - protein, 70 aa, Homo sapiens
  MAP TO AC008277.1; EXPRESSED IN FETAL LIVER, SIGNAL = 0.95; EXPRESSED IN LUNG, SIGNAL = 1.4; EXPRESSED IN BT474, SIGNAL = 1.5; EXPRESSED IN BONE MARROW, SIGNAL = 1.1; EXPRESSED IN ADULT LIVER, SIGNAL = 0.9; EXPRESSED IN BRAIN, SIGNAL = 0.99; EXPRESSED IN HEART, SIGNAL = 1.1; EXPRESSED IN PLACENTA, SIGNAL = 1.7; EXPRESSED IN HELA, SIGNAL = 0.6; EST_HUMAN HIT: BF057266.1, EVALUE 1.00e-24; EST_HUMAN HIT: AI339206.1, EVALUE 8.00e-25; SWISSPROT HIT: P40640, EVALUE 4.50e+00
GMQWCLLKEEDVIPRIRAMEGRRGRPPNPDRQRAREESRMRRRKGRPPNVGNAEFLDNADAKLLRKLQAQ

SEQ ID NO: 33807 - protein, 30 aa, Homo sapiens
  MAP TO AC008277.1; EXPRESSED IN FETAL LIVER, SIGNAL = 0.95; EXPRESSED IN LUNG, SIGNAL = 1.4; EXPRESSED IN BT474, SIGNAL = 1.5; EXPRESSED IN BONE MARROW, SIGNAL = 1.1; EXPRESSED IN ADULT LIVER, SIGNAL = 0.9; EXPRESSED IN BRAIN, SIGNAL = 0.99; EXPRESSED IN HEART, SIGNAL = 1.1; EXPRESSED IN PLACENTA, SIGNAL = 1.7; EXPRESSED IN HELA, SIGNAL = 0.6; EST_HUMAN HIT: AI339206.1, EVALUE 5.00e-11
RMSFLVSGQWKVVEEDHQIQIDNEQERNPG

SEQ ID NO: 33808 - protein, 194 aa, Homo sapiens
  MAP TO AC008277.1; EXPRESSED IN HELA, SIGNAL = 1.1; EXPRESSED IN BT474, SIGNAL = 2.3; EXPRESSED IN HBL100, SIGNAL = 1.3; EXPRESSED IN FETAL LIVER, SIGNAL = 1.1; EXPRESSED IN LUNG, SIGNAL = 1.3; EXPRESSED IN BRAIN, SIGNAL = 1.7; EXPRESSED IN PLACENTA, SIGNAL = 1.6; EXPRESSED IN BONE MARROW, SIGNAL = 2.2; EXPRESSED IN ADULT LIVER, SIGNAL = 0.94; EXPRESSED IN HEART, SIGNAL = 1.2; EST_HUMAN HIT: T19315.1, EVALUE 1.00e-52; SWISSPROT HIT: P53349, EVALUE 3.70e-01
MFETSGDSLNCSNTDHCEQKEDLKEKDNTNLFLQKPGSFSKLSKLLEVAKMPPESEVMTPKPNAGANGCTLSYQNSGKHSLGSVQSTATQSNVEKADSNNLFNTGSSGPGKFYSPLPNDQLLKTLTEKNRQWFSLLPRTPCDDTSLTHADMSTASLVTPQSQPPSKSPSPTPAPLGSSAQNPVGLNPFALSPLQ

SEQ ID NO: 33809 - protein, 31 aa, Homo sapiens
  MAP TO AC008267.1; EXPRESSED IN FETAL LIVER, SIGNAL = 3.8; EXPRESSED IN HELA, SIGNAL = 3.4; EXPRESSED IN HEART, SIGNAL = 1.6; EXPRESSED IN PLACENTA, SIGNAL = 1.6; EXPRESSED IN LUNG, SIGNAL = 2.9; EXPRESSED IN ADULT LIVER, SIGNAL = 3.3; EXPRESSED IN BRAIN, SIGNAL = 2.3; EXPRESSED IN BT474, SIGNAL = 7.2; EXPRESSED IN BONE MARROW, SIGNAL =   7; EXPRESSED IN HBL100, SIGNAL = 3.4; EST_HUMAN HIT: AW468897.1, EVALUE 4.00e-04
MKTGVGRILLDALQQGPLIPGSQACTGPHNR

SEQ ID NO: 33810 - protein, 49 aa, Homo sapiens
  MAP TO AC008267.1; EXPRESSED IN BT474, SIGNAL = 2.6; EXPRESSED IN HBL100, SIGNAL = 1.8; EXPRESSED IN FETAL LIVER, SIGNAL = 1.4; EXPRESSED IN LUNG, SIGNAL = 1.8; EXPRESSED IN BRAIN, SIGNAL = 1.4; EXPRESSED IN PLACENTA, SIGNAL = 1.4; EXPRESSED IN HELA, SIGNAL = 1.2; EXPRESSED IN HEART, SIGNAL = 1.3; EXPRESSED IN ADULT LIVER, SIGNAL = 1.5; EXPRESSED IN BONE MARROW, SIGNAL = 1.5; EST_HUMAN HIT: R19787.1, EVALUE 2.00e-19; SWISSPROT HIT: P42286, EVALUE 4.60e+00; EST_HUMAN HIT: AW403300.1, EVALUE 3.00e-19
PSPSINRQTSIEMDRVSKEFIEFLKTFCKTGQEIYKLTKLFLEGMHYKR

SEQ ID NO: 33811 - protein, 147 aa, Homo sapiens
  MAP TO AC008267.1; EXPRESSED IN PLACENTA, SIGNAL = 8.4; EXPRESSED IN BT474, SIGNAL =  19; EXPRESSED IN HBL100, SIGNAL =  18; EXPRESSED IN FETAL LIVER, SIGNAL =  14; EXPRESSED IN LUNG, SIGNAL = 6.8; EXPRESSED IN HELA, SIGNAL = 9.3; EXPRESSED IN BRAIN, SIGNAL =  28; EXPRESSED IN BONE MARROW, SIGNAL =  11; EXPRESSED IN ADULT LIVER, SIGNAL = 7.9; EXPRESSED IN HEART, SIGNAL =  11; EST_HUMAN HIT: BE386888.1, EVALUE 3.00e-55; EST_HUMAN HIT: AV761555.1, EVALUE 4.00e-55; SWISSPROT HIT: P34991, EVALUE 5.00e-56
SFDGEIFAVDVEIAKQSVTIKTTLEDLGMDDEGDDPVPLPNVNAAVLKKVIQWCTHHKDDPPPPEDDENKEKQTDDIPVWDQEFLKVAQGTLFELIRAANYLDIKGLLDVTCKTVANMIKGKTPEEIRKTFNIKNDFTEEEEAQVRK

SEQ ID NO: 33812 - protein, 210 aa, Homo sapiens
  MAP TO AC008267.1; EXPRESSED IN FETAL LIVER, SIGNAL =   4; EXPRESSED IN HELA, SIGNAL = 4.7; EXPRESSED IN BRAIN, SIGNAL = 4.3; EXPRESSED IN HEART, SIGNAL =   4; EXPRESSED IN PLACENTA, SIGNAL = 4.5; EXPRESSED IN BT474, SIGNAL = 4.5; EXPRESSED IN BONE MARROW, SIGNAL = 4.5; EXPRESSED IN HBL100, SIGNAL = 5.4; EXPRESSED IN LUNG, SIGNAL = 4.2; EXPRESSED IN ADULT LIVER, SIGNAL = 3.9; EST_HUMAN HIT: AI040021.1, EVALUE 1.00e-76; EST_HUMAN HIT: BE740136.1, EVALUE 1.00e-78; SWISSPROT HIT: P56709, EVALUE 5.20e+00
TWSYSLRATRNGMDVRFSKQWIHFLCADRCPPTSAILKMMFSRSKDAGGGHADPQHVLLGGQVARGGDAVYVGHAVLGRVRELVLAPAVVALVDAGVVPQGLDGADVPMLKGGHLLHVHLSDLERIGLVLLQLVEDLQRLHGPDHGLHGGENVLVDELGEAPFVLLLVPGAMDDAHLLDEGALPALAREEQQQLELAPGVALVPRSCFWI

SEQ ID NO: 33813 - protein, 45 aa, Homo sapiens
  MAP TO AC008267.1; EXPRESSED IN FETAL LIVER, SIGNAL =   4; EXPRESSED IN HELA, SIGNAL = 4.7; EXPRESSED IN BRAIN, SIGNAL = 4.3; EXPRESSED IN HEART, SIGNAL =   4; EXPRESSED IN PLACENTA, SIGNAL = 4.5; EXPRESSED IN BT474, SIGNAL = 4.5; EXPRESSED IN BONE MARROW, SIGNAL = 4.5; EXPRESSED IN HBL100, SIGNAL = 5.4; EXPRESSED IN LUNG, SIGNAL = 4.2; EXPRESSED IN ADULT LIVER, SIGNAL = 3.9; EST_HUMAN HIT: AI829048.1, EVALUE 3.00e-20; EST_HUMAN HIT: AI300452.1, EVALUE 2.00e-20; SWISSPROT HIT: O75069, EVALUE 9.20e-01
LPEHFHRHAGHDPGHGDAEDPLQVGAEQGQCAPDPRGGRGEGDHL

SEQ ID NO: 33814 - protein, 64 aa, Homo sapiens
  MAP TO AC008266.1; EXPRESSED IN BT474, SIGNAL = 1.8; EXPRESSED IN BONE MARROW, SIGNAL = 2.2; EXPRESSED IN LUNG, SIGNAL = 2.3; EXPRESSED IN ADULT LIVER, SIGNAL = 2.1; EXPRESSED IN HELA, SIGNAL =   2; EXPRESSED IN HBL100, SIGNAL = 1.6; EXPRESSED IN PLACENTA, SIGNAL = 1.9; EXPRESSED IN HEART, SIGNAL = 1.8; EXPRESSED IN BRAIN, SIGNAL = 2.7; EXPRESSED IN FETAL LIVER, SIGNAL = 1.8; EST_HUMAN HIT: AA335987.1, EVALUE 3.00e-32; SWISSPROT HIT: Q21973, EVALUE 5.00e-01
EKDVIILGDFGQGPDSNDYDILRKEKFHHLIPAHTFTNISTKNPQGSKSLDNIWISKSLKKVFT

SEQ ID NO: 33815 - protein, 32 aa, Homo sapiens
  MAP TO AC008167.1; EXPRESSED IN HELA, SIGNAL = 2.5; EXPRESSED IN BT474, SIGNAL =   7; EXPRESSED IN FETAL LIVER, SIGNAL = 3.1; EXPRESSED IN LUNG, SIGNAL = 2.8; EXPRESSED IN PLACENTA, SIGNAL = 2.1; EXPRESSED IN BONE MARROW, SIGNAL = 1.7; EXPRESSED IN HBL100, SIGNAL = 3.8; EXPRESSED IN ADULT LIVER, SIGNAL = 1.8; EXPRESSED IN BRAIN, SIGNAL = 2.1; EXPRESSED IN HEART, SIGNAL = 1.8; EST_HUMAN HIT: BE907634.1, EVALUE 6.00e-11
MQESQEPNLENIWGQEAAEVDQELVELLVKET

SEQ ID NO: 33816 - protein, 19 aa, Homo sapiens
  MAP TO AC008167.1; EXPRESSED IN HELA, SIGNAL = 2.5; EXPRESSED IN BT474, SIGNAL =   7; EXPRESSED IN FETAL LIVER, SIGNAL = 3.1; EXPRESSED IN LUNG, SIGNAL = 2.8; EXPRESSED IN PLACENTA, SIGNAL = 2.1; EXPRESSED IN BONE MARROW, SIGNAL = 1.7; EXPRESSED IN HBL100, SIGNAL = 3.8; EXPRESSED IN ADULT LIVER, SIGNAL = 1.8; EXPRESSED IN BRAIN, SIGNAL = 2.1; EXPRESSED IN HEART, SIGNAL = 1.8; EST_HUMAN HIT: BE907634.1, EVALUE 1.00e-04
CKNLKSPIWKTFGGKKLQR

SEQ ID NO: 33817 - protein, 35 aa, Homo sapiens
  MAP TO AC008166.1; EXPRESSED IN PLACENTA, SIGNAL = 5.1; EXPRESSED IN BONE MARROW, SIGNAL = 5.5; EXPRESSED IN LUNG, SIGNAL = 4.3; EXPRESSED IN ADULT LIVER, SIGNAL = 3.3; EXPRESSED IN HEART, SIGNAL = 4.3; EXPRESSED IN BT474, SIGNAL = 4.9; EXPRESSED IN HBL100, SIGNAL = 5.6; EXPRESSED IN FETAL LIVER, SIGNAL = 3.3; EXPRESSED IN HELA, SIGNAL = 5.1; EXPRESSED IN BRAIN, SIGNAL = 5.3; EST_HUMAN HIT: H11838.1, EVALUE 1.00e-09; EST_HUMAN HIT: H05567.1, EVALUE 7.00e-10
GQLQAEEQGEPIQVPKLKNSESDVQGQEASSMGEK

SEQ ID NO: 33818 - protein, 113 aa, Homo sapiens
  MAP TO AC008157.1; EXPRESSED IN PLACENTA, SIGNAL =  11; EXPRESSED IN LUNG, SIGNAL =   9; EXPRESSED IN HELA, SIGNAL =  13; EXPRESSED IN BT474, SIGNAL =  54; EXPRESSED IN HBL100, SIGNAL =  17; EXPRESSED IN FETAL LIVER, SIGNAL = 7.7; EXPRESSED IN BRAIN, SIGNAL =  21; EXPRESSED IN BONE MARROW, SIGNAL =  16; EXPRESSED IN ADULT LIVER, SIGNAL = 6.3; EXPRESSED IN HEART, SIGNAL = 5.2; SWISSPROT HIT: P35215, EVALUE 8.00e-51; EST_HUMAN HIT: BE882612.1, EVALUE 6.00e-52; EST_HUMAN HIT: AW630116.1, EVALUE 4.00e-50
EKNELVQKAKLAEQAEQYDNMAACMKSVTEQGAELSNEERNLLSVAYKNVVGARRSSWRVISSIEQKTEGVEKKQQMAREYREKIEMELRDISNDVLSLLEKFLISNAFTSRE

SEQ ID NO: 33819 - protein, 19 aa, Homo sapiens
  MAP TO AC008087.1; EXPRESSED IN FETAL LIVER, SIGNAL =  35; EXPRESSED IN HELA, SIGNAL =  97; EXPRESSED IN ADULT LIVER, SIGNAL =  16; EXPRESSED IN BRAIN, SIGNAL = 6.8; EXPRESSED IN HEART, SIGNAL =  11; EXPRESSED IN BONE MARROW, SIGNAL =  21; EXPRESSED IN PLACENTA, SIGNAL = 4.4; EXPRESSED IN BT474, SIGNAL =  30; EXPRESSED IN LUNG, SIGNAL =  22; EXPRESSED IN HBL100, SIGNAL =  51; EST_HUMAN HIT: N88304.1, EVALUE 2.00e-04; SWISSPROT HIT: P79183, EVALUE 5.00e-04; EST_HUMAN HIT: AV749456.1, EVALUE 2.00e-04
PHLVTHDARTIRYPDPSSR

SEQ ID NO: 33820 - protein, 35 aa, Homo sapiens
  MAP TO AC007967.2; EXPRESSED IN BRAIN, SIGNAL = 1.7; EXPRESSED IN HEART, SIGNAL = 1.5; EXPRESSED IN HBL100, SIGNAL = 1.1; EXPRESSED IN PLACENTA, SIGNAL = 1.4; EXPRESSED IN BT474, SIGNAL = 0.74; EXPRESSED IN BONE MARROW, SIGNAL = 0.86; EXPRESSED IN FETAL LIVER, SIGNAL = 1.7; EXPRESSED IN LUNG, SIGNAL = 1.2; EXPRESSED IN HELA, SIGNAL = 1.1; EXPRESSED IN ADULT LIVER, SIGNAL = 1.4; EST_HUMAN HIT: AW075636.1, EVALUE 3.00e+00; SWISSPROT HIT: O53426, EVALUE 8.20e+00
GGDLKAGGSCPPPSSDPQKNEGHGTPAAQAEPHRQ

SEQ ID NO: 33821 - protein, 24 aa, Homo sapiens
  MAP TO AC007966.2; EXPRESSED IN HELA, SIGNAL = 1.2; EXPRESSED IN HEART, SIGNAL = 1.4; EXPRESSED IN BT474, SIGNAL = 0.84; EXPRESSED IN BONE MARROW, SIGNAL = 0.89; EXPRESSED IN FETAL LIVER, SIGNAL = 0.95; EXPRESSED IN LUNG, SIGNAL =  44; EXPRESSED IN ADULT LIVER, SIGNAL = 1.1; EXPRESSED IN BRAIN, SIGNAL = 1.7; EXPRESSED IN PLACENTA, SIGNAL = 0.96; EXPRESSED IN HBL100, SIGNAL = 0.91; EST_HUMAN HIT: AV731181.1, EVALUE 9.30e-01; EST_HUMAN HIT: BE080770.1, EVALUE 1.10e+00; SWISSPROT HIT: P08547, EVALUE 2.90e+00
KMKIKTAMTYCLTPDKTAIIKTKK

SEQ ID NO: 33822 - protein, 27 aa, Homo sapiens
  MAP TO AC007910.1; EXPRESSED IN BONE MARROW, SIGNAL = 1.8; EXPRESSED IN FETAL LIVER, SIGNAL = 2.1; EXPRESSED IN LUNG, SIGNAL = 1.7; EXPRESSED IN ADULT LIVER, SIGNAL = 2.5; EXPRESSED IN BRAIN, SIGNAL = 1.7; EXPRESSED IN HEART, SIGNAL = 1.7; EXPRESSED IN PLACENTA, SIGNAL =   2; EXPRESSED IN HBL100, SIGNAL = 1.7; EXPRESSED IN BT474, SIGNAL = 1.7; EXPRESSED IN HELA, SIGNAL = 1.4; EST_HUMAN HIT: AA579016.1, EVALUE 5.00e-08; EST_HUMAN HIT: BE220497.1, EVALUE 3.00e-08; SWISSPROT HIT: P79303, EVALUE 3.00e-09
ESIPDMLELDHLTVSGDVTFGKNVSLK

SEQ ID NO: 33823 - protein, 484 aa, Homo sapiens
  MAP TO AC007906.2; EXPRESSED IN BONE MARROW, SIGNAL = 1.6; EXPRESSED IN HBL100, SIGNAL = 1.4; EXPRESSED IN FETAL LIVER, SIGNAL = 1.5; EXPRESSED IN LUNG, SIGNAL = 1.4; EXPRESSED IN ADULT LIVER, SIGNAL = 1.4; EXPRESSED IN BRAIN, SIGNAL = 1.9; EXPRESSED IN PLACENTA, SIGNAL = 1.4; EXPRESSED IN BT474, SIGNAL = 2.1; EXPRESSED IN HELA, SIGNAL = 1.4; EXPRESSED IN HEART, SIGNAL = 1.8; EST_HUMAN HIT: AW135324.1, EVALUE 2.00e-63; EST_HUMAN HIT: AV710288.1, EVALUE 1.00e-66
MTDPMMDFFDDANLFGETLEGLSDDAFVQPGPVSLVDELNLGAEFEPLHIDSLNHVQGTPTHQKMTDFEQLNQFDSIKFHHVNQSFGSPAEHVLSPHSQFNCSPIHPQNQPNGLFPDVSDGSPMWGHQTATTISNQNGSPFHQQGHSHSMHQNKSFVAHHDFALFQANEQQTQCTSLRSQQNRNNLNPGQNSLSQSKNFMNVSGPHRVNVNHPPQMTNASNSQQSISMQQFSQTSNPSAHFHKCSSHQEGNFNGPSPNMTSCSVSNSQQFSSHYSFSSNHISPNSLLQSSAVLASNHTNQTLSDFTGSNSFSPHRGIKQESTQHILNPNTSLNSNNFQILHSSHPQGNYSNSKLSPVHMNFPDPVDSGTQMGHFNDHVETNGFSSLEENLLHQVESQTEPFTGLDPEDLLQEGLLPHFDESTFGQDNSSHILDHDLDRQFTSHLVTRPSDMAQTQLQSQARSWHSSFSNHQHLHDRNHLCLQRQ

SEQ ID NO: 33824 - protein, 105 aa, Homo sapiens
  MAP TO AC007900.1; EXPRESSED IN PLACENTA, SIGNAL = 1.3; EXPRESSED IN BONE MARROW, SIGNAL =   1; EXPRESSED IN HBL100, SIGNAL = 1.2; EXPRESSED IN FETAL LIVER, SIGNAL = 1.9; EXPRESSED IN ADULT LIVER, SIGNAL = 1.1; EXPRESSED IN BRAIN, SIGNAL = 1.7; EXPRESSED IN HEART, SIGNAL = 1.2; EXPRESSED IN BT474, SIGNAL = 9.7; EXPRESSED IN LUNG, SIGNAL = 1.3; EXPRESSED IN HELA, SIGNAL = 1.7; EST_HUMAN HIT: BE384496.1, EVALUE 6.00e-10; EST_HUMAN HIT: AU117818.1, EVALUE 2.00e-10
LRIGFFFPPFLIQVQAEVPGSPIFVMRLAKQSRHLEVQILADQYGNAISLFGRDCSVQRRHQKIIEEAPATIATPAVFEHMEQVHILKGLLYVFLHRTFFIQFMY

SEQ ID NO: 33825 - protein, 63 aa, Homo sapiens
  MAP TO AC007900.1; EXPRESSED IN LUNG, SIGNAL = 2.2; EXPRESSED IN PLACENTA, SIGNAL = 1.1; EXPRESSED IN BT474, SIGNAL = 8.4; EXPRESSED IN BONE MARROW, SIGNAL = 1.2; EXPRESSED IN HBL100, SIGNAL = 1.5; EXPRESSED IN FETAL LIVER, SIGNAL = 1.8; EXPRESSED IN HELA, SIGNAL = 2.1; EXPRESSED IN ADULT LIVER, SIGNAL = 1.2; EXPRESSED IN BRAIN, SIGNAL = 2.1; EXPRESSED IN HEART, SIGNAL = 1.3; EST_HUMAN HIT: AI243801.1, EVALUE 8.60e+00; SWISSPROT HIT: Q13085, EVALUE 1.00e-30
VKDWVERLMKTLRDPSLPLLELQDIMTSVSGRIPPNVEKSIKKEMAQYASNITSVLCQFPSQQ

SEQ ID NO: 33826 - protein, 46 aa, Homo sapiens
  MAP TO AC007900.1; EXPRESSED IN PLACENTA, SIGNAL = 0.91; EXPRESSED IN BT474, SIGNAL = 3.8; EXPRESSED IN FETAL LIVER, SIGNAL = 1.1; EXPRESSED IN LUNG, SIGNAL = 0.98; EXPRESSED IN HELA, SIGNAL = 1.7; EXPRESSED IN ADULT LIVER, SIGNAL =   1; EXPRESSED IN BONE MARROW, SIGNAL = 1.3; EXPRESSED IN HBL100, SIGNAL = 0.9; EXPRESSED IN BRAIN, SIGNAL = 1.7; EXPRESSED IN HEART, SIGNAL = 0.93; SWISSPROT HIT: Q28559, EVALUE 1.00e-20
VLIANNGIAAVKCMRSIRRWSYEMFRNERAIRFVVMVTPEDLKANA

SEQ ID NO: 33827 - protein, 26 aa, Homo sapiens
  MAP TO AC007880.1; EXPRESSED IN PLACENTA, SIGNAL = 1.8; EXPRESSED IN BT474, SIGNAL = 3.4; EXPRESSED IN HEART, SIGNAL = 1.4; EXPRESSED IN HELA, SIGNAL = 2.3; EXPRESSED IN LUNG, SIGNAL = 2.3; EXPRESSED IN FETAL LIVER, SIGNAL = 4.2; EXPRESSED IN HBL100, SIGNAL = 1.9; EXPRESSED IN BONE MARROW, SIGNAL =   2; EXPRESSED IN BRAIN, SIGNAL = 2.9; EXPRESSED IN ADULT LIVER, SIGNAL = 1.3; SWISSPROT HIT: P26808, EVALUE 3.80e-02; EST_HUMAN HIT: AA706427.1, EVALUE 1.00e-06
MDTVLQHLEDCGYKVSKKKAQICQQQ

SEQ ID NO: 33828 - protein, 21 aa, Homo sapiens
  MAP TO AC007880.1; EXPRESSED IN PLACENTA, SIGNAL = 1.8; EXPRESSED IN BT474, SIGNAL = 3.4; EXPRESSED IN HEART, SIGNAL = 1.4; EXPRESSED IN HELA, SIGNAL = 2.3; EXPRESSED IN LUNG, SIGNAL = 2.3; EXPRESSED IN FETAL LIVER, SIGNAL = 4.2; EXPRESSED IN HBL100, SIGNAL = 1.9; EXPRESSED IN BONE MARROW, SIGNAL =   2; EXPRESSED IN BRAIN, SIGNAL = 2.9; EXPRESSED IN ADULT LIVER, SIGNAL = 1.3; EST_HUMAN HIT: AL044206.1, EVALUE 2.00e-02
TPPPSSGRHWLETSKSSPLET

SEQ ID NO: 33829 - protein, 60 aa, Homo sapiens
  MAP TO AC007877.3; EXPRESSED IN HBL100, SIGNAL = 0.74; EXPRESSED IN FETAL LIVER, SIGNAL = 0.8; EXPRESSED IN HELA, SIGNAL =   1; EXPRESSED IN ADULT LIVER, SIGNAL = 0.78; EXPRESSED IN BRAIN, SIGNAL = 0.8; EXPRESSED IN HEART, SIGNAL = 0.95; EXPRESSED IN PLACENTA, SIGNAL = 1.6; EXPRESSED IN LUNG, SIGNAL = 1.1; EXPRESSED IN BONE MARROW, SIGNAL =   1; EXPRESSED IN BT474, SIGNAL = 0.7; EST_HUMAN HIT: AW027067.1, EVALUE 1.30e+00; SWISSPROT HIT: Q03495, EVALUE 2.60e+00; EST_HUMAN HIT: AW027019.1, EVALUE 2.10e+00
LMKQCVLTGKAREYYIFLVLVCIGKSGQFCCFCQALGARASCAMAYVAGFKSVKPPDSQL

SEQ ID NO: 33830 - protein, 38 aa, Homo sapiens
  MAP TO AC007860.6; EXPRESSED IN PLACENTA, SIGNAL = 1.1; EXPRESSED IN BT474, SIGNAL =   1; EXPRESSED IN BONE MARROW, SIGNAL =   1; EXPRESSED IN HEART, SIGNAL =   1; EXPRESSED IN ADULT LIVER, SIGNAL = 6.8; EXPRESSED IN HELA, SIGNAL = 1.3; EXPRESSED IN LUNG, SIGNAL = 1.2; EXPRESSED IN FETAL LIVER, SIGNAL = 3.8; EXPRESSED IN BRAIN, SIGNAL = 1.1; EXPRESSED IN HBL100, SIGNAL = 1.2
MLISRKPPPSVLEHILVVRGWIFLPSSCLAHNRCSNSA

SEQ ID NO: 33831 - protein, 38 aa, Homo sapiens
  MAP TO AC007860.6; EXPRESSED IN PLACENTA, SIGNAL = 1.1; EXPRESSED IN BT474, SIGNAL =   1; EXPRESSED IN BONE MARROW, SIGNAL =   1; EXPRESSED IN HEART, SIGNAL =   1; EXPRESSED IN ADULT LIVER, SIGNAL = 6.8; EXPRESSED IN HELA, SIGNAL = 1.3; EXPRESSED IN LUNG, SIGNAL = 1.2; EXPRESSED IN FETAL LIVER, SIGNAL = 3.8; EXPRESSED IN BRAIN, SIGNAL = 1.1; EXPRESSED IN HBL100, SIGNAL = 1.2; SWISSPROT HIT: Q60519, EVALUE 8.10e+00
HALFEHLLCARHEEGKKIQPLTTRICSNTEGGGFLLIS

SEQ ID NO: 33832 - protein, 86 aa, Homo sapiens
  MAP TO AC007857.1; EXPRESSED IN HBL100, SIGNAL = 7.7; EXPRESSED IN ADULT LIVER, SIGNAL = 6.8; EXPRESSED IN BRAIN, SIGNAL = 8.3; EXPRESSED IN HEART, SIGNAL = 6.8; EXPRESSED IN PLACENTA, SIGNAL =  13; EXPRESSED IN BT474, SIGNAL = 6.5; EXPRESSED IN BONE MARROW, SIGNAL =  12; EXPRESSED IN FETAL LIVER, SIGNAL = 6.3; EXPRESSED IN LUNG, SIGNAL = 9.1; EXPRESSED IN HELA, SIGNAL = 8.1
EERKKKKRRRRRRGRRRRRKKKKKKRKKKKKRKKKKRRRRRRRRRRRRRRRRRRRRRRRRRRRRNKQTKGPPCKNLMLVFCPQNKA

SEQ ID NO: 33833 - protein, 66 aa, Homo sapiens
  MAP TO AC007847.1; EXPRESSED IN FETAL LIVER, SIGNAL = 1.5; EXPRESSED IN LUNG, SIGNAL = 1.4; EXPRESSED IN PLACENTA, SIGNAL = 2.5; EXPRESSED IN BONE MARROW, SIGNAL = 1.2; EXPRESSED IN HBL100, SIGNAL = 0.98; EXPRESSED IN ADULT LIVER, SIGNAL = 1.1; EXPRESSED IN BRAIN, SIGNAL = 1.1; EXPRESSED IN HEART, SIGNAL = 1.1; EXPRESSED IN BT474, SIGNAL = 0.94; EXPRESSED IN HELA, SIGNAL = 0.91; EST_HUMAN HIT: AI638294.1, EVALUE 3.30e+00; EST_HUMAN HIT: AW004072.1, EVALUE 2.20e+00
KGECGCRHRRVWRAVYRERRRESASCRRGWECSSTSPGAQRLLQSPRSWEVARRDSPPSFRGSMAL

SEQ ID NO: 33834 - protein, 29 aa, Homo sapiens
  MAP TO AC007847.1; EXPRESSED IN HEART, SIGNAL = 1.4; EXPRESSED IN PLACENTA, SIGNAL = 5.5; EXPRESSED IN BT474, SIGNAL = 1.4; EXPRESSED IN LUNG, SIGNAL = 2.1; EXPRESSED IN HELA, SIGNAL = 0.93; EXPRESSED IN ADULT LIVER, SIGNAL = 1.3; EXPRESSED IN BRAIN, SIGNAL =   2; EXPRESSED IN BONE MARROW, SIGNAL =   1; EXPRESSED IN HBL100, SIGNAL = 1.4; EXPRESSED IN FETAL LIVER, SIGNAL = 2.2; EST_HUMAN HIT: BE275502.1, EVALUE 3.00e-08; SWISSPROT HIT: P53355, EVALUE 3.00e-09
  unsure 28
ILKEIQHPNVITLHEVYENKTDVILILXT

SEQ ID NO: 33835 - protein, 43 aa, Homo sapiens
  MAP TO AC007846.1; EXPRESSED IN BRAIN, SIGNAL = 2.1; EXPRESSED IN BT474, SIGNAL = 1.4; EXPRESSED IN LUNG, SIGNAL = 1.9; EXPRESSED IN HELA, SIGNAL = 2.4; EXPRESSED IN ADULT LIVER, SIGNAL =   2; EXPRESSED IN HEART, SIGNAL = 1.5; EXPRESSED IN PLACENTA, SIGNAL = 1.5; EXPRESSED IN BONE MARROW, SIGNAL = 1.7; EXPRESSED IN HBL100, SIGNAL = 1.5; EXPRESSED IN FETAL LIVER, SIGNAL = 1.7
  unsure 20
  unsure 30
LDPSLGLTQLLLLLVLHRDXPGFPVPIHHXEVFPGLLVTLGGL

SEQ ID NO: 33836 - protein, 43 aa, Homo sapiens
  MAP TO AC007846.1; EXPRESSED IN HBL100, SIGNAL = 1.6; EXPRESSED IN FETAL LIVER, SIGNAL = 1.5; EXPRESSED IN ADULT LIVER, SIGNAL = 1.4; EXPRESSED IN BRAIN, SIGNAL = 1.2; EXPRESSED IN HEART, SIGNAL = 1.1; EXPRESSED IN PLACENTA, SIGNAL = 1.4; EXPRESSED IN BT474, SIGNAL = 2.4; EXPRESSED IN HELA, SIGNAL = 1.4; EXPRESSED IN LUNG, SIGNAL = 1.7; EXPRESSED IN BONE MARROW, SIGNAL = 2.2; EST_HUMAN HIT: AW868283.1, EVALUE 1.40e-01
  unsure 28
  unsure 37
STVSEKSVVVLIIVILYKMCLFFPLAPXQDFVFIFSXVEYDMG

SEQ ID NO: 33837 - protein, 28 aa, Homo sapiens
  MAP TO AC007846.1; EXPRESSED IN PLACENTA, SIGNAL = 6.4; EXPRESSED IN BT474, SIGNAL = 1.6; EXPRESSED IN BONE MARROW, SIGNAL = 1.8; EXPRESSED IN HBL100, SIGNAL = 1.7; EXPRESSED IN HELA, SIGNAL = 1.4; EXPRESSED IN ADULT LIVER, SIGNAL =   2; EXPRESSED IN BRAIN, SIGNAL = 1.6; EXPRESSED IN HEART, SIGNAL = 1.8; EXPRESSED IN LUNG, SIGNAL = 1.4; EXPRESSED IN FETAL LIVER, SIGNAL = 5.5
FLRRSQAKLQLLVQGHTSSSKTSYIQFL

SEQ ID NO: 33838 - protein, 74 aa, Homo sapiens
  MAP TO AC007846.1; EXPRESSED IN PLACENTA, SIGNAL =  47; EXPRESSED IN BONE MARROW, SIGNAL = 0.91; EXPRESSED IN LUNG, SIGNAL =   1; EXPRESSED IN HELA, SIGNAL = 1.4; EXPRESSED IN ADULT LIVER, SIGNAL = 1.1; EXPRESSED IN BT474, SIGNAL =   1; EXPRESSED IN HBL100, SIGNAL = 1.2; EXPRESSED IN FETAL LIVER, SIGNAL = 1.2; EXPRESSED IN BRAIN, SIGNAL = 1.1; EXPRESSED IN HEART, SIGNAL = 1.8; SWISSPROT HIT: Q14137, EVALUE 1.40e+00; EST_HUMAN HIT: BE512955.1, EVALUE 3.10e+00; EST_HUMAN HIT: AA482401.1, EVALUE 3.30e+00
KQLLLQPMGPSQSYPMTPPPLLSRLLSRLKSLQNSPESEYTSLSLPINAPPEFLKSPRPSDLTPFPSKSSMLFF

SEQ ID NO: 33839 - protein, 61 aa, Homo sapiens
  MAP TO AC007846.1; EXPRESSED IN PLACENTA, SIGNAL =  47; EXPRESSED IN BONE MARROW, SIGNAL = 0.91; EXPRESSED IN LUNG, SIGNAL =   1; EXPRESSED IN HELA, SIGNAL = 1.4; EXPRESSED IN ADULT LIVER, SIGNAL = 1.1; EXPRESSED IN BT474, SIGNAL =   1; EXPRESSED IN HBL100, SIGNAL = 1.2; EXPRESSED IN FETAL LIVER, SIGNAL = 1.2; EXPRESSED IN BRAIN, SIGNAL = 1.1; EXPRESSED IN HEART, SIGNAL = 1.8; EST_HUMAN HIT: AW168323.1, EVALUE 6.70e+00; SWISSPROT HIT: P09807, EVALUE 2.00e+00
QKKSIEDFEGKGVRSDGRGDFKNSGGAFMGKDNEVYSDSGLFCSDFSLDKSLDKRGGGVIG

SEQ ID NO: 33840 - protein, 65 aa, Homo sapiens
  MAP TO AC007790.1; EXPRESSED IN HELA, SIGNAL = 2.1; EXPRESSED IN ADULT LIVER, SIGNAL = 2.9; EXPRESSED IN BRAIN, SIGNAL = 2.4; EXPRESSED IN HEART, SIGNAL = 1.9; EXPRESSED IN PLACENTA, SIGNAL = 1.6; EXPRESSED IN LUNG, SIGNAL = 2.1; EXPRESSED IN FETAL LIVER, SIGNAL = 2.3; EXPRESSED IN HBL100, SIGNAL = 1.7; EXPRESSED IN BONE MARROW, SIGNAL = 1.9; EXPRESSED IN BT474, SIGNAL = 2.8
QSPSIELKKVVKKFFLPPHGKGANINKSVEMKHLIRQNPRRAAPLRKKPRAGMILYPRRHCCISR

SEQ ID NO: 33841 - protein, 27 aa, Homo sapiens
  MAP TO AC007786.1; EXPRESSED IN BT474, SIGNAL = 1.8; EXPRESSED IN BONE MARROW, SIGNAL = 2.7; EXPRESSED IN HELA, SIGNAL = 1.7; EXPRESSED IN ADULT LIVER, SIGNAL = 1.5; EXPRESSED IN HEART, SIGNAL = 1.9; EXPRESSED IN PLACENTA, SIGNAL = 1.6; EXPRESSED IN HBL100, SIGNAL =   2; EXPRESSED IN FETAL LIVER, SIGNAL = 1.7; EXPRESSED IN LUNG, SIGNAL = 2.1; EXPRESSED IN BRAIN, SIGNAL = 2.5
LRVHSTVLEDREEKKKLTVLRVTALKY

SEQ ID NO: 33842 - protein, 43 aa, Homo sapiens
  MAP TO AC007786.1; EXPRESSED IN PLACENTA, SIGNAL = 3.6; EXPRESSED IN HBL100, SIGNAL = 2.8; EXPRESSED IN FETAL LIVER, SIGNAL = 2.6; EXPRESSED IN BRAIN, SIGNAL = 2.1; EXPRESSED IN BT474, SIGNAL = 3.2; EXPRESSED IN BONE MARROW, SIGNAL = 3.1; EXPRESSED IN LUNG, SIGNAL = 2.7; EXPRESSED IN HELA, SIGNAL = 2.2; EXPRESSED IN ADULT LIVER, SIGNAL = 1.5; EXPRESSED IN HEART, SIGNAL = 2.4; EST_HUMAN HIT: AV729795.1, EVALUE 7.00e-04; EST_HUMAN HIT: AA524979.1, EVALUE 1.00e-03; SWISSPROT HIT: P34132, EVALUE 6.10e+00
WVLKEFAALKERALGEASAVLASSLTQHWPSGGGHRGACITIS

SEQ ID NO: 33843 - protein, 34 aa, Homo sapiens
  MAP TO AC007786.1; EXPRESSED IN HELA, SIGNAL = 1.5; EXPRESSED IN PLACENTA, SIGNAL = 1.1; EXPRESSED IN BT474, SIGNAL = 1.1; EXPRESSED IN BONE MARROW, SIGNAL =   1; EXPRESSED IN FETAL LIVER, SIGNAL = 1.1; EXPRESSED IN LUNG, SIGNAL = 1.1; EXPRESSED IN ADULT LIVER, SIGNAL = 1.4; EXPRESSED IN HBL100, SIGNAL =   1; EXPRESSED IN BRAIN, SIGNAL = 1.2; EXPRESSED IN HEART, SIGNAL = 2.2; EST_HUMAN HIT: AI872903.1, EVALUE 6.70e+00
TSSGTTACRKASRILWHMLYLLSCLSLEWITLYC

SEQ ID NO: 33844 - protein, 115 aa, Homo sapiens
  MAP TO AC007786.1; EXPRESSED IN HBL100, SIGNAL = 1.8; EXPRESSED IN ADULT LIVER, SIGNAL = 1.7; EXPRESSED IN BRAIN, SIGNAL = 1.2; EXPRESSED IN HEART, SIGNAL = 2.6; EXPRESSED IN BT474, SIGNAL = 1.1; EXPRESSED IN BONE MARROW, SIGNAL = 1.3; EXPRESSED IN FETAL LIVER, SIGNAL = 1.6; EXPRESSED IN HELA, SIGNAL = 1.6; EXPRESSED IN PLACENTA, SIGNAL =   1; EXPRESSED IN LUNG, SIGNAL = 0.96; SWISSPROT HIT: P04885, EVALUE 3.60e+00; EST_HUMAN HIT: AA306055.1, EVALUE 6.60e-01
APLLDLVTLTDLLSLLTMATEVPGQLCPPGMQHLLLMTSSTAGRVHSHFCLVYYRLLTGTMMMTTRASKSSCNKSLLQRISIAYILSSRHHAGKFTVSLKPQGTQTCKDAITLRQ

SEQ ID NO: 33845 - protein, 26 aa, Homo sapiens
  MAP TO AC007786.1; EXPRESSED IN HBL100, SIGNAL = 1.8; EXPRESSED IN ADULT LIVER, SIGNAL = 1.7; EXPRESSED IN BRAIN, SIGNAL = 1.2; EXPRESSED IN HEART, SIGNAL = 2.6; EXPRESSED IN BT474, SIGNAL = 1.1; EXPRESSED IN BONE MARROW, SIGNAL = 1.3; EXPRESSED IN FETAL LIVER, SIGNAL = 1.6; EXPRESSED IN HELA, SIGNAL = 1.6; EXPRESSED IN PLACENTA, SIGNAL =   1; EXPRESSED IN LUNG, SIGNAL = 0.96
QLSRYLSGHCQQTQQVCKCDQIQQRG

SEQ ID NO: 33846 - protein, 192 aa, Homo sapiens
  MAP TO AC007786.1; EXPRESSED IN LUNG, SIGNAL = 1.4; EXPRESSED IN ADULT LIVER, SIGNAL = 4.1; EXPRESSED IN HEART, SIGNAL = 2.6; EXPRESSED IN BONE MARROW, SIGNAL = 2.7; EXPRESSED IN HBL100, SIGNAL = 7.9; EXPRESSED IN PLACENTA, SIGNAL = 1.8; EXPRESSED IN BRAIN, SIGNAL = 2.6; EXPRESSED IN HELA, SIGNAL = 3.9; EXPRESSED IN FETAL LIVER, SIGNAL = 4.7; EXPRESSED IN BT474, SIGNAL = 4.2; EST_HUMAN HIT: BE379481.1, EVALUE 5.00e-97; SWISSPROT HIT: P47985, EVALUE 1.00e-103
IKVPDFSEYRRLEVLDSTKSSRESSEARKGFSYLVTGVTTVGVAYAAKNAVTQFVSSMSASADVLALAKIEIKLSDIPEGKNMAFKWRGKPLFVRHRTQKEIEQEAAVELSQLRDPQHDLDRVKKPEWVILIGVCTHLGCVPIANAGDFGGYYCPCHGSHYDASGRIRLGPAPLNLEVPTYEFTSDDMVIVG

SEQ ID NO: 33847 - protein, 52 aa, Homo sapiens
  MAP TO AC007776.1; EXPRESSED IN PLACENTA, SIGNAL = 1.7; EXPRESSED IN HBL100, SIGNAL = 5.5; EXPRESSED IN LUNG, SIGNAL = 1.5; EXPRESSED IN HELA, SIGNAL = 2.3; EXPRESSED IN ADULT LIVER, SIGNAL =   2; EXPRESSED IN BRAIN, SIGNAL = 0.74; EXPRESSED IN HEART, SIGNAL = 1.1; EXPRESSED IN BT474, SIGNAL =  35; EXPRESSED IN BONE MARROW, SIGNAL = 2.9; EXPRESSED IN FETAL LIVER, SIGNAL = 2.8; EST_HUMAN HIT: N49496.1, EVALUE 3.00e-11; SWISSPROT HIT: O43242, EVALUE 7.00e-11
  unsure 8
GMTQTGRXTLLNLLLRNYLHYSLYDQAEKLVSKSVFPEQANNNEWARYLYYT

SEQ ID NO: 33848 - protein, 47 aa, Homo sapiens
  MAP TO AC007750.2; EXPRESSED IN BT474, SIGNAL = 2.7; EXPRESSED IN LUNG, SIGNAL = 1.2; EXPRESSED IN HELA, SIGNAL =   1; EXPRESSED IN FETAL LIVER, SIGNAL = 1.4; EXPRESSED IN PLACENTA, SIGNAL = 1.1; EXPRESSED IN BONE MARROW, SIGNAL = 1.1; EXPRESSED IN HBL100, SIGNAL = 1.7; EXPRESSED IN ADULT LIVER, SIGNAL = 0.95; EXPRESSED IN BRAIN, SIGNAL = 1.1; EXPRESSED IN HEART, SIGNAL = 1.1; EST_HUMAN HIT: AW190333.1, EVALUE 2.00e-20; EST_HUMAN HIT: AW583897.1, EVALUE 1.00e-20; SWISSPROT HIT: P01275, EVALUE 1.00e-21
FPEEVAIVEELGRRHADGSFSDEMNTILDNLAARDFINWLIQTKITD

SEQ ID NO: 33849 - protein, 92 aa, Homo sapiens
  MAP TO AC007750.2; EXPRESSED IN PLACENTA, SIGNAL = 1.6; EXPRESSED IN FETAL LIVER, SIGNAL = 1.6; EXPRESSED IN LUNG, SIGNAL = 1.5; EXPRESSED IN HELA, SIGNAL = 1.5; EXPRESSED IN BT474, SIGNAL = 1.4; EXPRESSED IN BONE MARROW, SIGNAL = 1.3; EXPRESSED IN HBL100, SIGNAL = 1.7; EXPRESSED IN ADULT LIVER, SIGNAL = 1.3; EXPRESSED IN BRAIN, SIGNAL = 1.1; EXPRESSED IN HEART, SIGNAL = 1.4; EST_HUMAN HIT: BE882040.1, EVALUE 4.00e-19; EST_HUMAN HIT: Z20083.1, EVALUE 1.00e-12; SWISSPROT HIT: O69174, EVALUE 5.40e+00
AKEGNRKERVCAEHLRKYNEALQINDTIRMIDAYTHLETFYNEEKDKKFAVIEDDSDEGGDDEYCDGDEDEDDLKKPLKLDETDRFLMTLFF

SEQ ID NO: 33850 - protein, 25 aa, Homo sapiens
  MAP TO AC007746.1; EXPRESSED IN HEART, SIGNAL = 2.1; EXPRESSED IN HBL100, SIGNAL = 3.9; EXPRESSED IN FETAL LIVER, SIGNAL = 2.6; EXPRESSED IN BRAIN, SIGNAL = 5.2; EXPRESSED IN PLACENTA, SIGNAL = 3.8; EXPRESSED IN BT474, SIGNAL = 9.7; EXPRESSED IN BONE MARROW, SIGNAL =   4; EXPRESSED IN LUNG, SIGNAL = 3.4; EXPRESSED IN HELA, SIGNAL = 3.5; EXPRESSED IN ADULT LIVER, SIGNAL =   2
SRLRMLIVMMMMMMMMMMMMMIVNS

SEQ ID NO: 33851 - protein, 71 aa, Homo sapiens
  MAP TO AC007740.1; EXPRESSED IN HBL100, SIGNAL = 6.6; EXPRESSED IN FETAL LIVER, SIGNAL = 5.8; EXPRESSED IN LUNG, SIGNAL = 5.4; EXPRESSED IN HELA, SIGNAL = 8.5; EXPRESSED IN ADULT LIVER, SIGNAL = 2.9; EXPRESSED IN BRAIN, SIGNAL = 1.9; EXPRESSED IN HEART, SIGNAL = 3.2; EXPRESSED IN PLACENTA, SIGNAL = 2.5; EXPRESSED IN BT474, SIGNAL = 3.8; EXPRESSED IN BONE MARROW, SIGNAL = 3.9; EST_HUMAN HIT: AA496139.1, EVALUE 2.00e-29; SWISSPROT HIT: Q12809, EVALUE 7.00e-17
LLGSTSDSNLNKYSTINKIPQLTLNFSEVKTEKKNSSPPSSDKTIIAPKVKDRTHNVTEKVTQVGHNFLIN

SEQ ID NO: 33852 - protein, 24 aa, Homo sapiens
  MAP TO AC007740.1; EXPRESSED IN HBL100, SIGNAL = 6.6; EXPRESSED IN FETAL LIVER, SIGNAL = 5.8; EXPRESSED IN LUNG, SIGNAL = 5.4; EXPRESSED IN HELA, SIGNAL = 8.5; EXPRESSED IN ADULT LIVER, SIGNAL = 2.9; EXPRESSED IN BRAIN, SIGNAL = 1.9; EXPRESSED IN HEART, SIGNAL = 3.2; EXPRESSED IN PLACENTA, SIGNAL = 2.5; EXPRESSED IN BT474, SIGNAL = 3.8; EXPRESSED IN BONE MARROW, SIGNAL = 3.9; EST_HUMAN HIT: AA496139.1, EVALUE 2.00e-07
ASWDPHQIQTSTNTAPLTRFHSSL

SEQ ID NO: 33853 - protein, 52 aa, Homo sapiens
  MAP TO AC007720.1; EXPRESSED IN BT474, SIGNAL = 8.3; EXPRESSED IN BONE MARROW, SIGNAL = 6.7; EXPRESSED IN HELA, SIGNAL =  16; EXPRESSED IN ADULT LIVER, SIGNAL =   8; EXPRESSED IN PLACENTA, SIGNAL = 9.4; EXPRESSED IN FETAL LIVER, SIGNAL = 7.4; EXPRESSED IN LUNG, SIGNAL = 8.5; EXPRESSED IN BRAIN, SIGNAL =  17; EXPRESSED IN HEART, SIGNAL = 6.5; EXPRESSED IN HBL100, SIGNAL = 9.7; EST_HUMAN HIT: AA207227.1, EVALUE 5.00e-06; EST_HUMAN HIT: BF243959.1, EVALUE 1.00e-06
  unsure 14
  unsure 16
  unsure 32
  unsure 48
  unsure 49
MKFGAVTQIGGPPXGXINPLYSCSLLREKDPXYDLRSSDQPAQGTSHXXFKS

SEQ ID NO: 33854 - protein, 51 aa, Homo sapiens
  MAP TO AC007707.10; EXPRESSED IN PLACENTA, SIGNAL = 2.5; EXPRESSED IN FETAL LIVER, SIGNAL = 2.5; EXPRESSED IN LUNG, SIGNAL = 1.7; EXPRESSED IN ADULT LIVER, SIGNAL =   2; EXPRESSED IN BT474, SIGNAL = 1.4; EXPRESSED IN HEART, SIGNAL = 1.9; EXPRESSED IN BRAIN, SIGNAL = 2.5; EXPRESSED IN HELA, SIGNAL = 1.4; EXPRESSED IN HBL100, SIGNAL = 1.4; EXPRESSED IN BONE MARROW, SIGNAL =   2; EST_HUMAN HIT: AW900428.1, EVALUE 4.00e-20; SWISSPROT HIT: Q9QWV9, EVALUE 7.80e+00
TEVMEDLQKLLPGFPGVNPQAPFLQVAPNVNFMHNLLPMQNLQPTGQLEYK

SEQ ID NO: 33855 - protein, 33 aa, Homo sapiens
  MAP TO AC007707.10; EXPRESSED IN PLACENTA, SIGNAL = 2.5; EXPRESSED IN FETAL LIVER, SIGNAL = 2.5; EXPRESSED IN LUNG, SIGNAL = 1.7; EXPRESSED IN ADULT LIVER, SIGNAL =   2; EXPRESSED IN BT474, SIGNAL = 1.4; EXPRESSED IN HEART, SIGNAL = 1.9; EXPRESSED IN BRAIN, SIGNAL = 2.5; EXPRESSED IN HELA, SIGNAL = 1.4; EXPRESSED IN HBL100, SIGNAL = 1.4; EXPRESSED IN BONE MARROW, SIGNAL =   2; EST_HUMAN HIT: AW900428.1, EVALUE 2.00e-07
FVSARKLWKICRSSYLAFLESTPRLHSCRWPLM

SEQ ID NO: 33856 - protein, 118 aa, Homo sapiens
  MAP TO AC007707.10; EXPRESSED IN PLACENTA, SIGNAL =  15; EXPRESSED IN BT474, SIGNAL =  27; EXPRESSED IN BONE MARROW, SIGNAL =  13; EXPRESSED IN LUNG, SIGNAL =  14; EXPRESSED IN HELA, SIGNAL =  16; EXPRESSED IN ADULT LIVER, SIGNAL =  14; EXPRESSED IN BRAIN, SIGNAL =  27; EXPRESSED IN FETAL LIVER, SIGNAL =  20; EXPRESSED IN HEART, SIGNAL =  15; EXPRESSED IN HBL100, SIGNAL =  15; EST_HUMAN HIT: BE767903.1, EVALUE 5.00e-53; EST_HUMAN HIT: BE328409.1, EVALUE 6.00e-21; SWISSPROT HIT: P18428, EVALUE 2.10e+00
AHQQPPHYTTSALQQALLSPTPPDYTRHQQVPHILQGLLSPRHSLTGHSDIRLPPTEFAQLIKRQQQQRQQQQQQQQQQEYQELFRHMNQGDAGSLAPSLGGQSMTERQALSYQNADS

SEQ ID NO: 33857 - protein, 66 aa, Homo sapiens [sequence omitted]

SEQ ID NO: 33858 - protein, 54 aa, Homo sapiens
  MAP TO AC007707.10; EXPRESSED IN ADULT LIVER, SIGNAL =   4; EXPRESSED IN PLACENTA, SIGNAL = 3.3; EXPRESSED IN BT474, SIGNAL = 3.8; EXPRESSED IN BONE MARROW, SIGNAL = 5.1; EXPRESSED IN HBL100, SIGNAL = 3.7; EXPRESSED IN LUNG, SIGNAL = 3.8; EXPRESSED IN HELA, SIGNAL = 4.4; EXPRESSED IN BRAIN, SIGNAL = 4.6; EXPRESSED IN HEART, SIGNAL = 3.7; EXPRESSED IN FETAL LIVER, SIGNAL = 3.5; SWISSPROT HIT: O75312, EVALUE 3.00e-26; EST_HUMAN HIT: BE385905.1, EVALUE 3.00e-25
GMTRLLLTKIPFFREIIVSSFSCEHCGWNNTEIQSAGRIQDQGVRYTLSVRALE

SEQ ID NO: 33859 - protein, 44 aa, Homo sapiens
  MAP TO AC007707.10; EXPRESSED IN BT474, SIGNAL = 1.7; EXPRESSED IN HBL100, SIGNAL = 2.4; EXPRESSED IN LUNG, SIGNAL = 1.7; EXPRESSED IN HELA, SIGNAL = 2.3; EXPRESSED IN ADULT LIVER, SIGNAL = 2.3; EXPRESSED IN PLACENTA, SIGNAL = 1.3; EXPRESSED IN BONE MARROW, SIGNAL = 2.1; EXPRESSED IN FETAL LIVER, SIGNAL = 1.9; EXPRESSED IN BRAIN, SIGNAL = 1.5; EXPRESSED IN HEART, SIGNAL = 1.4; EST_HUMAN HIT: BE272349.1, EVALUE 7.00e-20; SWISSPROT HIT: Q62384, EVALUE 8.00e-21; EST_HUMAN HIT: BF514945.1, EVALUE 1.00e-19
NVYAPEDDPEMKVERYKRTFDQNEELGLNDMKTEGYEAGLAPQR

SEQ ID NO: 33860 - protein, 237 aa, Homo sapiens
  MAP TO AC007707.10; EXPRESSED IN HBL100, SIGNAL = 2.1; EXPRESSED IN FETAL LIVER, SIGNAL = 2.2; EXPRESSED IN LUNG, SIGNAL = 2.1; EXPRESSED IN ADULT LIVER, SIGNAL = 1.5; EXPRESSED IN BRAIN, SIGNAL = 1.8; EXPRESSED IN HEART, SIGNAL = 1.7; EXPRESSED IN PLACENTA, SIGNAL = 1.9; EXPRESSED IN BT474, SIGNAL = 2.2; EXPRESSED IN HELA, SIGNAL = 3.3; EXPRESSED IN BONE MARROW, SIGNAL = 1.8; EST_HUMAN HIT: BE791706.1, EVALUE 6.00e-81; EST_HUMAN HIT: AW402120.1, EVALUE 2.00e-45; SWISSPROT HIT: P30640, EVALUE 3.00e-07
HNEDLPSNRHFRHDTPDSSPRRVRHGTPDPSPRKDRHDTPDPSPRRARHDTPDPSPLRGARHDSDTSPPRRIRHDSSDTSPPRRARHDSPDPSPPRRPQHNSSGASPRRVRHDSPDPSPPRRARHGSSDISSPRRVHNNSPDTSRRTLGSSDTQQLRRARHDSPDLAPNVTYSLPRTKSGKAPERASSKTSPHWKESGASHLSFPKNSKYEYDPDISPPRKKQAKSHFGDKKQLDSK

SEQ ID NO: 33861 - protein, 42 aa, Homo sapiens
  MAP TO AC007707.10; EXPRESSED IN BT474, SIGNAL = 4.3; EXPRESSED IN HBL100, SIGNAL = 3.1; EXPRESSED IN HELA, SIGNAL = 2.4; EXPRESSED IN BRAIN, SIGNAL = 2.7; EXPRESSED IN PLACENTA, SIGNAL = 4.4; EXPRESSED IN HEART, SIGNAL =   3; EXPRESSED IN ADULT LIVER, SIGNAL = 2.3; EXPRESSED IN LUNG, SIGNAL = 2.6; EXPRESSED IN FETAL LIVER, SIGNAL = 3.1; EXPRESSED IN BONE MARROW, SIGNAL = 4.6; EST_HUMAN HIT: AW384545.1, EVALUE 3.60e+00
FLVQRRPQNKLGGEEPGEELLLFRGTVDAGNSGSWEGFWTGP

SEQ ID NO: 33862 - protein, 43 aa, Homo sapiens
  MAP TO AC007670.1; EXPRESSED IN HELA, SIGNAL = 1.9; EXPRESSED IN HEART, SIGNAL = 0.79; EXPRESSED IN BT474, SIGNAL = 1.7; EXPRESSED IN BONE MARROW, SIGNAL = 3.1; EXPRESSED IN FETAL LIVER, SIGNAL = 2.3; EXPRESSED IN LUNG, SIGNAL = 0.84; EXPRESSED IN ADULT LIVER, SIGNAL = 0.94; EXPRESSED IN BRAIN, SIGNAL = 0.75; EXPRESSED IN PLACENTA, SIGNAL = 0.8; EXPRESSED IN HBL100, SIGNAL = 8.1; EST_HUMAN HIT: AU130635.1, EVALUE 1.00e-17; SWISSPROT HIT: P87136, EVALUE 8.00e+00; EST_HUMAN HIT: BE397236.1, EVALUE 9.00e-18
RFFSGMENQIFLPIITKFCLPSTEEVVVTLWKYLNSFLSGGQG

SEQ ID NO: 33863 - protein, 70 aa, Homo sapiens
  MAP TO AC007637.5; EXPRESSED IN FETAL LIVER, SIGNAL = 1.7; EXPRESSED IN ADULT LIVER, SIGNAL = 4.7; EXPRESSED IN PLACENTA, SIGNAL = 2.8; EXPRESSED IN BT474, SIGNAL = 0.78; EXPRESSED IN BONE MARROW, SIGNAL = 0.9; EXPRESSED IN HBL100, SIGNAL = 0.87; EXPRESSED IN LUNG, SIGNAL = 0.96; EXPRESSED IN HELA, SIGNAL = 0.98; EXPRESSED IN BRAIN, SIGNAL = 1.3; EXPRESSED IN HEART, SIGNAL = 2.7; EST_HUMAN HIT: AU117818.1, EVALUE 5.00e-11; EST_HUMAN HIT: BE384496.1, EVALUE 3.00e-10; SWISSPROT HIT: O00763, EVALUE 8.00e-35
VQSEIPGSPIFLMKLAQHARHLEVQILADQYGNAVSLFGRDCSIQRRHQKIVEEAPATIAPLAIFEFMEQ

SEQ ID NO: 33864 - protein, 77 aa, Homo sapiens
  MAP TO AC007637.5; EXPRESSED IN HELA, SIGNAL = 1.3; EXPRESSED IN ADULT LIVER, SIGNAL = 4.6; EXPRESSED IN PLACENTA, SIGNAL = 0.64; EXPRESSED IN BT474, SIGNAL = 0.67; EXPRESSED IN BONE MARROW, SIGNAL = 0.69; EXPRESSED IN LUNG, SIGNAL = 0.83; EXPRESSED IN FETAL LIVER, SIGNAL = 0.88; EXPRESSED IN BRAIN, SIGNAL = 0.76; EXPRESSED IN HEART, SIGNAL = 1.5; EST_HUMAN HIT: AA722357.1, EVALUE 8.30e-01; SWISSPROT HIT: O00763, EVALUE 2.00e-34
DAAPSPELQANGTGTQGLEATDTNGLSSSARPQGQQAGSPSKEDKKQANIKRQLMTNFILGSFDDYSSDEDSVAGSS

SEQ ID NO: 33865 - protein, 62 aa, Homo sapiens
  MAP TO AC007626.1; EXPRESSED IN BT474, SIGNAL = 4.1; EXPRESSED IN BONE MARROW, SIGNAL = 5.5; EXPRESSED IN HBL100, SIGNAL = 4.8; EXPRESSED IN BRAIN, SIGNAL =  13; EXPRESSED IN PLACENTA, SIGNAL = 4.8; EXPRESSED IN FETAL LIVER, SIGNAL = 5.9; EXPRESSED IN LUNG, SIGNAL = 5.1; EXPRESSED IN HELA, SIGNAL = 6.4; EXPRESSED IN ADULT LIVER, SIGNAL = 5.6; EXPRESSED IN HEART, SIGNAL = 4.5; EST_HUMAN HIT: AW964363.1, EVALUE 1.00e-29; SWISSPROT HIT: P49675, EVALUE 7.00e-30; EST_HUMAN HIT: AV707618.1, EVALUE 2.00e-29
VLQKIGKDTFITHELAAEAAGNLVGPRDFVSVRCAKRRGSTCVLAGMATDFGNMPEQKGVIR

SEQ ID NO: 33866 - protein, 36 aa, Homo sapiens
  MAP TO AC007626.1; EXPRESSED IN BT474, SIGNAL = 4.1; EXPRESSED IN BONE MARROW, SIGNAL = 5.5; EXPRESSED IN HBL100, SIGNAL = 4.8; EXPRESSED IN BRAIN, SIGNAL =  13; EXPRESSED IN PLACENTA, SIGNAL = 4.8; EXPRESSED IN FETAL LIVER, SIGNAL = 5.9; EXPRESSED IN LUNG, SIGNAL = 5.1; EXPRESSED IN HELA, SIGNAL = 6.4; EXPRESSED IN ADULT LIVER, SIGNAL = 5.6; EXPRESSED IN HEART, SIGNAL = 4.5; EST_HUMAN HIT: AW964363.1, EVALUE 3.00e-12; SWISSPROT HIT: Q01636, EVALUE 3.20e-01; EST_HUMAN HIT: AV706022.1, EVALUE 5.00e-12
GSPWPGRSCRRSEKIHSLLTSWLPRQQETWWGPVTL

SEQ ID NO: 33867 - protein, 58 aa, Homo sapiens
  MAP TO AC007626.1; EXPRESSED IN LUNG, SIGNAL = 1.3; EXPRESSED IN BT474, SIGNAL = 3.1; EXPRESSED IN BONE MARROW, SIGNAL = 2.2; EXPRESSED IN HBL100, SIGNAL = 3.1; EXPRESSED IN FETAL LIVER, SIGNAL = 3.7; EXPRESSED IN HELA, SIGNAL = 1.1; EXPRESSED IN ADULT LIVER, SIGNAL = 1.4; EXPRESSED IN BRAIN, SIGNAL = 1.4; EXPRESSED IN PLACENTA, SIGNAL = 1.8; EXPRESSED IN HEART, SIGNAL = 1.2; SWISSPROT HIT: P55730, EVALUE 2.00e+00; EST_HUMAN HIT: BE070309.1, EVALUE 3.00e-31
PLEHPFNKDGYRYILAEPDPHAPDPEKLELDCWAGKPIPGDLYRACLYERVLLALHDR

SEQ ID NO: 33868 - protein, 49 aa, Homo sapiens
  MAP TO AC007607.2; EXPRESSED IN PLACENTA, SIGNAL = 2.8; EXPRESSED IN HEART, SIGNAL = 1.6; EXPRESSED IN BRAIN, SIGNAL = 2.3; EXPRESSED IN ADULT LIVER, SIGNAL = 1.4; EXPRESSED IN HELA, SIGNAL = 1.6; EXPRESSED IN LUNG, SIGNAL = 2.4; EXPRESSED IN HBL100, SIGNAL =   2; EXPRESSED IN BONE MARROW, SIGNAL = 2.6; EXPRESSED IN BT474, SIGNAL =   2; EXPRESSED IN FETAL LIVER, SIGNAL = 2.2; EST_HUMAN HIT: AW962987.1, EVALUE 7.00e-05
GFSLQRKASTTSVSCATRCSTPRPSSSVTSLSTASRAWAAPSNAPCVSQ

SEQ ID NO: 33869 - protein, 24 aa, Homo sapiens
  MAP TO AC007607.2; EXPRESSED IN BT474, SIGNAL = 3.8; EXPRESSED IN BONE MARROW, SIGNAL = 9.4; EXPRESSED IN HELA, SIGNAL = 3.1; EXPRESSED IN PLACENTA, SIGNAL =  14; EXPRESSED IN FETAL LIVER, SIGNAL = 2.5; EXPRESSED IN LUNG, SIGNAL = 4.3; EXPRESSED IN ADULT LIVER, SIGNAL = 2.7; EXPRESSED IN BRAIN, SIGNAL = 3.3; EXPRESSED IN HBL100, SIGNAL = 2.2; EXPRESSED IN HEART, SIGNAL = 3.1; EST_HUMAN HIT: BF700238.1, EVALUE 6.20e+00; EST_HUMAN HIT: AI148016.1, EVALUE 7.30e+00
SPTPQFSWGFSTSEPSSWSRLPVR

SEQ ID NO: 33870 - protein, 26 aa, Homo sapiens
  MAP TO AC007607.2; EXPRESSED IN BONE MARROW, SIGNAL = 1.6; EXPRESSED IN HBL100, SIGNAL = 0.83; EXPRESSED IN FETAL LIVER, SIGNAL = 0.94; EXPRESSED IN ADULT LIVER, SIGNAL = 0.85; EXPRESSED IN PLACENTA, SIGNAL = 1.9; EXPRESSED IN BT474, SIGNAL =   1; EXPRESSED IN LUNG, SIGNAL = 1.4; EXPRESSED IN HELA, SIGNAL = 0.9; EXPRESSED IN BRAIN, SIGNAL = 1.1; EXPRESSED IN HEART, SIGNAL = 1.1; EST_HUMAN HIT: AA446836.1, EVALUE 2.80e-02
MWKVPWILSSSVEVTVCMQTTQRKPV

SEQ ID NO: 33871 - protein, 267 aa, Homo sapiens
  MAP TO AC007607.2; EXPRESSED IN BONE MARROW, SIGNAL = 1.6; EXPRESSED IN HBL100, SIGNAL = 0.83; EXPRESSED IN FETAL LIVER, SIGNAL = 0.94; EXPRESSED IN ADULT LIVER, SIGNAL = 0.85; EXPRESSED IN PLACENTA, SIGNAL = 1.9; EXPRESSED IN BT474, SIGNAL =   1; EXPRESSED IN LUNG, SIGNAL = 1.4; EXPRESSED IN HELA, SIGNAL = 0.9; EXPRESSED IN BRAIN, SIGNAL = 1.1; EXPRESSED IN HEART, SIGNAL = 1.1; EST_HUMAN HIT: T80616.1, EVALUE 5.00e-13
IILARPDIVVPQPVILQQHLHGVGRPTDVTAVHGLRRVHVILAGLMAVRCLRVLKQHALQVSRLSFLGGHWGYPIGRAVLGRSIKHTVLLPQVLLQQDDGVEGLAAELTVILLAVCGDVALQLHLGAEGLPTEDALVSLGRVAQVAVFDVHLQVSLLAEVPVAGRAAVHLLLIAVLHRQVHLDGHLGVEDLLTQGAVVQHKGVHVQQVLLQVIHRGKLLVAALAHIVGRRGHVMHCQVLQEGLLGVKVLFALGARLLPQQQLQVQLQ

SEQ ID NO: 33872 - protein, 42 aa, Homo sapiens
  MAP TO AC007600.2; EXPRESSED IN HELA, SIGNAL = 2.3; EXPRESSED IN BRAIN, SIGNAL = 1.6; EXPRESSED IN HEART, SIGNAL = 3.4; EXPRESSED IN PLACENTA, SIGNAL = 1.3; EXPRESSED IN BT474, SIGNAL = 2.1; EXPRESSED IN BONE MARROW, SIGNAL = 1.8; EXPRESSED IN HBL100, SIGNAL = 6.7; EXPRESSED IN FETAL LIVER, SIGNAL =   3; EXPRESSED IN LUNG, SIGNAL = 1.3; EXPRESSED IN ADULT LIVER, SIGNAL = 2.5
WFALRMDVLMNILTFTVALLVTLSFSSISTSSKGLSLSYIIQ

SEQ ID NO: 33873 - protein, 82 aa, Homo sapiens
  MAP TO AC007600.2; EXPRESSED IN HEART, SIGNAL = 3.8; EXPRESSED IN FETAL LIVER, SIGNAL = 2.7; EXPRESSED IN ADULT LIVER, SIGNAL = 2.9; EXPRESSED IN BRAIN, SIGNAL = 4.3; EXPRESSED IN PLACENTA, SIGNAL = 2.6; EXPRESSED IN BONE MARROW, SIGNAL = 3.1; EXPRESSED IN LUNG, SIGNAL = 3.3; EXPRESSED IN HELA, SIGNAL = 4.2; EXPRESSED IN BT474, SIGNAL = 3.9; EXPRESSED IN HBL100, SIGNAL = 3.4; EST_HUMAN HIT: AI581410.1, EVALUE 2.60e-01; SWISSPROT HIT: P31369, EVALUE 8.80e-01; EST_HUMAN HIT: BF346015.1, EVALUE 3.70e-02
ITQPEDPDTVLLLANATLTWEHEASRKSTPKKLQNQKRHLCKKQRSEAYSERSPPAKGATGPEEQSDSLKSVLHSISFVVRK

SEQ ID NO: 33874 - protein, 22 aa, Homo sapiens
  MAP TO AC007600.2; EXPRESSED IN HEART, SIGNAL = 3.8; EXPRESSED IN FETAL LIVER, SIGNAL = 2.7; EXPRESSED IN ADULT LIVER, SIGNAL = 2.9; EXPRESSED IN BRAIN, SIGNAL = 4.3; EXPRESSED IN PLACENTA, SIGNAL = 2.6; EXPRESSED IN BONE MARROW, SIGNAL = 3.1; EXPRESSED IN LUNG, SIGNAL = 3.3; EXPRESSED IN HELA, SIGNAL = 4.2; EXPRESSED IN BT474, SIGNAL = 3.9; EXPRESSED IN HBL100, SIGNAL = 3.4
HHPTRRPRYCLAFSKCHLDMGA

SEQ ID NO: 33875 - protein, 83 aa, Homo sapiens
  MAP TO AC007600.2; EXPRESSED IN BT474, SIGNAL = 2.4; EXPRESSED IN FETAL LIVER, SIGNAL = 2.1; EXPRESSED IN LUNG, SIGNAL =   2; EXPRESSED IN PLACENTA, SIGNAL = 2.5; EXPRESSED IN HELA, SIGNAL = 1.6; EXPRESSED IN HEART, SIGNAL = 1.9; EXPRESSED IN BRAIN, SIGNAL = 1.8; EXPRESSED IN ADULT LIVER, SIGNAL = 1.8; EXPRESSED IN HBL100, SIGNAL = 1.9; EXPRESSED IN BONE MARROW, SIGNAL = 2.3; EST_HUMAN HIT: BE385503.1, EVALUE 1.90e-01; EST_HUMAN HIT: BE315346.1, EVALUE 2.90e-01
QVTKGRAVAQRPLGGRRLLIMDHSLTVRCARQLQSGWTCGRKTVPKGRTWVQASFLASDPDQGWVLFMQGAKDLCKNERPIFK

SEQ ID NO: 33876 - protein, 55 aa, Homo sapiens
  MAP TO AC007600.2; EXPRESSED IN BONE MARROW, SIGNAL = 5.2; EXPRESSED IN ADULT LIVER, SIGNAL = 5.8; EXPRESSED IN BRAIN, SIGNAL = 5.5; EXPRESSED IN PLACENTA, SIGNAL = 4.2; EXPRESSED IN BT474, SIGNAL = 4.9; EXPRESSED IN HBL100, SIGNAL = 4.3; EXPRESSED IN FETAL LIVER, SIGNAL = 5.3; EXPRESSED IN LUNG, SIGNAL =   5; EXPRESSED IN HELA, SIGNAL = 4.4; EXPRESSED IN HEART, SIGNAL = 3.9; EST_HUMAN HIT: U66687.1, EVALUE 5.00e-12; SWISSPROT HIT: Q63120, EVALUE 9.00e-14; EST_HUMAN HIT: H60893.1, EVALUE 7.00e-12
IILIDEATASIDMETDTLIQRTIREAFQGCTVLVIAHRVTTVLNCDHILVMGNGK

SEQ ID NO: 33877 - protein, 78 aa, Homo sapiens
  MAP TO AC007600.2; EXPRESSED IN HELA, SIGNAL = 0.7; EXPRESSED IN ADULT LIVER, SIGNAL = 2.1; EXPRESSED IN BRAIN, SIGNAL = 0.76; EXPRESSED IN PLACENTA, SIGNAL = 1.1; EXPRESSED IN BT474, SIGNAL = 2.6; EXPRESSED IN BONE MARROW, SIGNAL = 0.68; EXPRESSED IN LUNG, SIGNAL = 0.81; EXPRESSED IN HEART, SIGNAL = 0.96; EXPRESSED IN FETAL LIVER, SIGNAL = 0.97; EST_HUMAN HIT: BE089591.1, EVALUE 4.00e-09; SWISSPROT HIT: O15440, EVALUE 2.00e-08
ILIIPKILEYSEEQLGNVVHGVGLCFALFLSECVKSLSFSSSWIINQRTAIRFRAAVSSFAFEKLIQFKSVIHITSGE

SEQ ID NO: 33878 - protein, 78 aa, Homo sapiens
  MAP TO AC007600.2; EXPRESSED IN PLACENTA, SIGNAL = 0.61; EXPRESSED IN BT474, SIGNAL = 1.3; EXPRESSED IN HBL100, SIGNAL = 0.83; EXPRESSED IN LUNG, SIGNAL = 0.74; EXPRESSED IN FETAL LIVER, SIGNAL = 1.2; EXPRESSED IN HEART, SIGNAL = 0.89; EXPRESSED IN HELA, SIGNAL = 1.3; EXPRESSED IN ADULT LIVER, SIGNAL =   2; SWISSPROT HIT: P93647, EVALUE 8.00e-03; EST_HUMAN HIT: BE252470.1, EVALUE 2.00e-37
IGTAALAVQVVGSNWPKPHYTLLITGLCRFQIVQVLKEKPYPIAEVEQLDRLEEFPNTCKMREELGELSEQFYKYAVQ

SEQ ID NO: 33879 - protein, 263 aa, Homo sapiens
  MAP TO AC007566.1; EXPRESSED IN ADULT LIVER, SIGNAL = 2.9; EXPRESSED IN BRAIN, SIGNAL = 3.2; EXPRESSED IN HEART, SIGNAL = 1.4; EXPRESSED IN BT474, SIGNAL = 2.8; EXPRESSED IN PLACENTA, SIGNAL = 2.2; EXPRESSED IN HELA, SIGNAL = 2.6; EXPRESSED IN LUNG, SIGNAL = 3.2; EXPRESSED IN FETAL LIVER, SIGNAL = 3.6; EXPRESSED IN HBL100, SIGNAL = 2.8; EXPRESSED IN BONE MARROW, SIGNAL = 1.9; EST_HUMAN HIT: AI076830.1, EVALUE 1.00e-92; SWISSPROT HIT: P10272, EVALUE 1.00e-33
KAGYAIESSTSIIEATALPPSTTSQQAELIALTRAFTLAKGLHVNIYTDSKYAFHILHHHAVIWAERGFLTTQGSSIINASLIKTLLKAALLPKEAGVTHCKGHQKASDPITLGNAYADKVAKEAPSVPTSVPHGQFFSFPSVIPTYSPIETSAYQSLLTQGKWFLDQGKYLLPASQAHSILSSFHNLFHVGYKPLVHLLEPLISFHRGNISSRKSLLSVPSAILLPLRDCSGPLPSLHIKLGDLPLPRTGKLTLLTCPESGN

SEQ ID NO: 33880 - protein, 39 aa, Homo sapiens
  MAP TO AC007566.1; EXPRESSED IN BRAIN, SIGNAL =  18; EXPRESSED IN PLACENTA, SIGNAL =   2; EXPRESSED IN BT474, SIGNAL = 1.2; EXPRESSED IN BONE MARROW, SIGNAL = 0.96; EXPRESSED IN HBL100, SIGNAL = 1.7; EXPRESSED IN FETAL LIVER, SIGNAL = 1.1; EXPRESSED IN LUNG, SIGNAL = 1.5; EXPRESSED IN HELA, SIGNAL = 2.1; EXPRESSED IN ADULT LIVER, SIGNAL = 1.3; EXPRESSED IN HEART, SIGNAL = 1.4
FSHAHHHVLPRSLRHLLSLLHPAPCPHYWLNQLWPALHF

SEQ ID NO: 33881 - protein, 99 aa, Homo sapiens
  MAP TO AC007566.1; EXPRESSED IN BRAIN, SIGNAL =  18; EXPRESSED IN PLACENTA, SIGNAL =   2; EXPRESSED IN BT474, SIGNAL = 1.2; EXPRESSED IN BONE MARROW, SIGNAL = 0.96; EXPRESSED IN HBL100, SIGNAL = 1.7; EXPRESSED IN FETAL LIVER, SIGNAL = 1.1; EXPRESSED IN LUNG, SIGNAL = 1.5; EXPRESSED IN HELA, SIGNAL = 2.1; EXPRESSED IN ADULT LIVER, SIGNAL = 1.3; EXPRESSED IN HEART, SIGNAL = 1.4; SWISSPROT HIT: Q60140, EVALUE 4.30e+00
GRGRDVFKVRSQQLLLQCKINGVINKNLAFRLRALDRLKTEGYLIELQAVATLFKCRSEGNAMPKSAEQATADSASNEGKVLGAGVTEGAEDFGVKRGG

SEQ ID NO: 33882 - protein, 100 aa, Homo sapiens
  MAP TO AC007556.2; EXPRESSED IN PLACENTA, SIGNAL =   2; EXPRESSED IN BONE MARROW, SIGNAL = 0.85; EXPRESSED IN ADULT LIVER, SIGNAL = 1.2; EXPRESSED IN HEART, SIGNAL = 0.96; EXPRESSED IN HELA, SIGNAL = 1.9; EXPRESSED IN BT474, SIGNAL = 1.5; EXPRESSED IN HBL100, SIGNAL = 0.76; EXPRESSED IN FETAL LIVER, SIGNAL = 1.8; EXPRESSED IN LUNG, SIGNAL = 0.85; EXPRESSED IN BRAIN, SIGNAL = 1.2; EST_HUMAN HIT: AW368058.1, EVALUE 8.00e-03; SWISSPROT HIT: P35658, EVALUE 1.20e+00
LSFLMPSKLITKCPCSQRITTVTPMNGSAPTNVASQNPGSVTHLTTVRITQMKTVPTVPAGPAGRASFGVLMAAASRRPGSVMWIMIVETTRMSPLKNAV

SEQ ID NO: 33883 - protein, 80 aa, Homo sapiens
  MAP TO AC007556.2; EXPRESSED IN BONE MARROW, SIGNAL = 1.5; EXPRESSED IN FETAL LIVER, SIGNAL = 2.3; EXPRESSED IN ADULT LIVER, SIGNAL = 1.9; EXPRESSED IN BRAIN, SIGNAL = 3.8; EXPRESSED IN HEART, SIGNAL = 2.2; EXPRESSED IN PLACENTA, SIGNAL = 2.3; EXPRESSED IN BT474, SIGNAL = 1.9; EXPRESSED IN HBL100, SIGNAL = 1.5; EXPRESSED IN LUNG, SIGNAL = 1.7; EXPRESSED IN HELA, SIGNAL = 2.1; EST_HUMAN HIT: BE838271.1, EVALUE 3.00e-15; EST_HUMAN HIT: AW502726.1, EVALUE 6.00e-14; SWISSPROT HIT: P98164, EVALUE 4.00e-49
LHTCSPTAFTCANGRCVQYSYRCDYYNDCGDGSDEAGCLFRDCNATTEFMCNNRRCIPREFICNGVDNCHDNNTSDEKNC

SEQ ID NO: 33884 - protein, 65 aa, Homo sapiens
  MAP TO AC007556.2; EXPRESSED IN BONE MARROW, SIGNAL = 1.5; EXPRESSED IN FETAL LIVER, SIGNAL = 2.3; EXPRESSED IN ADULT LIVER, SIGNAL = 1.9; EXPRESSED IN BRAIN, SIGNAL = 3.8; EXPRESSED IN HEART, SIGNAL = 2.2; EXPRESSED IN PLACENTA, SIGNAL = 2.3; EXPRESSED IN BT474, SIGNAL = 1.9; EXPRESSED IN HBL100, SIGNAL = 1.5; EXPRESSED IN LUNG, SIGNAL = 1.7; EXPRESSED IN HELA, SIGNAL = 2.1; EST_HUMAN HIT: R84948.1, EVALUE 3.70e+00
FTPAHRQPSPVPMGDVSNTLTAVITTMTVVMAVMRQGACSGTAMPPRSLCAITEGAYLVSLSAMV

SEQ ID NO: 33885 - protein, 82 aa, Homo sapiens
  MAP TO AC007556.2; EXPRESSED IN LUNG, SIGNAL = 0.95; EXPRESSED IN PLACENTA, SIGNAL = 0.98; EXPRESSED IN BT474, SIGNAL = 0.89; EXPRESSED IN BONE MARROW, SIGNAL = 1.3; EXPRESSED IN FETAL LIVER, SIGNAL = 0.73; EXPRESSED IN HELA, SIGNAL = 0.94; EXPRESSED IN BRAIN, SIGNAL = 0.92; EXPRESSED IN ADULT LIVER, SIGNAL = 1.7; EXPRESSED IN HEART, SIGNAL = 0.93; EST_HUMAN HIT: BE543079.1, EVALUE 2.00e-15; EST_HUMAN HIT: AW950260.1, EVALUE 8.00e-14; SWISSPROT HIT: P98164, EVALUE 9.00e-49
GNSCSDFNGGCTHECVQEPFGAKCLCPLGFLLANDSKTCEDIDECDILGSCSQHCYNMRGSFRCSCDTGYMLESDGRTCKVT

SEQ ID NO: 33886 - protein, 41 aa, Homo sapiens
  MAP TO AC007556.2; EXPRESSED IN LUNG, SIGNAL = 0.95; EXPRESSED IN PLACENTA, SIGNAL = 0.98; EXPRESSED IN BT474, SIGNAL = 0.89; EXPRESSED IN BONE MARROW, SIGNAL = 1.3; EXPRESSED IN FETAL LIVER, SIGNAL = 0.73; EXPRESSED IN HELA, SIGNAL = 0.94; EXPRESSED IN BRAIN, SIGNAL = 0.92; EXPRESSED IN ADULT LIVER, SIGNAL = 1.7; EXPRESSED IN HEART, SIGNAL = 0.93
GTAAQISMVVVLTSVFKSPLGLNAYVHWDSYLPMILRPVKT

SEQ ID NO: 33887 - protein, 36 aa, Homo sapiens
  MAP TO AC007546.5; EXPRESSED IN BONE MARROW, SIGNAL = 1.9; EXPRESSED IN HBL100, SIGNAL = 1.5; EXPRESSED IN ADULT LIVER, SIGNAL = 2.1; EXPRESSED IN PLACENTA, SIGNAL =   2; EXPRESSED IN BT474, SIGNAL = 1.7; EXPRESSED IN LUNG, SIGNAL = 2.1; EXPRESSED IN HELA, SIGNAL = 1.5; EXPRESSED IN BRAIN, SIGNAL = 3.2; EXPRESSED IN FETAL LIVER, SIGNAL = 1.6; EXPRESSED IN HEART, SIGNAL = 1.8; EST_HUMAN HIT: BF516262.1, EVALUE 5.00e-14; EST_HUMAN HIT: W74471.1, EVALUE 1.00e-03
GAVRGRGTLLKGTSSLQSLKNNLTMLAWGPSYLQCQ

SEQ ID NO: 33888 - protein, 37 aa, Homo sapiens
  MAP TO AC007546.5; EXPRESSED IN BONE MARROW, SIGNAL = 1.9; EXPRESSED IN HBL100, SIGNAL = 1.5; EXPRESSED IN ADULT LIVER, SIGNAL = 2.1; EXPRESSED IN PLACENTA, SIGNAL =   2; EXPRESSED IN BT474, SIGNAL = 1.7; EXPRESSED IN LUNG, SIGNAL = 2.1; EXPRESSED IN HELA, SIGNAL = 1.5; EXPRESSED IN BRAIN, SIGNAL = 3.2; EXPRESSED IN FETAL LIVER, SIGNAL = 1.6; EXPRESSED IN HEART, SIGNAL = 1.8; EST_HUMAN HIT: BF516262.1, EVALUE 2.00e-15; EST_HUMAN HIT: W74471.1, EVALUE 1.00e-03
RSCKGERNFAERHILPAELEEQSNHAGMGPILPAMPR

SEQ ID NO: 33889 - protein, 64 aa, Homo sapiens
  MAP TO AC007546.5; EXPRESSED IN PLACENTA, SIGNAL = 2.3; EXPRESSED IN BT474, SIGNAL = 2.1; EXPRESSED IN BONE MARROW, SIGNAL = 3.4; EXPRESSED IN HELA, SIGNAL =   2; EXPRESSED IN ADULT LIVER, SIGNAL = 1.8; EXPRESSED IN HEART, SIGNAL = 1.7; EXPRESSED IN HBL100, SIGNAL = 2.2; EXPRESSED IN FETAL LIVER, SIGNAL = 1.8; EXPRESSED IN LUNG, SIGNAL = 2.1; EXPRESSED IN BRAIN, SIGNAL = 1.9; EST_HUMAN HIT: AW867799.1, EVALUE 3.00e-13; EST_HUMAN HIT: AU125286.1, EVALUE 4.00e-13
AIQESLLTSTEGLCPSALSETSRFDNDLQLAMELSAKELEEWELRLQEEEAELQQVLQLSLTDK

SEQ ID NO: 33890 - protein, 53 aa, Homo sapiens
  MAP TO AC007546.5; EXPRESSED IN HEART, SIGNAL = 0.91; EXPRESSED IN PLACENTA, SIGNAL = 1.9; EXPRESSED IN BT474, SIGNAL = 1.8; EXPRESSED IN BONE MARROW, SIGNAL = 1.9; EXPRESSED IN HBL100, SIGNAL = 0.96; EXPRESSED IN FETAL LIVER, SIGNAL = 0.75; EXPRESSED IN LUNG, SIGNAL = 0.89; EXPRESSED IN HELA, SIGNAL = 0.72; EST_HUMAN HIT: AL120745.1, EVALUE 3.00e-17; SWISSPROT HIT: P53208, EVALUE 3.50e+00; EST_HUMAN HIT: AW504027.1, EVALUE 5.00e-17
LHEAVSTGDPEMVYTVLQHRDYHNTSMALEGVPELLQKILEVSMKMWPGHNLS

SEQ ID NO: 33891 - protein, 61 aa, Homo sapiens
  MAP TO AC007540.3; EXPRESSED IN BT474, SIGNAL =   2; EXPRESSED IN BONE MARROW, SIGNAL = 1.9; EXPRESSED IN HBL100, SIGNAL = 1.3; EXPRESSED IN FETAL LIVER, SIGNAL = 1.4; EXPRESSED IN LUNG, SIGNAL = 2.4; EXPRESSED IN ADULT LIVER, SIGNAL = 1.2; EXPRESSED IN BRAIN, SIGNAL = 1.9; EXPRESSED IN HEART, SIGNAL = 1.5; EXPRESSED IN PLACENTA, SIGNAL = 1.8; EXPRESSED IN HELA, SIGNAL = 1.7; EST_HUMAN HIT: AI394483.1, EVALUE 1.00e-28; SWISSPROT HIT: P02349, EVALUE 2.60e+00; EST_HUMAN HIT: BF509039.1, EVALUE 3.00e-34
MHHLQPLNAKHHGNGTPLHHKQGALYWEPEALYTLCYFMHCPQMEWENPNVEPSKVNLQVE

SEQ ID NO: 33892 - protein, 68 aa, Homo sapiens
  MAP TO AC007540.3; EXPRESSED IN BT474, SIGNAL =   2; EXPRESSED IN BONE MARROW, SIGNAL = 1.9; EXPRESSED IN HBL100, SIGNAL = 1.3; EXPRESSED IN FETAL LIVER, SIGNAL = 1.4; EXPRESSED IN LUNG, SIGNAL = 2.4; EXPRESSED IN ADULT LIVER, SIGNAL = 1.2; EXPRESSED IN BRAIN, SIGNAL = 1.9; EXPRESSED IN HEART, SIGNAL = 1.5; EXPRESSED IN PLACENTA, SIGNAL = 1.8; EXPRESSED IN HELA, SIGNAL = 1.7; EST_HUMAN HIT: AI394483.1, EVALUE 4.00e-26; SWISSPROT HIT: Q24266, EVALUE 1.60e-02; EST_HUMAN HIT: BF509039.1, EVALUE 1.00e-26
FSANVGFLEDLKSSFCPQVTWCPVQCITCSPSMPSTTAMAPPCTTSRGHCTGSPRPCTPFAISCTAHK

SEQ ID NO: 33893 - protein, 73 aa, Homo sapiens
  MAP TO AC007540.3; EXPRESSED IN PLACENTA, SIGNAL =   2; EXPRESSED IN BT474, SIGNAL = 1.3; EXPRESSED IN LUNG, SIGNAL =   1; EXPRESSED IN HEART, SIGNAL = 0.93; EXPRESSED IN BONE MARROW, SIGNAL = 1.2; EXPRESSED IN BRAIN, SIGNAL = 1.6; EXPRESSED IN ADULT LIVER, SIGNAL = 1.9; EXPRESSED IN HELA, SIGNAL = 1.1; EXPRESSED IN FETAL LIVER, SIGNAL = 5.7; EXPRESSED IN HBL100, SIGNAL = 1.7; SWISSPROT HIT: P74397, EVALUE 1.90e+00; EST_HUMAN HIT: AA333768.1, EVALUE 2.00e-12
NVFRKLLAQPEKEKSDILSLEEILAEGTDLAETAPPPLCASRNSKAKLRALREAMYHSAEHGYVDVTIDIRSI

SEQ ID NO: 33894 - protein, 47 aa, Homo sapiens
  MAP TO AC007540.3; EXPRESSED IN ADULT LIVER, SIGNAL = 2.5; EXPRESSED IN BRAIN, SIGNAL =   2; EXPRESSED IN HEART, SIGNAL = 1.4; EXPRESSED IN BT474, SIGNAL = 1.1; EXPRESSED IN BONE MARROW, SIGNAL = 2.3; EXPRESSED IN HBL100, SIGNAL = 1.7; EXPRESSED IN HELA, SIGNAL = 1.8; EXPRESSED IN PLACENTA, SIGNAL =   2; EXPRESSED IN FETAL LIVER, SIGNAL = 1.9; EXPRESSED IN LUNG, SIGNAL = 2.1; EST_HUMAN HIT: AI422187.1, EVALUE 1.20e+00
RLFHLLMIITGSSPTSRPSHAARNCCTRGMALRTCTRGLFPCEHGPV

SEQ ID NO: 33895 - protein, 50 aa, Homo sapiens
  MAP TO AC007540.3; EXPRESSED IN LUNG, SIGNAL = 1.3; EXPRESSED IN ADULT LIVER, SIGNAL = 2.4; EXPRESSED IN BRAIN, SIGNAL = 1.6; EXPRESSED IN HEART, SIGNAL = 1.1; EXPRESSED IN PLACENTA, SIGNAL = 1.1; EXPRESSED IN BT474, SIGNAL = 1.4; EXPRESSED IN BONE MARROW, SIGNAL = 1.3; EXPRESSED IN HBL100, SIGNAL = 1.2; EXPRESSED IN FETAL LIVER, SIGNAL = 1.4; EXPRESSED IN HELA, SIGNAL = 1.1; EST_HUMAN HIT: BE379926.1, EVALUE 6.00e-21; SWISSPROT HIT: P53813, EVALUE 6.00e+00
MMVLIENEAFKQLLYDKNGEGTGQDVLQDLQRTLAIRIQSIHLSSSKGSV

SEQ ID NO: 33896 - protein, 129 aa, Homo sapiens
  MAP TO AC007537.3; EXPRESSED IN BT474, SIGNAL = 1.2; EXPRESSED IN HBL100, SIGNAL = 2.6; EXPRESSED IN HELA, SIGNAL = 1.3; EXPRESSED IN HEART, SIGNAL = 1.3; EXPRESSED IN PLACENTA, SIGNAL = 1.4; EXPRESSED IN BONE MARROW, SIGNAL = 1.4; EXPRESSED IN FETAL LIVER, SIGNAL = 1.2; EXPRESSED IN LUNG, SIGNAL = 1.4; EXPRESSED IN BRAIN, SIGNAL = 1.3; EXPRESSED IN ADULT LIVER, SIGNAL = 1.1; EST_HUMAN HIT: AA399486.1, EVALUE 2.00e-31; SWISSPROT HIT: P10385, EVALUE 1.80e+00
DDDLNTIEFKILAYYTRHHVFKSTPALFSPKLLRTRSLSQRGLGNCSANESWTEVSWPCRNSQSSEKAINLGKKKSSWKAFFGVVEKEDSQSTPAKVSAQGQRTLEYQDSHSQQWSRCLSNVEQCLEHE

SEQ ID NO: 33897 - protein, 57 aa, Homo sapiens
  MAP TO AC007527.6; EXPRESSED IN HBL100, SIGNAL = 1.5; EXPRESSED IN LUNG, SIGNAL = 0.71; EXPRESSED IN HELA, SIGNAL = 1.3; EXPRESSED IN BRAIN, SIGNAL = 1.1; EXPRESSED IN BT474, SIGNAL = 0.94; EXPRESSED IN BONE MARROW, SIGNAL = 0.78; EXPRESSED IN PLACENTA, SIGNAL = 2.4; EXPRESSED IN HEART, SIGNAL = 0.89; EXPRESSED IN ADULT LIVER, SIGNAL = 1.2; EXPRESSED IN FETAL LIVER, SIGNAL =   3; EST_HUMAN HIT: AW237482.1, EVALUE 2.00e-03; SWISSPROT HIT: O25372, EVALUE 7.70e+00
IVGFGKPEAVSQGHSGAYGVTSLRRSCNLQPIASEDLRSADNHVRELRSRFSSPSQA

SEQ ID NO: 33898 - protein, 22 aa, Homo sapiens
  MAP TO AC007527.6; EXPRESSED IN HBL100, SIGNAL = 1.5; EXPRESSED IN LUNG, SIGNAL = 0.71; EXPRESSED IN HELA, SIGNAL = 1.3; EXPRESSED IN BRAIN, SIGNAL = 1.1; EXPRESSED IN BT474, SIGNAL = 0.94; EXPRESSED IN BONE MARROW, SIGNAL = 0.78; EXPRESSED IN PLACENTA, SIGNAL = 2.4; EXPRESSED IN HEART, SIGNAL = 0.89; EXPRESSED IN ADULT LIVER, SIGNAL = 1.2; EXPRESSED IN FETAL LIVER, SIGNAL =   3
LWALGSQKLYHKDIQEPMESPA

SEQ ID NO: 33899 - protein, 19 aa, Homo sapiens
  MAP TO AC007447.6; EXPRESSED IN PLACENTA, SIGNAL = 1.6; EXPRESSED IN FETAL LIVER, SIGNAL = 1.4; EXPRESSED IN LUNG, SIGNAL = 1.4; EXPRESSED IN ADULT LIVER, SIGNAL = 1.4; EXPRESSED IN BT474, SIGNAL = 1.8; EXPRESSED IN BONE MARROW, SIGNAL = 1.7; EXPRESSED IN HBL100, SIGNAL = 1.9; EXPRESSED IN HELA, SIGNAL = 1.1; EXPRESSED IN BRAIN, SIGNAL = 1.8; EXPRESSED IN HEART, SIGNAL = 2.1; EST_HUMAN HIT: AI077927.1, EVALUE 3.00e-04
MPPLQHKAARKIDDQLPQD

SEQ ID NO: 33900 - protein, 478 aa, Homo sapiens
  MAP TO AC007447.6; EXPRESSED IN HBL100, SIGNAL = 6.5; EXPRESSED IN PLACENTA, SIGNAL = 6.6; EXPRESSED IN BT474, SIGNAL =   6; EXPRESSED IN BONE MARROW, SIGNAL = 4.6; EXPRESSED IN LUNG, SIGNAL = 5.8; EXPRESSED IN HELA, SIGNAL =  12; EXPRESSED IN ADULT LIVER, SIGNAL = 6.8; EXPRESSED IN BRAIN, SIGNAL =  10; EXPRESSED IN FETAL LIVER, SIGNAL = 6.5; EXPRESSED IN HEART, SIGNAL = 6.4; EST_HUMAN HIT: AI267168.1, EVALUE 5.00e-67
PVSLAPITFVGIDGQASKHLKAPLLWCQLGQPSFKHSFLVIPTCPVPLLGRDILTKLSASLTIPGLQPHLIATLLPNPKLPLRLPLVSPYLDPQVWDIFTPSLATDHMPITIPLKPNHPYPAQRQYPIPQHALKGLKPVITRLLQHGLLKPINSPYNSPISPVQKPHKSYRLVEDLCLINQIVLLIYPVVPNPYTLLSSIHSSTTHYSILDLKDAFFTILLYPSSQPLFAFTWTDPDTHQSQQLTWAVLPQGFRDSSHYFSQALSHDLLSFHPSASHLIQYIDDLLLCSPSFESSQQDTLLLLQHLFSKGYWVSPSKAQISSPSVIYLSIILHKNAHALPANRVRLISQTPTPSTKQQLLSFLGMVGYFRFWMPGFAILTKPLYKLTKGNLADPIDPKSFLHSSFRSLKTALETEATLALPDSSQPFSLPTAGLEVQGCAVRIVTQGPGPRPVAFCSKQLDLTVLPSPQVCMQQPPLP

SEQ ID NO: 33901 - protein, 28 aa, Homo sapiens
  MAP TO AC007446.8; EXPRESSED IN HEART, SIGNAL = 1.5; EXPRESSED IN FETAL LIVER, SIGNAL = 1.3; EXPRESSED IN LUNG, SIGNAL = 1.3; EXPRESSED IN HELA, SIGNAL = 3.7; EXPRESSED IN PLACENTA, SIGNAL = 1.9; EXPRESSED IN BT474, SIGNAL = 1.7; EXPRESSED IN BONE MARROW, SIGNAL = 2.3; EXPRESSED IN HBL100, SIGNAL = 1.8; EXPRESSED IN ADULT LIVER, SIGNAL = 1.9; EXPRESSED IN BRAIN, SIGNAL = 1.7; EST_HUMAN HIT: H71821.1, EVALUE 1.20e-02; EST_HUMAN HIT: AW800926.1, EVALUE 3.00e-04
IRHKLLSCKWLTYNKRCMLSLTTCLLIK

SEQ ID NO: 33902 - protein, 35 aa, Homo sapiens
  MAP TO AC007436.1; EXPRESSED IN BT474, SIGNAL = 4.7; EXPRESSED IN BRAIN, SIGNAL = 8.9; EXPRESSED IN HEART, SIGNAL = 6.3; EXPRESSED IN BONE MARROW, SIGNAL = 6.2; EXPRESSED IN PLACENTA, SIGNAL =  18; EXPRESSED IN ADULT LIVER, SIGNAL =  22; EXPRESSED IN HELA, SIGNAL =   8; EXPRESSED IN LUNG, SIGNAL =  13; EXPRESSED IN FETAL LIVER, SIGNAL =  30; EXPRESSED IN HBL100, SIGNAL = 6.1; EST_HUMAN HIT: BF241894.1, EVALUE 4.00e-15; EST_HUMAN HIT: AA188327.1, EVALUE 1.00e-14; SWISSPROT HIT: P14370, EVALUE 3.00e-04
SNYSTCASCPSCPDRWMKYGNHCYYFSVEEKDWNS

SEQ ID NO: 33903 - protein, 60 aa, Homo sapiens
  MAP TO AC007436.1; EXPRESSED IN BONE MARROW, SIGNAL = 1.9; EXPRESSED IN FETAL LIVER, SIGNAL =  49; EXPRESSED IN PLACENTA, SIGNAL = 4.3; EXPRESSED IN BT474, SIGNAL = 0.67; EXPRESSED IN LUNG, SIGNAL =  25; EXPRESSED IN HELA, SIGNAL = 3.5; EXPRESSED IN ADULT LIVER, SIGNAL =  35; EXPRESSED IN BRAIN, SIGNAL = 0.76; EXPRESSED IN HEART, SIGNAL = 3.2; EST_HUMAN HIT: AU133728.1, EVALUE 1.00e-28; EST_HUMAN HIT: H40184.1, EVALUE 7.00e-29; SWISSPROT HIT: P01023, EVALUE 1.00e-29
HPVVRNALFCLESAWKTAQEGDHGSHVYTKALLAYAFALAGNQDKRKEVLKSLNEEAVKK

SEQ ID NO: 33904 - protein, 40 aa, Homo sapiens
  MAP TO AC007436.1; EXPRESSED IN BONE MARROW, SIGNAL = 1.9; EXPRESSED IN FETAL LIVER, SIGNAL =  49; EXPRESSED IN PLACENTA, SIGNAL = 4.3; EXPRESSED IN BT474, SIGNAL = 0.67; EXPRESSED IN LUNG, SIGNAL =  25; EXPRESSED IN HELA, SIGNAL = 3.5; EXPRESSED IN ADULT LIVER, SIGNAL =  35; EXPRESSED IN BRAIN, SIGNAL = 0.76; EXPRESSED IN HEART, SIGNAL = 3.2; EST_HUMAN HIT: AU134432.1, EVALUE 1.00e-18; EST_HUMAN HIT: AA668287.1, EVALUE 6.00e-19
HKKGTMAAMYIPKHCWPMLLPWQVTRTRGRKYSSHLMRKL

SEQ ID NO: 33905 - protein, 76 aa, Homo sapiens
  MAP TO AC007436.1; EXPRESSED IN LUNG, SIGNAL =  17; EXPRESSED IN HELA, SIGNAL = 4.1; EXPRESSED IN PLACENTA, SIGNAL =   2; EXPRESSED IN BRAIN, SIGNAL = 1.2; EXPRESSED IN HEART, SIGNAL = 1.6; EXPRESSED IN BT474, SIGNAL = 0.64; EXPRESSED IN FETAL LIVER, SIGNAL =  23; EXPRESSED IN ADULT LIVER, SIGNAL =  23; EXPRESSED IN BONE MARROW, SIGNAL = 1.3; EST_HUMAN HIT: AU133589.1, EVALUE 2.00e-33; EST_HUMAN HIT: AI110656.1, EVALUE 1.00e-33; SWISSPROT HIT: P01023, EVALUE 2.00e-34
VNYKDRSPCYGYQWVSEEHEEAHHTAYLVFSPSKSFVHLEPMSHELPCGHTQTVQAHYILNGGTLLGLKKLSFYYL

SEQ ID NO: 33906 - protein, 42 aa, Homo sapiens
  MAP TO AC007436.1; EXPRESSED IN LUNG, SIGNAL =  17; EXPRESSED IN HELA, SIGNAL = 4.1; EXPRESSED IN PLACENTA, SIGNAL =   2; EXPRESSED IN BRAIN, SIGNAL = 1.2; EXPRESSED IN HEART, SIGNAL = 1.6; EXPRESSED IN BT474, SIGNAL = 0.64; EXPRESSED IN FETAL LIVER, SIGNAL =  23; EXPRESSED IN ADULT LIVER, SIGNAL =  23; EXPRESSED IN BONE MARROW, SIGNAL = 1.3; EST_HUMAN HIT: AA654851.1, EVALUE 2.00e-17; SWISSPROT HIT: P17408, EVALUE 6.10e+00; EST_HUMAN HIT: AU119825.1, EVALUE 2.00e-17
NTKRHITLLILCSPQARALSTLSPCLMNYPVAILRQSRHIIF

SEQ ID NO: 33907 - protein, 60 aa, Homo sapiens
  MAP TO AC007436.1; EXPRESSED IN HELA, SIGNAL = 8.4; EXPRESSED IN ADULT LIVER, SIGNAL =  19; EXPRESSED IN BRAIN, SIGNAL = 6.8; EXPRESSED IN PLACENTA, SIGNAL = 7.5; EXPRESSED IN HEART, SIGNAL = 7.7; EXPRESSED IN LUNG, SIGNAL =  20; EXPRESSED IN FETAL LIVER, SIGNAL =  22; EXPRESSED IN HBL100, SIGNAL = 5.1; EXPRESSED IN BONE MARROW, SIGNAL =   6; EXPRESSED IN BT474, SIGNAL = 5.7; EST_HUMAN HIT: AL041738.1, EVALUE 1.00e-27; SWISSPROT HIT: P01023, EVALUE 1.00e-28
YMVLVPSLLHTETTEKGCVLLSYLNETVTVSASLESVRGNRSLFTDLEAENDVLHCVAFA

SEQ ID NO: 33908 - protein, 90 aa, Homo sapiens
  MAP TO AC007430.11; EXPRESSED IN LUNG, SIGNAL = 6.9; EXPRESSED IN ADULT LIVER, SIGNAL = 4.5; EXPRESSED IN BRAIN, SIGNAL = 6.1; EXPRESSED IN HEART, SIGNAL = 4.4; EXPRESSED IN PLACENTA, SIGNAL = 5.5; EXPRESSED IN BT474, SIGNAL = 6.1; EXPRESSED IN BONE MARROW, SIGNAL = 6.6; EXPRESSED IN HBL100, SIGNAL = 5.8; EXPRESSED IN FETAL LIVER, SIGNAL = 6.1; EXPRESSED IN HELA, SIGNAL = 6.7; EST_HUMAN HIT: N56674.1, EVALUE 2.60e-02; SWISSPROT HIT: P10587, EVALUE 1.10e-02
YQRKWDELAVQEKMFRQEFEQLANNKKEIVAFLKRTLNQQVDEITDLNEQLQNLQLAKEMEKDAFEAQLAQVRHEFQETKDQLTTENIIL

SEQ ID NO: 33909 - protein, 31 aa, Homo sapiens
  MAP TO AC007430.11; EXPRESSED IN HBL100, SIGNAL = 3.7; EXPRESSED IN HELA, SIGNAL = 4.7; EXPRESSED IN BRAIN, SIGNAL = 4.5; EXPRESSED IN PLACENTA, SIGNAL = 4.6; EXPRESSED IN BT474, SIGNAL = 4.1; EXPRESSED IN BONE MARROW, SIGNAL = 3.5; EXPRESSED IN HEART, SIGNAL = 3.3; EXPRESSED IN ADULT LIVER, SIGNAL = 3.7; EXPRESSED IN LUNG, SIGNAL = 4.6; EXPRESSED IN FETAL LIVER, SIGNAL =   4
AWLGLIVNSSSIIIITIIIIIIIIIIIIING

SEQ ID NO: 33910 - protein, 18 aa, Homo sapiens
  MAP TO AC007430.11; EXPRESSED IN HBL100, SIGNAL = 3.7; EXPRESSED IN HELA, SIGNAL = 4.7; EXPRESSED IN BRAIN, SIGNAL = 4.5; EXPRESSED IN PLACENTA, SIGNAL = 4.6; EXPRESSED IN BT474, SIGNAL = 4.1; EXPRESSED IN BONE MARROW, SIGNAL = 3.5; EXPRESSED IN HEART, SIGNAL = 3.3; EXPRESSED IN ADULT LIVER, SIGNAL = 3.7; EXPRESSED IN LUNG, SIGNAL = 4.6; EXPRESSED IN FETAL LIVER, SIGNAL =   4
QHTWVKSTLGLFPHDPDR

SEQ ID NO: 33911 - protein, 36 aa, Homo sapiens
  MAP TO AC007430.11; EXPRESSED IN PLACENTA, SIGNAL =   4; EXPRESSED IN HBL100, SIGNAL = 4.8; EXPRESSED IN LUNG, SIGNAL =   4; EXPRESSED IN BRAIN, SIGNAL =  14; EXPRESSED IN BT474, SIGNAL = 3.9; EXPRESSED IN BONE MARROW, SIGNAL = 3.3; EXPRESSED IN FETAL LIVER, SIGNAL = 3.1; EXPRESSED IN HELA, SIGNAL = 3.4; EXPRESSED IN ADULT LIVER, SIGNAL = 2.1; EXPRESSED IN HEART, SIGNAL = 3.1; EST_HUMAN HIT: AW961028.1, EVALUE 7.00e-14; EST_HUMAN HIT: AI002999.1, EVALUE 1.00e-13; SWISSPROT HIT: O08599, EVALUE 8.00e-15
ITEENLNKLIQHAQIPPEDSEIITNMAHLGVPIVTD

SEQ ID NO: 33912 - protein, 44 aa, Homo sapiens
  MAP TO AC007406.1; EXPRESSED IN BT474, SIGNAL = 8.5; EXPRESSED IN BONE MARROW, SIGNAL =  13; EXPRESSED IN FETAL LIVER, SIGNAL = 9.8; EXPRESSED IN HELA, SIGNAL = 8.4; EXPRESSED IN ADULT LIVER, SIGNAL = 7.6; EXPRESSED IN BRAIN, SIGNAL =  11; EXPRESSED IN PLACENTA, SIGNAL = 8.7; EXPRESSED IN LUNG, SIGNAL =  11; EXPRESSED IN HEART, SIGNAL = 8.1; EXPRESSED IN HBL100, SIGNAL = 8.8; EST_HUMAN HIT: BF104781.1, EVALUE 8.00e-01; SWISSPROT HIT: Q09302, EVALUE 8.00e+00
SLELKLCSEDFFIPELLTKQILLRIQFLDCPPLPAKHKSGYLEL

SEQ ID NO: 33913 - protein, 203 aa, Homo sapiens
  MAP TO AC007406.1; EXPRESSED IN BT474, SIGNAL = 9.9; EXPRESSED IN HELA, SIGNAL = 7.9; EXPRESSED IN FETAL LIVER, SIGNAL = 8.6; EXPRESSED IN PLACENTA, SIGNAL = 7.9; EXPRESSED IN BONE MARROW, SIGNAL = 8.7; EXPRESSED IN HBL100, SIGNAL =  11; EXPRESSED IN LUNG, SIGNAL =   8; EXPRESSED IN ADULT LIVER, SIGNAL = 5.4; EXPRESSED IN BRAIN, SIGNAL = 6.8; EXPRESSED IN HEART, SIGNAL = 5.8; EST_HUMAN HIT: BF207317.1, EVALUE 2.00e-07; EST_HUMAN HIT: AI253548.1, EVALUE 5.00e-05; EST_HUMAN HIT: AI253548.1, EVALUE 5.00e-05; SWISSPROT HIT: P13983, EVALUE 7.00e-04
TDPSVTSTTTRYRVAASAPGSYLAFGFHPCSPRGISILLNLRSLYVTPQVKASRGFPVPLKEKSCSPFSCLQGHIGCIPHHSPQPPALPRPPCSLHTWGVLDPFPHHFPQPHALPRPPCSLPLQPRALPRPPCSLHTWVVLDPFPHHSLQPPALPRPPCSLHTWGVLDPFPHHSPQPPALPRPPGSLHTWGVLDAVPPQFLLP

SEQ ID NO: 33914 - protein, 92 aa, Homo sapiens
  MAP TO AC007397.21; EXPRESSED IN PLACENTA, SIGNAL =  21; EXPRESSED IN HBL100, SIGNAL =  13; EXPRESSED IN LUNG, SIGNAL =  18; EXPRESSED IN HELA, SIGNAL =  14; EXPRESSED IN BT474, SIGNAL =  18; EXPRESSED IN BONE MARROW, SIGNAL =  14; EXPRESSED IN FETAL LIVER, SIGNAL =  23; EXPRESSED IN ADULT LIVER, SIGNAL =  14; EXPRESSED IN BRAIN, SIGNAL =  20; EXPRESSED IN HEART, SIGNAL =  12; EST_HUMAN HIT: AV742802.1, EVALUE 1.00e-30; SWISSPROT HIT: P22881, EVALUE 2.60e+00; EST_HUMAN HIT: AW873282.1, EVALUE 5.00e-29
GDVRVIWLRHLSLHRLPGLIQLIWLARRVSPSSLTTPCASVPKLQAQWKRMTIPNKGGPVFGQGYVSSWASILEPPNKLSTYIKDLEFSLSQ

SEQ ID NO: 33915 - protein, 26 aa, Homo sapiens
  MAP TO AC007397.21; EXPRESSED IN PLACENTA, SIGNAL =  21; EXPRESSED IN HBL100, SIGNAL =  13; EXPRESSED IN LUNG, SIGNAL =  18; EXPRESSED IN HELA, SIGNAL =  14; EXPRESSED IN BT474, SIGNAL =  18; EXPRESSED IN BONE MARROW, SIGNAL =  14; EXPRESSED IN FETAL LIVER, SIGNAL =  23; EXPRESSED IN ADULT LIVER, SIGNAL =  14; EXPRESSED IN BRAIN, SIGNAL =  20; EXPRESSED IN HEART, SIGNAL =  12; EST_HUMAN HIT: AV736824.1, EVALUE 2.00e-05; EST_HUMAN HIT: N69442.1, EVALUE 3.00e-04
RGCEGDLAAASVTPSIARVDSADLAG

SEQ ID NO: 33916 - protein, 199 aa, Homo sapiens
  MAP TO AC007397.21; EXPRESSED IN ADULT LIVER, SIGNAL = 3.6; EXPRESSED IN BRAIN, SIGNAL = 2.9; EXPRESSED IN HEART, SIGNAL = 2.9; EXPRESSED IN PLACENTA, SIGNAL = 2.2; EXPRESSED IN BT474, SIGNAL = 2.6; EXPRESSED IN HELA, SIGNAL = 2.5; EXPRESSED IN LUNG, SIGNAL =   3; EXPRESSED IN FETAL LIVER, SIGNAL =   3; EXPRESSED IN HBL100, SIGNAL = 2.4; EXPRESSED IN BONE MARROW, SIGNAL = 2.8; EST_HUMAN HIT: BE702462.1, EVALUE 3.00e-13; EST_HUMAN HIT: AI565972.1, EVALUE 5.00e-03; SWISSPROT HIT: Q01097, EVALUE 1.00e-106
DESSMFFQFGPSIEQQASVMLNIMEEYDWYIFSIVTTYFPGYQDFVNKIRSTIENSFVGWELEEVLLLDMSLDDGDSKIQNQLKKLQSPIILLYCTKEEATYIFEVANSVGLTGYGYTWIVPSLVAGDTDTVPAEFPTGLISVSYDEWDYGLPARVRDGIAIITTAASDMLSEHSFIPEPKSSCYNTHEKRIYQSNMLN

SEQ ID NO: 33917 - protein, 58 aa, Homo sapiens
  MAP TO AC007390.2; EXPRESSED IN HELA, SIGNAL = 9.7; EXPRESSED IN ADULT LIVER, SIGNAL = 3.8; EXPRESSED IN PLACENTA, SIGNAL = 4.2; EXPRESSED IN BONE MARROW, SIGNAL = 2.8; EXPRESSED IN BT474, SIGNAL = 4.1; EXPRESSED IN HEART, SIGNAL = 2.6; EXPRESSED IN BRAIN, SIGNAL = 4.2; EXPRESSED IN LUNG, SIGNAL = 4.3; EXPRESSED IN FETAL LIVER, SIGNAL = 3.8; EXPRESSED IN HBL100, SIGNAL = 4.1; EST_HUMAN HIT: AI829309.1, EVALUE 1.00e-11; SWISSPROT HIT: Q45298, EVALUE 3.40e+00
SSCGRRFWRNALQLPSGVWKFLCAGDVAGVWLTVEARNCNTEICCYLAAATLLLFTLK

SEQ ID NO: 33918 - protein, 57 aa, Homo sapiens
  MAP TO AC007390.2; EXPRESSED IN HELA, SIGNAL = 9.7; EXPRESSED IN ADULT LIVER, SIGNAL = 3.8; EXPRESSED IN PLACENTA, SIGNAL = 4.2; EXPRESSED IN BONE MARROW, SIGNAL = 2.8; EXPRESSED IN BT474, SIGNAL = 4.1; EXPRESSED IN HEART, SIGNAL = 2.6; EXPRESSED IN BRAIN, SIGNAL = 4.2; EXPRESSED IN LUNG, SIGNAL = 4.3; EXPRESSED IN FETAL LIVER, SIGNAL = 3.8; EXPRESSED IN HBL100, SIGNAL = 4.1; EST_HUMAN HIT: AI829309.1, EVALUE 2.00e-17; SWISSPROT HIT: Q02585, EVALUE 2.60e+00
QALVGGGSGGTPCSCRQAFGSSCVLEMWLGFGSQWRQGIATQKYVATWLLLLYYCSP

SEQ ID NO: 33919 - protein, 176 aa, Homo sapiens
  MAP TO AC007390.2; EXPRESSED IN PLACENTA, SIGNAL = 1.2; EXPRESSED IN BT474, SIGNAL =   2; EXPRESSED IN LUNG, SIGNAL = 1.3; EXPRESSED IN BRAIN, SIGNAL = 1.2; EXPRESSED IN HEART, SIGNAL = 1.1; EXPRESSED IN BONE MARROW, SIGNAL = 2.3; EXPRESSED IN HBL100, SIGNAL = 2.1; EXPRESSED IN FETAL LIVER, SIGNAL = 1.7; EXPRESSED IN HELA, SIGNAL = 1.9; EXPRESSED IN ADULT LIVER, SIGNAL = 1.4; EST_HUMAN HIT: AL039954.1, EVALUE 3.00e-68; EST_HUMAN HIT: AU126056.1, EVALUE 2.00e-86; SWISSPROT HIT: Q03701, EVALUE 2.00e-97
DDAVHTLQFVETLVNLVKKKGSKQQCLMALDTFKELLITDLLPDNRKLRIFSQRPFDKLEQLSSGNKDSRDRRLILWYFEHQLKHLVAEFVQVLETLSHDTLVTTKTRALTVAHELLCNKPEEEKALLVQVVNKLGDPQNRIATKASHLLETLLCKHPNMKGVVSGEVERLLFRSN

SEQ ID NO: 33920 - protein, 34 aa, Homo sapiens
  MAP TO AC007387.2; EXPRESSED IN PLACENTA, SIGNAL = 1.5; EXPRESSED IN LUNG, SIGNAL = 1.7; EXPRESSED IN BRAIN, SIGNAL = 1.4; EXPRESSED IN BT474, SIGNAL = 1.4; EXPRESSED IN BONE MARROW, SIGNAL = 2.7; EXPRESSED IN HBL100, SIGNAL =  25; EXPRESSED IN FETAL LIVER, SIGNAL = 1.5; EXPRESSED IN HELA, SIGNAL = 1.1; EXPRESSED IN ADULT LIVER, SIGNAL = 1.1; EXPRESSED IN HEART, SIGNAL = 1.3
GKLQQDTARKKHEERDKPRGGMNPLAVEISDHGD

SEQ ID NO: 33921 - protein, 22 aa, Homo sapiens
  MAP TO AC007387.2; EXPRESSED IN PLACENTA, SIGNAL = 1.5; EXPRESSED IN LUNG, SIGNAL = 1.7; EXPRESSED IN BRAIN, SIGNAL = 1.4; EXPRESSED IN BT474, SIGNAL = 1.4; EXPRESSED IN BONE MARROW, SIGNAL = 2.7; EXPRESSED IN HBL100, SIGNAL =  25; EXPRESSED IN FETAL LIVER, SIGNAL = 1.5; EXPRESSED IN HELA, SIGNAL = 1.1; EXPRESSED IN ADULT LIVER, SIGNAL = 1.1; EXPRESSED IN HEART, SIGNAL = 1.3
KVSFNRTLPGRSMKKEINPEAE

SEQ ID NO: 33922 - protein, 42 aa, Homo sapiens
  MAP TO AC007387.2; EXPRESSED IN PLACENTA, SIGNAL = 1.8; EXPRESSED IN LUNG, SIGNAL = 1.9; EXPRESSED IN BRAIN, SIGNAL = 2.6; EXPRESSED IN HEART, SIGNAL = 1.6; EXPRESSED IN BT474, SIGNAL = 1.9; EXPRESSED IN BONE MARROW, SIGNAL =   2; EXPRESSED IN HBL100, SIGNAL = 1.2; EXPRESSED IN FETAL LIVER, SIGNAL = 1.4; EXPRESSED IN HELA, SIGNAL = 1.3; EXPRESSED IN ADULT LIVER, SIGNAL = 1.5; SWISSPROT HIT: P20742, EVALUE 2.70e+00
REGCFRSQGASLRLAVEDGLQQFKQYSRHVTTRAALTYTSLE

SEQ ID NO: 33923 - protein, 77 aa, Homo sapiens
  MAP TO AC007386.3; EXPRESSED IN PLACENTA, SIGNAL = 1.9; EXPRESSED IN BT474, SIGNAL = 5.7; EXPRESSED IN BONE MARROW, SIGNAL = 3.1; EXPRESSED IN FETAL LIVER, SIGNAL = 1.8; EXPRESSED IN LUNG, SIGNAL = 1.4; EXPRESSED IN ADULT LIVER, SIGNAL = 1.6; EXPRESSED IN BRAIN, SIGNAL = 2.5; EXPRESSED IN HBL100, SIGNAL = 3.1; EXPRESSED IN HELA, SIGNAL = 1.5; EXPRESSED IN HEART, SIGNAL = 1.4; EST_HUMAN HIT: AU117468.1, EVALUE 7.00e-38; EST_HUMAN HIT: AW950075.1, EVALUE 3.00e-36; SWISSPROT HIT: P43007, EVALUE 6.00e-39
DRTTTVVNVEGDALGAGILHHLNQKATKKGEQELAEVKVEAIPNCKSEEETSPLVTHQNPAGPVASAPELESKESVL

SEQ ID NO: 33924 - protein, 35 aa, Homo sapiens
  MAP TO AC007380.3; EXPRESSED IN HBL100, SIGNAL = 9.1; EXPRESSED IN LUNG, SIGNAL =  13; EXPRESSED IN PLACENTA, SIGNAL = 9.7; EXPRESSED IN BT474, SIGNAL = 9.8; EXPRESSED IN BONE MARROW, SIGNAL = 9.7; EXPRESSED IN FETAL LIVER, SIGNAL =  11; EXPRESSED IN HELA, SIGNAL =  10; EXPRESSED IN ADULT LIVER, SIGNAL = 8.2; EXPRESSED IN BRAIN, SIGNAL =  14; EXPRESSED IN HEART, SIGNAL =  11; EST_HUMAN HIT: R96567.1, EVALUE 8.80e-02; SWISSPROT HIT: P22304, EVALUE 6.20e+00
SHHEDPTLMSSSKPYYHPKAREFPNTIQISKYHHT

SEQ ID NO: 33925 - protein, 33 aa, Homo sapiens
  MAP TO AC007380.3; EXPRESSED IN HBL100, SIGNAL = 9.1; EXPRESSED IN LUNG, SIGNAL =  13; EXPRESSED IN PLACENTA, SIGNAL = 9.7; EXPRESSED IN BT474, SIGNAL = 9.8; EXPRESSED IN BONE MARROW, SIGNAL = 9.7; EXPRESSED IN FETAL LIVER, SIGNAL =  11; EXPRESSED IN HELA, SIGNAL =  10; EXPRESSED IN ADULT LIVER, SIGNAL = 8.2; EXPRESSED IN BRAIN, SIGNAL =  14; EXPRESSED IN HEART, SIGNAL =  11; EST_HUMAN HIT: AI636465.1, EVALUE 6.90e-02
PIMRTPPSCPHLNLITTQRPVNFQILSKFPNTI

SEQ ID NO: 33926 - protein, 91 aa, Homo sapiens
  MAP TO AC007377.3; EXPRESSED IN ADULT LIVER, SIGNAL = 0.82; EXPRESSED IN BRAIN, SIGNAL = 1.1; EXPRESSED IN BONE MARROW, SIGNAL = 0.99; EXPRESSED IN HBL100, SIGNAL = 1.1; EXPRESSED IN HEART, SIGNAL = 2.2; EXPRESSED IN PLACENTA, SIGNAL = 1.1; EXPRESSED IN BT474, SIGNAL = 0.8; EXPRESSED IN LUNG, SIGNAL = 1.2; EXPRESSED IN HELA, SIGNAL = 0.87; EXPRESSED IN FETAL LIVER, SIGNAL = 0.9; EST_HUMAN HIT: T19754.1, EVALUE 3.00e-14; SWISSPROT HIT: P70414, EVALUE 2.00e-43
EDDDDDECGEEKLPSCFDYVMHFLTVFWKVLFAFVPPTEYWNGWACFIVSILMIGLLTAFIGDLASHFGCTIGLKDSVTAVVFVALGTSVP

SEQ ID NO: 33927 - protein, 19 aa, Homo sapiens
  MAP TO AC007377.3; EXPRESSED IN ADULT LIVER, SIGNAL = 0.82; EXPRESSED IN BRAIN, SIGNAL = 1.1; EXPRESSED IN BONE MARROW, SIGNAL = 0.99; EXPRESSED IN HBL100, SIGNAL = 1.1; EXPRESSED IN HEART, SIGNAL = 2.2; EXPRESSED IN PLACENTA, SIGNAL = 1.1; EXPRESSED IN BT474, SIGNAL = 0.8; EXPRESSED IN LUNG, SIGNAL = 1.2; EXPRESSED IN HELA, SIGNAL = 0.87; EXPRESSED IN FETAL LIVER, SIGNAL = 0.9; EST_HUMAN HIT: T19754.1, EVALUE 6.00e-04
KMMTTMNVGKRSCPPVSIT

SEQ ID NO: 33928 - protein, 29 aa, Homo sapiens
  MAP TO AC007370.7; EXPRESSED IN FETAL LIVER, SIGNAL = 6.6; EXPRESSED IN PLACENTA, SIGNAL = 8.3; EXPRESSED IN BT474, SIGNAL = 5.6; EXPRESSED IN BONE MARROW, SIGNAL = 8.7; EXPRESSED IN HBL100, SIGNAL =   6; EXPRESSED IN LUNG, SIGNAL = 6.4; EXPRESSED IN HELA, SIGNAL = 5.8; EXPRESSED IN ADULT LIVER, SIGNAL = 4.5; EXPRESSED IN BRAIN, SIGNAL =   6; EXPRESSED IN HEART, SIGNAL = 5.4
FLLSLGQMRELNPRLNIKPEIHKGAEEAP

SEQ ID NO: 33929 - protein, 27 aa, Homo sapiens
  MAP TO AC007370.7; EXPRESSED IN HBL100, SIGNAL = 4.6; EXPRESSED IN FETAL LIVER, SIGNAL = 5.3; EXPRESSED IN PLACENTA, SIGNAL = 3.8; EXPRESSED IN BT474, SIGNAL =   5; EXPRESSED IN ADULT LIVER, SIGNAL = 6.2; EXPRESSED IN BRAIN, SIGNAL = 5.9; EXPRESSED IN HEART, SIGNAL = 4.2; EXPRESSED IN BONE MARROW, SIGNAL = 6.8; EXPRESSED IN HELA, SIGNAL =   7; EXPRESSED IN LUNG, SIGNAL =   7; EST_HUMAN HIT: AW861455.1, EVALUE 8.00e-05; EST_HUMAN HIT: AV698462.1, EVALUE 7.00e-05
ENLQPDNVIEKKNQFSEEKLKPGAEIC

SEQ ID NO: 33930 - protein, 35 aa, Homo sapiens
  MAP TO AC007370.7; EXPRESSED IN HBL100, SIGNAL = 3.4; EXPRESSED IN HELA, SIGNAL =   6; EXPRESSED IN ADULT LIVER, SIGNAL = 3.2; EXPRESSED IN BRAIN, SIGNAL = 4.3; EXPRESSED IN HEART, SIGNAL = 4.4; EXPRESSED IN PLACENTA, SIGNAL = 3.7; EXPRESSED IN LUNG, SIGNAL = 4.9; EXPRESSED IN FETAL LIVER, SIGNAL = 3.6; EXPRESSED IN BONE MARROW, SIGNAL = 3.8; EXPRESSED IN BT474, SIGNAL = 3.9; EST_HUMAN HIT: AW474132.1, EVALUE 1.00e-06; SWISSPROT HIT: Q13308, EVALUE 8.20e+00
AVCKLRNKDSQSSPKTEKFEVRCLRAGTIQHGRKM

SEQ ID NO: 33931 - protein, 39 aa, Homo sapiens
  MAP TO AC007367.3; EXPRESSED IN BRAIN, SIGNAL =  33; EXPRESSED IN HEART, SIGNAL =  20; EXPRESSED IN HBL100, SIGNAL =  27; EXPRESSED IN BT474, SIGNAL =  18; EXPRESSED IN BONE MARROW, SIGNAL =  21; EXPRESSED IN FETAL LIVER, SIGNAL =  17; EXPRESSED IN HELA, SIGNAL =  24; EXPRESSED IN ADULT LIVER, SIGNAL =  21; EXPRESSED IN PLACENTA, SIGNAL =  29; EXPRESSED IN LUNG, SIGNAL =  25; SWISSPROT HIT: P22055, EVALUE 6.20e+00
SLTSMHKVDKNVKKIFISAPHNHISAISIMWDYEICHLS

SEQ ID NO: 33932 - protein, 44 aa, Homo sapiens
  MAP TO AC007366.2; EXPRESSED IN BT474, SIGNAL = 4.7; EXPRESSED IN HBL100, SIGNAL = 4.2; EXPRESSED IN FETAL LIVER, SIGNAL = 4.8; EXPRESSED IN HELA, SIGNAL = 4.8; EXPRESSED IN ADULT LIVER, SIGNAL = 3.5; EXPRESSED IN BRAIN, SIGNAL =   5; EXPRESSED IN PLACENTA, SIGNAL = 5.1; EXPRESSED IN BONE MARROW, SIGNAL = 4.9; EXPRESSED IN LUNG, SIGNAL = 4.8; EXPRESSED IN HEART, SIGNAL =   4; SWISSPROT HIT: P51817, EVALUE 4.00e-20; EST_HUMAN HIT: AI935203.1, EVALUE 4.00e-19
IICAIEYLHSKEIVYRDLKPENILLDRDGHIKLTDFGFAKKLVD

SEQ ID NO: 33933 - protein, 68 aa, Homo sapiens
  MAP TO AC007366.2; EXPRESSED IN BT474, SIGNAL = 4.7; EXPRESSED IN HBL100, SIGNAL = 4.2; EXPRESSED IN FETAL LIVER, SIGNAL = 4.8; EXPRESSED IN HELA, SIGNAL = 4.8; EXPRESSED IN ADULT LIVER, SIGNAL = 3.5; EXPRESSED IN BRAIN, SIGNAL =   5; EXPRESSED IN PLACENTA, SIGNAL = 5.1; EXPRESSED IN BONE MARROW, SIGNAL = 4.9; EXPRESSED IN LUNG, SIGNAL = 4.8; EXPRESSED IN HEART, SIGNAL =   4; EST_HUMAN HIT: AI935203.1, EVALUE 6.00e-11; SWISSPROT HIT: P22420, EVALUE 5.70e+00; EST_HUMAN HIT: AW271821.1, EVALUE 9.00e-11
HVLSVPAGSGRGMTSASSTCSWSTCRAASSSATCATGGASPAPRGSSTLQRSSVPSSTCTPKRSSTGT

SEQ ID NO: 33934 - protein, 47 aa, Homo sapiens
  MAP TO AC007360.2; EXPRESSED IN HELA, SIGNAL = 1.9; EXPRESSED IN ADULT LIVER, SIGNAL = 1.9; EXPRESSED IN BT474, SIGNAL = 1.9; EXPRESSED IN HEART, SIGNAL = 1.9; EXPRESSED IN PLACENTA, SIGNAL = 1.6; EXPRESSED IN BONE MARROW, SIGNAL = 2.3; EXPRESSED IN FETAL LIVER, SIGNAL = 1.7; EXPRESSED IN LUNG, SIGNAL = 2.3; EXPRESSED IN BRAIN, SIGNAL = 2.7; EXPRESSED IN HBL100, SIGNAL = 1.8
SQNTGSQSYFFQEGDQKVFEDPVHRKYLKVLRCGFSRPQLIQITLQR

SEQ ID NO: 33935 - protein, 27 aa, Homo sapiens
  MAP TO AC007360.2; EXPRESSED IN HELA, SIGNAL = 1.9; EXPRESSED IN ADULT LIVER, SIGNAL = 1.9; EXPRESSED IN BT474, SIGNAL = 1.9; EXPRESSED IN HEART, SIGNAL = 1.9; EXPRESSED IN PLACENTA, SIGNAL = 1.6; EXPRESSED IN BONE MARROW, SIGNAL = 2.3; EXPRESSED IN FETAL LIVER, SIGNAL = 1.7; EXPRESSED IN LUNG, SIGNAL = 2.3; EXPRESSED IN BRAIN, SIGNAL = 2.7; EXPRESSED IN HBL100, SIGNAL = 1.8; EST_HUMAN HIT: AA491433.1, EVALUE 7.10e+00
PRTLAANHISSKKEIKRYLRTQSTEST

SEQ ID NO: 33936 - protein, 65 aa, Homo sapiens
  MAP TO AC007326.22; EXPRESSED IN PLACENTA, SIGNAL = 3.1; EXPRESSED IN BT474, SIGNAL = 5.6; EXPRESSED IN BONE MARROW, SIGNAL = 2.5; EXPRESSED IN HBL100, SIGNAL =   3; EXPRESSED IN FETAL LIVER, SIGNAL = 2.6; EXPRESSED IN LUNG, SIGNAL = 2.9; EXPRESSED IN HELA, SIGNAL =   3; EXPRESSED IN ADULT LIVER, SIGNAL = 2.1; EXPRESSED IN BRAIN, SIGNAL = 3.4; EXPRESSED IN HEART, SIGNAL = 1.7; EST_HUMAN HIT: AW013827.1, EVALUE 4.00e-12; SWISSPROT HIT: P10996, EVALUE 2.30e+00; EST_HUMAN HIT: AI214968.1, EVALUE 5.00e-12
FGRAAIICGARYPFAIINIYFYRIIHPCDWCYHLRGGPFLCISDGFIVELQMSSGYPNRKLIFSW

SEQ ID NO: 33937 - protein, 37 aa, Homo sapiens
  MAP TO AC007320.2; EXPRESSED IN FETAL LIVER, SIGNAL =  42; EXPRESSED IN HEART, SIGNAL =  34; EXPRESSED IN HELA, SIGNAL =  47; EXPRESSED IN ADULT LIVER, SIGNAL =  38; EXPRESSED IN BRAIN, SIGNAL =  65; EXPRESSED IN PLACENTA, SIGNAL =  32; EXPRESSED IN BT474, SIGNAL =  31; EXPRESSED IN BONE MARROW, SIGNAL =  31; EXPRESSED IN HBL100, SIGNAL =  29; EXPRESSED IN LUNG, SIGNAL =  53; EST_HUMAN HIT: AU127412.1, EVALUE 4.00e-09; EST_HUMAN HIT: BE242149.1, EVALUE 3.00e-09; SWISSPROT HIT: P38159, EVALUE 3.00e-10
TMVEADHPGKLFIGGLNRETNEKMLKAVFGKHGPISE

SEQ ID NO: 33938 - protein, 53 aa, Homo sapiens
  MAP TO AC007317.3; EXPRESSED IN PLACENTA, SIGNAL = 1.4; EXPRESSED IN BT474, SIGNAL = 1.1; EXPRESSED IN LUNG, SIGNAL = 2.5; EXPRESSED IN HELA, SIGNAL = 1.4; EXPRESSED IN BRAIN, SIGNAL = 1.5; EXPRESSED IN HBL100, SIGNAL = 1.1; EXPRESSED IN FETAL LIVER, SIGNAL = 1.1; EXPRESSED IN ADULT LIVER, SIGNAL = 1.2; EXPRESSED IN BONE MARROW, SIGNAL = 1.5; EXPRESSED IN HEART, SIGNAL = 1.4; SWISSPROT HIT: Q9Z183, EVALUE 7.80e+00; EST_HUMAN HIT: BE539873.1, EVALUE 4.90e+00; EST_HUMAN HIT: AW959461.1, EVALUE 9.60e+00
RRIIRWKGMGELRREGAKRKEKILQKLITRKRMRDINFRQKEILSSATSSCQL

SEQ ID NO: 33939 - protein, 20 aa, Homo sapiens
  MAP TO AC007317.3; EXPRESSED IN PLACENTA, SIGNAL = 1.4; EXPRESSED IN BONE MARROW, SIGNAL = 1.6; EXPRESSED IN ADULT LIVER, SIGNAL = 1.1; EXPRESSED IN HEART, SIGNAL = 1.2; EXPRESSED IN LUNG, SIGNAL = 1.1; EXPRESSED IN BT474, SIGNAL = 1.3; EXPRESSED IN HBL100, SIGNAL = 1.2; EXPRESSED IN FETAL LIVER, SIGNAL = 1.3; EXPRESSED IN HELA, SIGNAL = 0.91; EXPRESSED IN BRAIN, SIGNAL = 0.92; EST_HUMAN HIT: H82572.1, EVALUE 2.20e-02; EST_HUMAN HIT: N34212.1, EVALUE 1.50e-02
RLKEVRKLQKKSLKLAEVGS

SEQ ID NO: 33940 - protein, 35 aa, Homo sapiens
  MAP TO AC007316.2; EXPRESSED IN BONE MARROW, SIGNAL = 0.83; EXPRESSED IN FETAL LIVER, SIGNAL = 2.8; EXPRESSED IN HEART, SIGNAL = 1.2; EXPRESSED IN PLACENTA, SIGNAL = 1.6; EXPRESSED IN BT474, SIGNAL = 0.63; EXPRESSED IN BRAIN, SIGNAL = 1.3; EXPRESSED IN ADULT LIVER, SIGNAL = 2.5; EXPRESSED IN HELA, SIGNAL = 1.3; EXPRESSED IN LUNG, SIGNAL =   2; EXPRESSED IN HBL100, SIGNAL = 0.79; EST_HUMAN HIT: AA812950.1, EVALUE 1.00e-04
PQEMSSPMKANSKDWKKQLVHQTCSYQCKDIRTMK

SEQ ID NO: 33941 - protein, 45 aa, Homo sapiens
  MAP TO AC007316.2; EXPRESSED IN BT474, SIGNAL = 8.4; EXPRESSED IN BONE MARROW, SIGNAL = 6.7; EXPRESSED IN LUNG, SIGNAL = 7.6; EXPRESSED IN ADULT LIVER, SIGNAL =   9; EXPRESSED IN HBL100, SIGNAL = 9.1; EXPRESSED IN FETAL LIVER, SIGNAL = 7.1; EXPRESSED IN HELA, SIGNAL = 6.4; EXPRESSED IN PLACENTA, SIGNAL = 7.1; EXPRESSED IN HEART, SIGNAL = 4.5; EXPRESSED IN BRAIN, SIGNAL = 4.4
VFLQPHTPCAIFLQLLLLLLLLLPPMLFLLTAQSSGPPTSLYDAL

SEQ ID NO: 33942 - protein, 59 aa, Homo sapiens
  MAP TO AC007297.22; EXPRESSED IN ADULT LIVER, SIGNAL = 4.8; EXPRESSED IN HELA, SIGNAL = 1.2; EXPRESSED IN HEART, SIGNAL = 0.97; EXPRESSED IN PLACENTA, SIGNAL =   1; EXPRESSED IN FETAL LIVER, SIGNAL = 4.5; EXPRESSED IN LUNG, SIGNAL = 4.5; EST_HUMAN HIT: BF527091.1, EVALUE 2.70e+00; EST_HUMAN HIT: BE296734.1, EVALUE 3.10e+00; SWISSPROT HIT: Q50729, EVALUE 5.80e+00
QVMHGPPQDSVLNAFVNIISKSGLSWNHVSISHRAIRSLKKHLIQHSIQCLNPLHSSPN

SEQ ID NO: 33943 - protein, 42 aa, Homo sapiens
  MAP TO AC007297.22; EXPRESSED IN HBL100, SIGNAL = 2.9; EXPRESSED IN FETAL LIVER, SIGNAL = 2.9; EXPRESSED IN HELA, SIGNAL = 2.8; EXPRESSED IN BRAIN, SIGNAL = 3.1; EXPRESSED IN BT474, SIGNAL = 2.6; EXPRESSED IN BONE MARROW, SIGNAL = 3.2; EXPRESSED IN LUNG, SIGNAL = 3.1; EXPRESSED IN ADULT LIVER, SIGNAL = 2.7; EXPRESSED IN PLACENTA, SIGNAL = 2.5; EXPRESSED IN HEART, SIGNAL = 2.4; EST_HUMAN HIT: AV688856.1, EVALUE 9.30e+00; SWISSPROT HIT: O67837, EVALUE 4.70e+00
ERVCLGDNTRDVIKQPFDKIKIVLVEIRHYSSTQWKNDPKGI

SEQ ID NO: 33944 - protein, 26 aa, Homo sapiens
  MAP TO AC007297.22; EXPRESSED IN BONE MARROW, SIGNAL = 1.6; EXPRESSED IN HBL100, SIGNAL = 1.1; EXPRESSED IN HEART, SIGNAL = 1.5; EXPRESSED IN PLACENTA, SIGNAL = 1.2; EXPRESSED IN BT474, SIGNAL = 1.1; EXPRESSED IN BRAIN, SIGNAL = 1.5; EXPRESSED IN ADULT LIVER, SIGNAL = 1.1; EXPRESSED IN HELA, SIGNAL = 1.2; EXPRESSED IN LUNG, SIGNAL = 1.4; EXPRESSED IN FETAL LIVER, SIGNAL = 1.6
MRLSFLGTGACGEHLRQLLIGHHALQ

SEQ ID NO: 33945 - protein, 53 aa, Homo sapiens
  MAP TO AC007286.17; EXPRESSED IN FETAL LIVER, SIGNAL = 0.64; EXPRESSED IN LUNG, SIGNAL = 0.7; EXPRESSED IN PLACENTA, SIGNAL = 0.8; EXPRESSED IN HEART, SIGNAL = 0.84; EXPRESSED IN BRAIN, SIGNAL = 1.6; EXPRESSED IN ADULT LIVER, SIGNAL = 0.71; EXPRESSED IN HELA, SIGNAL = 0.64; EXPRESSED IN HBL100, SIGNAL = 0.69; EXPRESSED IN BONE MARROW, SIGNAL = 0.78; EXPRESSED IN BT474, SIGNAL = 0.84
KPQSTVLKNIMSGRANAESIFTFYVILSMQLENILIILFIQQIFIKSLKYAMP

SEQ ID NO: 33946 - protein, 26 aa, Homo sapiens
  MAP TO AC007277.2; EXPRESSED IN BT474, SIGNAL = 5.5; EXPRESSED IN BONE MARROW, SIGNAL =  10; EXPRESSED IN HELA, SIGNAL = 6.9; EXPRESSED IN BRAIN, SIGNAL = 6.8; EXPRESSED IN PLACENTA, SIGNAL = 6.8; EXPRESSED IN HBL100, SIGNAL =   6; EXPRESSED IN FETAL LIVER, SIGNAL = 5.4; EXPRESSED IN LUNG, SIGNAL = 6.9; EXPRESSED IN ADULT LIVER, SIGNAL = 4.5; EXPRESSED IN HEART, SIGNAL = 5.6
CRLMPLTKSSSLVLAGPITLSQVRVL

SEQ ID NO: 33947 - protein, 61 aa, Homo sapiens
  MAP TO AC007277.2; EXPRESSED IN HEART, SIGNAL = 4.6; EXPRESSED IN FETAL LIVER, SIGNAL =  21; EXPRESSED IN HELA, SIGNAL =  17; EXPRESSED IN ADULT LIVER, SIGNAL = 6.6; EXPRESSED IN BRAIN, SIGNAL =  10; EXPRESSED IN PLACENTA, SIGNAL = 3.9; EXPRESSED IN BT474, SIGNAL =  19; EXPRESSED IN BONE MARROW, SIGNAL = 9.6; EXPRESSED IN LUNG, SIGNAL = 9.4; EXPRESSED IN HBL100, SIGNAL =  22; EST_HUMAN HIT: AW403673.1, EVALUE 1.00e-25; SWISSPROT HIT: P31104, EVALUE 3.40e+00; EST_HUMAN HIT: AW651679.1, EVALUE 8.00e-26
HHMHFLCKLVGRSVRRSTQMPQSTSQSFLRSAQRGGRPCLLKIKENLKIWQRWTKTVMKEK

SEQ ID NO: 33948 - protein, 51 aa, Homo sapiens
  MAP TO AC007240.2; EXPRESSED IN BONE MARROW, SIGNAL = 5.5; EXPRESSED IN FETAL LIVER, SIGNAL = 2.7; EXPRESSED IN PLACENTA, SIGNAL = 2.7; EXPRESSED IN BT474, SIGNAL = 3.4; EXPRESSED IN HBL100, SIGNAL = 3.9; EXPRESSED IN LUNG, SIGNAL = 2.9; EXPRESSED IN HELA, SIGNAL = 5.5; EXPRESSED IN ADULT LIVER, SIGNAL = 2.8; EXPRESSED IN BRAIN, SIGNAL = 3.9; EXPRESSED IN HEART, SIGNAL = 2.7; SWISSPROT HIT: O68008, EVALUE 6.00e+00
MESSEELNDLDSLSLVIFFIRKIKVAIPSQRVVARITYGSIYEDDQRCLTQ

SEQ ID NO: 33949 - protein, 100 aa, Homo sapiens
  MAP TO AC007237.3; EXPRESSED IN PLACENTA, SIGNAL = 1.8; EXPRESSED IN BRAIN, SIGNAL = 0.83; EXPRESSED IN HEART, SIGNAL = 1.1; EXPRESSED IN FETAL LIVER, SIGNAL = 2.3; EXPRESSED IN LUNG, SIGNAL = 0.68; EXPRESSED IN HELA, SIGNAL = 0.65; EXPRESSED IN BONE MARROW, SIGNAL = 1.4; EXPRESSED IN ADULT LIVER, SIGNAL = 1.1; EST_HUMAN HIT: AW748170.1, EVALUE 4.70e-01; SWISSPROT HIT: P12577, EVALUE 4.50e+00
LFTASTPTLLFRKCLKLNVKNFPNVLGSPRDKAVEFVKMTQAPGVMPVILDETGDQLQDQTVLLKPSTPEVTRSQSPSMEKKAELAFQGTQLLSDLCLDG

SEQ ID NO: 33950 - protein, 63 aa, Homo sapiens
  MAP TO AC007227.2; EXPRESSED IN BRAIN, SIGNAL = 1.6; EXPRESSED IN HEART, SIGNAL = 1.2; EXPRESSED IN BONE MARROW, SIGNAL = 2.5; EXPRESSED IN HBL100, SIGNAL = 2.6; EXPRESSED IN FETAL LIVER, SIGNAL = 1.8; EXPRESSED IN LUNG, SIGNAL = 1.9; EXPRESSED IN ADULT LIVER, SIGNAL = 2.3; EXPRESSED IN PLACENTA, SIGNAL = 1.4; EXPRESSED IN BT474, SIGNAL = 2.7; EXPRESSED IN HELA, SIGNAL = 1.7; EST_HUMAN HIT: AW105151.1, EVALUE 1.00e-29; SWISSPROT HIT: P40464, EVALUE 5.00e-03; EST_HUMAN HIT: BE613860.1, EVALUE 2.00e-29
VEGKNSIILTFRQLMAEEGPWGLMKGLSARIISATPSTIVIVVGYESLKKLSLRPELVDSRHW

SEQ ID NO: 33951 - protein, 24 aa, Homo sapiens
  MAP TO AC007227.2; EXPRESSED IN HELA, SIGNAL = 4.7; EXPRESSED IN BT474, SIGNAL =  15; EXPRESSED IN FETAL LIVER, SIGNAL = 5.4; EXPRESSED IN LUNG, SIGNAL = 3.7; EXPRESSED IN PLACENTA, SIGNAL = 4.9; EXPRESSED IN BONE MARROW, SIGNAL = 4.6; EXPRESSED IN HBL100, SIGNAL =  16; EXPRESSED IN ADULT LIVER, SIGNAL = 6.6; EXPRESSED IN BRAIN, SIGNAL = 4.5; EXPRESSED IN HEART, SIGNAL = 4.4
EPESKEPVEKEEEPDPEPPPVTPQ

SEQ ID NO: 33952 - protein, 35 aa, Homo sapiens
  MAP TO AC007130.2; EXPRESSED IN FETAL LIVER, SIGNAL = 0.94; EXPRESSED IN ADULT LIVER, SIGNAL = 1.6; EXPRESSED IN HEART, SIGNAL = 1.1; EXPRESSED IN PLACENTA, SIGNAL = 0.89; EXPRESSED IN BT474, SIGNAL = 2.4; EXPRESSED IN BONE MARROW, SIGNAL = 0.66; EXPRESSED IN HBL100, SIGNAL = 1.6; EXPRESSED IN LUNG, SIGNAL = 0.6; EXPRESSED IN HELA, SIGNAL = 0.84; EST_HUMAN HIT: BE274608.1, EVALUE 5.00e-15; SWISSPROT HIT: P29266, EVALUE 7.00e-14; EST_HUMAN HIT: AV705617.1, EVALUE 7.00e-15
MGNPMAKNLMKHGYPLIIYDVFPDACKEFQDAGEQ

SEQ ID NO: 33953 - protein, 18 aa, Homo sapiens
  MAP TO AC007130.2; EXPRESSED IN FETAL LIVER, SIGNAL = 0.94; EXPRESSED IN ADULT LIVER, SIGNAL = 1.6; EXPRESSED IN HEART, SIGNAL = 1.1; EXPRESSED IN PLACENTA, SIGNAL = 0.89; EXPRESSED IN BT474, SIGNAL = 2.4; EXPRESSED IN BONE MARROW, SIGNAL = 0.66; EXPRESSED IN HBL100, SIGNAL = 1.6; EXPRESSED IN LUNG, SIGNAL = 0.6; EXPRESSED IN HELA, SIGNAL = 0.84; EST_HUMAN HIT: BE389273.1, EVALUE 4.00e-04; EST_HUMAN HIT: AV686765.1, EVALUE 7.00e-04
GESNGKKSHETWLSTYYL

SEQ ID NO: 33954 - protein, 44 aa, Homo sapiens
  MAP TO AC007130.2; EXPRESSED IN FETAL LIVER, SIGNAL =  12; EXPRESSED IN BRAIN, SIGNAL =  14; EXPRESSED IN PLACENTA, SIGNAL =  15; EXPRESSED IN HEART, SIGNAL =  13; EXPRESSED IN ADULT LIVER, SIGNAL =  12; EXPRESSED IN HELA, SIGNAL =  20; EXPRESSED IN LUNG, SIGNAL =  15; EXPRESSED IN HBL100, SIGNAL =  12; EXPRESSED IN BONE MARROW, SIGNAL =  14; EXPRESSED IN BT474, SIGNAL =  14; EST_HUMAN HIT: N35297.1, EVALUE 9.00e-19; SWISSPROT HIT: P29266, EVALUE 2.00e-18; EST_HUMAN HIT: N42161.1, EVALUE 6.00e-19
VGAARSGNLTFMVGGVEDEFAAAQELLGCMGSNVVYCGAVGTGQ

SEQ ID NO: 33955 - protein, 17 aa, Homo sapiens
  MAP TO AC007130.2; EXPRESSED IN FETAL LIVER, SIGNAL =  12; EXPRESSED IN BRAIN, SIGNAL =  14; EXPRESSED IN PLACENTA, SIGNAL =  15; EXPRESSED IN HEART, SIGNAL =  13; EXPRESSED IN ADULT LIVER, SIGNAL =  12; EXPRESSED IN HELA, SIGNAL =  20; EXPRESSED IN LUNG, SIGNAL =  15; EXPRESSED IN HBL100, SIGNAL =  12; EXPRESSED IN BONE MARROW, SIGNAL =  14; EXPRESSED IN BT474, SIGNAL =  14; EST_HUMAN HIT: BE274608.1, EVALUE 8.00e-04; EST_HUMAN HIT: BF571690.1, EVALUE 1.00e-03
RCRSCTIWEPHVYGGRS

SEQ ID NO: 33956 - protein, 24 aa, Homo sapiens
  MAP TO AC007106.6; EXPRESSED IN LUNG, SIGNAL = 8.9; EXPRESSED IN HELA, SIGNAL =   9; EXPRESSED IN PLACENTA, SIGNAL =  11; EXPRESSED IN BT474, SIGNAL =  10; EXPRESSED IN HBL100, SIGNAL = 7.6; EXPRESSED IN FETAL LIVER, SIGNAL = 9.8; EXPRESSED IN BRAIN, SIGNAL = 9.1; EXPRESSED IN BONE MARROW, SIGNAL =  10; EXPRESSED IN ADULT LIVER, SIGNAL = 6.5; EXPRESSED IN HEART, SIGNAL = 6.3; EST_HUMAN HIT: H16877.1, EVALUE 7.40e-02; EST_HUMAN HIT: AU122272.1, EVALUE 6.30e-02
PSRFMACTLRSSSLSCTWAPFSHS

SEQ ID NO: 33957 - protein, 175 aa, Homo sapiens
  MAP TO AC007106.6; EXPRESSED IN BRAIN, SIGNAL = 2.7; EXPRESSED IN HEART, SIGNAL =   2; EXPRESSED IN PLACENTA, SIGNAL =   4; EXPRESSED IN BT474, SIGNAL = 3.1; EXPRESSED IN HBL100, SIGNAL = 5.1; EXPRESSED IN FETAL LIVER, SIGNAL =   4; EXPRESSED IN HELA, SIGNAL = 4.9; EXPRESSED IN ADULT LIVER, SIGNAL =   4; EXPRESSED IN BONE MARROW, SIGNAL =   8; EXPRESSED IN LUNG, SIGNAL = 2.7; EST_HUMAN HIT: BE150340.1, EVALUE 1.00e-65; SWISSPROT HIT: P10272, EVALUE 1.00e-25
SPTVTIVPVLDFNPAFHIIPDTTPDHHDCISLIHLTFTPFPHISFFPVPHLEHTWFIDGSSTRPNCHSPAKAGYAIVSSTSIIEATALPRSTTSQQAKLIAYTDSKCAFHILHHHAVIWEERNFLTMQGASIINAFLIKTLLKDILLPKEAGVIHCKGHQKASDPITQDNAYADK

SEQ ID NO: 33958 - protein, 43 aa, Homo sapiens
  MAP TO AC007106.6; EXPRESSED IN BRAIN, SIGNAL = 2.7; EXPRESSED IN HEART, SIGNAL =   2; EXPRESSED IN PLACENTA, SIGNAL =   4; EXPRESSED IN BT474, SIGNAL = 3.1; EXPRESSED IN HBL100, SIGNAL = 5.1; EXPRESSED IN FETAL LIVER, SIGNAL =   4; EXPRESSED IN HELA, SIGNAL = 4.9; EXPRESSED IN ADULT LIVER, SIGNAL =   4; EXPRESSED IN BONE MARROW, SIGNAL =   8; EXPRESSED IN LUNG, SIGNAL = 2.7; EST_HUMAN HIT: AA223237.1, EVALUE 6.00e-05
PGSFSYTHSLLSLPQLPLFLSWTSIRPSTLFRIPHLTTMTVSL

SEQ ID NO: 33959 - protein, 32 aa, Homo sapiens
  MAP TO AC007090.2; EXPRESSED IN ADULT LIVER, SIGNAL =  11; EXPRESSED IN HEART, SIGNAL =  10; EXPRESSED IN BONE MARROW, SIGNAL =  13; EXPRESSED IN HELA, SIGNAL =  12; EXPRESSED IN BRAIN, SIGNAL =  13; EXPRESSED IN PLACENTA, SIGNAL =  11; EXPRESSED IN BT474, SIGNAL = 8.6; EXPRESSED IN HBL100, SIGNAL = 9.1; EXPRESSED IN FETAL LIVER, SIGNAL =  11; EXPRESSED IN LUNG, SIGNAL =  15
RRPRKLTVEDPENQQSMSTLWALETVLESGAF

SEQ ID NO: 33960 - protein, 42 aa, Homo sapiens
  MAP TO AC007077.2; EXPRESSED IN HBL100, SIGNAL = 1.8; EXPRESSED IN HELA, SIGNAL = 2.5; EXPRESSED IN BRAIN, SIGNAL = 2.2; EXPRESSED IN BT474, SIGNAL = 1.8; EXPRESSED IN BONE MARROW, SIGNAL = 2.6; EXPRESSED IN HEART, SIGNAL = 1.7; EXPRESSED IN ADULT LIVER, SIGNAL = 1.7; EXPRESSED IN LUNG, SIGNAL = 2.4; EXPRESSED IN FETAL LIVER, SIGNAL = 1.9; EXPRESSED IN PLACENTA, SIGNAL = 2.4; EST_HUMAN HIT: BE965351.2, EVALUE 9.30e+00
LSQFRQSTGTWRKRTFDLFSETQERENVKTGVIASKVGHVAL

SEQ ID NO: 33961 - protein, 66 aa, Homo sapiens
  MAP TO AC007076.2; EXPRESSED IN BT474, SIGNAL =  13; EXPRESSED IN BONE MARROW, SIGNAL =  18; EXPRESSED IN HBL100, SIGNAL =  11; EXPRESSED IN FETAL LIVER, SIGNAL =  14; EXPRESSED IN LUNG, SIGNAL =  15; EXPRESSED IN HELA, SIGNAL =  15; EXPRESSED IN ADULT LIVER, SIGNAL = 9.8; EXPRESSED IN PLACENTA, SIGNAL =  12; EXPRESSED IN BRAIN, SIGNAL =  16; EXPRESSED IN HEART, SIGNAL =  12
VVVAETPGGSDDGGDSSDDGGSDNGGGGRYGSSDGKGGVNSSDVNVQGGGSGGSNGESGDNYEECE

SEQ ID NO: 33962 - protein, 35 aa, Homo sapiens
  MAP TO AC007076.2; EXPRESSED IN BT474, SIGNAL =  13; EXPRESSED IN BONE MARROW, SIGNAL =  18; EXPRESSED IN HBL100, SIGNAL =  11; EXPRESSED IN FETAL LIVER, SIGNAL =  14; EXPRESSED IN LUNG, SIGNAL =  15; EXPRESSED IN HELA, SIGNAL =  15; EXPRESSED IN ADULT LIVER, SIGNAL = 9.8; EXPRESSED IN PLACENTA, SIGNAL =  12; EXPRESSED IN BRAIN, SIGNAL =  16; EXPRESSED IN HEART, SIGNAL =  12
VVMMVEIVVMMEVVIMEVVVDMAVVMAKVVLTVVM

SEQ ID NO: 33963 - protein, 57 aa, Homo sapiens
  MAP TO AC007076.2; EXPRESSED IN BRAIN, SIGNAL = 2.3; EXPRESSED IN HBL100, SIGNAL = 1.7; EXPRESSED IN ADULT LIVER, SIGNAL = 1.8; EXPRESSED IN HEART, SIGNAL =   2; EXPRESSED IN BT474, SIGNAL = 1.7; EXPRESSED IN BONE MARROW, SIGNAL = 2.5; EXPRESSED IN HELA, SIGNAL = 1.9; EXPRESSED IN PLACENTA, SIGNAL = 1.9; EXPRESSED IN FETAL LIVER, SIGNAL = 1.5; EXPRESSED IN LUNG, SIGNAL = 2.4; EST_HUMAN HIT: BE468028.1, EVALUE 5.00e-17; SWISSPROT HIT: Q94890, EVALUE 2.00e-19
RMFPTIRVSFSGVDPEAKYIVLMDIVPVDNKRYRYAYHRSSWLVAGKADPPLPARFV

SEQ ID NO: 33964 - protein, 27 aa, Homo sapiens
  MAP TO AC007076.2; EXPRESSED IN BRAIN, SIGNAL = 2.3; EXPRESSED IN HBL100, SIGNAL = 1.7; EXPRESSED IN ADULT LIVER, SIGNAL = 1.8; EXPRESSED IN HEART, SIGNAL =   2; EXPRESSED IN BT474, SIGNAL = 1.7; EXPRESSED IN BONE MARROW, SIGNAL = 2.5; EXPRESSED IN HELA, SIGNAL = 1.9; EXPRESSED IN PLACENTA, SIGNAL = 1.9; EXPRESSED IN FETAL LIVER, SIGNAL = 1.5; EXPRESSED IN LUNG, SIGNAL = 2.4; EST_HUMAN HIT: T82243.1, EVALUE 9.30e+00
SLSLSLSGGCFQPSGCPFRGWILRPST

SEQ ID NO: 33965 - protein, 25 aa, Homo sapiens
  MAP TO AC007056.4; EXPRESSED IN PLACENTA, SIGNAL = 2.9; EXPRESSED IN LUNG, SIGNAL = 3.3; EXPRESSED IN ADULT LIVER, SIGNAL = 5.9; EXPRESSED IN BT474, SIGNAL = 2.6; EXPRESSED IN BONE MARROW, SIGNAL = 3.9; EXPRESSED IN HBL100, SIGNAL = 2.9; EXPRESSED IN FETAL LIVER, SIGNAL = 2.8; EXPRESSED IN HELA, SIGNAL = 2.6; EXPRESSED IN BRAIN, SIGNAL = 2.6; EXPRESSED IN HEART, SIGNAL = 2.7
MALSDFRVPSGKVGWRYMDGGMENG

SEQ ID NO: 33966 - protein, 155 aa, Homo sapiens
  MAP TO AC007050.23; EXPRESSED IN BRAIN, SIGNAL = 2.4; EXPRESSED IN ADULT LIVER, SIGNAL = 3.2; EXPRESSED IN PLACENTA, SIGNAL = 3.8; EXPRESSED IN BT474, SIGNAL = 3.9; EXPRESSED IN HBL100, SIGNAL = 6.9; EXPRESSED IN LUNG, SIGNAL = 3.5; EXPRESSED IN HELA, SIGNAL = 3.3; EXPRESSED IN HEART, SIGNAL =   2; EXPRESSED IN BONE MARROW, SIGNAL =  18; EXPRESSED IN FETAL LIVER, SIGNAL = 7.2; SWISSPROT HIT: P52591, EVALUE 5.00e-08; EST_HUMAN HIT: AL042278.1, EVALUE 4.00e-65
MDSLWGPGAGSHPFGVHNSRLSPDLCPGKIVLRALKESGAGMPEQDKDPRVQENPGDQRRVPEVTGDAPSAFRPLRDNGGLSPFVPGPGPLQTDLHAQRSEIRYDQSSQTSWTSSCTNRNAISSSYSSTGGLPGLKRRRGPASSHCQLTLSSSKT

SEQ ID NO: 33967 - protein, 50 aa, Homo sapiens
  MAP TO AC007050.23; EXPRESSED IN HBL100, SIGNAL = 1.8; EXPRESSED IN LUNG, SIGNAL = 2.6; EXPRESSED IN HELA, SIGNAL = 2.8; EXPRESSED IN ADULT LIVER, SIGNAL =   2; EXPRESSED IN BRAIN, SIGNAL = 2.8; EXPRESSED IN BT474, SIGNAL = 2.4; EXPRESSED IN PLACENTA, SIGNAL = 2.4; EXPRESSED IN HEART, SIGNAL = 1.7; EXPRESSED IN FETAL LIVER, SIGNAL =   2; EXPRESSED IN BONE MARROW, SIGNAL = 2.4; EST_HUMAN HIT: AI366706.1, EVALUE 5.80e+00; EST_HUMAN HIT: BF475558.1, EVALUE 2.90e+00; SWISSPROT HIT: P23118, EVALUE 6.00e+00
LRHKIYPQSVDDETEAQNGSCKFTETRHSGNRGGEVQAPKPVSPGIADIE

SEQ ID NO: 33968 - protein, 35 aa, Homo sapiens
  MAP TO AC007050.23; EXPRESSED IN PLACENTA, SIGNAL = 1.4; EXPRESSED IN BONE MARROW, SIGNAL = 1.3; EXPRESSED IN HBL100, SIGNAL = 1.3; EXPRESSED IN FETAL LIVER, SIGNAL = 1.2; EXPRESSED IN LUNG, SIGNAL = 1.2; EXPRESSED IN ADULT LIVER, SIGNAL = 0.98; EXPRESSED IN BRAIN, SIGNAL = 1.2; EXPRESSED IN HEART, SIGNAL = 1.2; EXPRESSED IN BT474, SIGNAL = 1.4; EXPRESSED IN HELA, SIGNAL = 0.93
CQRRGCGYQVSPRIQCQEQHLPNLSKLCSEDTART

SEQ ID NO: 33969 - protein, 78 aa, Homo sapiens
  MAP TO AC007050.23; EXPRESSED IN HBL100, SIGNAL = 5.3; EXPRESSED IN LUNG, SIGNAL = 5.4; EXPRESSED IN PLACENTA, SIGNAL = 5.1; EXPRESSED IN BT474, SIGNAL = 5.1; EXPRESSED IN BONE MARROW, SIGNAL = 4.8; EXPRESSED IN FETAL LIVER, SIGNAL = 7.4; EXPRESSED IN HELA, SIGNAL = 4.5; EXPRESSED IN ADULT LIVER, SIGNAL = 3.8; EXPRESSED IN BRAIN, SIGNAL =   6; EXPRESSED IN HEART, SIGNAL = 4.3; EST_HUMAN HIT: BE904071.1, EVALUE 1.00e-15; EST_HUMAN HIT: AW385142.1, EVALUE 1.00e-15; SWISSPROT HIT: P29386, EVALUE 7.00e-01
PAPYSAHHAGQAHGQVHLGPVCGDSSWPLLPVVAGLWPHRHQRLLFSHDLGEMGQDSVQKMDECLEEALAYLRQIFRV

SEQ ID NO: 33970 - protein, 38 aa, Homo sapiens
  MAP TO AC007050.23; EXPRESSED IN HBL100, SIGNAL = 5.3; EXPRESSED IN LUNG, SIGNAL = 5.4; EXPRESSED IN PLACENTA, SIGNAL = 5.1; EXPRESSED IN BT474, SIGNAL = 5.1; EXPRESSED IN BONE MARROW, SIGNAL = 4.8; EXPRESSED IN FETAL LIVER, SIGNAL = 7.4; EXPRESSED IN HELA, SIGNAL = 4.5; EXPRESSED IN ADULT LIVER, SIGNAL = 3.8; EXPRESSED IN BRAIN, SIGNAL =   6; EXPRESSED IN HEART, SIGNAL = 4.3; EST_HUMAN HIT: BF303697.1, EVALUE 2.00e-06; EST_HUMAN HIT: AW385142.1, EVALUE 1.00e-06; SWISSPROT HIT: Q45251, EVALUE 4.70e+00
TNGSYSAMTWARWGRTASRRWTSAWRRPWRTCARYSEY

SEQ ID NO: 33971 - protein, 21 aa, Homo sapiens
  MAP TO AC007050.23; EXPRESSED IN HBL100, SIGNAL = 5.3; EXPRESSED IN LUNG, SIGNAL = 5.4; EXPRESSED IN PLACENTA, SIGNAL = 5.1; EXPRESSED IN BT474, SIGNAL = 5.1; EXPRESSED IN BONE MARROW, SIGNAL = 4.8; EXPRESSED IN FETAL LIVER, SIGNAL = 7.4; EXPRESSED IN HELA, SIGNAL = 4.5; EXPRESSED IN ADULT LIVER, SIGNAL = 3.8; EXPRESSED IN BRAIN, SIGNAL =   6; EXPRESSED IN HEART, SIGNAL = 4.3
SCTLLSSSRRPSTRPGPSRTS

SEQ ID NO: 33972 - protein, 79 aa, Homo sapiens
  MAP TO AC007050.23; EXPRESSED IN FETAL LIVER, SIGNAL =  25; EXPRESSED IN ADULT LIVER, SIGNAL =  18; EXPRESSED IN BRAIN, SIGNAL = 9.4; EXPRESSED IN BONE MARROW, SIGNAL =  33; EXPRESSED IN HBL100, SIGNAL =  39; EXPRESSED IN HEART, SIGNAL =  12; EXPRESSED IN PLACENTA, SIGNAL =  21; EXPRESSED IN BT474, SIGNAL =  34; EXPRESSED IN LUNG, SIGNAL =  24; EXPRESSED IN HELA, SIGNAL =  24
QLQLQQVALQQQQQQQQFQQQQQAALQQQQQQQQQQQFQAQQSAMQQQFQAVVQQQQQLQQQQQQQQHLIKLHHQNQQQ

SEQ ID NO: 33973 - protein, 52 aa, Homo sapiens
  MAP TO AC007050.23; EXPRESSED IN FETAL LIVER, SIGNAL =  25; EXPRESSED IN ADULT LIVER, SIGNAL =  18; EXPRESSED IN BRAIN, SIGNAL = 9.4; EXPRESSED IN BONE MARROW, SIGNAL =  33; EXPRESSED IN HBL100, SIGNAL =  39; EXPRESSED IN HEART, SIGNAL =  12; EXPRESSED IN PLACENTA, SIGNAL =  21; EXPRESSED IN BT474, SIGNAL =  34; EXPRESSED IN LUNG, SIGNAL =  24; EXPRESSED IN HELA, SIGNAL =  24
PSCSSSRWRCSSSSNSSSSSSSSRRRYSSSSSSSNSSSSRLSRVPCSSSSKQ

SEQ ID NO: 33974 - protein, 51 aa, Homo sapiens
  MAP TO AC007040.2; EXPRESSED IN HBL100, SIGNAL = 3.5; EXPRESSED IN FETAL LIVER, SIGNAL = 2.1; EXPRESSED IN LUNG, SIGNAL = 2.2; EXPRESSED IN HELA, SIGNAL = 2.6; EXPRESSED IN BRAIN, SIGNAL = 3.1; EXPRESSED IN PLACENTA, SIGNAL = 2.5; EXPRESSED IN BT474, SIGNAL = 2.3; EXPRESSED IN BONE MARROW, SIGNAL = 2.8; EXPRESSED IN ADULT LIVER, SIGNAL = 2.4; EXPRESSED IN HEART, SIGNAL = 2.2; SWISSPROT HIT: P38869, EVALUE 7.00e-05; EST_HUMAN HIT: BE005705.1, EVALUE 5.00e-23
FSTAVLIGLYVFERFPTSMIGVGLFTNLVYFGLLQTFPFIMLTSPNFILSC

SEQ ID NO: 33975 - protein, 27 aa, Homo sapiens
  MAP TO AC007040.2; EXPRESSED IN PLACENTA, SIGNAL = 6.1; EXPRESSED IN BT474, SIGNAL = 5.5; EXPRESSED IN BONE MARROW, SIGNAL = 6.8; EXPRESSED IN HEART, SIGNAL = 4.5; EXPRESSED IN BRAIN, SIGNAL = 5.9; EXPRESSED IN ADULT LIVER, SIGNAL = 5.5; EXPRESSED IN LUNG, SIGNAL =   7; EXPRESSED IN FETAL LIVER, SIGNAL = 5.3; EXPRESSED IN HBL100, SIGNAL = 6.3; EXPRESSED IN HELA, SIGNAL = 5.9; EST_HUMAN HIT: H92142.1, EVALUE 1.00e-07; SWISSPROT HIT: P18488, EVALUE 1.70e-02; EST_HUMAN HIT: BF037978.1, EVALUE 4.00e-08
MEFQRCQYVVGRERTELARQLNLSETQ

SEQ ID NO: 33976 - protein, 55 aa, Homo sapiens
  MAP TO AC007040.2; EXPRESSED IN PLACENTA, SIGNAL = 6.1; EXPRESSED IN BT474, SIGNAL = 5.5; EXPRESSED IN BONE MARROW, SIGNAL = 6.8; EXPRESSED IN HEART, SIGNAL = 4.5; EXPRESSED IN BRAIN, SIGNAL = 5.9; EXPRESSED IN ADULT LIVER, SIGNAL = 5.5; EXPRESSED IN LUNG, SIGNAL =   7; EXPRESSED IN FETAL LIVER, SIGNAL = 5.3; EXPRESSED IN HBL100, SIGNAL = 6.3; EXPRESSED IN HELA, SIGNAL = 5.9; EST_HUMAN HIT: H92142.1, EVALUE 5.00e-07; EST_HUMAN HIT: BF037978.1, EVALUE 9.00e-12
PKGQFGKLSCLRAWTWTGPSGHVHPSLPSSCTAWRWSSSAASMWWAASALSWPAS

SEQ ID NO: 33977 - protein, 22 aa, Homo sapiens
  MAP TO AC006987.2; EXPRESSED IN HBL100, SIGNAL = 1.7; EXPRESSED IN LUNG, SIGNAL = 3.3; EXPRESSED IN HELA, SIGNAL = 3.6; EXPRESSED IN BRAIN, SIGNAL = 1.7; EXPRESSED IN BT474, SIGNAL = 2.5; EXPRESSED IN BONE MARROW, SIGNAL = 1.4; EXPRESSED IN PLACENTA, SIGNAL = 1.8; EXPRESSED IN HEART, SIGNAL =   2; EXPRESSED IN ADULT LIVER, SIGNAL = 3.3; EXPRESSED IN FETAL LIVER, SIGNAL = 3.4
VRRMKKWKKIVKKRKKKITVKR

SEQ ID NO: 33978 - protein, 67 aa, Homo sapiens [sequence omitted]

SEQ ID NO: 33979 - protein, 91 aa, Homo sapiens
  MAP TO AC006966.3; EXPRESSED IN FETAL LIVER, SIGNAL = 5.8; EXPRESSED IN PLACENTA, SIGNAL =   7; EXPRESSED IN BT474, SIGNAL = 5.2; EXPRESSED IN BONE MARROW, SIGNAL = 7.6; EXPRESSED IN HBL100, SIGNAL = 6.5; EXPRESSED IN LUNG, SIGNAL = 6.5; EXPRESSED IN HELA, SIGNAL = 4.8; EXPRESSED IN ADULT LIVER, SIGNAL = 4.7; EXPRESSED IN BRAIN, SIGNAL = 5.4; EXPRESSED IN HEART, SIGNAL = 5.9; SWISSPROT HIT: P80385, EVALUE 2.00e-05; EST_HUMAN HIT: BE763984.1, EVALUE 2.00e-15; EST_HUMAN HIT: AW957020.1, EVALUE 1.00e-09
VHRLVVVNEADSIVGIISLSDILQALILTPAGKMLVSDLCHRRLGRVGGRTGSAAFKPSFLHPPTDQGFEYITLKPFSFSLQLGSLSVLRE

SEQ ID NO: 33980 - protein, 44 aa, Homo sapiens
  MAP TO AC006840.13; EXPRESSED IN PLACENTA, SIGNAL = 5.8; EXPRESSED IN BRAIN, SIGNAL =   7; EXPRESSED IN HEART, SIGNAL = 3.4; EXPRESSED IN BONE MARROW, SIGNAL = 8.2; EXPRESSED IN HELA, SIGNAL =  14; EXPRESSED IN LUNG, SIGNAL = 8.2; EXPRESSED IN BT474, SIGNAL = 7.3; EXPRESSED IN ADULT LIVER, SIGNAL = 6.8; EXPRESSED IN FETAL LIVER, SIGNAL = 6.6; EXPRESSED IN HBL100, SIGNAL = 7.2; EST_HUMAN HIT: AA399328.1, EVALUE 2.00e-13; SWISSPROT HIT: Q92777, EVALUE 2.40e-01; EST_HUMAN HIT: AI734108.1, EVALUE 2.00e-13
TRIGGPTLEINPLSSCSLLHEKDPPMTLGPQTNQPKEHLTNFKL

SEQ ID NO: 33981 - protein, 20 aa, Homo sapiens
  MAP TO AC006840.13; EXPRESSED IN PLACENTA, SIGNAL = 5.8; EXPRESSED IN BRAIN, SIGNAL =   7; EXPRESSED IN HEART, SIGNAL = 3.4; EXPRESSED IN BONE MARROW, SIGNAL = 8.2; EXPRESSED IN HELA, SIGNAL =  14; EXPRESSED IN LUNG, SIGNAL = 8.2; EXPRESSED IN BT474, SIGNAL = 7.3; EXPRESSED IN ADULT LIVER, SIGNAL = 6.8; EXPRESSED IN FETAL LIVER, SIGNAL = 6.6; EXPRESSED IN HBL100, SIGNAL = 7.2; EST_HUMAN HIT: BF666115.1, EVALUE 4.90e-02; EST_HUMAN HIT: H88396.1, EVALUE 6.60e-01
DSDRGTYLGDQSLVLLLFAP

SEQ ID NO: 33982 - protein, 329 aa, Homo sapiens
  MAP TO AC006576.15; EXPRESSED IN HBL100, SIGNAL =   4; EXPRESSED IN HELA, SIGNAL = 4.1; EXPRESSED IN ADULT LIVER, SIGNAL = 3.5; EXPRESSED IN BRAIN, SIGNAL = 4.3; EXPRESSED IN PLACENTA, SIGNAL = 6.4; EXPRESSED IN BONE MARROW, SIGNAL = 4.9; EXPRESSED IN BT474, SIGNAL = 5.3; EXPRESSED IN HEART, SIGNAL = 7.7; EXPRESSED IN LUNG, SIGNAL =  13; EXPRESSED IN FETAL LIVER, SIGNAL = 4.3; EST_HUMAN HIT: AU140989.1, EVALUE 1.00e-110; EST_HUMAN HIT: H17745.1, EVALUE 2.00e-12; SWISSPROT HIT: P04275, EVALUE 0.00e+00
GLKKKKVIVIPVGIGPHANLKQIRLIEKQAPENKAFVLSSVDELEQQRDEIVSYLCDLAPEAPPPTLPPDMAQVTVGPGLLGVSTLGPKRNSMVLDVAFVLEGSDKIGEADFNRSKEFMEEVIQRMDVGQDSIHVTVLQYSYMVTVEYPFSEAQSKGDILQRVREIRYQGGNRTNTGLALRYLSDHSFLVSQGDREQAPNLVYMVTGNPASDEIKRLPGDIQVVPIGVGPNANVQELERIGWPNAPILIQDFETLPREAPDLVLQRCCSGEGLQIPTLSPAPGMLAPCVQVGGLGEGWHGLGATCICQDTTRVLILASLVCVALVETCL

SEQ ID NO: 33983 - protein, 33 aa, Homo sapiens
  MAP TO AC006576.15; EXPRESSED IN HBL100, SIGNAL =   4; EXPRESSED IN HELA, SIGNAL = 4.1; EXPRESSED IN ADULT LIVER, SIGNAL = 3.5; EXPRESSED IN BRAIN, SIGNAL = 4.3; EXPRESSED IN PLACENTA, SIGNAL = 6.4; EXPRESSED IN BONE MARROW, SIGNAL = 4.9; EXPRESSED IN BT474, SIGNAL = 5.3; EXPRESSED IN HEART, SIGNAL = 7.7; EXPRESSED IN LUNG, SIGNAL =  13; EXPRESSED IN FETAL LIVER, SIGNAL = 4.3; EST_HUMAN HIT: AU140168.1, EVALUE 2.00e-08; EST_HUMAN HIT: R30738.1, EVALUE 7.80e-01; SWISSPROT HIT: P08121, EVALUE 1.60e+00
RPGPEEEEGHCDPGGHWAPCQPQADPPHREAGP

SEQ ID NO: 33984 - protein, 17 aa, Homo sapiens
  MAP TO AC006560.8; EXPRESSED IN PLACENTA, SIGNAL = 1.3; EXPRESSED IN HBL100, SIGNAL = 0.8; EXPRESSED IN FETAL LIVER, SIGNAL = 0.69; EXPRESSED IN LUNG, SIGNAL = 1.1; EXPRESSED IN BRAIN, SIGNAL = 0.71; EXPRESSED IN BT474, SIGNAL = 0.8; EXPRESSED IN BONE MARROW, SIGNAL = 0.81; EXPRESSED IN HELA, SIGNAL = 3.3; EXPRESSED IN ADULT LIVER, SIGNAL = 0.75; EXPRESSED IN HEART, SIGNAL = 1.1; EST_HUMAN HIT: AU142869.1, EVALUE 1.70e-02
QLQPLCLSIRLHAPMSG

SEQ ID NO: 33985 - protein, 66 aa, Homo sapiens
  MAP TO AC006560.8; EXPRESSED IN PLACENTA, SIGNAL = 5.1; EXPRESSED IN BONE MARROW, SIGNAL = 1.2; EXPRESSED IN LUNG, SIGNAL = 3.4; EXPRESSED IN ADULT LIVER, SIGNAL = 1.7; EXPRESSED IN BRAIN, SIGNAL = 2.6; EXPRESSED IN BT474, SIGNAL = 3.4; EXPRESSED IN HBL100, SIGNAL = 3.2; EXPRESSED IN FETAL LIVER, SIGNAL = 2.7; EXPRESSED IN HELA, SIGNAL = 2.6; EXPRESSED IN HEART, SIGNAL = 2.9; SWISSPROT HIT: Q57165, EVALUE 3.80e-01; EST_HUMAN HIT: AA490128.1, EVALUE 1.00e-15
STPMVSWGAPYDQLTEEEKTQAWFTDGSAQYAGTTQKWTAAAALQPLSRTSLRTAVKGNLPSGHFE

SEQ ID NO: 33986 - protein, 33 aa, Homo sapiens
  MAP TO AC006536.2; EXPRESSED IN BONE MARROW, SIGNAL = 6.8; EXPRESSED IN HBL100, SIGNAL = 4.8; EXPRESSED IN LUNG, SIGNAL =   7; EXPRESSED IN HEART, SIGNAL = 5.1; EXPRESSED IN PLACENTA, SIGNAL =   5; EXPRESSED IN BT474, SIGNAL = 4.7; EXPRESSED IN FETAL LIVER, SIGNAL = 4.6; EXPRESSED IN HELA, SIGNAL = 6.4; EXPRESSED IN ADULT LIVER, SIGNAL = 5.3; EXPRESSED IN BRAIN, SIGNAL = 7.4; EST_HUMAN HIT: W90169.1, EVALUE 2.00e-03
MLQQGAILEAETKPSPDTKYTSALIFNFPASTA

SEQ ID NO: 33987 - protein, 18 aa, Homo sapiens
  MAP TO AC006536.2; EXPRESSED IN BONE MARROW, SIGNAL = 6.8; EXPRESSED IN HBL100, SIGNAL = 4.8; EXPRESSED IN LUNG, SIGNAL =   7; EXPRESSED IN HEART, SIGNAL = 5.1; EXPRESSED IN PLACENTA, SIGNAL =   5; EXPRESSED IN BT474, SIGNAL = 4.7; EXPRESSED IN FETAL LIVER, SIGNAL = 4.6; EXPRESSED IN HELA, SIGNAL = 6.4; EXPRESSED IN ADULT LIVER, SIGNAL = 5.3; EXPRESSED IN BRAIN, SIGNAL = 7.4; EST_HUMAN HIT: AI690301.1, EVALUE 3.40e-02
SCGGWEVEDQGTGIFGVW

SEQ ID NO: 33988 - protein, 33 aa, Homo sapiens
  MAP TO AC006476.3; EXPRESSED IN PLACENTA, SIGNAL = 1.9; EXPRESSED IN BT474, SIGNAL = 1.6; EXPRESSED IN FETAL LIVER, SIGNAL = 1.7; EXPRESSED IN LUNG, SIGNAL = 2.2; EXPRESSED IN HELA, SIGNAL =   2; EXPRESSED IN ADULT LIVER, SIGNAL = 1.7; EXPRESSED IN BRAIN, SIGNAL = 2.5; EXPRESSED IN HEART, SIGNAL = 1.9; EXPRESSED IN BONE MARROW, SIGNAL = 2.1; EXPRESSED IN HBL100, SIGNAL = 1.8; EST_HUMAN HIT: BF527866.1, EVALUE 7.00e-13; EST_HUMAN HIT: BE048208.1, EVALUE 5.00e-13; SWISSPROT HIT: P41587, EVALUE 5.00e-14
VNSIHPECRFHLEIQEEETKCAELLRSQTEKHK

SEQ ID NO: 33989 - protein, 29 aa, Homo sapiens
  MAP TO AC006476.3; EXPRESSED IN PLACENTA, SIGNAL = 1.9; EXPRESSED IN BT474, SIGNAL = 1.6; EXPRESSED IN FETAL LIVER, SIGNAL = 1.7; EXPRESSED IN LUNG, SIGNAL = 2.2; EXPRESSED IN HELA, SIGNAL =   2; EXPRESSED IN ADULT LIVER, SIGNAL = 1.7; EXPRESSED IN BRAIN, SIGNAL = 2.5; EXPRESSED IN HEART, SIGNAL = 1.9; EXPRESSED IN BONE MARROW, SIGNAL = 2.1; EXPRESSED IN HBL100, SIGNAL = 1.8; EST_HUMAN HIT: BE048208.1, EVALUE 8.00e-12
FVFFCLRPQKLCTFCFFLLYFQMKSAFWV

SEQ ID NO: 33990 - protein, 70 aa, Homo sapiens
  MAP TO AC006430.15; EXPRESSED IN HBL100, SIGNAL = 1.5; EXPRESSED IN FETAL LIVER, SIGNAL = 9.9; EXPRESSED IN BRAIN, SIGNAL = 0.88; EXPRESSED IN PLACENTA, SIGNAL = 1.1; EXPRESSED IN BT474, SIGNAL = 1.3; EXPRESSED IN BONE MARROW, SIGNAL =   1; EXPRESSED IN LUNG, SIGNAL = 0.99; EXPRESSED IN HELA, SIGNAL = 0.9; EXPRESSED IN ADULT LIVER, SIGNAL =  12; EXPRESSED IN HEART, SIGNAL = 1.2; EST_HUMAN HIT: AV648298.1, EVALUE 1.00e-28; EST_HUMAN HIT: H52281.1, EVALUE 1.00e-07; SWISSPROT HIT: P01031, EVALUE 1.00e-29
LLVGEILSAVLSQEGINILTHLPKGSAEAELMSVVPVFYVFHYLETGNHWNIFHSDPLIEKQKLKKKLKE

SEQ ID NO: 33991 - protein, 51 aa, Homo sapiens
  MAP TO AC006430.15; EXPRESSED IN ADULT LIVER, SIGNAL = 6.7; EXPRESSED IN PLACENTA, SIGNAL = 1.1; EXPRESSED IN BONE MARROW, SIGNAL = 0.68; EXPRESSED IN HBL100, SIGNAL = 0.84; EXPRESSED IN FETAL LIVER, SIGNAL = 4.8; EXPRESSED IN LUNG, SIGNAL = 0.94; EXPRESSED IN HELA, SIGNAL = 0.76; EXPRESSED IN BT474, SIGNAL = 0.65; EXPRESSED IN BRAIN, SIGNAL = 0.86; EXPRESSED IN HEART, SIGNAL = 0.93; EST_HUMAN HIT: AV661765.1, EVALUE 1.00e-12; SWISSPROT HIT: P01031, EVALUE 5.00e-24
DTINAIEGLTEYSLLVKQLRLSMDIDVSYKHKGALHNYKMTDKNFLGRPVE

SEQ ID NO: 33992 - protein, 137 aa, Homo sapiens
  MAP TO AC006430.15; EXPRESSED IN HEART, SIGNAL = 1.4; EXPRESSED IN PLACENTA, SIGNAL = 1.4; EXPRESSED IN BT474, SIGNAL = 1.3; EXPRESSED IN HBL100, SIGNAL = 1.3; EXPRESSED IN LUNG, SIGNAL = 1.9; EXPRESSED IN BRAIN, SIGNAL = 1.7; EXPRESSED IN BONE MARROW, SIGNAL = 2.2; EXPRESSED IN FETAL LIVER, SIGNAL = 1.5; EXPRESSED IN HELA, SIGNAL = 1.3; EXPRESSED IN ADULT LIVER, SIGNAL = 1.6; EST_HUMAN HIT: AA568587.1, EVALUE 7.00e-21; SWISSPROT HIT: Q13077, EVALUE 4.00e-65; EST_HUMAN HIT: BE729693.1, EVALUE 1.00e-39
GSPQSVQEHEVTSQTSHLNLLLGFMKQWKARLGCGLESGPMALEQNLSDLQLQAAVEVAGDLEVDCYRAPCSESQEELALQHFMKEKLLAELEGKLRVFENIVAVLNKEVEASHLALATSIHQSQLDRERILSLEQR

SEQ ID NO: 33993 - protein, 72 aa, Homo sapiens
  MAP TO AC006430.15; EXPRESSED IN LUNG, SIGNAL = 1.6; EXPRESSED IN HELA, SIGNAL = 1.2; EXPRESSED IN ADULT LIVER, SIGNAL = 1.4; EXPRESSED IN PLACENTA, SIGNAL = 1.3; EXPRESSED IN BT474, SIGNAL = 1.1; EXPRESSED IN BRAIN, SIGNAL = 1.3; EXPRESSED IN HEART, SIGNAL = 1.2; EXPRESSED IN BONE MARROW, SIGNAL = 1.8; EXPRESSED IN HBL100, SIGNAL = 1.3; EXPRESSED IN FETAL LIVER, SIGNAL = 1.2; EST_HUMAN HIT: AW136067.1, EVALUE 1.00e-18; SWISSPROT HIT: Q13077, EVALUE 3.00e-37
VTFMLLDQNNREHAIDAFRPDLSSASFQRPQSETNVASGCPLFFPLSKLQSPKHAYVKDDTMFLKCIVETST

SEQ ID NO: 33994 - protein, 72 aa, Homo sapiens
  MAP TO AC006356.3; EXPRESSED IN FETAL LIVER, SIGNAL = 1.4; EXPRESSED IN LUNG, SIGNAL = 1.8; EXPRESSED IN ADULT LIVER, SIGNAL = 1.5; EXPRESSED IN HEART, SIGNAL = 1.2; EXPRESSED IN PLACENTA, SIGNAL = 1.5; EXPRESSED IN HELA, SIGNAL = 1.4; EXPRESSED IN BRAIN, SIGNAL = 1.6; EXPRESSED IN BT474, SIGNAL =   1; EXPRESSED IN BONE MARROW, SIGNAL = 1.5; EXPRESSED IN HBL100, SIGNAL = 1.1; EST_HUMAN HIT: BE047549.1, EVALUE 4.00e-01; SWISSPROT HIT: P38190, EVALUE 1.80e+00; EST_HUMAN HIT: BE562634.1, EVALUE 8.10e-01
TRAHVLFLKYTRHIAAKNFALLFPVPGMLCPMISTLLFPSVDSGLASNVVSSEKSSLMTICQAYCSSPPDSA

SEQ ID NO: 33995 - protein, 27 aa, Homo sapiens
  MAP TO AC006356.3; EXPRESSED IN FETAL LIVER, SIGNAL = 1.4; EXPRESSED IN LUNG, SIGNAL = 1.8; EXPRESSED IN ADULT LIVER, SIGNAL = 1.5; EXPRESSED IN HEART, SIGNAL = 1.2; EXPRESSED IN PLACENTA, SIGNAL = 1.5; EXPRESSED IN HELA, SIGNAL = 1.4; EXPRESSED IN BRAIN, SIGNAL = 1.6; EXPRESSED IN BT474, SIGNAL =   1; EXPRESSED IN BONE MARROW, SIGNAL = 1.5; EXPRESSED IN HBL100, SIGNAL = 1.1; SWISSPROT HIT: P16885, EVALUE 6.40e+00
SSGKTFLKRQHWRQDLNQPRERAMWRS

SEQ ID NO: 33996 - protein, 17 aa, Homo sapiens
  MAP TO AC006286.12; EXPRESSED IN FETAL LIVER, SIGNAL = 1.3; EXPRESSED IN LUNG, SIGNAL = 1.7; EXPRESSED IN HELA, SIGNAL = 2.2; EXPRESSED IN ADULT LIVER, SIGNAL = 1.2; EXPRESSED IN HEART, SIGNAL = 1.2; EXPRESSED IN BONE MARROW, SIGNAL = 1.3; EXPRESSED IN BRAIN, SIGNAL = 1.4; EXPRESSED IN PLACENTA, SIGNAL = 0.9; EXPRESSED IN BT474, SIGNAL = 1.5; EXPRESSED IN HBL100, SIGNAL = 1.9; EST_HUMAN HIT: BE071924.1, EVALUE 5.70e+00
LWKGLSTVWKITLIGTS

SEQ ID NO: 33997 - protein, 77 aa, Homo sapiens
  MAP TO AC006017.2; EXPRESSED IN PLACENTA, SIGNAL = 2.4; EXPRESSED IN BT474, SIGNAL = 1.8; EXPRESSED IN HBL100, SIGNAL =   2; EXPRESSED IN LUNG, SIGNAL = 1.9; EXPRESSED IN ADULT LIVER, SIGNAL = 1.5; EXPRESSED IN HEART, SIGNAL = 1.2; EXPRESSED IN BONE MARROW, SIGNAL = 2.3; EXPRESSED IN FETAL LIVER, SIGNAL = 1.7; EXPRESSED IN HELA, SIGNAL = 1.9; EXPRESSED IN BRAIN, SIGNAL = 1.6; SWISSPROT HIT: P25989, EVALUE 3.70e-01; EST_HUMAN HIT: AA368411.1, EVALUE 7.00e-21
DSQRKQYEEWLQETQQLLQMQQKYLEEQIGAHRKSKKALSAKQRTAKKAGREFPEEDAEQLKHVTEQQSMVQKQLEQ

SEQ ID NO: 33998 - protein, 39 aa, Homo sapiens
  MAP TO AC006017.2; EXPRESSED IN PLACENTA, SIGNAL = 4.6; EXPRESSED IN FETAL LIVER, SIGNAL = 4.7; EXPRESSED IN HELA, SIGNAL = 4.2; EXPRESSED IN BRAIN, SIGNAL = 4.9; EXPRESSED IN HEART, SIGNAL = 3.9; EXPRESSED IN BT474, SIGNAL = 4.5; EXPRESSED IN BONE MARROW, SIGNAL = 4.7; EXPRESSED IN LUNG, SIGNAL = 4.7; EXPRESSED IN ADULT LIVER, SIGNAL = 3.5; EXPRESSED IN HBL100, SIGNAL = 3.4; EST_HUMAN HIT: AW014128.1, EVALUE 1.00e-03; EST_HUMAN HIT: AI298476.1, EVALUE 2.00e-03
QSPQHQQQMGQVLQQQNIQQGSINSPSTQTFMQTNERRQ

SEQ ID NO: 33999 - protein, 74 aa, Homo sapiens
  MAP TO AC006017.2; EXPRESSED IN PLACENTA, SIGNAL = 4.6; EXPRESSED IN FETAL LIVER, SIGNAL = 4.7; EXPRESSED IN HELA, SIGNAL = 4.2; EXPRESSED IN BRAIN, SIGNAL = 4.9; EXPRESSED IN HEART, SIGNAL = 3.9; EXPRESSED IN BT474, SIGNAL = 4.5; EXPRESSED IN BONE MARROW, SIGNAL = 4.7; EXPRESSED IN LUNG, SIGNAL = 4.7; EXPRESSED IN ADULT LIVER, SIGNAL = 3.5; EXPRESSED IN HBL100, SIGNAL = 3.4; EST_HUMAN HIT: W04955.1, EVALUE 1.00e-24; SWISSPROT HIT: P56094, EVALUE 1.20e-01
PLNPPRIQPPIAQLPIKTCTPAPGTVSNANPQSGPPPRVEFDDNNPFSESFQERERKERLREQQERQRIQLMQE

SEQ ID NO: 34000 - protein, 56 aa, Homo sapiens
  MAP TO AC006017.2; EXPRESSED IN BT474, SIGNAL =  13; EXPRESSED IN HBL100, SIGNAL =  11; EXPRESSED IN LUNG, SIGNAL =  18; EXPRESSED IN HELA, SIGNAL =  11; EXPRESSED IN ADULT LIVER, SIGNAL = 7.4; EXPRESSED IN BRAIN, SIGNAL =  13; EXPRESSED IN BONE MARROW, SIGNAL =  17; EXPRESSED IN PLACENTA, SIGNAL =  18; EXPRESSED IN HEART, SIGNAL = 7.7; EXPRESSED IN FETAL LIVER, SIGNAL =  13; SWISSPROT HIT: P75445, EVALUE 1.20e+00; EST_HUMAN HIT: AA331817.1, EVALUE 4.00e-26
PHTLNSTSTSKSFQSTVTGELNAPYSKQFVHSKSSQYRKMKTEWKSNVYLARSRIQ

SEQ ID NO: 34001 - protein, 25 aa, Homo sapiens
  MAP TO AC006017.2; EXPRESSED IN BT474, SIGNAL =  13; EXPRESSED IN HBL100, SIGNAL =  11; EXPRESSED IN LUNG, SIGNAL =  18; EXPRESSED IN HELA, SIGNAL =  11; EXPRESSED IN ADULT LIVER, SIGNAL = 7.4; EXPRESSED IN BRAIN, SIGNAL =  13; EXPRESSED IN BONE MARROW, SIGNAL =  17; EXPRESSED IN PLACENTA, SIGNAL =  18; EXPRESSED IN HEART, SIGNAL = 7.7; EXPRESSED IN FETAL LIVER, SIGNAL =  13; EST_HUMAN HIT: AA332025.1, EVALUE 4.00e-08; EST_HUMAN HIT: AW965281.1, EVALUE 3.00e-08
ASHLKQHQHLKVISEHSHWRTERTL

SEQ ID NO: 34002 - protein, 83 aa, Homo sapiens
  MAP TO AC006017.2; EXPRESSED IN HBL100, SIGNAL =  12; EXPRESSED IN FETAL LIVER, SIGNAL =  12; EXPRESSED IN BRAIN, SIGNAL =  12; EXPRESSED IN PLACENTA, SIGNAL = 9.2; EXPRESSED IN HEART, SIGNAL = 9.8; EXPRESSED IN ADULT LIVER, SIGNAL = 9.9; EXPRESSED IN HELA, SIGNAL =  14; EXPRESSED IN LUNG, SIGNAL =  12; EXPRESSED IN BONE MARROW, SIGNAL =  11; EXPRESSED IN BT474, SIGNAL = 8.3; EST_HUMAN HIT: BF351270.1, EVALUE 2.00e-39; EST_HUMAN HIT: AA083568.1, EVALUE 6.00e-35; SWISSPROT HIT: Q10473, EVALUE 9.00e-21
EVLVFLDSHCEVNVMWLQPLLAAIREDRHTVVCPVIDIISADTLAYSSSPVVRGGFNWGLHFKWDLVPLSELGRAEGATAPIK

SEQ ID NO: 34003 - protein, 61 aa, Homo sapiens
  MAP TO AC006017.2; EXPRESSED IN ADULT LIVER, SIGNAL = 0.85; EXPRESSED IN PLACENTA, SIGNAL = 1.3; EXPRESSED IN BT474, SIGNAL = 2.2; EXPRESSED IN BONE MARROW, SIGNAL = 0.85; EXPRESSED IN FETAL LIVER, SIGNAL = 0.96; EXPRESSED IN LUNG, SIGNAL = 1.1; EXPRESSED IN HELA, SIGNAL = 0.91; EXPRESSED IN HBL100, SIGNAL = 1.4; EXPRESSED IN BRAIN, SIGNAL = 1.8; EXPRESSED IN HEART, SIGNAL = 0.93; EST_HUMAN HIT: AW370405.1, EVALUE 8.00e-20; SWISSPROT HIT: Q9ULK2, EVALUE 4.40e+00
KNVPVKGSGPHGPSPKKFYPRFTRGPSRVLEPQFKANKIDDVIDSRVEDPEEGHLKFSSEL

SEQ ID NO: 34004 - protein, 83 aa, Homo sapiens
  MAP TO AC006017.2; EXPRESSED IN BRAIN, SIGNAL =   1; EXPRESSED IN HEART, SIGNAL = 1.2; EXPRESSED IN PLACENTA, SIGNAL = 1.2; EXPRESSED IN HBL100, SIGNAL = 1.7; EXPRESSED IN BT474, SIGNAL = 2.2; EXPRESSED IN BONE MARROW, SIGNAL =   2; EXPRESSED IN FETAL LIVER, SIGNAL = 1.4; EXPRESSED IN LUNG, SIGNAL = 1.2; EXPRESSED IN HELA, SIGNAL = 1.2; EXPRESSED IN ADULT LIVER, SIGNAL = 2.3; EST_HUMAN HIT: BE064386.1, EVALUE 5.00e-19; SWISSPROT HIT: P10266, EVALUE 1.00e-08
MSRLTLRRTPTVTSNTHRTQPPTWGQIEKLPQMAEENLRKAGQPVTISNWILPRITKFKPIEGAENVFTDGSSNGKASYSGSK

SEQ ID NO: 34005 - protein, 47 aa, Homo sapiens
  MAP TO AC006017.2; EXPRESSED IN BRAIN, SIGNAL =   1; EXPRESSED IN HEART, SIGNAL = 1.2; EXPRESSED IN PLACENTA, SIGNAL = 1.2; EXPRESSED IN HBL100, SIGNAL = 1.7; EXPRESSED IN BT474, SIGNAL = 2.2; EXPRESSED IN BONE MARROW, SIGNAL =   2; EXPRESSED IN FETAL LIVER, SIGNAL = 1.4; EXPRESSED IN LUNG, SIGNAL = 1.2; EXPRESSED IN HELA, SIGNAL = 1.2; EXPRESSED IN ADULT LIVER, SIGNAL = 2.3; EST_HUMAN HIT: BE064386.1, EVALUE 6.00e-19; SWISSPROT HIT: P22850, EVALUE 7.90e+00
VKTDAEEDPNCHEQHPSNTATHLGTDREAATDGGRKPEESWTTSHNK

SEQ ID NO: 34006 - protein, 43 aa, Homo sapiens
  MAP TO AC006017.2; EXPRESSED IN HELA, SIGNAL = 1.4; EXPRESSED IN ADULT LIVER, SIGNAL = 1.3; EXPRESSED IN HEART, SIGNAL = 1.1; EXPRESSED IN BT474, SIGNAL = 2.5; EXPRESSED IN BONE MARROW, SIGNAL = 2.5; EXPRESSED IN FETAL LIVER, SIGNAL = 1.5; EXPRESSED IN LUNG, SIGNAL = 1.7; EXPRESSED IN BRAIN, SIGNAL = 1.2; EXPRESSED IN PLACENTA, SIGNAL = 1.8; EXPRESSED IN HBL100, SIGNAL = 2.2; EST_HUMAN HIT: AV730925.1, EVALUE 8.00e-10; EST_HUMAN HIT: AI076672.1, EVALUE 2.00e-07
GPRGTGPKGKARSEKGCSLSHGPQTNKPLVVQKGQKMEQANHP

SEQ ID NO: 34007 - protein, 337 aa, Homo sapiens
  MAP TO AC006017.2; EXPRESSED IN LUNG, SIGNAL = 1.9; EXPRESSED IN ADULT LIVER, SIGNAL = 1.7; EXPRESSED IN BRAIN, SIGNAL = 8.4; EXPRESSED IN PLACENTA, SIGNAL = 1.9; EXPRESSED IN BONE MARROW, SIGNAL = 1.6; EXPRESSED IN FETAL LIVER, SIGNAL = 1.9; EXPRESSED IN HELA, SIGNAL = 2.2; EXPRESSED IN HEART, SIGNAL = 1.4; EXPRESSED IN BT474, SIGNAL = 3.9; EXPRESSED IN HBL100, SIGNAL = 1.9; EST_HUMAN HIT: AU125551.1, EVALUE 1.00e-114; EST_HUMAN HIT: H15311.1, EVALUE 4.00e-48; SWISSPROT HIT: Q03164, EVALUE 5.00e-36
LPEKASPPASPPIAFPPAFEAAQVEAKPDELKVTVKLKPRLRAVHGGFEDCRPLNKKWRGMKWKKWSIHIVIPKGTFKPPCEDEIDEFLKKLGTSLKPDPVPKDYRKCCFCHEEGDGLTDGPARLLNLDLDLWVHLNCALWSTEVYETQAGALINVELALRRGLQMKCVFCHKTGATSGCHRFRCTNIYHFTCAIKAQCMFFKDKTMLCPMHKPKGIHEQELSYFAVFRRVYVQRDEVRQIASIVQRGERDHTFRVGSLIFHTIGQLLPQQMQAFHSPKALFPVGYEASRLYWSTRYANRRCRYLCSIEEKDGRPVFVIRIVEQGHEDLVLSDISPK

SEQ ID NO: 34008 - protein, 18 aa, Homo sapiens
  MAP TO AC006017.2; EXPRESSED IN LUNG, SIGNAL = 1.9; EXPRESSED IN ADULT LIVER, SIGNAL = 1.7; EXPRESSED IN BRAIN, SIGNAL = 8.4; EXPRESSED IN PLACENTA, SIGNAL = 1.9; EXPRESSED IN BONE MARROW, SIGNAL = 1.6; EXPRESSED IN FETAL LIVER, SIGNAL = 1.9; EXPRESSED IN HELA, SIGNAL = 2.2; EXPRESSED IN HEART, SIGNAL = 1.4; EXPRESSED IN BT474, SIGNAL = 3.9; EXPRESSED IN HBL100, SIGNAL = 1.9; EST_HUMAN HIT: AW997046.1, EVALUE 2.00e-04
PRESFSPCLTTHRLPSCF

SEQ ID NO: 34009 - protein, 128 aa, Homo sapiens
  MAP TO AC005517.3; EXPRESSED IN BT474, SIGNAL = 3.3; EXPRESSED IN HELA, SIGNAL = 2.1; EXPRESSED IN BRAIN, SIGNAL = 2.1; EXPRESSED IN HBL100, SIGNAL = 2.7; EXPRESSED IN FETAL LIVER, SIGNAL = 2.5; EXPRESSED IN LUNG, SIGNAL = 2.4; EXPRESSED IN ADULT LIVER, SIGNAL = 1.4; EXPRESSED IN PLACENTA, SIGNAL = 2.3; EXPRESSED IN BONE MARROW, SIGNAL = 2.3; EXPRESSED IN HEART, SIGNAL = 1.7; EST_HUMAN HIT: BE241577.1, EVALUE 2.00e-41
KHDPWPAYVTYTSQTVKRLIEKSKTRELECMRALEERPWASRQNKPSSVIQPKRRKSSKSSGKAVFRDTLSESTLSMWGAYSVLAMAPTMIPEPTHLHADSRDCPTENYNKIIFARKPMMRMLPTVRY

SEQ ID NO: 34010 - protein, 59 aa, Homo sapiens
  MAP TO AC005517.3; EXPRESSED IN PLACENTA, SIGNAL = 3.6; EXPRESSED IN LUNG, SIGNAL = 4.1; EXPRESSED IN HELA, SIGNAL = 3.5; EXPRESSED IN BT474, SIGNAL =   3; EXPRESSED IN BONE MARROW, SIGNAL = 4.3; EXPRESSED IN HBL100, SIGNAL = 2.9; EXPRESSED IN FETAL LIVER, SIGNAL =   3; EXPRESSED IN BRAIN, SIGNAL = 4.1; EXPRESSED IN ADULT LIVER, SIGNAL = 2.8; EXPRESSED IN HEART, SIGNAL = 3.1; EST_HUMAN HIT: AI400185.1, EVALUE 2.10e-01
INLFTRHLGHLSQRRCQWGHELLMLGQPPAPASAPPCVTLKLLGWETSIFWRGFNGIQV

SEQ ID NO: 34011 - protein, 29 aa, Homo sapiens
  MAP TO AC005497.2; EXPRESSED IN FETAL LIVER, SIGNAL = 8.4; EXPRESSED IN LUNG, SIGNAL = 7.2; EXPRESSED IN HELA, SIGNAL =  10; EXPRESSED IN BRAIN, SIGNAL =   2; EXPRESSED IN HEART, SIGNAL =   3; EXPRESSED IN BT474, SIGNAL = 0.77; EXPRESSED IN BONE MARROW, SIGNAL = 3.3; EXPRESSED IN PLACENTA, SIGNAL = 2.7; EXPRESSED IN ADULT LIVER, SIGNAL =  11; EXPRESSED IN HBL100, SIGNAL = 5.9; SWISSPROT HIT: P30318, EVALUE 2.80e+00
NKLDYIKIENVVLQLILSRRKKYTLQNKE

SEQ ID NO: 34012 - protein, 114 aa, Homo sapiens
  MAP TO AC005480.3; EXPRESSED IN HELA, SIGNAL =   4; EXPRESSED IN ADULT LIVER, SIGNAL = 2.8; EXPRESSED IN HEART, SIGNAL = 2.7; EXPRESSED IN PLACENTA, SIGNAL = 2.9; EXPRESSED IN BONE MARROW, SIGNAL = 3.5; EXPRESSED IN FETAL LIVER, SIGNAL = 2.4; EXPRESSED IN LUNG, SIGNAL =   3; EXPRESSED IN BRAIN, SIGNAL = 2.9; EXPRESSED IN BT474, SIGNAL = 2.4; EXPRESSED IN HBL100, SIGNAL = 2.9; EST_HUMAN HIT: BF029366.1, EVALUE 7.20e-01; SWISSPROT HIT: P26986, EVALUE 3.00e-01; EST_HUMAN HIT: AA417354.1, EVALUE 5.30e+00
ELFRKIRIQMRALDMLQMASSPIASSSNRANPQPRTATRTQQEKLGFLHTNFRFQPRVNPVVPDYEGLYKAFQRRAAKRRETQEATRNKPFLLRTANLRHPQRPCDAATTGRRQ

SEQ ID NO: 34013 - protein, 46 aa, Homo sapiens
  MAP TO AC005480.3; EXPRESSED IN BT474, SIGNAL = 2.1; EXPRESSED IN LUNG, SIGNAL = 1.2; EXPRESSED IN HELA, SIGNAL =   1; EXPRESSED IN ADULT LIVER, SIGNAL = 2.6; EXPRESSED IN BRAIN, SIGNAL = 1.1; EXPRESSED IN HEART, SIGNAL = 1.4; EXPRESSED IN BONE MARROW, SIGNAL = 1.5; EXPRESSED IN PLACENTA, SIGNAL = 4.8; EXPRESSED IN FETAL LIVER, SIGNAL = 2.4; EXPRESSED IN HBL100, SIGNAL = 1.8; EST_HUMAN HIT: BE780916.1, EVALUE 4.00e-20; EST_HUMAN HIT: BE407814.1, EVALUE 2.00e-04
EVGFEPCYAEVLRVVRGKLHQPEEVQRGSFYAFSYYYDRAVDTDMI

SEQ ID NO: 34014 - protein, 38 aa, Homo sapiens
  MAP TO AC005476.3; EXPRESSED IN HELA, SIGNAL = 2.8; EXPRESSED IN ADULT LIVER, SIGNAL = 2.8; EXPRESSED IN HEART, SIGNAL = 2.3; EXPRESSED IN BT474, SIGNAL = 2.3; EXPRESSED IN BONE MARROW, SIGNAL =   3; EXPRESSED IN FETAL LIVER, SIGNAL = 2.5; EXPRESSED IN BRAIN, SIGNAL = 2.8; EXPRESSED IN PLACENTA, SIGNAL = 2.2; EXPRESSED IN HBL100, SIGNAL = 2.1; EXPRESSED IN LUNG, SIGNAL = 3.6; EST_HUMAN HIT: W01610.1, EVALUE 8.50e+00
LTLVHKTWIASTLYPYNFTAQKAHKGFLISRCFLSQKA

SEQ ID NO: 34015 - protein, 82 aa, Homo sapiens
  MAP TO AC005300.9; EXPRESSED IN BONE MARROW, SIGNAL = 5.4; EXPRESSED IN FETAL LIVER, SIGNAL = 5.1; EXPRESSED IN PLACENTA, SIGNAL = 6.8; EXPRESSED IN HEART, SIGNAL = 3.7; EXPRESSED IN BRAIN, SIGNAL = 5.4; EXPRESSED IN ADULT LIVER, SIGNAL = 3.5; EXPRESSED IN HELA, SIGNAL =   5; EXPRESSED IN LUNG, SIGNAL = 7.4; EXPRESSED IN HBL100, SIGNAL = 7.1; EXPRESSED IN BT474, SIGNAL = 7.7; EST_HUMAN HIT: AI365586.1, EVALUE 3.00e-38; SWISSPROT HIT: O02666, EVALUE 3.40e-01; EST_HUMAN HIT: BF528236.1, EVALUE 4.00e-38
PTHLWVPVGHRWSACAGPQSDPCCSESLPKAGELPGAAAGARGFCYKCWEHLTTQQSPGAVSPAGVRGEKAARGMEAQGPGS

SEQ ID NO: 34016 - protein, 20 aa, Homo sapiens
  MAP TO AC005300.9; EXPRESSED IN BONE MARROW, SIGNAL = 5.4; EXPRESSED IN FETAL LIVER, SIGNAL = 5.1; EXPRESSED IN PLACENTA, SIGNAL = 6.8; EXPRESSED IN HEART, SIGNAL = 3.7; EXPRESSED IN BRAIN, SIGNAL = 5.4; EXPRESSED IN ADULT LIVER, SIGNAL = 3.5; EXPRESSED IN HELA, SIGNAL =   5; EXPRESSED IN LUNG, SIGNAL = 7.4; EXPRESSED IN HBL100, SIGNAL = 7.1; EXPRESSED IN BT474, SIGNAL = 7.7; EST_HUMAN HIT: BE280799.1, EVALUE 2.00e-06; EST_HUMAN HIT: BF346356.1, EVALUE 3.00e-06
AHPPLGSCWTSMECLCGATE

SEQ ID NO: 34017 - protein, 67 aa, Homo sapiens
  MAP TO AC005300.9; EXPRESSED IN HBL100, SIGNAL = 3.7; EXPRESSED IN FETAL LIVER, SIGNAL = 5.5; EXPRESSED IN LUNG, SIGNAL = 5.8; EXPRESSED IN HELA, SIGNAL = 4.1; EXPRESSED IN BRAIN, SIGNAL = 5.1; EXPRESSED IN PLACENTA, SIGNAL = 4.1; EXPRESSED IN HEART, SIGNAL = 3.6; EXPRESSED IN ADULT LIVER, SIGNAL = 3.6; EXPRESSED IN BONE MARROW, SIGNAL = 5.9; EXPRESSED IN BT474, SIGNAL = 3.3; EST_HUMAN HIT: BE795136.1, EVALUE 4.00e-24; EST_HUMAN HIT: AI734040.1, EVALUE 5.00e-19; SWISSPROT HIT: P53984, EVALUE 2.90e-01
VLKLVSDLRNHPVATLMATGHPMVISSDDPAMFGAKGLSYDFYEVFMGIGGMKADLRTLKQLAMNSI

SEQ ID NO: 34018 - protein, 23 aa, Homo sapiens
  MAP TO AC005280.2; EXPRESSED IN FETAL LIVER, SIGNAL = 3.9; EXPRESSED IN LUNG, SIGNAL = 4.5; EXPRESSED IN ADULT LIVER, SIGNAL = 2.9; EXPRESSED IN BRAIN, SIGNAL = 4.3; EXPRESSED IN PLACENTA, SIGNAL = 5.9; EXPRESSED IN HBL100, SIGNAL = 4.5; EXPRESSED IN HEART, SIGNAL = 3.4; EXPRESSED IN BT474, SIGNAL = 5.3; EXPRESSED IN BONE MARROW, SIGNAL = 6.4; EXPRESSED IN HELA, SIGNAL = 3.6
VSCKRTSVSSSLEQLIRRMLLLK

SEQ ID NO: 34019 - protein, 41 aa, Homo sapiens
  MAP TO AC005100.2; EXPRESSED IN LUNG, SIGNAL = 1.3; EXPRESSED IN HELA, SIGNAL = 1.3; EXPRESSED IN ADULT LIVER, SIGNAL = 1.2; EXPRESSED IN BRAIN, SIGNAL = 1.4; EXPRESSED IN HEART, SIGNAL = 1.6; EXPRESSED IN PLACENTA, SIGNAL = 1.2; EXPRESSED IN BT474, SIGNAL = 1.1; EXPRESSED IN BONE MARROW, SIGNAL = 1.3; EXPRESSED IN HBL100, SIGNAL = 1.1; EXPRESSED IN FETAL LIVER, SIGNAL = 1.3; EST_HUMAN HIT: AI266468.1, EVALUE 1.00e-17; SWISSPROT HIT: P11654, EVALUE 3.60e+00
RGGHKEKMAICKPRNEASPDTGSMSTLILDSPASRTVRNKC

SEQ ID NO: 34020 - protein, 42 aa, Homo sapiens
  MAP TO AC005100.2; EXPRESSED IN LUNG, SIGNAL = 1.3; EXPRESSED IN HELA, SIGNAL = 1.3; EXPRESSED IN ADULT LIVER, SIGNAL = 1.2; EXPRESSED IN BRAIN, SIGNAL = 1.4; EXPRESSED IN HEART, SIGNAL = 1.6; EXPRESSED IN PLACENTA, SIGNAL = 1.2; EXPRESSED IN BT474, SIGNAL = 1.1; EXPRESSED IN BONE MARROW, SIGNAL = 1.3; EXPRESSED IN HBL100, SIGNAL = 1.1; EXPRESSED IN FETAL LIVER, SIGNAL = 1.3; EST_HUMAN HIT: AI266468.1, EVALUE 1.00e-22
NIYFSQFWRLESPRSRCSWIQCLVRPHFWVCRWPSSPCALLW

SEQ ID NO: 34021 - protein, 32 aa, Homo sapiens
  MAP TO AC005100.2; EXPRESSED IN FETAL LIVER, SIGNAL = 0.77; EXPRESSED IN LUNG, SIGNAL = 0.74; EXPRESSED IN HELA, SIGNAL = 0.76; EXPRESSED IN ADULT LIVER, SIGNAL = 0.81; EXPRESSED IN HEART, SIGNAL = 2.2; EXPRESSED IN PLACENTA, SIGNAL = 0.78; EXPRESSED IN BT474, SIGNAL = 0.7; EXPRESSED IN BRAIN, SIGNAL =   1; EXPRESSED IN HBL100, SIGNAL = 1.6
MMMMMMMMLESSKGLRYFTQLIREAPATSIQR

SEQ ID NO: 34022 - protein, 18 aa, Homo sapiens
  MAP TO AC005076.2; EXPRESSED IN PLACENTA, SIGNAL = 1.1; EXPRESSED IN BT474, SIGNAL = 1.5; EXPRESSED IN BONE MARROW, SIGNAL = 1.1; EXPRESSED IN HBL100, SIGNAL = 1.2; EXPRESSED IN FETAL LIVER, SIGNAL = 1.5; EXPRESSED IN LUNG, SIGNAL = 1.4; EXPRESSED IN HELA, SIGNAL = 2.4; EXPRESSED IN ADULT LIVER, SIGNAL =   2; EXPRESSED IN HEART, SIGNAL = 1.6; EXPRESSED IN BRAIN, SIGNAL = 0.91; EST_HUMAN HIT: BE163587.1, EVALUE 7.60e-02
TQGFYLLVSEADTEPQIC

SEQ ID NO: 34023 - protein, 38 aa, Homo sapiens
  MAP TO AC005067.2; EXPRESSED IN PLACENTA, SIGNAL = 1.5; EXPRESSED IN FETAL LIVER, SIGNAL = 2.6; EXPRESSED IN HELA, SIGNAL = 2.3; EXPRESSED IN ADULT LIVER, SIGNAL = 3.2; EXPRESSED IN BRAIN, SIGNAL = 2.5; EXPRESSED IN HEART, SIGNAL = 1.7; EXPRESSED IN BONE MARROW, SIGNAL = 1.3; EXPRESSED IN LUNG, SIGNAL =   2; EXPRESSED IN BT474, SIGNAL = 1.7; EXPRESSED IN HBL100, SIGNAL = 1.5; EST_HUMAN HIT: AA468646.1, EVALUE 5.00e-08
AHHHIEAAKAHGFHPLVWQPELYLGPFEPRLEAEWPGM

SEQ ID NO: 34024 - protein, 18 aa, Homo sapiens
  MAP TO AC005067.2; EXPRESSED IN PLACENTA, SIGNAL = 1.5; EXPRESSED IN FETAL LIVER, SIGNAL = 2.6; EXPRESSED IN HELA, SIGNAL = 2.3; EXPRESSED IN ADULT LIVER, SIGNAL = 3.2; EXPRESSED IN BRAIN, SIGNAL = 2.5; EXPRESSED IN HEART, SIGNAL = 1.7; EXPRESSED IN BONE MARROW, SIGNAL = 1.3; EXPRESSED IN LUNG, SIGNAL =   2; EXPRESSED IN BT474, SIGNAL = 1.7; EXPRESSED IN HBL100, SIGNAL = 1.5
TLEGESHEPWPLQCGGEP

SEQ ID NO: 34025 - protein, 63 aa, Homo sapiens
  MAP TO AC005067.2; EXPRESSED IN PLACENTA, SIGNAL = 5.5; EXPRESSED IN HEART, SIGNAL = 1.4; EXPRESSED IN BT474, SIGNAL = 4.6; EXPRESSED IN BRAIN, SIGNAL = 1.3; EXPRESSED IN ADULT LIVER, SIGNAL =  16; EXPRESSED IN HELA, SIGNAL = 3.9; EXPRESSED IN LUNG, SIGNAL =   3; EXPRESSED IN FETAL LIVER, SIGNAL =  12; EXPRESSED IN HBL100, SIGNAL = 2.3; EXPRESSED IN BONE MARROW, SIGNAL = 1.2; EST_HUMAN HIT: AU125143.1, EVALUE 4.00e-29; EST_HUMAN HIT: AW246234.1, EVALUE 2.00e-29; SWISSPROT HIT: P16435, EVALUE 9.00e-28
FMINMGDSHVDTSSTVSEAVAEEVSLFSMTDMILFSLIVGLLTYWFLFRKKKEEVPEFTKIQT

SEQ ID NO: 34026 - protein, 57 aa, Homo sapiens
  MAP TO AC005067.2; EXPRESSED IN PLACENTA, SIGNAL = 5.5; EXPRESSED IN HEART, SIGNAL = 1.4; EXPRESSED IN BT474, SIGNAL = 4.6; EXPRESSED IN BRAIN, SIGNAL = 1.3; EXPRESSED IN ADULT LIVER, SIGNAL =  16; EXPRESSED IN HELA, SIGNAL = 3.9; EXPRESSED IN LUNG, SIGNAL =   3; EXPRESSED IN FETAL LIVER, SIGNAL =  12; EXPRESSED IN HBL100, SIGNAL = 2.3; EXPRESSED IN BONE MARROW, SIGNAL = 1.2; EST_HUMAN HIT: AU130041.1, EVALUE 7.00e-29; EST_HUMAN HIT: BE299190.1, EVALUE 4.00e-29; SWISSPROT HIT: O75069, EVALUE 1.20e+00
FHDQHGRLPRGHQLHRVRGGGRRSISFQHDGHDSVFAHRGSPNLLVPLQKEKRRSPR

SEQ ID NO: 34027 - protein, 30 aa, Homo sapiens
  MAP TO AC005060.2; EXPRESSED IN BONE MARROW, SIGNAL = 3.2; EXPRESSED IN ADULT LIVER, SIGNAL = 3.4; EXPRESSED IN PLACENTA, SIGNAL = 2.8; EXPRESSED IN BT474, SIGNAL =   3; EXPRESSED IN FETAL LIVER, SIGNAL = 3.4; EXPRESSED IN LUNG, SIGNAL =   5; EXPRESSED IN HELA, SIGNAL = 3.3; EXPRESSED IN BRAIN, SIGNAL = 3.7; EXPRESSED IN HEART, SIGNAL = 3.4; EXPRESSED IN HBL100, SIGNAL =   3; SWISSPROT HIT: P21439, EVALUE 1.10e-01
LAVTGMIETAAMTGFANKDKQELKHAGKVK

SEQ ID NO: 34028 - protein, 38 aa, Homo sapiens
  MAP TO AB023056.1; EXPRESSED IN LUNG, SIGNAL = 2e+02; EXPRESSED IN PLACENTA, SIGNAL =  36; EXPRESSED IN HBL100, SIGNAL = 1.4e+02; EXPRESSED IN FETAL LIVER, SIGNAL =  55; EXPRESSED IN BRAIN, SIGNAL =  20; EXPRESSED IN BT474, SIGNAL =  17; EXPRESSED IN BONE MARROW, SIGNAL =  95; EXPRESSED IN HELA, SIGNAL =  73; EXPRESSED IN ADULT LIVER, SIGNAL =  32; EXPRESSED IN HEART, SIGNAL =  44; SWISSPROT HIT: P30383, EVALUE 8.10e+00; EST_HUMAN HIT: AW389473.1, EVALUE 2.90e+00
QSSQPTIPIVGIVAGLVLLGAVVTGAVVSAVMCRKKNS

SEQ ID NO: 34029 - protein, 25 aa, Homo sapiens
  MAP TO AB023056.1; EXPRESSED IN LUNG, SIGNAL = 2e+02; EXPRESSED IN PLACENTA, SIGNAL =  36; EXPRESSED IN HBL100, SIGNAL = 1.4e+02; EXPRESSED IN FETAL LIVER, SIGNAL =  55; EXPRESSED IN BRAIN, SIGNAL =  20; EXPRESSED IN BT474, SIGNAL =  17; EXPRESSED IN BONE MARROW, SIGNAL =  95; EXPRESSED IN HELA, SIGNAL =  73; EXPRESSED IN ADULT LIVER, SIGNAL =  32; EXPRESSED IN HEART, SIGNAL =  44; EST_HUMAN HIT: AW389473.1, EVALUE 8.00e-12
AVFSAHHPHRGYRCWPGSPWSCSHW

SEQ ID NO: 34030 - protein, 38 aa, Homo sapiens
  MAP TO AB023057.1; EXPRESSED IN PLACENTA, SIGNAL = 5.6; EXPRESSED IN BT474, SIGNAL = 2.4; EXPRESSED IN BONE MARROW, SIGNAL =  23; EXPRESSED IN HBL100, SIGNAL =  23; EXPRESSED IN LUNG, SIGNAL =  27; EXPRESSED IN ADULT LIVER, SIGNAL =   7; EXPRESSED IN BRAIN, SIGNAL = 5.1; EXPRESSED IN FETAL LIVER, SIGNAL = 7.9; EXPRESSED IN HELA, SIGNAL =  18; EXPRESSED IN HEART, SIGNAL = 8.9; EST_HUMAN HIT: BE173139.1, EVALUE 3.80e+00; SWISSPROT HIT: Q09160, EVALUE 1.90e-01; EST_HUMAN HIT: T29734.1, EVALUE 5.60e+00
PSSQPTIPIVGIVAGLVLLVAVVTGAVVAAVMWRKKSS

SEQ ID NO: 34031 - protein, 28 aa, Homo sapiens
  MAP TO AB023057.1; EXPRESSED IN PLACENTA, SIGNAL = 5.6; EXPRESSED IN BT474, SIGNAL = 2.4; EXPRESSED IN BONE MARROW, SIGNAL =  23; EXPRESSED IN HBL100, SIGNAL =  23; EXPRESSED IN LUNG, SIGNAL =  27; EXPRESSED IN ADULT LIVER, SIGNAL =   7; EXPRESSED IN BRAIN, SIGNAL = 5.1; EXPRESSED IN FETAL LIVER, SIGNAL = 7.9; EXPRESSED IN HELA, SIGNAL =  18; EXPRESSED IN HEART, SIGNAL = 8.9; EST_HUMAN HIT: AA379309.1, EVALUE 7.00e-11; SWISSPROT HIT: Q02256, EVALUE 6.40e+00
AIFPAHHPHRGHRCWPGSTCSCGHWSCG

SEQ ID NO: 34032 - protein, 39 aa, Homo sapiens
  MAP TO AB023057.1; EXPRESSED IN LUNG, SIGNAL =  41; EXPRESSED IN HELA, SIGNAL =  24; EXPRESSED IN ADULT LIVER, SIGNAL = 8.6; EXPRESSED IN HEART, SIGNAL = 6.7; EXPRESSED IN PLACENTA, SIGNAL =  11; EXPRESSED IN BT474, SIGNAL = 4.2; EXPRESSED IN FETAL LIVER, SIGNAL =  12; EXPRESSED IN BRAIN, SIGNAL = 3.6; EXPRESSED IN BONE MARROW, SIGNAL =  30; EXPRESSED IN HBL100, SIGNAL =  34; EST_HUMAN HIT: AI123699.1, EVALUE 1.00e-12; SWISSPROT HIT: O25748, EVALUE 3.60e+00
AWGSETLTFTSFPRAVFPAHHPHHGYRCWSGCPCSCSHW

SEQ ID NO: 34033 - protein, 89 aa, Homo sapiens
  MAP TO AB023057.1; EXPRESSED IN PLACENTA, SIGNAL = 1.2; EXPRESSED IN LUNG, SIGNAL = 3.1; EXPRESSED IN ADULT LIVER, SIGNAL =   1; EXPRESSED IN BONE MARROW, SIGNAL = 2.1; EXPRESSED IN HBL100, SIGNAL = 1.8; EXPRESSED IN FETAL LIVER, SIGNAL = 1.5; EXPRESSED IN HELA, SIGNAL = 1.5; EXPRESSED IN BRAIN, SIGNAL = 1.1; EXPRESSED IN BT474, SIGNAL = 0.87; EXPRESSED IN HEART, SIGNAL = 1.1; SWISSPROT HIT: P17693, EVALUE 1.00e-49; EST_HUMAN HIT: AU137175.1, EVALUE 9.00e-49; EST_HUMAN HIT: BE314635.1, EVALUE 3.00e-40
SHSMRYFSAAVSRPGRGEPRFIAMGYVDDTQFVRFDSDSACPRMEPRAPWVEQEGPEYWEEETRNTKAHAQTDRMNLQTLRGYYNQSEA

SEQ ID NO: 34034 - protein, 72 aa, Homo sapiens
  MAP TO AB023057.1; EXPRESSED IN PLACENTA, SIGNAL = 1.2; EXPRESSED IN LUNG, SIGNAL = 3.1; EXPRESSED IN ADULT LIVER, SIGNAL =   1; EXPRESSED IN BONE MARROW, SIGNAL = 2.1; EXPRESSED IN HBL100, SIGNAL = 1.8; EXPRESSED IN FETAL LIVER, SIGNAL = 1.5; EXPRESSED IN HELA, SIGNAL = 1.5; EXPRESSED IN BRAIN, SIGNAL = 1.1; EXPRESSED IN BT474, SIGNAL = 0.87; EXPRESSED IN HEART, SIGNAL = 1.1; EST_HUMAN HIT: BE314635.1, EVALUE 5.00e-09; EST_HUMAN HIT: AU139120.1, EVALUE 1.00e-15
LPLHEVFQRRRVPARPRGAPLHRHGLRGRHAVRAVRQRLGVSEDGAAGAVGGAGGARVLGRGDTEHQGPRTD

SEQ ID NO: 34035 - protein, 161 aa, Homo sapiens
  MAP TO AC003666.1; EXPRESSED IN FETAL LIVER, SIGNAL = 0.72; EXPRESSED IN HEART, SIGNAL = 2.4; EXPRESSED IN BRAIN, SIGNAL = 2.4; EXPRESSED IN ADULT LIVER, SIGNAL = 0.65; EST_HUMAN HIT: AW248103.1, EVALUE 7.00e-58; SWISSPROT HIT: P51794, EVALUE 5.00e-72
SLSVIFPKSCFRELPGLHFGILLLPSVAGGVTRMTVSLVVIMFELTGGLEYIVPLMAAAVTSKWVADAFGKEGIYEAHIHLNGYPFLDVKDEFTHRTLATDVMRPRRGEPPLSVLTQDSMTVEDVETLIKETDYNGFPVVVSRDSERLIGFAQRRELILAI

SEQ ID NO: 34036 - protein, 75 aa, Homo sapiens
  MAP TO AC003666.1; EXPRESSED IN HBL100, SIGNAL = 0.93; EXPRESSED IN FETAL LIVER, SIGNAL = 2.9; EXPRESSED IN LUNG, SIGNAL = 2.5; EXPRESSED IN ADULT LIVER, SIGNAL = 1.4; EXPRESSED IN BRAIN, SIGNAL = 0.97; EXPRESSED IN PLACENTA, SIGNAL = 2.5; EXPRESSED IN BT474, SIGNAL = 0.63; EXPRESSED IN HEART, SIGNAL = 0.81; EXPRESSED IN HELA, SIGNAL = 0.77; EST_HUMAN HIT: H38319.1, EVALUE 6.00e-36; SWISSPROT HIT: P51794, EVALUE 1.00e-36
PILENARQRQEGIVSNSIMYFTEEPPELPANSPHPLKLRRILNLSPFTVTDHTPMETVVDIFRKLGLRQCLVTRS

SEQ ID NO: 34037 - protein, 75 aa, Homo sapiens
  MAP TO AC004480.7; EXPRESSED IN BT474, SIGNAL = 6.9; EXPRESSED IN HEART, SIGNAL = 3.7; EXPRESSED IN PLACENTA, SIGNAL = 3.7; EXPRESSED IN BRAIN, SIGNAL = 7.8; EXPRESSED IN ADULT LIVER, SIGNAL = 4.5; EXPRESSED IN HELA, SIGNAL =   7; EXPRESSED IN LUNG, SIGNAL =   3; EXPRESSED IN FETAL LIVER, SIGNAL = 4.9; EXPRESSED IN HBL100, SIGNAL = 8.1; EXPRESSED IN BONE MARROW, SIGNAL = 6.1; EST_HUMAN HIT: AV726854.1, EVALUE 2.00e-13; EST_HUMAN HIT: AW953059.1, EVALUE 1.00e-13
SLLLVRRYARPCSRIRDAMSSRISLMTGSRNCSKSSSGSSTSTSSGASTSSMSRGRISSCRFLSTAVGAFFSPEP

SEQ ID NO: 34038 - protein, 77 aa, Homo sapiens
  MAP TO AC004876.2; EXPRESSED IN BT474, SIGNAL = 0.77; EXPRESSED IN BONE MARROW, SIGNAL = 0.88; EXPRESSED IN HEART, SIGNAL = 1.5; EXPRESSED IN BRAIN, SIGNAL = 1.1; EXPRESSED IN ADULT LIVER, SIGNAL =   2; EXPRESSED IN LUNG, SIGNAL = 8.4; EXPRESSED IN HBL100, SIGNAL =   3; EXPRESSED IN PLACENTA, SIGNAL = 8.9; EXPRESSED IN HELA, SIGNAL = 1.8; EXPRESSED IN FETAL LIVER, SIGNAL =  20; EST_HUMAN HIT: AI991331.1, EVALUE 4.00e-40; SWISSPROT HIT: P05121, EVALUE 6.00e-41
KGMAPALRHLYKELMGPWNKDEISTTDAIFVQRDLKLVQGFMPHFFRLFRSTVKQVDFSEVERARFIINDWVKTHTK

SEQ ID NO: 34039 - protein, 29 aa, Homo sapiens
  MAP TO AC004876.2; EXPRESSED IN BT474, SIGNAL = 0.77; EXPRESSED IN BONE MARROW, SIGNAL = 0.88; EXPRESSED IN HEART, SIGNAL = 1.5; EXPRESSED IN BRAIN, SIGNAL = 1.1; EXPRESSED IN ADULT LIVER, SIGNAL =   2; EXPRESSED IN LUNG, SIGNAL = 8.4; EXPRESSED IN HBL100, SIGNAL =   3; EXPRESSED IN PLACENTA, SIGNAL = 8.9; EXPRESSED IN HELA, SIGNAL = 1.8; EXPRESSED IN FETAL LIVER, SIGNAL =  20; EST_HUMAN HIT: AA147887.1, EVALUE 2.00e-10; SWISSPROT HIT: P36784, EVALUE 8.30e+00; EST_HUMAN HIT: BF338316.1, EVALUE 3.00e-10
PSGICTRSSWGHGTRMRSAPQTRSSSSGI

SEQ ID NO: 34040 - protein, 230 aa, Homo sapiens
  MAP TO AC004890.2; EXPRESSED IN ADULT LIVER, SIGNAL = 1.3; EXPRESSED IN BT474, SIGNAL = 2.3; EXPRESSED IN HBL100, SIGNAL = 1.7; EXPRESSED IN HELA, SIGNAL =   1; EXPRESSED IN HEART, SIGNAL = 0.78; EXPRESSED IN PLACENTA, SIGNAL = 0.96; EXPRESSED IN BONE MARROW, SIGNAL =   2; EXPRESSED IN FETAL LIVER, SIGNAL = 1.1; EXPRESSED IN LUNG, SIGNAL =   1; SWISSPROT HIT: P18737, EVALUE 4.00e-35; EST_HUMAN HIT: AW246327.1, EVALUE 6.00e-31; EST_HUMAN HIT: BE885790.1, EVALUE 6.00e-31
EELVIKAEGLARSSLCPEVPVPFSSPPAAAKDAFSDVAFKSQQSTSMTPFGRPATDLPEASEGQVTFTQLGSYPLPPPVGEQVFSCHHCGKNLSQDMLLTHQCSHATEHPLPCAQCPKHFTPQADLSSTSQDHASETPPTCPHCARTFTHPSRLTYHLRVHNSTERPFPCPDCPKRFADQARLTSHRRAHASERPFRCAQCGRSFSLKISLLLHQRGHAQERPFSCPQCG

SEQ ID NO: 34041 - protein, 170 aa, Homo sapiens
  MAP TO AC004890.2; EXPRESSED IN HBL100, SIGNAL = 1.4; EXPRESSED IN FETAL LIVER, SIGNAL = 1.8; EXPRESSED IN LUNG, SIGNAL = 1.3; EXPRESSED IN HELA, SIGNAL =   2; EXPRESSED IN BRAIN, SIGNAL = 1.4; EXPRESSED IN BT474, SIGNAL = 3.7; EXPRESSED IN BONE MARROW, SIGNAL = 0.86; EXPRESSED IN PLACENTA, SIGNAL = 2.1; EXPRESSED IN HEART, SIGNAL = 1.1; EXPRESSED IN ADULT LIVER, SIGNAL = 1.1; EST_HUMAN HIT: BE735242.1, EVALUE 1.00e-76; EST_HUMAN HIT: T59201.1, EVALUE 2.00e-23; SWISSPROT HIT: Q06730, EVALUE 1.00e-04
GGVMIKQELQYTQEGPADLPGEFSCIAEEQAFLSPEQTELWGGQGSSVLLETGPGDSTLEEPVGSRVPSSSRTVGCPKQKSHRQVQLDQECGQGLKLKKDTSRPYECSECEITFRYKQQLATHLRSHSGWGSCTPEEPEESLRPRPRLKPQTKKAKLHQCDVCLRSFSCK

SEQ ID NO: 34042 - protein, 115 aa, Homo sapiens
  MAP TO AC004890.2; EXPRESSED IN HELA, SIGNAL = 2.4; EXPRESSED IN BT474, SIGNAL = 4.4; EXPRESSED IN LUNG, SIGNAL = 1.3; EXPRESSED IN ADULT LIVER, SIGNAL = 1.5; EXPRESSED IN BRAIN, SIGNAL = 1.9; EXPRESSED IN HEART, SIGNAL = 0.81; EXPRESSED IN PLACENTA, SIGNAL = 2.4; EXPRESSED IN BONE MARROW, SIGNAL =   3; EXPRESSED IN FETAL LIVER, SIGNAL = 2.4; EXPRESSED IN HBL100, SIGNAL = 4.6; EST_HUMAN HIT: AU119822.1, EVALUE 7.00e-46; EST_HUMAN HIT: AW977845.1, EVALUE 1.00e-32; SWISSPROT HIT: P21884, EVALUE 3.60e+00
MREPQLPTAEISLWTVVAAIQAVERKVDAQASQLLNLEGRTGTAEKKLADCEKTAVEFGNHMESKWAVLGTLLQEYGLLQRRLENLENLLRNRNFWVLRLPPGSKGEAPKVCGGP

SEQ ID NO: 34043 - protein, 146 aa, Homo sapiens
  MAP TO AC004890.2; EXPRESSED IN PLACENTA, SIGNAL = 3.6; EXPRESSED IN BT474, SIGNAL = 8.3; EXPRESSED IN FETAL LIVER, SIGNAL = 3.3; EXPRESSED IN LUNG, SIGNAL = 2.3; EXPRESSED IN ADULT LIVER, SIGNAL = 2.2; EXPRESSED IN BONE MARROW, SIGNAL = 1.8; EXPRESSED IN HBL100, SIGNAL = 5.1; EXPRESSED IN HELA, SIGNAL = 2.8; EXPRESSED IN BRAIN, SIGNAL =   3; EXPRESSED IN HEART, SIGNAL = 2.2; EST_HUMAN HIT: AW296963.1, EVALUE 3.00e-33; SWISSPROT HIT: P22340, EVALUE 6.50e-02; EST_HUMAN HIT: AU119822.1, EVALUE 1.00e-34
DPVSLIHQHRRKRRSTPLTSSTLPSQATEKSSYFQTTEISLWTVVAAIQAVEKKMESQAARLQSLEGRTGTAEKKLADCEKMAVEFGNQLEGKWAVLGTLLQEYGLLQRRLENVENLLRNRNFWILRLPPGSKGEAPKVVSLRIKS

SEQ ID NO: 34044 - protein, 61 aa, Homo sapiens
  MAP TO AC004936.2; EXPRESSED IN HBL100, SIGNAL = 1.1; EXPRESSED IN HELA, SIGNAL = 1.9; EXPRESSED IN ADULT LIVER, SIGNAL = 2.5; EXPRESSED IN HEART, SIGNAL = 0.98; EXPRESSED IN PLACENTA, SIGNAL = 0.96; EXPRESSED IN FETAL LIVER, SIGNAL = 1.4; EXPRESSED IN LUNG, SIGNAL = 1.4; EXPRESSED IN BONE MARROW, SIGNAL = 0.81; EXPRESSED IN BT474, SIGNAL = 1.2; EST_HUMAN HIT: AA776601.1, EVALUE 4.00e-03; SWISSPROT HIT: P34281, EVALUE 7.60e+00
INLEISHRRKIGKFANIWKVNNIFLTNHCHEEIKKKIKKKEKQLKPKTKKEDKNENTIDQN

SEQ ID NO: 34045 - protein, 146 aa, Homo sapiens
  MAP TO AC004967.2; EXPRESSED IN BT474, SIGNAL = 2.6; EXPRESSED IN BONE MARROW, SIGNAL = 1.2; EXPRESSED IN ADULT LIVER, SIGNAL = 2.2; EXPRESSED IN HEART, SIGNAL = 1.7; EXPRESSED IN PLACENTA, SIGNAL = 1.5; EXPRESSED IN LUNG, SIGNAL = 1.5; EXPRESSED IN HBL100, SIGNAL =   2; EXPRESSED IN FETAL LIVER, SIGNAL = 2.1; EXPRESSED IN HELA, SIGNAL = 1.5; EXPRESSED IN BRAIN, SIGNAL = 1.7; EST_HUMAN HIT: BF345274.1, EVALUE 5.00e-28; EST_HUMAN HIT: AA042813.1, EVALUE 2.00e-26; SWISSPROT HIT: P35894, EVALUE 1.00e-26
RIPPPGTLRGSRTAAGPRFALPVPVHVSGHGAEEPAQHPGCQLCLSPPHPHLCWADIGFTLATVPKMIVDMQSHSRVISHAGCLTQMSFFILFACIEGMLLTVMAYDCFVAICRPLHYPVIVNPHLCVFFVLVSFFLSLLDSQLHS

SEQ ID NO: 34046 - protein, 19 aa, Homo sapiens
  MAP TO AC004967.2; EXPRESSED IN BT474, SIGNAL = 2.6; EXPRESSED IN BONE MARROW, SIGNAL = 1.2; EXPRESSED IN ADULT LIVER, SIGNAL = 2.2; EXPRESSED IN HEART, SIGNAL = 1.7; EXPRESSED IN PLACENTA, SIGNAL = 1.5; EXPRESSED IN LUNG, SIGNAL = 1.5; EXPRESSED IN HBL100, SIGNAL =   2; EXPRESSED IN FETAL LIVER, SIGNAL = 2.1; EXPRESSED IN HELA, SIGNAL = 1.5; EXPRESSED IN BRAIN, SIGNAL = 1.7
SWESNRLRKKDTKTKKTQR

SEQ ID NO: 34047 - protein, 165 aa, Homo sapiens
  MAP TO AC004997.2; EXPRESSED IN HEART, SIGNAL = 3.4; EXPRESSED IN LUNG, SIGNAL = 4.2; EXPRESSED IN HELA, SIGNAL = 3.3; EXPRESSED IN ADULT LIVER, SIGNAL = 3.6; EXPRESSED IN BRAIN, SIGNAL = 3.5; EXPRESSED IN PLACENTA, SIGNAL =   4; EXPRESSED IN BT474, SIGNAL = 3.6; EXPRESSED IN BONE MARROW, SIGNAL = 3.7; EXPRESSED IN FETAL LIVER, SIGNAL = 2.9; EXPRESSED IN HBL100, SIGNAL = 3.6; EST_HUMAN HIT: AA424391.1, EVALUE 2.00e-40; SWISSPROT HIT: Q01778, EVALUE 1.40e-01
PVSLPLQVVELPVTERQIEREHLIQLRRWQETRGELQCRSPPRLHGAKAILDAEPGPRPALQPSPSIRLPLDAPLPGSKAKPKPPKQAQKEQRKQMKGRGQLEKPPAPNQAMVVAAAGDACPPQHVPPKDSAPKDSAPQDLAPQVSAHHRSQESLTSQESEDTYL

SEQ ID NO: 34048 - protein, 86 aa, Homo sapiens
  MAP TO AC004997.2; EXPRESSED IN PLACENTA, SIGNAL = 2.8; EXPRESSED IN BT474, SIGNAL = 6.8; EXPRESSED IN BONE MARROW, SIGNAL = 2.1; EXPRESSED IN LUNG, SIGNAL = 3.2; EXPRESSED IN ADULT LIVER, SIGNAL = 2.9; EXPRESSED IN BRAIN, SIGNAL = 2.4; EXPRESSED IN HBL100, SIGNAL = 5.5; EXPRESSED IN FETAL LIVER, SIGNAL = 4.6; EXPRESSED IN HELA, SIGNAL =   3; EXPRESSED IN HEART, SIGNAL = 2.4; EST_HUMAN HIT: BE244751.1, EVALUE 3.00e-44; SWISSPROT HIT: Q15459, EVALUE 4.00e-45; EST_HUMAN HIT: BE243926.1, EVALUE 4.00e-44
VQAQVIQETIVPKEPPPEFEFIADPPSISAFDLDVVKLTAQFVARNGRQFLTQLMQKEQRNYQFDFLRPQHSLFNYFTKLVEQYTK

SEQ ID NO: 34049 - protein, 61 aa, Homo sapiens
  MAP TO AC005006.2; EXPRESSED IN PLACENTA, SIGNAL = 1.4; EXPRESSED IN FETAL LIVER, SIGNAL = 3.4; EXPRESSED IN LUNG, SIGNAL = 1.3; EXPRESSED IN BT474, SIGNAL = 3.3; EXPRESSED IN HEART, SIGNAL = 1.3; EXPRESSED IN BRAIN, SIGNAL =   2; EXPRESSED IN ADULT LIVER, SIGNAL = 1.8; EXPRESSED IN HELA, SIGNAL = 2.8; EXPRESSED IN HBL100, SIGNAL = 4.6; EXPRESSED IN BONE MARROW, SIGNAL = 1.5; EST_HUMAN HIT: BE382692.1, EVALUE 7.00e-31; SWISSPROT HIT: P53261, EVALUE 5.00e-07; EST_HUMAN HIT: BE894946.1, EVALUE 1.00e-30
CYVQPQWVFDSVNARLLLPVAEYFSGVQLPPHLSPFVTEKEGDYVPPEKLKLLALQRGEDP

SEQ ID NO: 34050 - protein, 56 aa, Homo sapiens
  MAP TO AC005006.2; EXPRESSED IN PLACENTA, SIGNAL = 1.2; EXPRESSED IN BT474, SIGNAL = 2.9; EXPRESSED IN BONE MARROW, SIGNAL = 1.4; EXPRESSED IN HBL100, SIGNAL =   4; EXPRESSED IN LUNG, SIGNAL = 1.2; EXPRESSED IN HELA, SIGNAL = 3.3; EXPRESSED IN ADULT LIVER, SIGNAL = 1.4; EXPRESSED IN FETAL LIVER, SIGNAL = 2.4; EXPRESSED IN HEART, SIGNAL = 1.3; EXPRESSED IN BRAIN, SIGNAL = 1.7; EST_HUMAN HIT: BE410233.1, EVALUE 7.00e-30; EST_HUMAN HIT: BE562361.1, EVALUE 1.00e-29; SWISSPROT HIT: P12752, EVALUE 3.00e-01
IPRSSMPCGTWTMPSPCASCFPPSRGLASATCRPFSCAAGSLWSSCTTLSLPVPCA

SEQ ID NO: 34051 - protein, 56 aa, Homo sapiens
  MAP TO AC005006.2; EXPRESSED IN PLACENTA, SIGNAL = 1.2; EXPRESSED IN BT474, SIGNAL = 2.9; EXPRESSED IN BONE MARROW, SIGNAL = 1.4; EXPRESSED IN HBL100, SIGNAL =   4; EXPRESSED IN LUNG, SIGNAL = 1.2; EXPRESSED IN HELA, SIGNAL = 3.3; EXPRESSED IN ADULT LIVER, SIGNAL = 1.4; EXPRESSED IN FETAL LIVER, SIGNAL = 2.4; EXPRESSED IN HEART, SIGNAL = 1.3; EXPRESSED IN BRAIN, SIGNAL = 1.7; SWISSPROT HIT: P53261, EVALUE 5.00e-07; EST_HUMAN HIT: BE562361.1, EVALUE 7.00e-27; EST_HUMAN HIT: AW602062.1, EVALUE 4.00e-27
YPTFIDALRDLDDALSMCFLFSTFPRTGKCHVQTIQLCRRLTVEFMHYIIAARALR

SEQ ID NO: 34052 - protein, 46 aa, Homo sapiens
  MAP TO AC005037.2; EXPRESSED IN FETAL LIVER, SIGNAL = 1.2; EXPRESSED IN HELA, SIGNAL = 1.9; EXPRESSED IN ADULT LIVER, SIGNAL = 1.3; EXPRESSED IN PLACENTA, SIGNAL = 1.3; EXPRESSED IN BONE MARROW, SIGNAL = 0.96; EXPRESSED IN BT474, SIGNAL = 1.2; EXPRESSED IN HEART, SIGNAL = 1.3; EXPRESSED IN BRAIN, SIGNAL = 1.1; EXPRESSED IN LUNG, SIGNAL = 1.3; EXPRESSED IN HBL100, SIGNAL = 1.2; EST_HUMAN HIT: AU130158.1, EVALUE 2.00e-19; SWISSPROT HIT: Q13416, EVALUE 1.00e-20
KLKKERAQLLVNPKKIIKKPEYDLEEDDQEVLKDQNYVEIMGRDVQ

SEQ ID NO: 34053 - protein, 76 aa, Homo sapiens
  MAP TO AC005037.2; EXPRESSED IN LUNG, SIGNAL = 4.3; EXPRESSED IN HEART, SIGNAL = 0.88; EXPRESSED IN PLACENTA, SIGNAL = 2.2; EXPRESSED IN BT474, SIGNAL =   2; EXPRESSED IN HBL100, SIGNAL = 1.8; EXPRESSED IN FETAL LIVER, SIGNAL = 3.4; EXPRESSED IN BRAIN, SIGNAL = 1.5; EXPRESSED IN BONE MARROW, SIGNAL = 6.2; EXPRESSED IN HELA, SIGNAL = 1.1; EXPRESSED IN ADULT LIVER, SIGNAL = 1.7; EST_HUMAN HIT: AU118544.1, EVALUE 3.00e-22; EST_HUMAN HIT: AL040956.1, EVALUE 2.00e-22; SWISSPROT HIT: P49759, EVALUE 3.00e-23
HYLESRSINEKDYHSRRYIDEYRNDYTQGCEPGHRQRDHESRYQNHSSKSSGRSGRSSYKSKHRIHHSTSHRRSHG

SEQ ID NO: 34054 - protein, 62 aa, Homo sapiens
  MAP TO AC005046.2; EXPRESSED IN LUNG, SIGNAL = 1.8; EXPRESSED IN HELA, SIGNAL = 1.5; EXPRESSED IN ADULT LIVER, SIGNAL = 5.9; EXPRESSED IN BRAIN, SIGNAL = 1.6; EXPRESSED IN HEART, SIGNAL = 1.5; EXPRESSED IN PLACENTA, SIGNAL = 1.1; EXPRESSED IN BT474, SIGNAL = 0.98; EXPRESSED IN BONE MARROW, SIGNAL = 1.1; EXPRESSED IN HBL100, SIGNAL = 0.81; EXPRESSED IN FETAL LIVER, SIGNAL = 1.2; SWISSPROT HIT: P40879, EVALUE 2.00e-12; EST_HUMAN HIT: AW604046.1, EVALUE 7.00e-08
PFPILSMMVGLAVSGAVSKAVPDRNATTLGLPNNSNNSSLLDDERVRVAAAASVTVLSGIIQ

SEQ ID NO: 34055 - protein, 48 aa, Homo sapiens
  MAP TO AC005046.2; EXPRESSED IN PLACENTA, SIGNAL = 1.7; EXPRESSED IN BT474, SIGNAL = 2.9; EXPRESSED IN LUNG, SIGNAL = 1.1; EXPRESSED IN BRAIN, SIGNAL = 1.4; EXPRESSED IN BONE MARROW, SIGNAL = 1.4; EXPRESSED IN HBL100, SIGNAL = 1.9; EXPRESSED IN FETAL LIVER, SIGNAL = 2.8; EXPRESSED IN HELA, SIGNAL = 1.9; EXPRESSED IN ADULT LIVER, SIGNAL = 3.1; EXPRESSED IN HEART, SIGNAL = 4.1; EST_HUMAN HIT: H12076.1, EVALUE 5.00e-21; EST_HUMAN HIT: R60374.1, EVALUE 4.00e-21; SWISSPROT HIT: P09622, EVALUE 4.00e-22
VVHVNGYGKITGKNQVTATKADGGTQVIDTKNILIATGSEVTPFPGIT

SEQ ID NO: 34056 - protein, 27 aa, Homo sapiens
  MAP TO AC005046.2; EXPRESSED IN HBL100, SIGNAL = 2.6; EXPRESSED IN ADULT LIVER, SIGNAL = 0.8; EXPRESSED IN HEART, SIGNAL = 1.2; EXPRESSED IN BT474, SIGNAL =   1; EXPRESSED IN HELA, SIGNAL = 1.6; EXPRESSED IN PLACENTA, SIGNAL = 1.7; EXPRESSED IN FETAL LIVER, SIGNAL = 1.9; EXPRESSED IN LUNG, SIGNAL = 1.5; EST_HUMAN HIT: AI370809.1, EVALUE 9.00e-10; EST_HUMAN HIT: AW376279.1, EVALUE 6.00e-10
SARICQCLLQSRHWPVPLFPGSVCSAV

SEQ ID NO: 34057 - protein, 47 aa, Homo sapiens
  MAP TO AB016897.1; EXPRESSED IN LUNG, SIGNAL = 1.8; EXPRESSED IN PLACENTA, SIGNAL = 1.6; EXPRESSED IN BT474, SIGNAL = 2.3; EXPRESSED IN BONE MARROW, SIGNAL = 1.9; EXPRESSED IN HBL100, SIGNAL = 1.6; EXPRESSED IN FETAL LIVER, SIGNAL = 1.7; EXPRESSED IN HELA, SIGNAL = 1.8; EXPRESSED IN BRAIN, SIGNAL = 2.1; EXPRESSED IN ADULT LIVER, SIGNAL = 1.4; EXPRESSED IN HEART, SIGNAL = 1.6; EST_HUMAN HIT: AL041823.1, EVALUE 3.00e-22; SWISSPROT HIT: P55196, EVALUE 4.00e-23
LVTDPDSGLCSHYWGAIIRQQLGHIEAWAEKQGLELAADCHLSRIVQ

SEQ ID NO: 34058 - protein, 47 aa, Homo sapiens
  MAP TO AB016897.1; EXPRESSED IN HBL100, SIGNAL = 3.7; EXPRESSED IN FETAL LIVER, SIGNAL = 3.4; EXPRESSED IN BRAIN, SIGNAL = 4.5; EXPRESSED IN HEART, SIGNAL =   4; EXPRESSED IN ADULT LIVER, SIGNAL = 3.4; EXPRESSED IN PLACENTA, SIGNAL = 3.1; EXPRESSED IN BT474, SIGNAL = 3.1; EXPRESSED IN BONE MARROW, SIGNAL = 4.4; EXPRESSED IN LUNG, SIGNAL = 3.9; EXPRESSED IN HELA, SIGNAL = 3.5; EST_HUMAN HIT: AA424268.1, EVALUE 1.50e+00; SWISSPROT HIT: Q9UJU5, EVALUE 7.00e-01; EST_HUMAN HIT: BF131923.1, EVALUE 7.80e-01
GEVSQEQVLDDASHHQPLPPHHDSPFGPVGHPLLLPHQHGRFVEMYA

SEQ ID NO: 34059 - protein, 36 aa, Homo sapiens
  MAP TO AB016897.1; EXPRESSED IN BRAIN, SIGNAL = 4.2; EXPRESSED IN HEART, SIGNAL = 3.2; EXPRESSED IN HBL100, SIGNAL = 2.7; EXPRESSED IN PLACENTA, SIGNAL = 4.7; EXPRESSED IN BT474, SIGNAL =   3; EXPRESSED IN BONE MARROW, SIGNAL = 4.9; EXPRESSED IN FETAL LIVER, SIGNAL = 3.8; EXPRESSED IN HELA, SIGNAL =   4; EXPRESSED IN ADULT LIVER, SIGNAL = 3.9; EXPRESSED IN LUNG, SIGNAL = 3.9; EST_HUMAN HIT: AW296376.1, EVALUE 5.80e-01
SGPVHPRSHKYQCQNWATQASRAGACGWRRQTRTTA

SEQ ID NO: 34060 - protein, 27 aa, Homo sapiens
  MAP TO Z99756.7; EXPRESSED IN BT474, SIGNAL = 6.6; EXPRESSED IN HBL100, SIGNAL = 6.8; EXPRESSED IN PLACENTA, SIGNAL = 7.3; EXPRESSED IN FETAL LIVER, SIGNAL = 8.9; EXPRESSED IN HELA, SIGNAL = 7.7; EXPRESSED IN ADULT LIVER, SIGNAL = 6.2; EXPRESSED IN HEART, SIGNAL = 5.7; EXPRESSED IN BONE MARROW, SIGNAL = 5.9; EXPRESSED IN BRAIN, SIGNAL = 7.1; EXPRESSED IN LUNG, SIGNAL =  10
NFQLMQPHQTTSFWRPRTMLHHNYHLP

SEQ ID NO: 34061 - protein, 159 aa, Homo sapiens
  MAP TO AB023049.1; EXPRESSED IN BT474, SIGNAL = 4.6; EXPRESSED IN LUNG, SIGNAL =   3; EXPRESSED IN HELA, SIGNAL = 3.2; EXPRESSED IN ADULT LIVER, SIGNAL = 2.3; EXPRESSED IN PLACENTA, SIGNAL =   3; EXPRESSED IN BONE MARROW, SIGNAL = 2.8; EXPRESSED IN HBL100, SIGNAL = 3.4; EXPRESSED IN FETAL LIVER, SIGNAL = 3.3; EXPRESSED IN BRAIN, SIGNAL = 2.3; EXPRESSED IN HEART, SIGNAL =   3; EST_HUMAN HIT: BE905563.1, EVALUE 6.00e-26; SWISSPROT HIT: P06291, EVALUE 1.10e+00; EST_HUMAN HIT: BE386092.1, EVALUE 1.80e+00
DEEGHSPVLGGLGPPFAFNLNSDTDVEEGQQPATEEASSAARRGATVEAKQSEAKVVTEIQLEKDQPLVKERDNDTKVKRGAGNGVVPAGVILERSQPPGEDSDTDVDDDSRPPGRPAEVHLERAQPFGFIDSDTDAEEERIPATPVVIPMKKRKIFHG

SEQ ID NO: 34062 - protein, 42 aa, Homo sapiens
  MAP TO Z98749.11; EXPRESSED IN PLACENTA, SIGNAL = 1.4; EXPRESSED IN BT474, SIGNAL = 1.8; EXPRESSED IN HEART, SIGNAL = 1.4; EXPRESSED IN BRAIN, SIGNAL = 1.1; EXPRESSED IN ADULT LIVER, SIGNAL = 1.1; EXPRESSED IN HELA, SIGNAL = 1.2; EXPRESSED IN LUNG, SIGNAL = 1.3; EXPRESSED IN FETAL LIVER, SIGNAL =   1; EXPRESSED IN HBL100, SIGNAL = 1.4; EXPRESSED IN BONE MARROW, SIGNAL = 1.5
SLPGAECEKHLGQRGARVGQENDHFPTRSTPPPLHCLPGHHP

SEQ ID NO: 34063 - protein, 50 aa, Homo sapiens
  MAP TO Z83851.17; EXPRESSED IN PLACENTA, SIGNAL = 1.7; EXPRESSED IN BONE MARROW, SIGNAL = 2.9; EXPRESSED IN HBL100, SIGNAL = 1.9; EXPRESSED IN BRAIN, SIGNAL = 1.4; EXPRESSED IN HEART, SIGNAL = 1.1; EXPRESSED IN BT474, SIGNAL = 1.5; EXPRESSED IN HELA, SIGNAL = 1.4; EXPRESSED IN FETAL LIVER, SIGNAL = 1.2; EXPRESSED IN LUNG, SIGNAL = 1.5; EXPRESSED IN ADULT LIVER, SIGNAL = 1.1; EST_HUMAN HIT: AI283143.1, EVALUE 3.00e-01; SWISSPROT HIT: P08121, EVALUE 2.30e-01
GDRGEPDRQGVHLGETDVTTQPPPQGEGAMVGAGLGKARGLVPPKRNPPA

SEQ ID NO: 34064 - protein, 21 aa, Homo sapiens
  MAP TO Z83851.17; EXPRESSED IN PLACENTA, SIGNAL = 1.7; EXPRESSED IN BONE MARROW, SIGNAL = 2.9; EXPRESSED IN HBL100, SIGNAL = 1.9; EXPRESSED IN BRAIN, SIGNAL = 1.4; EXPRESSED IN HEART, SIGNAL = 1.1; EXPRESSED IN BT474, SIGNAL = 1.5; EXPRESSED IN HELA, SIGNAL = 1.4; EXPRESSED IN FETAL LIVER, SIGNAL = 1.2; EXPRESSED IN LUNG, SIGNAL = 1.5; EXPRESSED IN ADULT LIVER, SIGNAL = 1.1; EST_HUMAN HIT: AW958503.1, EVALUE 4.30e+00; EST_HUMAN HIT: BE892367.1, EVALUE 6.30e+00
WWGLDWVRHVAWSLQRGIHLQ

SEQ ID NO: 34065 - protein, 70 aa, Homo sapiens
  MAP TO Z83845.14; EXPRESSED IN FETAL LIVER, SIGNAL = 1.3; EXPRESSED IN LUNG, SIGNAL = 0.77; EXPRESSED IN HELA, SIGNAL = 1.1; EXPRESSED IN HEART, SIGNAL = 1.8; EXPRESSED IN PLACENTA, SIGNAL =   3; EXPRESSED IN ADULT LIVER, SIGNAL = 0.73; EXPRESSED IN BRAIN, SIGNAL = 1.4; EXPRESSED IN BT474, SIGNAL = 1.3; EXPRESSED IN BONE MARROW, SIGNAL = 0.78; EXPRESSED IN HBL100, SIGNAL = 1.4; EST_HUMAN HIT: BE746542.1, EVALUE 5.00e-35; SWISSPROT HIT: Q15750, EVALUE 4.00e-36
MIDTEFAKQTSLDAVAQAVVDRVKRIHSDTFASGGERARFCPRHEDMTLLVRNFGYPLGEMSQPTPSPAP

SEQ ID NO: 34066 - protein, 60 aa, Homo sapiens
  MAP TO Z83845.14; EXPRESSED IN FETAL LIVER, SIGNAL = 1.3; EXPRESSED IN LUNG, SIGNAL = 0.77; EXPRESSED IN HELA, SIGNAL = 1.1; EXPRESSED IN HEART, SIGNAL = 1.8; EXPRESSED IN PLACENTA, SIGNAL =   3; EXPRESSED IN ADULT LIVER, SIGNAL = 0.73; EXPRESSED IN BRAIN, SIGNAL = 1.4; EXPRESSED IN BT474, SIGNAL = 1.3; EXPRESSED IN BONE MARROW, SIGNAL = 0.78; EXPRESSED IN HBL100, SIGNAL = 1.4; EST_HUMAN HIT: BE746542.1, EVALUE 1.00e-24; SWISSPROT HIT: P17283, EVALUE 5.10e-01
LPGRSGPGRRGPGEAHPQRHLRQWWGACQVLPPARGHDPASEELWLPAGRNEPAHTEPSP

SEQ ID NO: 34067 - protein, 51 aa, Homo sapiens
  MAP TO Z83845.14; EXPRESSED IN BT474, SIGNAL =   8; EXPRESSED IN BONE MARROW, SIGNAL =  10; EXPRESSED IN HBL100, SIGNAL = 5.3; EXPRESSED IN HELA, SIGNAL = 4.7; EXPRESSED IN BRAIN, SIGNAL = 5.7; EXPRESSED IN PLACENTA, SIGNAL = 8.4; EXPRESSED IN HEART, SIGNAL = 4.4; EXPRESSED IN ADULT LIVER, SIGNAL = 4.1; EXPRESSED IN LUNG, SIGNAL =   6; EXPRESSED IN FETAL LIVER, SIGNAL = 8.9; SWISSPROT HIT: Q15750, EVALUE 7.00e-24; EST_HUMAN HIT: AL118967.1, EVALUE 9.00e-23
SENNCFLYGVFNGYDGNRVTNFVAQRLSAELLLGQLNAEHAEADVRRVLLQ

SEQ ID NO: 34068 - protein, 49 aa, Homo sapiens
  MAP TO L29074.1; EXPRESSED IN FETAL LIVER, SIGNAL = 1.9e+02; EXPRESSED IN LUNG, SIGNAL = 1.3e+02; EXPRESSED IN HELA, SIGNAL = 3.5e+02; EXPRESSED IN ADULT LIVER, SIGNAL = 1e+02; EXPRESSED IN BRAIN, SIGNAL =  40; EXPRESSED IN HBL100, SIGNAL =  84; EXPRESSED IN HEART, SIGNAL =  50; EXPRESSED IN PLACENTA, SIGNAL =  15; EXPRESSED IN BT474, SIGNAL = 2e+02; EXPRESSED IN BONE MARROW, SIGNAL =  57; EST_HUMAN HIT: N28782.1, EVALUE 5.00e-22; SWISSPROT HIT: P25915, EVALUE 2.00e-22
ELYASYVYLSMSYYFDHDDVALKNFAKYFLHQSHEEREHAEELMKLQNQ

SEQ ID NO: 34069 - protein, 23 aa, Homo sapiens
  MAP TO L29074.1; EXPRESSED IN PLACENTA, SIGNAL = 1.8; EXPRESSED IN BT474, SIGNAL = 2.2; EXPRESSED IN LUNG, SIGNAL = 1.9; EXPRESSED IN HELA, SIGNAL = 2.7; EXPRESSED IN FETAL LIVER, SIGNAL = 2.3; EXPRESSED IN BONE MARROW, SIGNAL =   2; EXPRESSED IN HBL100, SIGNAL = 2.7; EXPRESSED IN ADULT LIVER, SIGNAL =   2; EXPRESSED IN BRAIN, SIGNAL = 2.4; EXPRESSED IN HEART, SIGNAL =   2
FGVLQVWSKFGARKFEKEVCELI

SEQ ID NO: 34070 - protein, 70 aa, Homo sapiens
  MAP TO L29074.1; EXPRESSED IN HEART, SIGNAL = 0.79; EXPRESSED IN BRAIN, SIGNAL = 0.98; EXPRESSED IN PLACENTA, SIGNAL = 1.8; EXPRESSED IN BT474, SIGNAL = 0.87; EXPRESSED IN BONE MARROW, SIGNAL = 1.4; EXPRESSED IN FETAL LIVER, SIGNAL = 1.1; EXPRESSED IN HELA, SIGNAL = 1.1; EXPRESSED IN ADULT LIVER, SIGNAL = 1.3; EXPRESSED IN HBL100, SIGNAL = 2.4; EXPRESSED IN LUNG, SIGNAL =   1; EST_HUMAN HIT: AL120230.1, EVALUE 3.00e-06; SWISSPROT HIT: P35922, EVALUE 4.00e-07
TNSEASNASETESDHRDELSDWSLAPTEEERESFLRRGDGRRRGGGGRGQGGRGRGGGFKGMEIFIKKSK

SEQ ID NO: 34071 - protein, 110 aa, Homo sapiens
  MAP TO AP000339.1; EXPRESSED IN BONE MARROW, SIGNAL = 8.6; EXPRESSED IN ADULT LIVER, SIGNAL = 7.7; EXPRESSED IN PLACENTA, SIGNAL = 6.2; EXPRESSED IN BT474, SIGNAL = 6.9; EXPRESSED IN LUNG, SIGNAL =  12; EXPRESSED IN HELA, SIGNAL =  10; EXPRESSED IN BRAIN, SIGNAL =  12; EXPRESSED IN HBL100, SIGNAL = 5.9; EXPRESSED IN FETAL LIVER, SIGNAL = 6.7; EXPRESSED IN HEART, SIGNAL =  11; EST_HUMAN HIT: AW811755.1, EVALUE 3.00e-15; SWISSPROT HIT: Q03530, EVALUE 5.80e+00
LLGNRWCLVTLISSLVVICEILVYPSPEQYTLHPIYSILSLTPFPPFPQVLVLVHFHTSDKDIPETGQHTKERGLMENSQFHVAGEASQSWQKARRSKSHLMWMAAGNDR

SEQ ID NO: 34072 - protein, 83 aa, Homo sapiens; identical to SEQ ID NO: 33665
  MAP TO AP000338.1; EXPRESSED IN LUNG, SIGNAL = 1.2; EXPRESSED IN BRAIN, SIGNAL = 1.2; EXPRESSED IN HEART, SIGNAL = 1.2; EXPRESSED IN HBL100, SIGNAL = 1.6; EXPRESSED IN FETAL LIVER, SIGNAL = 1.2; EXPRESSED IN PLACENTA, SIGNAL = 1.2; EXPRESSED IN BT474, SIGNAL = 1.5; EXPRESSED IN BONE MARROW, SIGNAL = 2.4; EXPRESSED IN HELA, SIGNAL = 0.95; EXPRESSED IN ADULT LIVER, SIGNAL = 1.1; SWISSPROT HIT: Q14689, EVALUE 1.00e-18; EST_HUMAN HIT: BE783710.1, EVALUE 5.00e-16

SEQ ID NO: 34073 - protein, 44 aa, Homo sapiens
  MAP TO AP000338.1; EXPRESSED IN LUNG, SIGNAL = 1.2; EXPRESSED IN BRAIN, SIGNAL = 1.2; EXPRESSED IN HEART, SIGNAL = 1.2; EXPRESSED IN HBL100, SIGNAL = 1.6; EXPRESSED IN FETAL LIVER, SIGNAL = 1.2; EXPRESSED IN PLACENTA, SIGNAL = 1.2; EXPRESSED IN BT474, SIGNAL = 1.5; EXPRESSED IN BONE MARROW, SIGNAL = 2.4; EXPRESSED IN HELA, SIGNAL = 0.95; EXPRESSED IN ADULT LIVER, SIGNAL = 1.1
AGWARAGCPGPGGPGDQRGAGGALPGRGSGGHRGPRGDPYQLSG

SEQ ID NO: 34074 - protein, 38 aa, Homo sapiens
  MAP TO AP000338.1; EXPRESSED IN LUNG, SIGNAL = 3.2; EXPRESSED IN BRAIN, SIGNAL = 1.6; EXPRESSED IN HEART, SIGNAL = 2.4; EXPRESSED IN BT474, SIGNAL = 2.4; EXPRESSED IN BONE MARROW, SIGNAL = 3.2; EXPRESSED IN PLACENTA, SIGNAL = 1.9; EXPRESSED IN ADULT LIVER, SIGNAL = 2.6; EXPRESSED IN HELA, SIGNAL = 4.8; EXPRESSED IN FETAL LIVER, SIGNAL = 2.9; EXPRESSED IN HBL100, SIGNAL = 2.8; EST_HUMAN HIT: AW672963.1, EVALUE 1.00e-06; SWISSPROT HIT: Q14689, EVALUE 2.00e-15
IAVFSVTVLHDDRIVLVAEQRPDASEEDSFQWMSRVLQ

SEQ ID NO: 34075 - protein, 43 aa, Homo sapiens
  MAP TO AP000295.1; EXPRESSED IN BONE MARROW, SIGNAL = 1.7; EXPRESSED IN FETAL LIVER, SIGNAL = 1.6; EXPRESSED IN PLACENTA, SIGNAL = 2.4; EXPRESSED IN HEART, SIGNAL = 1.5; EXPRESSED IN BRAIN, SIGNAL = 0.92; EXPRESSED IN ADULT LIVER, SIGNAL =   2; EXPRESSED IN HELA, SIGNAL = 1.1; EXPRESSED IN LUNG, SIGNAL = 1.5; EXPRESSED IN HBL100, SIGNAL = 2.4; EXPRESSED IN BT474, SIGNAL = 1.7; EST_HUMAN HIT: AA352477.1, EVALUE 5.00e-21; SWISSPROT HIT: Q08334, EVALUE 4.00e-22
ADSLHMRFLAPKIENEYETWTMKNVYNSWTYNVQYWKNGTDEK

SEQ ID NO: 34076 - protein, 37 aa, Homo sapiens
  MAP TO AP000295.1; EXPRESSED IN BT474, SIGNAL = 1.2; EXPRESSED IN BONE MARROW, SIGNAL = 1.4; EXPRESSED IN ADULT LIVER, SIGNAL = 1.5; EXPRESSED IN HEART, SIGNAL = 1.6; EXPRESSED IN HBL100, SIGNAL = 1.7; EXPRESSED IN FETAL LIVER, SIGNAL = 1.8; EXPRESSED IN LUNG, SIGNAL = 1.6; EXPRESSED IN HELA, SIGNAL = 1.3; EXPRESSED IN BRAIN, SIGNAL = 0.88; EXPRESSED IN PLACENTA, SIGNAL = 1.9; EST_HUMAN HIT: AU134299.1, EVALUE 2.00e-16; SWISSPROT HIT: Q08334, EVALUE 1.00e-17
CDFSSLSKYGDHTLRVRAEFADEHSDWVNITFCPVDD

SEQ ID NO: 34077 - protein, 232 aa, Homo sapiens; identical to SEQ ID NO: 33560
  MAP TO AP000295.1; EXPRESSED IN BT474, SIGNAL =   2; EXPRESSED IN BONE MARROW, SIGNAL = 2.7; EXPRESSED IN HELA, SIGNAL = 2.7; EXPRESSED IN ADULT LIVER, SIGNAL = 1.9; EXPRESSED IN PLACENTA, SIGNAL = 2.7; EXPRESSED IN FETAL LIVER, SIGNAL = 2.9; EXPRESSED IN LUNG, SIGNAL = 2.8; EXPRESSED IN BRAIN, SIGNAL = 2.1; EXPRESSED IN HEART, SIGNAL = 2.6; EXPRESSED IN HBL100, SIGNAL = 2.9; SWISSPROT HIT: P48551, EVALUE 1.00e-123; EST_HUMAN HIT: BE315520.1, EVALUE 5.00e-56

SEQ ID NO: 34078 - protein, 53 aa, Homo sapiens
  MAP TO AP000289.1; EXPRESSED IN LUNG, SIGNAL = 2.2; EXPRESSED IN BRAIN, SIGNAL = 2.1; EXPRESSED IN HEART, SIGNAL = 1.7; EXPRESSED IN PLACENTA, SIGNAL = 3.6; EXPRESSED IN BONE MARROW, SIGNAL = 1.3; EXPRESSED IN HBL100, SIGNAL = 1.4; EXPRESSED IN FETAL LIVER, SIGNAL = 1.2; EXPRESSED IN ADULT LIVER, SIGNAL =   2; EXPRESSED IN BT474, SIGNAL = 1.4; EXPRESSED IN HELA, SIGNAL = 2.1; EST_HUMAN HIT: BE814918.1, EVALUE 4.90e+00
VMVVVVVVVVVVLVLFHLLASGGFTHMLPLQSWFPTAMGRRYSLYMSLYQCTG

SEQ ID NO: 34079 - protein, 63 aa, Homo sapiens
  MAP TO AP000279.1; EXPRESSED IN BT474, SIGNAL =   2; EXPRESSED IN HBL100, SIGNAL = 1.5; EXPRESSED IN HELA, SIGNAL = 1.4; EXPRESSED IN ADULT LIVER, SIGNAL = 0.93; EXPRESSED IN PLACENTA, SIGNAL = 1.3; EXPRESSED IN BONE MARROW, SIGNAL =   2; EXPRESSED IN FETAL LIVER, SIGNAL = 1.4; EXPRESSED IN LUNG, SIGNAL =   1; EXPRESSED IN BRAIN, SIGNAL = 1.4; EXPRESSED IN HEART, SIGNAL = 1.1; SWISSPROT HIT: P16383, EVALUE 9.00e-05; EST_HUMAN HIT: BF215569.1, EVALUE 2.00e-21
LDSMKELHKTNRQQHEKHLQSRVDSTRAIERLEGSSGGIGERYKFLQEMRGYVQDLLECFSEK

SEQ ID NO: 34080 - protein, 69 aa, Homo sapiens
  MAP TO AP000275.1; EXPRESSED IN HELA, SIGNAL = 1.3; EXPRESSED IN BT474, SIGNAL = 1.2; EXPRESSED IN LUNG, SIGNAL = 1.5; EXPRESSED IN ADULT LIVER, SIGNAL = 1.3; EXPRESSED IN HEART, SIGNAL = 1.3; EXPRESSED IN PLACENTA, SIGNAL = 1.9; EXPRESSED IN FETAL LIVER, SIGNAL = 1.2; EXPRESSED IN BRAIN, SIGNAL = 2.2; EXPRESSED IN BONE MARROW, SIGNAL = 2.4; EXPRESSED IN HBL100, SIGNAL = 1.4; SWISSPROT HIT: O43426, EVALUE 4.00e-14; EST_HUMAN HIT: AI537253.1, EVALUE 4.00e-13
DVDDYSAEVEELLPQHLQPSSSSGLGTSPSSSPRTSPCQSPTISEGPVPSLPIRPSRAPSRTPGPPSAQ

SEQ ID NO: 34081 - protein, 242 aa, Homo sapiens
  MAP TO AP000275.1; EXPRESSED IN HBL100, SIGNAL = 3.1; EXPRESSED IN ADULT LIVER, SIGNAL = 2.3; EXPRESSED IN BRAIN, SIGNAL =   6; EXPRESSED IN BONE MARROW, SIGNAL = 3.4; EXPRESSED IN LUNG, SIGNAL = 4.5; EXPRESSED IN HELA, SIGNAL = 3.8; EXPRESSED IN HEART, SIGNAL = 2.4; EXPRESSED IN PLACENTA, SIGNAL = 3.3; EXPRESSED IN BT474, SIGNAL = 2.3; EXPRESSED IN FETAL LIVER, SIGNAL = 2.8; SWISSPROT HIT: O43426, EVALUE 1.00e-120; EST_HUMAN HIT: AU131904.1, EVALUE 3.00e-85
LLAVSKAQLSVQTSPVPTPDPKRLIQLPSATQSNVLSSVSCMPTMPPIPARSQSQENMRSSPNPFITGLTRTNPFSDRTAAPGNPFRAKSEESEATSWFSKEEPVTISPFPSLQPLGHNKSRASSSLDGFKDSFDLQGQSTLKISNPKGWVTFEEEEDFGVKGKSKSACSDLLGNQPSSFSGSNLTLNDDWNKGTNVSFCVLPSRRPPPPPVPLLPPGTSPPVDPFTTLASKASPTLDFTER

SEQ ID NO: 34082 - protein, 46 aa, Homo sapiens
  MAP TO AP000275.1; EXPRESSED IN HBL100, SIGNAL = 3.1; EXPRESSED IN ADULT LIVER, SIGNAL = 2.3; EXPRESSED IN BRAIN, SIGNAL =   6; EXPRESSED IN BONE MARROW, SIGNAL = 3.4; EXPRESSED IN LUNG, SIGNAL = 4.5; EXPRESSED IN HELA, SIGNAL = 3.8; EXPRESSED IN HEART, SIGNAL = 2.4; EXPRESSED IN PLACENTA, SIGNAL = 3.3; EXPRESSED IN BT474, SIGNAL = 2.3; EXPRESSED IN FETAL LIVER, SIGNAL = 2.8
SELELEALLACNLQNSKHYFALQKATESTSLGLGWEQVTFEQIAEP

SEQ ID NO: 34083 - protein, 42 aa, Homo sapiens
  MAP TO AP000268.1; EXPRESSED IN PLACENTA, SIGNAL =   2; EXPRESSED IN BT474, SIGNAL = 0.72; EXPRESSED IN FETAL LIVER, SIGNAL = 0.67; EXPRESSED IN LUNG, SIGNAL = 0.81; EXPRESSED IN HEART, SIGNAL = 0.87; EXPRESSED IN BONE MARROW, SIGNAL = 0.68; EXPRESSED IN HELA, SIGNAL =   1; SWISSPROT HIT: Q06458, EVALUE 1.20e+00
LARACLSLMTAMVTQGPEAARDVCSHFDLNKKTLYTLVTKRD

SEQ ID NO: 34084 - protein, 39 aa, Homo sapiens
  MAP TO AP000268.1; EXPRESSED IN PLACENTA, SIGNAL =   2; EXPRESSED IN BT474, SIGNAL = 0.72; EXPRESSED IN FETAL LIVER, SIGNAL = 0.67; EXPRESSED IN LUNG, SIGNAL = 0.81; EXPRESSED IN HEART, SIGNAL = 0.87; EXPRESSED IN BONE MARROW, SIGNAL = 0.68; EXPRESSED IN HELA, SIGNAL =   1; EST_HUMAN HIT: AA643336.1, EVALUE 3.70e+00
VDVSDFLWFPVQVGSRLPEPDDRHGDPGSGSCQGRLQPF

SEQ ID NO: 34085 - protein, 33 aa, Homo sapiens
  MAP TO AP000248.1; EXPRESSED IN PLACENTA, SIGNAL = 1.7; EXPRESSED IN BONE MARROW, SIGNAL = 1.9; EXPRESSED IN HBL100, SIGNAL = 1.7; EXPRESSED IN FETAL LIVER, SIGNAL = 1.4; EXPRESSED IN LUNG, SIGNAL =   2; EXPRESSED IN ADULT LIVER, SIGNAL = 1.7; EXPRESSED IN BT474, SIGNAL = 1.7; EXPRESSED IN HELA, SIGNAL = 1.9; EXPRESSED IN BRAIN, SIGNAL =   2; EXPRESSED IN HEART, SIGNAL = 1.5; EST_HUMAN HIT: AA248382.1, EVALUE 9.00e-08
TETHLSRPEAQEEEEEAGWYHGHNALNPSLSPS

SEQ ID NO: 34086 - protein, 17 aa, Homo sapiens
  MAP TO AP000245.1; EXPRESSED IN LUNG, SIGNAL = 0.87; EXPRESSED IN HELA, SIGNAL = 1.2; EXPRESSED IN ADULT LIVER, SIGNAL = 0.97; EXPRESSED IN BRAIN, SIGNAL = 0.78; EXPRESSED IN HEART, SIGNAL = 0.79; EXPRESSED IN PLACENTA, SIGNAL = 0.64; EXPRESSED IN BT474, SIGNAL = 2.3; EXPRESSED IN BONE MARROW, SIGNAL = 0.93; EXPRESSED IN HBL100, SIGNAL = 1.5; EXPRESSED IN FETAL LIVER, SIGNAL =   1
SPLTVLLEEFFLVLRHW

SEQ ID NO: 34087 - protein, 26 aa, Homo sapiens
  MAP TO AP000245.1; EXPRESSED IN HBL100, SIGNAL = 1.9; EXPRESSED IN FETAL LIVER, SIGNAL =   3; EXPRESSED IN HELA, SIGNAL = 2.2; EXPRESSED IN BRAIN, SIGNAL = 2.3; EXPRESSED IN BT474, SIGNAL = 2.1; EXPRESSED IN BONE MARROW, SIGNAL = 2.2; EXPRESSED IN HEART, SIGNAL =   2; EXPRESSED IN ADULT LIVER, SIGNAL = 2.2; EXPRESSED IN LUNG, SIGNAL = 2.7; EXPRESSED IN PLACENTA, SIGNAL = 3.2
MNMETIYRFYGQEGKAGNVGRKQVDR

SEQ ID NO: 34088 - protein, 245 aa, Homo sapiens
  MAP TO AP000215.1; EXPRESSED IN LUNG, SIGNAL =  10; EXPRESSED IN HELA, SIGNAL =  13; EXPRESSED IN ADULT LIVER, SIGNAL = 7.6; EXPRESSED IN BRAIN, SIGNAL = 9.9; EXPRESSED IN PLACENTA, SIGNAL =  13; EXPRESSED IN BT474, SIGNAL = 7.4; EXPRESSED IN BONE MARROW, SIGNAL =  11; EXPRESSED IN HEART, SIGNAL = 6.8; EXPRESSED IN HBL100, SIGNAL =  11; EXPRESSED IN FETAL LIVER, SIGNAL = 9.2; EST_HUMAN HIT: BF375387.1, EVALUE 2.00e-37; SWISSPROT HIT: O95613, EVALUE 1.00e-107
ELRASLETQRAQSSRLCVALKHEQTAKDNLQKELRIEHSRCEALLAQERSQLSELQKDLAAEKSRTLELSEALRHERLLTEQLSQRTQEACVHQDTQAHHALLQKLKEEKSRVVDLQAMLEKVQQQALHSQQQLEAEAQKHCEALRREKEVSATLKSTVEALHTQKRELRCSLEREREKPAWLQAELEQSHPRLKEQEGRKAARRSAEARQSPAAAEQWRKWQRDKEKLVRAACRRTSTPKNDKQ

SEQ ID NO: 34089 - protein, 87 aa, Homo sapiens
  MAP TO AP000208.1; EXPRESSED IN PLACENTA, SIGNAL = 2.1; EXPRESSED IN BT474, SIGNAL = 1.6; EXPRESSED IN BONE MARROW, SIGNAL = 1.3; EXPRESSED IN HBL100, SIGNAL = 1.4; EXPRESSED IN HEART, SIGNAL = 1.1; EXPRESSED IN FETAL LIVER, SIGNAL = 1.2; EXPRESSED IN LUNG, SIGNAL = 1.5; EXPRESSED IN HELA, SIGNAL = 1.3; EXPRESSED IN ADULT LIVER, SIGNAL = 1.2; EXPRESSED IN BRAIN, SIGNAL = 1.6; EST_HUMAN HIT: AW197823.1, EVALUE 3.00e-12; SWISSPROT HIT: Q13009, EVALUE 2.00e-28
EVPFSSCPFFLVQTTSQTELENWITAIHSACATAVARHHHKEDTLRLLKSEIKKLEQKIDMDEKMKKMGEMQLSSVTDSKKKKTILD

SEQ ID NO: 34090 - protein, 40 aa, Homo sapiens
  MAP TO AP000198.1; EXPRESSED IN PLACENTA, SIGNAL = 9.5; EXPRESSED IN BONE MARROW, SIGNAL = 9.2; EXPRESSED IN HEART, SIGNAL =  13; EXPRESSED IN BRAIN, SIGNAL =  16; EXPRESSED IN HELA, SIGNAL =  21; EXPRESSED IN LUNG, SIGNAL =  23; EXPRESSED IN HBL100, SIGNAL =  13; EXPRESSED IN BT474, SIGNAL =  14; EXPRESSED IN ADULT LIVER, SIGNAL =  13; EXPRESSED IN FETAL LIVER, SIGNAL =  20; EST_HUMAN HIT: AA460816.1, EVALUE 7.20e+00
LASLQLAYCMLHACLHGTFGFPPLGTVFHFANNCYFILDS

SEQ ID NO: 34091 - protein, 35 aa, Homo sapiens
  MAP TO AP000194.1; EXPRESSED IN BT474, SIGNAL = 1.6; EXPRESSED IN BONE MARROW, SIGNAL =   2; EXPRESSED IN HBL100, SIGNAL = 5.8; EXPRESSED IN LUNG, SIGNAL =   3; EXPRESSED IN HELA, SIGNAL = 1.9; EXPRESSED IN ADULT LIVER, SIGNAL =   2; EXPRESSED IN BRAIN, SIGNAL = 2.2; EXPRESSED IN HEART, SIGNAL = 1.8; EXPRESSED IN PLACENTA, SIGNAL = 2.1; EXPRESSED IN FETAL LIVER, SIGNAL = 1.8; EST_HUMAN HIT: BF206516.1, EVALUE 5.70e+00; SWISSPROT HIT: P48764, EVALUE 6.20e+00
VAVICYVIAMWVLRAAIAQVGAVHERMVPCPAGPG

SEQ ID NO: 34092 - protein, 39 aa, Homo sapiens; identical to SEQ ID NO: 33573
  MAP TO AP000189.1; EXPRESSED IN BT474, SIGNAL = 1.9; EXPRESSED IN BRAIN, SIGNAL = 1.6; EXPRESSED IN PLACENTA, SIGNAL = 6.5; EXPRESSED IN BONE MARROW, SIGNAL = 2.2; EXPRESSED IN HBL100, SIGNAL = 2.3; EXPRESSED IN FETAL LIVER, SIGNAL = 2.1; EXPRESSED IN LUNG, SIGNAL = 2.4; EXPRESSED IN HELA, SIGNAL = 1.5; EXPRESSED IN ADULT LIVER, SIGNAL = 1.9; EXPRESSED IN HEART, SIGNAL = 1.7; SWISSPROT HIT: P38484, EVALUE 8.00e-17; EST_HUMAN HIT: BE732802.1, EVALUE 4.00e-16

SEQ ID NO: 34093 - protein, 65 aa, Homo sapiens
  MAP TO AP000188.1; EXPRESSED IN ADULT LIVER, SIGNAL = 1.1; EXPRESSED IN HEART, SIGNAL = 0.86; EXPRESSED IN BT474, SIGNAL =   2; EXPRESSED IN BONE MARROW, SIGNAL = 2.8; EXPRESSED IN HELA, SIGNAL = 1.1; EXPRESSED IN PLACENTA, SIGNAL =   1; EXPRESSED IN HBL100, SIGNAL = 1.9; EXPRESSED IN FETAL LIVER, SIGNAL = 1.4; EXPRESSED IN LUNG, SIGNAL = 1.4; SWISSPROT HIT: P22415, EVALUE 4.00e-14; EST_HUMAN HIT: AW937895.1, EVALUE 1.00e-13
QTEGTGAISGYPTTQFMTQVVIQGDITSYDAVNTEGKAAEIHYTFPPLQWEMGQGVPHQGVQLLL

SEQ ID NO: 34094 - protein, 41 aa, Homo sapiens
  MAP TO AP000188.1; EXPRESSED IN LUNG, SIGNAL =   3; EXPRESSED IN HELA, SIGNAL = 2.5; EXPRESSED IN ADULT LIVER, SIGNAL = 3.2; EXPRESSED IN BRAIN, SIGNAL = 2.8; EXPRESSED IN HEART, SIGNAL = 2.2; EXPRESSED IN PLACENTA, SIGNAL = 1.9; EXPRESSED IN BT474, SIGNAL = 2.3; EXPRESSED IN BONE MARROW, SIGNAL =  15; EXPRESSED IN HBL100, SIGNAL = 2.4; EXPRESSED IN FETAL LIVER, SIGNAL = 2.2; EST_HUMAN HIT: AI904079.1, EVALUE 2.00e-15; SWISSPROT HIT: Q08334, EVALUE 3.00e-16
MVCLALLGCFALLWCVYKKTKYAFSPRNSLPQHLKEVGRME

SEQ ID NO: 34095 - protein, 39 aa, Homo sapiens
  MAP TO AP000188.1; EXPRESSED IN HBL100, SIGNAL = 1.3; EXPRESSED IN FETAL LIVER, SIGNAL = 1.3; EXPRESSED IN HELA, SIGNAL = 1.6; EXPRESSED IN ADULT LIVER, SIGNAL = 1.4; EXPRESSED IN BRAIN, SIGNAL = 0.98; EXPRESSED IN PLACENTA, SIGNAL = 1.5; EXPRESSED IN BONE MARROW, SIGNAL = 1.2; EXPRESSED IN BT474, SIGNAL = 1.1; EXPRESSED IN HEART, SIGNAL = 1.2; EXPRESSED IN LUNG, SIGNAL = 1.4; EST_HUMAN HIT: AA307672.1, EVALUE 4.00e-18; SWISSPROT HIT: Q08334, EVALUE 5.00e-20
HMRFLAPKIENEYETWTMKNVYNSWTYNVQYWKNGTDEK

SEQ ID NO: 34096 - protein, 25 aa, Homo sapiens
  MAP TO AP000185.1; EXPRESSED IN LUNG, SIGNAL =  13; EXPRESSED IN HEART, SIGNAL =  11; EXPRESSED IN PLACENTA, SIGNAL =  21; EXPRESSED IN BT474, SIGNAL = 9.3; EXPRESSED IN BONE MARROW, SIGNAL =  16; EXPRESSED IN HBL100, SIGNAL =  13; EXPRESSED IN FETAL LIVER, SIGNAL =  19; EXPRESSED IN ADULT LIVER, SIGNAL =  14; EXPRESSED IN BRAIN, SIGNAL =  18; EXPRESSED IN HELA, SIGNAL =  11
MAAFGHQLPVCSLSPENLCGHSSQA

SEQ ID NO: 34097 - protein, 53 aa, Homo sapiens
  MAP TO AP000184.1; EXPRESSED IN PLACENTA, SIGNAL = 3.3; EXPRESSED IN BT474, SIGNAL = 2.8; EXPRESSED IN BONE MARROW, SIGNAL = 4.2; EXPRESSED IN LUNG, SIGNAL = 3.4; EXPRESSED IN ADULT LIVER, SIGNAL = 3.1; EXPRESSED IN BRAIN, SIGNAL = 2.9; EXPRESSED IN HBL100, SIGNAL = 2.8; EXPRESSED IN FETAL LIVER, SIGNAL = 3.8; EXPRESSED IN HELA, SIGNAL = 2.5; EXPRESSED IN HEART, SIGNAL = 2.8; SWISSPROT HIT: O64459, EVALUE 5.90e+00; EST_HUMAN HIT: AA253293.1, EVALUE 5.70e-02
MKQVTGSAHTQGEGSTQGCEYQEVRTVGPPQGLSPTPGDYEASKKMEHSPVDR

SEQ ID NO: 34098 - protein, 18 aa, Homo sapiens
  MAP TO AP000184.1; EXPRESSED IN PLACENTA, SIGNAL = 3.3; EXPRESSED IN BT474, SIGNAL = 2.8; EXPRESSED IN BONE MARROW, SIGNAL = 4.2; EXPRESSED IN LUNG, SIGNAL = 3.4; EXPRESSED IN ADULT LIVER, SIGNAL = 3.1; EXPRESSED IN BRAIN, SIGNAL = 2.9; EXPRESSED IN HBL100, SIGNAL = 2.8; EXPRESSED IN FETAL LIVER, SIGNAL = 3.8; EXPRESSED IN HELA, SIGNAL = 2.5; EXPRESSED IN HEART, SIGNAL = 2.8
EASHRVCPHSRGGQHTRV

SEQ ID NO: 34099 - protein, 39 aa, Homo sapiens
  MAP TO AP000179.1; EXPRESSED IN HBL100, SIGNAL =   5; EXPRESSED IN BRAIN, SIGNAL = 6.4; EXPRESSED IN BT474, SIGNAL =   3; EXPRESSED IN BONE MARROW, SIGNAL = 6.7; EXPRESSED IN FETAL LIVER, SIGNAL = 5.1; EXPRESSED IN HELA, SIGNAL = 7.2; EXPRESSED IN ADULT LIVER, SIGNAL = 3.5; EXPRESSED IN PLACENTA, SIGNAL =   4; EXPRESSED IN LUNG, SIGNAL = 5.4; EXPRESSED IN HEART, SIGNAL = 5.2; EST_HUMAN HIT: N57483.1, EVALUE 1.00e-09; SWISSPROT HIT: O09127, EVALUE 8.10e+00
TYGRRTQERDICSSKAERLPPFGMCFCVCISQGSLEGQN

SEQ ID NO: 34100 - protein, 42 aa, Homo sapiens; identical to SEQ ID NO: 34083
  MAP TO AP000179.1; EXPRESSED IN PLACENTA, SIGNAL = 4.9; EXPRESSED IN BT474, SIGNAL = 3.6; EXPRESSED IN BONE MARROW, SIGNAL = 4.7; EXPRESSED IN HEART, SIGNAL = 3.9; EXPRESSED IN ADULT LIVER, SIGNAL = 3.9; EXPRESSED IN HBL100, SIGNAL = 3.8; EXPRESSED IN FETAL LIVER, SIGNAL = 4.5; EXPRESSED IN LUNG, SIGNAL = 5.6; EXPRESSED IN HELA, SIGNAL = 5.5; EXPRESSED IN BRAIN, SIGNAL = 5.1; SWISSPROT HIT: Q06458, EVALUE 1.20e+00

SEQ ID NO: 34101 - protein, 43 aa, Homo sapiens
  MAP TO AP000179.1; EXPRESSED IN PLACENTA, SIGNAL = 4.9; EXPRESSED IN BT474, SIGNAL = 3.6; EXPRESSED IN BONE MARROW, SIGNAL = 4.7; EXPRESSED IN HEART, SIGNAL = 3.9; EXPRESSED IN ADULT LIVER, SIGNAL = 3.9; EXPRESSED IN HBL100, SIGNAL = 3.8; EXPRESSED IN FETAL LIVER, SIGNAL = 4.5; EXPRESSED IN LUNG, SIGNAL = 5.6; EXPRESSED IN HELA, SIGNAL = 5.5; EXPRESSED IN BRAIN, SIGNAL = 5.1; EST_HUMAN HIT: AA643336.1, EVALUE 3.60e+00
ASAVVDVSDFLWFPVQVGSRLPEPDDRHGDPGSGSCQGRLQPF

SEQ ID NO: 34102 - protein, 58 aa, Homo sapiens; identical to SEQ ID NO: 33567
  MAP TO AP000178.1; EXPRESSED IN BT474, SIGNAL = 3.8; EXPRESSED IN BONE MARROW, SIGNAL = 3.7; EXPRESSED IN FETAL LIVER, SIGNAL = 3.1; EXPRESSED IN HELA, SIGNAL = 2.4; EXPRESSED IN PLACENTA, SIGNAL = 4.2; EXPRESSED IN HEART, SIGNAL = 2.4; EXPRESSED IN BRAIN, SIGNAL = 2.9; EXPRESSED IN ADULT LIVER, SIGNAL = 2.7; EXPRESSED IN LUNG, SIGNAL = 2.8; EXPRESSED IN HBL100, SIGNAL = 3.2; SWISSPROT HIT: P48313, EVALUE 7.60e+00; EST_HUMAN HIT: BF334583.1, EVALUE 4.00e-23

SEQ ID NO: 34103 - protein, 24 aa, Homo sapiens
  MAP TO AP000178.1; EXPRESSED IN BT474, SIGNAL = 3.8; EXPRESSED IN BONE MARROW, SIGNAL = 3.7; EXPRESSED IN FETAL LIVER, SIGNAL = 3.1; EXPRESSED IN HELA, SIGNAL = 2.4; EXPRESSED IN PLACENTA, SIGNAL = 4.2; EXPRESSED IN HEART, SIGNAL = 2.4; EXPRESSED IN BRAIN, SIGNAL = 2.9; EXPRESSED IN ADULT LIVER, SIGNAL = 2.7; EXPRESSED IN LUNG, SIGNAL = 2.8; EXPRESSED IN HBL100, SIGNAL = 3.2; EST_HUMAN HIT: BF334583.1, EVALUE 2.00e-08
GQHLSEAHSLIPYFCHFEEGIKNC

SEQ ID NO: 34104 - protein, 49 aa, Homo sapiens
  MAP TO AP000175.1; EXPRESSED IN LUNG, SIGNAL = 1.8; EXPRESSED IN PLACENTA, SIGNAL = 1.2; EXPRESSED IN BT474, SIGNAL = 1.2; EXPRESSED IN BONE MARROW, SIGNAL = 1.8; EXPRESSED IN HBL100, SIGNAL = 1.2; EXPRESSED IN FETAL LIVER, SIGNAL = 1.2; EXPRESSED IN HELA, SIGNAL = 1.8; EXPRESSED IN ADULT LIVER, SIGNAL = 1.4; EXPRESSED IN BRAIN, SIGNAL =   2; EXPRESSED IN HEART, SIGNAL = 1.5
QSLHSSDGQGQVTKRKQKLVMVEKEEEEEEMTRSQDWLWSSSRAGSLLP

SEQ ID NO: 34105 - protein, 63 aa, Homo sapiens
  MAP TO AP000175.1; EXPRESSED IN ADULT LIVER, SIGNAL = 2.6; EXPRESSED IN BONE MARROW, SIGNAL = 1.9; EXPRESSED IN HBL100, SIGNAL = 1.7; EXPRESSED IN HELA, SIGNAL = 2.2; EXPRESSED IN BRAIN, SIGNAL = 2.7; EXPRESSED IN HEART, SIGNAL =   2; EXPRESSED IN PLACENTA, SIGNAL = 1.7; EXPRESSED IN BT474, SIGNAL = 1.4; EXPRESSED IN LUNG, SIGNAL = 2.1; EXPRESSED IN FETAL LIVER, SIGNAL = 1.6; SWISSPROT HIT: P30995, EVALUE 4.40e+00
SVERYFPEKLLNNMNEKIDELSWFANALKVEGKNVKKKSLFFLLTHGEVRGGVALIVNTKHRL

SEQ ID NO: 34106 - protein, 220 aa, Homo sapiens
  MAP TO AP000175.1; EXPRESSED IN PLACENTA, SIGNAL = 1.5; EXPRESSED IN ADULT LIVER, SIGNAL = 1.3; EXPRESSED IN HEART, SIGNAL = 1.3; EXPRESSED IN LUNG, SIGNAL = 1.2; EXPRESSED IN BT474, SIGNAL = 1.1; EXPRESSED IN BONE MARROW, SIGNAL = 1.4; EXPRESSED IN HBL100, SIGNAL = 0.86; EXPRESSED IN FETAL LIVER, SIGNAL =   1; EXPRESSED IN HELA, SIGNAL = 1.1; EXPRESSED IN BRAIN, SIGNAL = 0.87; SWISSPROT HIT: P04930, EVALUE 1.10e+00
VDLDRVDPDRVDLDGVDPDGVDPDGVDPNGVDLDEVALDGVHLDGVDLDTVDLDGADPDGVDPDGVDLDGVGLNGVHLDGVDLDGVDLDGVDLDEVDLDGLDLDGVDSDGVDPDRVDLDGVNPDGVHLDGAHLDEVHLDGVDLDGIHLDGVDLDTVDLDGVDLDTVDLDGVDPNGEDLDGVDLDGVDLDGMDLDGIDLGGIDLDGGNEPLGFQLGLWSLT

SEQ ID NO: 34107 - protein, 132 aa, Homo sapiens
  MAP TO AP000175.1; EXPRESSED IN PLACENTA, SIGNAL = 1.5; EXPRESSED IN ADULT LIVER, SIGNAL = 1.3; EXPRESSED IN HEART, SIGNAL = 1.3; EXPRESSED IN LUNG, SIGNAL = 1.2; EXPRESSED IN BT474, SIGNAL = 1.1; EXPRESSED IN BONE MARROW, SIGNAL = 1.4; EXPRESSED IN HBL100, SIGNAL = 0.86; EXPRESSED IN FETAL LIVER, SIGNAL =   1; EXPRESSED IN HELA, SIGNAL = 1.1; EXPRESSED IN BRAIN, SIGNAL = 0.87; SWISSPROT HIT: P15305, EVALUE 4.00e-01; EST_HUMAN HIT: BE074361.1, EVALUE 3.00e-09
SIQIHSIQVLSIRVHSIQVHCIQVHSIQVHCIQVHSIQVNSIQVHSIQVNFIQVRSIQVHSIRIHSIQIHSIWVHSIRVHSIQVQSIQIHFIQVHSIQIHSIQVHSIQVHSIQAHSIQVHSIRVHSIWVRSI

SEQ ID NO: 34108 - protein, 27 aa, Homo sapiens
  MAP TO AP000175.1; EXPRESSED IN PLACENTA, SIGNAL = 1.5; EXPRESSED IN ADULT LIVER, SIGNAL = 1.3; EXPRESSED IN HEART, SIGNAL = 1.3; EXPRESSED IN LUNG, SIGNAL = 1.2; EXPRESSED IN BT474, SIGNAL = 1.1; EXPRESSED IN BONE MARROW, SIGNAL = 1.4; EXPRESSED IN HBL100, SIGNAL = 0.86; EXPRESSED IN FETAL LIVER, SIGNAL =   1; EXPRESSED IN HELA, SIGNAL = 1.1; EXPRESSED IN BRAIN, SIGNAL = 0.87; EST_HUMAN HIT: AW175873.1, EVALUE 6.00e-04
SIWVHSIRVHSIQVHSIWVHSIQVHSI

SEQ ID NO: 34109 - protein, 218 aa, Homo sapiens; identical to SEQ ID NO: 33631
  MAP TO AP000175.1; EXPRESSED IN PLACENTA, SIGNAL = 1.7; EXPRESSED IN BT474, SIGNAL = 1.8; EXPRESSED IN FETAL LIVER, SIGNAL = 1.7; EXPRESSED IN HELA, SIGNAL = 1.6; EXPRESSED IN ADULT LIVER, SIGNAL = 1.6; EXPRESSED IN BONE MARROW, SIGNAL = 1.6; EXPRESSED IN HBL100, SIGNAL = 1.6; EXPRESSED IN LUNG, SIGNAL = 1.7; EXPRESSED IN BRAIN, SIGNAL =   2; EXPRESSED IN HEART, SIGNAL = 1.5; SWISSPROT HIT: P57058, EVALUE 1.00e-109; EST_HUMAN HIT: BF529471.1, EVALUE 2.00e-87

SEQ ID NO: 34110 - protein, 98 aa, Homo sapiens
  MAP TO AP000174.1; EXPRESSED IN BONE MARROW, SIGNAL = 2.6; EXPRESSED IN ADULT LIVER, SIGNAL = 2.2; EXPRESSED IN PLACENTA, SIGNAL = 2.5; EXPRESSED IN BT474, SIGNAL = 2.2; EXPRESSED IN HBL100, SIGNAL = 2.2; EXPRESSED IN LUNG, SIGNAL = 3.7; EXPRESSED IN HELA, SIGNAL = 2.7; EXPRESSED IN BRAIN, SIGNAL = 4.3; EXPRESSED IN FETAL LIVER, SIGNAL = 2.6; EXPRESSED IN HEART, SIGNAL = 4.4; SWISSPROT HIT: P57058, EVALUE 1.00e-51; EST_HUMAN HIT: BF114883.1, EVALUE 1.00e-50
VAIKVIDKKRAKKDTYVTKNLRREGQIQQMIRHPNITQLLDILETENSYYLVMELCPGGNLMHKIYEKKRLEESEARRYIRQLISAVEHLHRAGVVHR

SEQ ID NO: 34111 - protein, 56 aa, Homo sapiens
  MAP TO AP000169.1; EXPRESSED IN HBL100, SIGNAL = 4.7; EXPRESSED IN BRAIN, SIGNAL = 5.6; EXPRESSED IN PLACENTA, SIGNAL = 3.1; EXPRESSED IN BT474, SIGNAL = 2.9; EXPRESSED IN BONE MARROW, SIGNAL = 1.7; EXPRESSED IN FETAL LIVER, SIGNAL = 6.6; EXPRESSED IN HELA, SIGNAL =   2; EXPRESSED IN ADULT LIVER, SIGNAL = 8.2; EXPRESSED IN HEART, SIGNAL = 5.3; EXPRESSED IN LUNG, SIGNAL = 4.9; EST_HUMAN HIT: AU121754.1, EVALUE 4.00e-14; SWISSPROT HIT: P53805, EVALUE 3.00e-15
EKYELHAATDTTPSVVVHVCESDQEKEEEEEMERMRRPKPKIIQTRRPEYTPIHLS

SEQ ID NO: 34112 - protein, 20 aa, Homo sapiens
  MAP TO AP000168.1; EXPRESSED IN HELA, SIGNAL = 2.6; EXPRESSED IN ADULT LIVER, SIGNAL = 3.6; EXPRESSED IN HEART, SIGNAL = 3.9; EXPRESSED IN BT474, SIGNAL = 2.4; EXPRESSED IN BONE MARROW, SIGNAL = 1.8; EXPRESSED IN HBL100, SIGNAL = 1.8; EXPRESSED IN BRAIN, SIGNAL = 2.8; EXPRESSED IN PLACENTA, SIGNAL = 1.8; EXPRESSED IN FETAL LIVER, SIGNAL = 2.3; EXPRESSED IN LUNG, SIGNAL = 3.2
GVPGKFELQQWNLNAQDDPV

SEQ ID NO: 34113 - protein, 28 aa, Homo sapiens
  MAP TO AP000168.1; EXPRESSED IN BONE MARROW, SIGNAL = 1.8; EXPRESSED IN FETAL LIVER, SIGNAL = 1.6; EXPRESSED IN LUNG, SIGNAL = 1.4; EXPRESSED IN PLACENTA, SIGNAL = 2.5; EXPRESSED IN HEART, SIGNAL = 2.4; EXPRESSED IN BRAIN, SIGNAL = 1.2; EXPRESSED IN ADULT LIVER, SIGNAL = 1.4; EXPRESSED IN HELA, SIGNAL = 1.4; EXPRESSED IN HBL100, SIGNAL = 1.8; EXPRESSED IN BT474, SIGNAL = 1.7; EST_HUMAN HIT: AI934364.1, EVALUE 1.00e-10
YCSQWSLQTPSSHPTHLQGRLSDQLPEM

SEQ ID NO: 34114 - protein, 27 aa, Homo sapiens
  MAP TO AP000168.1; EXPRESSED IN BONE MARROW, SIGNAL = 1.8; EXPRESSED IN FETAL LIVER, SIGNAL = 1.6; EXPRESSED IN LUNG, SIGNAL = 1.4; EXPRESSED IN PLACENTA, SIGNAL = 2.5; EXPRESSED IN HEART, SIGNAL = 2.4; EXPRESSED IN BRAIN, SIGNAL = 1.2; EXPRESSED IN ADULT LIVER, SIGNAL = 1.4; EXPRESSED IN HELA, SIGNAL = 1.4; EXPRESSED IN HBL100, SIGNAL = 1.8; EXPRESSED IN BT474, SIGNAL = 1.7; EST_HUMAN HIT: AI934364.1, EVALUE 2.00e-08
IAHNGAYKPLVPIQHISKADSQTSSQK

SEQ ID NO: 34115 - protein, 34 aa, Homo sapiens
  MAP TO AP000165.1; EXPRESSED IN BT474, SIGNAL = 1.4; EXPRESSED IN BONE MARROW, SIGNAL = 2.1; EXPRESSED IN HELA, SIGNAL =   2; EXPRESSED IN ADULT LIVER, SIGNAL = 1.6; EXPRESSED IN PLACENTA, SIGNAL = 1.5; EXPRESSED IN HBL100, SIGNAL = 1.3; EXPRESSED IN FETAL LIVER, SIGNAL = 1.5; EXPRESSED IN LUNG, SIGNAL = 2.1; EXPRESSED IN BRAIN, SIGNAL = 2.3; EXPRESSED IN HEART, SIGNAL = 2.4; EST_HUMAN HIT: BE160525.1, EVALUE 1.30e+00
MQVLMQQGLGSAKNPISYKFPDDAGAAGPQTTLW

SEQ ID NO: 34116 - protein, 34 aa, Homo sapiens
  MAP TO AP000165.1; EXPRESSED IN BT474, SIGNAL = 1.4; EXPRESSED IN BONE MARROW, SIGNAL = 2.1; EXPRESSED IN HELA, SIGNAL =   2; EXPRESSED IN ADULT LIVER, SIGNAL = 1.6; EXPRESSED IN PLACENTA, SIGNAL = 1.5; EXPRESSED IN HBL100, SIGNAL = 1.3; EXPRESSED IN FETAL LIVER, SIGNAL = 1.5; EXPRESSED IN LUNG, SIGNAL = 2.1; EXPRESSED IN BRAIN, SIGNAL = 2.3; EXPRESSED IN HEART, SIGNAL = 2.4; EST_HUMAN HIT: AA746278.1, EVALUE 5.20e-02; SWISSPROT HIT: P32599, EVALUE 4.80e+00
PKCGLWASSTCVIWELVRNGILSRSQTLLHQNLH

SEQ ID NO: 34117 - protein, 22 aa, Homo sapiens
  MAP TO AP000154.1; EXPRESSED IN PLACENTA, SIGNAL = 1.2; EXPRESSED IN BT474, SIGNAL = 1.1; EXPRESSED IN BONE MARROW, SIGNAL = 1.9; EXPRESSED IN HBL100, SIGNAL = 0.98; EXPRESSED IN LUNG, SIGNAL = 1.5; EXPRESSED IN HELA, SIGNAL = 1.3; EXPRESSED IN ADULT LIVER, SIGNAL = 1.3; EXPRESSED IN BRAIN, SIGNAL = 1.3; EXPRESSED IN FETAL LIVER, SIGNAL =   1; EXPRESSED IN HEART, SIGNAL = 1.3
PVLHADLDFRDHIPRPSAGWSL

SEQ ID NO: 34118 - protein, 86 aa, Homo sapiens
  MAP TO AP000154.1; EXPRESSED IN HEART, SIGNAL = 1.2; EXPRESSED IN FETAL LIVER, SIGNAL = 1.6; EXPRESSED IN LUNG, SIGNAL = 1.5; EXPRESSED IN HELA, SIGNAL = 1.4; EXPRESSED IN BRAIN, SIGNAL = 1.4; EXPRESSED IN PLACENTA, SIGNAL = 2.2; EXPRESSED IN BT474, SIGNAL = 1.7; EXPRESSED IN BONE MARROW, SIGNAL = 3.1; EXPRESSED IN HBL100, SIGNAL =   2; EXPRESSED IN ADULT LIVER, SIGNAL = 1.1; EST_HUMAN HIT: AU119258.1, EVALUE 5.00e-27; SWISSPROT HIT: Q63470, EVALUE 5.00e-28
ETGGPGGRRAGESGHTVADYLKFKDLILRMLDYDPKTRIQPYYALQHSFFKKTADEGTNTSNSVSTSPAMEQSQSSGTTSSTSSSS

SEQ ID NO: 34119 - protein, 18 aa, Homo sapiens
  MAP TO AP000154.1; EXPRESSED IN HEART, SIGNAL = 1.2; EXPRESSED IN FETAL LIVER, SIGNAL = 1.6; EXPRESSED IN LUNG, SIGNAL = 1.5; EXPRESSED IN HELA, SIGNAL = 1.4; EXPRESSED IN BRAIN, SIGNAL = 1.4; EXPRESSED IN PLACENTA, SIGNAL = 2.2; EXPRESSED IN BT474, SIGNAL = 1.7; EXPRESSED IN BONE MARROW, SIGNAL = 3.1; EXPRESSED IN HBL100, SIGNAL =   2; EXPRESSED IN ADULT LIVER, SIGNAL = 1.1; EST_HUMAN HIT: BE168032.1, EVALUE 1.00e-05
GNRRTWWATCWGVRSYGR

SEQ ID NO: 34120 - protein, 50 aa, Homo sapiens
  MAP TO AP000154.1; EXPRESSED IN FETAL LIVER, SIGNAL = 1.9; EXPRESSED IN BRAIN, SIGNAL =   2; EXPRESSED IN HEART, SIGNAL = 1.3; EXPRESSED IN PLACENTA, SIGNAL = 1.9; EXPRESSED IN BT474, SIGNAL = 2.1; EXPRESSED IN BONE MARROW, SIGNAL = 1.5; EXPRESSED IN ADULT LIVER, SIGNAL = 1.2; EXPRESSED IN HELA, SIGNAL = 1.5; EXPRESSED IN LUNG, SIGNAL = 1.9; EXPRESSED IN HBL100, SIGNAL = 1.8; SWISSPROT HIT: Q13627, EVALUE 9.00e-24; EST_HUMAN HIT: BE817813.1, EVALUE 1.00e-22
SFSFHAAGLQMAGQMPHSHQYSDRRQPNISDQQVSALSYSDQIQQPLTNQ

SEQ ID NO: 34121 - protein, 22 aa, Homo sapiens
  MAP TO AP000154.1; EXPRESSED IN FETAL LIVER, SIGNAL = 1.9; EXPRESSED IN BRAIN, SIGNAL =   2; EXPRESSED IN HEART, SIGNAL = 1.3; EXPRESSED IN PLACENTA, SIGNAL = 1.9; EXPRESSED IN BT474, SIGNAL = 2.1; EXPRESSED IN BONE MARROW, SIGNAL = 1.5; EXPRESSED IN ADULT LIVER, SIGNAL = 1.2; EXPRESSED IN HELA, SIGNAL = 1.5; EXPRESSED IN LUNG, SIGNAL = 1.9; EXPRESSED IN HBL100, SIGNAL = 1.8; EST_HUMAN HIT: BE817813.1, EVALUE 9.00e-08
VIFIPCCWPSDGWTDAPFTSVQ

SEQ ID NO: 34122 - protein, 60 aa, Homo sapiens
  MAP TO AP000144.1; EXPRESSED IN BONE MARROW, SIGNAL =  11; EXPRESSED IN LUNG, SIGNAL =  10; EXPRESSED IN BT474, SIGNAL = 8.6; EXPRESSED IN HBL100, SIGNAL = 8.4; EXPRESSED IN FETAL LIVER, SIGNAL = 8.2; EXPRESSED IN HELA, SIGNAL = 6.4; EXPRESSED IN ADULT LIVER, SIGNAL =   7; EXPRESSED IN BRAIN, SIGNAL = 7.6; EXPRESSED IN PLACENTA, SIGNAL =  13; EXPRESSED IN HEART, SIGNAL = 5.9; EST_HUMAN HIT: AA468646.1, EVALUE 6.00e-20; SWISSPROT HIT: O83558, EVALUE 2.30e-01
LGRGSQTPIFDFCALAGSTPHGSCQGLQLAPSEATIRALCWPLSAMAGAAGTQGTKSPGC

SEQ ID NO: 34123 - protein, 47 aa, Homo sapiens
  MAP TO AP000139.1; EXPRESSED IN BONE MARROW, SIGNAL =  16; EXPRESSED IN LUNG, SIGNAL =  11; EXPRESSED IN HEART, SIGNAL =  10; EXPRESSED IN BRAIN, SIGNAL =  12; EXPRESSED IN PLACENTA, SIGNAL =  13; EXPRESSED IN BT474, SIGNAL =  14; EXPRESSED IN HBL100, SIGNAL =  34; EXPRESSED IN FETAL LIVER, SIGNAL =  13; EXPRESSED IN HELA, SIGNAL =  16; EXPRESSED IN ADULT LIVER, SIGNAL = 9.6; EST_HUMAN HIT: AV690294.1, EVALUE 3.00e-10
TNSGHAAFKNCNTARVHGFMLEVGKTKNPPIPDTFWRPRRDFCLSLS

SEQ ID NO: 34124 - protein, 112 aa, Homo sapiens
  MAP TO AP000139.1; EXPRESSED IN PLACENTA, SIGNAL = 2.8; EXPRESSED IN LUNG, SIGNAL = 1.5; EXPRESSED IN BRAIN, SIGNAL = 1.6; EXPRESSED IN HEART, SIGNAL = 1.1; EXPRESSED IN HBL100, SIGNAL = 1.7; EXPRESSED IN FETAL LIVER, SIGNAL = 2.8; EXPRESSED IN HELA, SIGNAL = 1.3; EXPRESSED IN BT474, SIGNAL =   2; EXPRESSED IN BONE MARROW, SIGNAL = 2.2; EXPRESSED IN ADULT LIVER, SIGNAL = 1.5; EST_HUMAN HIT: AU140126.1, EVALUE 1.00e-22; SWISSPROT HIT: Q06546, EVALUE 4.00e-41
IEPKLNILEIVKPADTVEVVIDPDAHHAESEAHLVEEAQVITLDGTKHITTISDETSEQVTRWAAALEGYRKEQERLGIPYGNKMHNSILGRIIGIKLDIEDTRVSYNLFYM

SEQ ID NO: 34125 - protein, 56 aa, Homo sapiens; identical to SEQ ID NO: 33712
  MAP TO AP000139.1; EXPRESSED IN PLACENTA, SIGNAL = 2.2; EXPRESSED IN FETAL LIVER, SIGNAL =   4; EXPRESSED IN LUNG, SIGNAL =   2; EXPRESSED IN HBL100, SIGNAL = 5.2; EXPRESSED IN HELA, SIGNAL = 3.3; EXPRESSED IN ADULT LIVER, SIGNAL = 3.3; EXPRESSED IN BT474, SIGNAL = 2.1; EXPRESSED IN BONE MARROW, SIGNAL = 2.3; EXPRESSED IN BRAIN, SIGNAL =   2; EXPRESSED IN HEART, SIGNAL = 3.5; EST_HUMAN HIT: AA128761.1, EVALUE 5.00e-24; SWISSPROT HIT: P18859, EVALUE 5.00e-24

SEQ ID NO: 34126 - protein, 34 aa, Homo sapiens
  MAP TO AP000139.1; EXPRESSED IN PLACENTA, SIGNAL = 2.2; EXPRESSED IN FETAL LIVER, SIGNAL =   4; EXPRESSED IN LUNG, SIGNAL =   2; EXPRESSED IN HBL100, SIGNAL = 5.2; EXPRESSED IN HELA, SIGNAL = 3.3; EXPRESSED IN ADULT LIVER, SIGNAL = 3.3; EXPRESSED IN BT474, SIGNAL = 2.1; EXPRESSED IN BONE MARROW, SIGNAL = 2.3; EXPRESSED IN BRAIN, SIGNAL =   2; EXPRESSED IN HEART, SIGNAL = 3.5; SWISSPROT HIT: P22748, EVALUE 3.60e+00; EST_HUMAN HIT: AA157397.1, EVALUE 8.00e-14
NQHDSSEALQVLLCHSVSRLSPFAEEHWCYSSGI

SEQ ID NO: 34127 - protein, 60 aa, Homo sapiens; identical to SEQ ID NO: 33554
  MAP TO AP000135.1; EXPRESSED IN HBL100, SIGNAL = 3.3; EXPRESSED IN HELA, SIGNAL = 3.6; EXPRESSED IN ADULT LIVER, SIGNAL = 3.7; EXPRESSED IN BRAIN, SIGNAL = 4.1; EXPRESSED IN HEART, SIGNAL = 3.1; EXPRESSED IN BT474, SIGNAL = 3.4; EXPRESSED IN BONE MARROW, SIGNAL = 3.5; EXPRESSED IN FETAL LIVER, SIGNAL = 3.6; EXPRESSED IN PLACENTA, SIGNAL = 3.4; EXPRESSED IN LUNG, SIGNAL = 4.1; EST_HUMAN HIT: L25488.1, EVALUE 3.00e+00; SWISSPROT HIT: O95104, EVALUE 9.00e-07

SEQ ID NO: 34128 - protein, 46 aa, Homo sapiens
  MAP TO AP000135.1; EXPRESSED IN HBL100, SIGNAL = 3.3; EXPRESSED IN HELA, SIGNAL = 3.6; EXPRESSED IN ADULT LIVER, SIGNAL = 3.7; EXPRESSED IN BRAIN, SIGNAL = 4.1; EXPRESSED IN HEART, SIGNAL = 3.1; EXPRESSED IN BT474, SIGNAL = 3.4; EXPRESSED IN BONE MARROW, SIGNAL = 3.5; EXPRESSED IN FETAL LIVER, SIGNAL = 3.6; EXPRESSED IN PLACENTA, SIGNAL = 3.4; EXPRESSED IN LUNG, SIGNAL = 4.1; EST_HUMAN HIT: L25488.1, EVALUE 2.00e-06
SCLIDLTMMMSQKLWKNQRKRIPLPSPRQHLLPQYPLHPPPPCLLL

SEQ ID NO: 34129 - protein, 155 aa, Homo sapiens
  MAP TO AP000129.1; EXPRESSED IN FETAL LIVER, SIGNAL =   2; EXPRESSED IN LUNG, SIGNAL = 2.9; EXPRESSED IN HELA, SIGNAL = 2.3; EXPRESSED IN BRAIN, SIGNAL = 2.1; EXPRESSED IN HEART, SIGNAL = 1.5; EXPRESSED IN BT474, SIGNAL = 1.8; EXPRESSED IN BONE MARROW, SIGNAL = 1.2; EXPRESSED IN PLACENTA, SIGNAL = 1.4; EXPRESSED IN ADULT LIVER, SIGNAL = 2.1; EXPRESSED IN HBL100, SIGNAL = 2.1; EST_HUMAN HIT: BE711811.1, EVALUE 8.00e-53; SWISSPROT HIT: Q13009, EVALUE 2.00e-77
SAPSKSLGRRRRRLARNRFTIDSDAVSASSPEKESQQPPGGGDTDRWVEEQFDLAQYEEQDDIKETDILSDDDEFCESVKGASVDRDLQERLQATSISQRERGRKTLDSHASRMAQLKKQAALSGINGGLESASEEVIWVRREDFAPSRKLNTEI

SEQ ID NO: 34130 - protein, 48 aa, Homo sapiens
  MAP TO AP000129.1; EXPRESSED IN FETAL LIVER, SIGNAL =   2; EXPRESSED IN LUNG, SIGNAL = 2.9; EXPRESSED IN HELA, SIGNAL = 2.3; EXPRESSED IN BRAIN, SIGNAL = 2.1; EXPRESSED IN HEART, SIGNAL = 1.5; EXPRESSED IN BT474, SIGNAL = 1.8; EXPRESSED IN BONE MARROW, SIGNAL = 1.2; EXPRESSED IN PLACENTA, SIGNAL = 1.4; EXPRESSED IN ADULT LIVER, SIGNAL = 2.1; EXPRESSED IN HBL100, SIGNAL = 2.1; SWISSPROT HIT: P46379, EVALUE 3.50e+00
CLPQASLLGGGGGGWLETGLPLILMPSPQAARRKSPSSPPVVGTLTDG

SEQ ID NO: 34131 - protein, 26 aa, Homo sapiens
  MAP TO AP000128.1; EXPRESSED IN LUNG, SIGNAL = 0.87; EXPRESSED IN HELA, SIGNAL = 0.8; EXPRESSED IN PLACENTA, SIGNAL = 1.5; EXPRESSED IN BT474, SIGNAL = 0.82; EXPRESSED IN BONE MARROW, SIGNAL =   1; EXPRESSED IN HBL100, SIGNAL = 0.83; EXPRESSED IN FETAL LIVER, SIGNAL = 0.78; EXPRESSED IN BRAIN, SIGNAL = 0.92; EXPRESSED IN ADULT LIVER, SIGNAL = 0.84; EXPRESSED IN HEART, SIGNAL = 1.1
MNMETIYRFYGQEGKAGNVGRKQVDR

SEQ ID NO: 34132 - protein, 43 aa, Homo sapiens
  MAP TO AP000124.1; EXPRESSED IN PLACENTA, SIGNAL = 5.3; EXPRESSED IN BONE MARROW, SIGNAL = 6.5; EXPRESSED IN FETAL LIVER, SIGNAL =   5; EXPRESSED IN LUNG, SIGNAL = 7.2; EXPRESSED IN HELA, SIGNAL = 5.6; EXPRESSED IN ADULT LIVER, SIGNAL = 4.7; EXPRESSED IN BT474, SIGNAL = 3.9; EXPRESSED IN HBL100, SIGNAL = 5.4; EXPRESSED IN BRAIN, SIGNAL = 7.3; EXPRESSED IN HEART, SIGNAL =   6; SWISSPROT HIT: Q9Y696, EVALUE 9.00e-14; EST_HUMAN HIT: AW816405.1, EVALUE 2.00e-18
SPLPDEIDAYSTEDVTVSGRKFLDGDELTLADCNLLPKLHIIK

SEQ ID NO: 34133 - protein, 36 aa, Homo sapiens
  MAP TO AP000119.1; EXPRESSED IN BONE MARROW, SIGNAL = 6.3; EXPRESSED IN HBL100, SIGNAL =   7; EXPRESSED IN PLACENTA, SIGNAL = 4.7; EXPRESSED IN HEART, SIGNAL = 9.3; EXPRESSED IN BRAIN, SIGNAL = 7.1; EXPRESSED IN HELA, SIGNAL =  12; EXPRESSED IN FETAL LIVER, SIGNAL = 6.9; EXPRESSED IN BT474, SIGNAL = 5.5; EXPRESSED IN ADULT LIVER, SIGNAL = 9.6; EXPRESSED IN LUNG, SIGNAL =  13
QHVNRPIQQHRKTPLTHTQKNPFFNEPVVLATQESE

SEQ ID NO: 34134 - protein, 55 aa, Homo sapiens
  MAP TO AP000119.1; EXPRESSED IN PLACENTA, SIGNAL = 1.5; EXPRESSED IN BRAIN, SIGNAL = 1.8; EXPRESSED IN BT474, SIGNAL = 1.2; EXPRESSED IN BONE MARROW, SIGNAL = 1.6; EXPRESSED IN HBL100, SIGNAL = 1.3; EXPRESSED IN FETAL LIVER, SIGNAL = 1.5; EXPRESSED IN LUNG, SIGNAL = 3.6; EXPRESSED IN HELA, SIGNAL = 1.4; EXPRESSED IN ADULT LIVER, SIGNAL = 1.2; EXPRESSED IN HEART, SIGNAL = 1.6; SWISSPROT HIT: P32599, EVALUE 4.50e+00; EST_HUMAN HIT: BE080204.1, EVALUE 6.00e-03
MERLGTPYPKCGLWASSTCVIWELVRNGILSRSQTLLHQNLHFNEIPGDLCTCEN

SEQ ID NO: 34135 - protein, 29 aa, Homo sapiens
  MAP TO AP000119.1; EXPRESSED IN PLACENTA, SIGNAL = 1.5; EXPRESSED IN BRAIN, SIGNAL = 1.8; EXPRESSED IN BT474, SIGNAL = 1.2; EXPRESSED IN BONE MARROW, SIGNAL = 1.6; EXPRESSED IN HBL100, SIGNAL = 1.3; EXPRESSED IN FETAL LIVER, SIGNAL = 1.5; EXPRESSED IN LUNG, SIGNAL = 3.6; EXPRESSED IN HELA, SIGNAL = 1.4; EXPRESSED IN ADULT LIVER, SIGNAL = 1.2; EXPRESSED IN HEART, SIGNAL = 1.6; EST_HUMAN HIT: AW971462.1, EVALUE 1.20e-01
GASRNSLPKVWSVGQQHLRHLGTCKKWDS

SEQ ID NO: 34136 - protein, 69 aa, Homo sapiens
  MAP TO AP000118.1; EXPRESSED IN PLACENTA, SIGNAL = 4.4; EXPRESSED IN HBL100, SIGNAL = 1.7; EXPRESSED IN LUNG, SIGNAL = 2.8; EXPRESSED IN BRAIN, SIGNAL = 3.3; EXPRESSED IN HEART, SIGNAL = 2.4; EXPRESSED IN BT474, SIGNAL = 2.1; EXPRESSED IN BONE MARROW, SIGNAL = 2.7; EXPRESSED IN FETAL LIVER, SIGNAL = 2.4; EXPRESSED IN HELA, SIGNAL = 2.2; EXPRESSED IN ADULT LIVER, SIGNAL = 2.5; SWISSPROT HIT: P18886, EVALUE 8.20e-01; EST_HUMAN HIT: AU145181.1, EVALUE 5.50e+00
HCLVNNAPLSLPLTMELSQGKLLSLRNVTMLVFWKQRFRCHTQTPVLLPFSSPADLNTLGMKFGSMSLL

SEQ ID NO: 34137 - protein, 27 aa, Homo sapiens
  MAP TO AP000118.1; EXPRESSED IN PLACENTA, SIGNAL = 3.8; EXPRESSED IN LUNG, SIGNAL = 5.7; EXPRESSED IN ADULT LIVER, SIGNAL = 6.6; EXPRESSED IN BRAIN, SIGNAL = 1.7; EXPRESSED IN HEART, SIGNAL = 2.4; EXPRESSED IN BT474, SIGNAL =  15; EXPRESSED IN HELA, SIGNAL = 6.1; EXPRESSED IN FETAL LIVER, SIGNAL =  18; EXPRESSED IN HBL100, SIGNAL =  34; EXPRESSED IN BONE MARROW, SIGNAL =  25; EST_HUMAN HIT: AV703969.1, EVALUE 1.20e-02; SWISSPROT HIT: Q24186, EVALUE 1.00e-04
LCTGTLEGALREIMTIAECLADELITA

SEQ ID NO: 34138 - protein, 46 aa, Homo sapiens
  MAP TO AP000114.1; EXPRESSED IN BT474, SIGNAL = 2.5; EXPRESSED IN FETAL LIVER, SIGNAL = 2.4; EXPRESSED IN LUNG, SIGNAL = 2.1; EXPRESSED IN HELA, SIGNAL = 3.4; EXPRESSED IN ADULT LIVER, SIGNAL = 2.1; EXPRESSED IN HEART, SIGNAL = 1.8; EXPRESSED IN PLACENTA, SIGNAL = 1.6; EXPRESSED IN BRAIN, SIGNAL = 1.4; EXPRESSED IN BONE MARROW, SIGNAL = 1.9; EXPRESSED IN HBL100, SIGNAL = 2.4; SWISSPROT HIT: P18583, EVALUE 4.00e-22; EST_HUMAN HIT: R91414.1, EVALUE 5.00e-21
EFPVSSGSQHRKKEADSVYGEWVPVEKNGEENKDDDNVFSSNLPSE

SEQ ID NO: 34139 - protein, 46 aa, Homo sapiens
  MAP TO AP000114.1; EXPRESSED IN PLACENTA, SIGNAL =  10; EXPRESSED IN BT474, SIGNAL =  11; EXPRESSED IN BONE MARROW, SIGNAL = 5.8; EXPRESSED IN FETAL LIVER, SIGNAL = 9.2; EXPRESSED IN LUNG, SIGNAL = 7.3; EXPRESSED IN ADULT LIVER, SIGNAL = 2.7; EXPRESSED IN BRAIN, SIGNAL = 5.2; EXPRESSED IN HEART, SIGNAL = 4.9; EXPRESSED IN HBL100, SIGNAL = 5.8; EXPRESSED IN HELA, SIGNAL = 4.6; EST_HUMAN HIT: AW997856.1, EVALUE 2.00e-20; SWISSPROT HIT: Q55119, EVALUE 2.10e+00
SIWESMVLDASIWESMVLDANIWVSMVLEANIWDSGAIKGSTPTVT

SEQ ID NO: 34140 - protein, 76 aa, Homo sapiens
  MAP TO AP000114.1; EXPRESSED IN BT474, SIGNAL = 1.7; EXPRESSED IN HELA, SIGNAL = 2.6; EXPRESSED IN HEART, SIGNAL = 1.3; EXPRESSED IN PLACENTA, SIGNAL = 1.3; EXPRESSED IN FETAL LIVER, SIGNAL =   2; EXPRESSED IN LUNG, SIGNAL = 1.2; EXPRESSED IN ADULT LIVER, SIGNAL = 2.7; EXPRESSED IN BONE MARROW, SIGNAL = 2.9; EXPRESSED IN HBL100, SIGNAL = 3.9; EXPRESSED IN BRAIN, SIGNAL = 1.5; EST_HUMAN HIT: BE265029.1, EVALUE 2.00e-36; SWISSPROT HIT: P22102, EVALUE 4.00e-37
FPEAQALGLEVFHAGTALKNGKVVTHGGRVLAVTAIRENLISALEEAKKGLAAIKFEGAIYRKDVGFRAIAFLQQP

SEQ ID NO: 34141 - protein, 361 aa, Homo sapiens; identical to SEQ ID NO: 33614
  MAP TO AP000114.1; EXPRESSED IN FETAL LIVER, SIGNAL =   6; EXPRESSED IN ADULT LIVER, SIGNAL = 3.5; EXPRESSED IN PLACENTA, SIGNAL = 5.3; EXPRESSED IN BT474, SIGNAL = 6.8; EXPRESSED IN BONE MARROW, SIGNAL = 4.5; EXPRESSED IN HEART, SIGNAL = 3.4; EXPRESSED IN BRAIN, SIGNAL = 4.6; EXPRESSED IN HELA, SIGNAL = 6.1; EXPRESSED IN LUNG, SIGNAL = 5.4; EXPRESSED IN HBL100, SIGNAL = 4.4; EST_HUMAN HIT: AW502403.1, EVALUE 5.00e-42; SWISSPROT HIT: P18583, EVALUE 8.00e-43

SEQ ID NO: 34142 - protein, 20 aa, Homo sapiens
  MAP TO AP000114.1; EXPRESSED IN FETAL LIVER, SIGNAL =   6; EXPRESSED IN ADULT LIVER, SIGNAL = 3.5; EXPRESSED IN PLACENTA, SIGNAL = 5.3; EXPRESSED IN BT474, SIGNAL = 6.8; EXPRESSED IN BONE MARROW, SIGNAL = 4.5; EXPRESSED IN HEART, SIGNAL = 3.4; EXPRESSED IN BRAIN, SIGNAL = 4.6; EXPRESSED IN HELA, SIGNAL = 6.1; EXPRESSED IN LUNG, SIGNAL = 5.4; EXPRESSED IN HBL100, SIGNAL = 4.4; EST_HUMAN HIT: AI650942.1, EVALUE 1.00e-03
DQSLEEEDLYQKRSAKDLQS

SEQ ID NO: 34143 - protein, 91 aa, Homo sapiens; identical to SEQ ID NO: 33616
  MAP TO AP000114.1; EXPRESSED IN BT474, SIGNAL =  14; EXPRESSED IN FETAL LIVER, SIGNAL =  13; EXPRESSED IN PLACENTA, SIGNAL =  11; EXPRESSED IN BONE MARROW, SIGNAL =  11; EXPRESSED IN HBL100, SIGNAL =  12; EXPRESSED IN LUNG, SIGNAL =  10; EXPRESSED IN HELA, SIGNAL = 8.1; EXPRESSED IN ADULT LIVER, SIGNAL = 8.1; EXPRESSED IN BRAIN, SIGNAL = 9.6; EXPRESSED IN HEART, SIGNAL = 7.4; SWISSPROT HIT: P18583, EVALUE 4.00e-14; EST_HUMAN HIT: BF339176.1, EVALUE 2.00e-13

SEQ ID NO: 34144 - protein, 246 aa, Homo sapiens; identical to SEQ ID NO: 33613
  MAP TO AP000114.1; EXPRESSED IN PLACENTA, SIGNAL =   4; EXPRESSED IN BONE MARROW, SIGNAL = 4.5; EXPRESSED IN HBL100, SIGNAL = 4.5; EXPRESSED IN LUNG, SIGNAL = 4.2; EXPRESSED IN HELA, SIGNAL =   3; EXPRESSED IN BRAIN, SIGNAL = 4.3; EXPRESSED IN BT474, SIGNAL = 9.8; EXPRESSED IN FETAL LIVER, SIGNAL = 6.4; EXPRESSED IN HEART, SIGNAL =   3; EXPRESSED IN ADULT LIVER, SIGNAL = 2.3; EST_HUMAN HIT: BE614046.1, EVALUE 1.00e-35; SWISSPROT HIT: P18583, EVALUE 7.00e-59

SEQ ID NO: 34145 - protein, 170 aa, Homo sapiens
  MAP TO AP000114.1; EXPRESSED IN FETAL LIVER, SIGNAL =  16; EXPRESSED IN ADULT LIVER, SIGNAL = 6.3; EXPRESSED IN BRAIN, SIGNAL = 0.8; EXPRESSED IN HEART, SIGNAL =   2; EXPRESSED IN BONE MARROW, SIGNAL =  14; EXPRESSED IN HBL100, SIGNAL =  28; EXPRESSED IN LUNG, SIGNAL = 5.6; EXPRESSED IN PLACENTA, SIGNAL = 3.9; EXPRESSED IN BT474, SIGNAL =  12; EXPRESSED IN HELA, SIGNAL = 9.1; EST_HUMAN HIT: BE790790.1, EVALUE 1.00e-74; SWISSPROT HIT: P46782, EVALUE 1.00e-74
QRPLDIKLSGKWSTDDMQINGISLQDYTAVKEKYAKYLPHSAGWYAAKCFRKAQCPIVEPLTNSMMMHGCNNSNKLMIMCIIKHAFDFIHLLTGENPLQVLVNAIINSGPWEDSTCIGRAGTVRQQAVDMSPLHCVNQVVWLLCTGTREAAFWNIKTIAECLADELINAT

SEQ ID NO: 34146 - protein, 48 aa, Homo sapiens
  MAP TO AP000109.1; EXPRESSED IN HBL100, SIGNAL = 8.2; EXPRESSED IN FETAL LIVER, SIGNAL = 8.7; EXPRESSED IN HELA, SIGNAL = 7.5; EXPRESSED IN ADULT LIVER, SIGNAL = 4.4; EXPRESSED IN BRAIN, SIGNAL = 3.4; EXPRESSED IN PLACENTA, SIGNAL = 3.1; EXPRESSED IN HEART, SIGNAL = 3.6; EXPRESSED IN LUNG, SIGNAL = 5.6; EXPRESSED IN BONE MARROW, SIGNAL = 4.3; EXPRESSED IN BT474, SIGNAL =   6; EST_HUMAN HIT: AA558124.1, EVALUE 2.30e+00; SWISSPROT HIT: O66550, EVALUE 4.60e+00
MTRKKLRLQPWKWGQCEESPGWDMENCGNHLKESFITKSKTSYMIFEP

SEQ ID NO: 34147 - protein, 17 aa, Homo sapiens
  MAP TO AP000105.1; EXPRESSED IN BT474, SIGNAL = 3.2; EXPRESSED IN HELA, SIGNAL =   2; EXPRESSED IN ADULT LIVER, SIGNAL = 3.6; EXPRESSED IN PLACENTA, SIGNAL = 1.5; EXPRESSED IN BONE MARROW, SIGNAL = 1.6; EXPRESSED IN HBL100, SIGNAL = 3.3; EXPRESSED IN FETAL LIVER, SIGNAL = 2.7; EXPRESSED IN LUNG, SIGNAL = 2.3; EXPRESSED IN BRAIN, SIGNAL = 2.3; EXPRESSED IN HEART, SIGNAL = 2.1; EST_HUMAN HIT: AI138970.1, EVALUE 2.60e-02
VPGHGAVEPAQHPGRQP

SEQ ID NO: 34148 - protein, 193 aa, Homo sapiens
  MAP TO AP000105.1; EXPRESSED IN HBL100, SIGNAL = 1.1; EXPRESSED IN BRAIN, SIGNAL = 2.2; EXPRESSED IN HEART, SIGNAL = 1.2; EXPRESSED IN PLACENTA, SIGNAL = 1.5; EXPRESSED IN BT474, SIGNAL = 1.1; EXPRESSED IN BONE MARROW, SIGNAL = 1.2; EXPRESSED IN ADULT LIVER, SIGNAL = 1.1; EXPRESSED IN HELA, SIGNAL = 1.7; EXPRESSED IN LUNG, SIGNAL = 1.3; EXPRESSED IN FETAL LIVER, SIGNAL = 1.6; SWISSPROT HIT: O43426, EVALUE 1.00e-108; EST_HUMAN HIT: AU131904.1, EVALUE 1.00e-73
LLAVSKAQLSVQTSPVPTPDPKRLIQLPSATQSNVLSSVSCMPTMPPIPARSQSQENMRSSPNPFITGLTRTNPFSDRTAAPGNPFRAKSEESEATSWFSKEEPVTISPFPSLQPLGHNKSRASSSLDGFKDSFDLQGQSTLKISNPKGWVTFEEEEDFGVKGKSKSACSDLLGNQPSSFSGSNLTLNDDWNK

SEQ ID NO: 34149 - protein, 22 aa, Homo sapiens
  MAP TO AP000105.1; EXPRESSED IN HBL100, SIGNAL = 1.1; EXPRESSED IN BRAIN, SIGNAL = 2.2; EXPRESSED IN HEART, SIGNAL = 1.2; EXPRESSED IN PLACENTA, SIGNAL = 1.5; EXPRESSED IN BT474, SIGNAL = 1.1; EXPRESSED IN BONE MARROW, SIGNAL = 1.2; EXPRESSED IN ADULT LIVER, SIGNAL = 1.1; EXPRESSED IN HELA, SIGNAL = 1.7; EXPRESSED IN LUNG, SIGNAL = 1.3; EXPRESSED IN FETAL LIVER, SIGNAL = 1.6
IGGIVGMQLTELKTLLCVAEGN

SEQ ID NO: 34150 - protein, 82 aa, Homo sapiens
  MAP TO AP000104.1; EXPRESSED IN HBL100, SIGNAL = 1.8; EXPRESSED IN BRAIN, SIGNAL = 2.4; EXPRESSED IN BT474, SIGNAL = 1.7; EXPRESSED IN BONE MARROW, SIGNAL = 1.8; EXPRESSED IN FETAL LIVER, SIGNAL = 2.1; EXPRESSED IN LUNG, SIGNAL = 2.5; EXPRESSED IN HELA, SIGNAL = 2.3; EXPRESSED IN ADULT LIVER, SIGNAL = 1.5; EXPRESSED IN PLACENTA, SIGNAL = 1.8; EXPRESSED IN HEART, SIGNAL =   2; EST_HUMAN HIT: AA533272.1, EVALUE 7.00e-36; SWISSPROT HIT: P14728, EVALUE 1.60e-01
PTRRELPCCSCPVSASAWPSHCAPWSSESPVPRTSATCSWGGSSWCQEVTRSRRTARMKKRRRTPLSLISQGNCRGSVGLHI

SEQ ID NO: 34151 - protein, 32 aa, Homo sapiens
  MAP TO AP000104.1; EXPRESSED IN HBL100, SIGNAL = 1.8; EXPRESSED IN BRAIN, SIGNAL = 2.4; EXPRESSED IN BT474, SIGNAL = 1.7; EXPRESSED IN BONE MARROW, SIGNAL = 1.8; EXPRESSED IN FETAL LIVER, SIGNAL = 2.1; EXPRESSED IN LUNG, SIGNAL = 2.5; EXPRESSED IN HELA, SIGNAL = 2.3; EXPRESSED IN ADULT LIVER, SIGNAL = 1.5; EXPRESSED IN PLACENTA, SIGNAL = 1.8; EXPRESSED IN HEART, SIGNAL =   2; EST_HUMAN HIT: AA533272.1, EVALUE 4.00e-07
PGPHTVRPGHQRVLCQGLPRLAAGEGAAGARK

SEQ ID NO: 34152 - protein, 74 aa, Homo sapiens
  MAP TO AP000099.1; EXPRESSED IN HEART, SIGNAL = 1.3; EXPRESSED IN BT474, SIGNAL = 1.6; EXPRESSED IN HELA, SIGNAL = 1.4; EXPRESSED IN PLACENTA, SIGNAL = 1.4; EXPRESSED IN BONE MARROW, SIGNAL = 1.6; EXPRESSED IN HBL100, SIGNAL = 1.4; EXPRESSED IN FETAL LIVER, SIGNAL = 1.7; EXPRESSED IN LUNG, SIGNAL = 1.5; EXPRESSED IN ADULT LIVER, SIGNAL = 1.6; EXPRESSED IN BRAIN, SIGNAL = 1.9; SWISSPROT HIT: P57058, EVALUE 2.00e-28; EST_HUMAN HIT: BF529471.1, EVALUE 1.00e-27
SFGCRNIFRKTSDSNCVASSSMEFIPVPPPRTPRIVKKPEPHQPGPGSTGIPHKEDPLMLDMVRSFESVDRDDH

SEQ ID NO: 34153 - protein, 120 aa, Homo sapiens
  MAP TO AP000099.1; EXPRESSED IN HEART, SIGNAL = 1.3; EXPRESSED IN BT474, SIGNAL = 1.6; EXPRESSED IN HELA, SIGNAL = 1.4; EXPRESSED IN PLACENTA, SIGNAL = 1.4; EXPRESSED IN BONE MARROW, SIGNAL = 1.6; EXPRESSED IN HBL100, SIGNAL = 1.4; EXPRESSED IN FETAL LIVER, SIGNAL = 1.7; EXPRESSED IN LUNG, SIGNAL = 1.5; EXPRESSED IN ADULT LIVER, SIGNAL = 1.6; EXPRESSED IN BRAIN, SIGNAL = 1.9; SWISSPROT HIT: P08042, EVALUE 6.00e-03; EST_HUMAN HIT: BF529471.1, EVALUE 3.00e-66
NLRFQLCGFFFHGVHPRATAQDPEDCEETGAPSARARKHWHPPQGRPPDAGHGALLRVCGSRRPRRSAVSLSSLQDSELPGQLGSQKFQREDAVPGSAIRKHVASPYSFASNSGLFCSRR

SEQ ID NO: 34154 - protein, 98 aa, Homo sapiens; identical to SEQ ID NO: 34110
  MAP TO AP000098.1; EXPRESSED IN ADULT LIVER, SIGNAL = 2.6; EXPRESSED IN BRAIN, SIGNAL = 3.3; EXPRESSED IN BONE MARROW, SIGNAL =   2; EXPRESSED IN HBL100, SIGNAL = 2.3; EXPRESSED IN FETAL LIVER, SIGNAL =   2; EXPRESSED IN LUNG, SIGNAL = 3.3; EXPRESSED IN HEART, SIGNAL = 2.2; EXPRESSED IN PLACENTA, SIGNAL = 2.5; EXPRESSED IN BT474, SIGNAL = 1.9; EXPRESSED IN HELA, SIGNAL = 2.2; EST_HUMAN HIT: BF114883.1, EVALUE 1.00e-50; SWISSPROT HIT: P57058, EVALUE 1.00e-51

SEQ ID NO: 34155 - protein, 23 aa, Homo sapiens
  MAP TO AP000098.1; EXPRESSED IN ADULT LIVER, SIGNAL = 2.6; EXPRESSED IN BRAIN, SIGNAL = 3.3; EXPRESSED IN BONE MARROW, SIGNAL =   2; EXPRESSED IN HBL100, SIGNAL = 2.3; EXPRESSED IN FETAL LIVER, SIGNAL =   2; EXPRESSED IN LUNG, SIGNAL = 3.3; EXPRESSED IN HEART, SIGNAL = 2.2; EXPRESSED IN PLACENTA, SIGNAL = 2.5; EXPRESSED IN BT474, SIGNAL = 1.9; EXPRESSED IN HELA, SIGNAL = 2.2; EST_HUMAN HIT: BF114883.1, EVALUE 1.00e-07
HQKPAARGSDPADDPPPQYHSAP

SEQ ID NO: 34156 - protein, 40 aa, Homo sapiens
  MAP TO AP000094.1; EXPRESSED IN PLACENTA, SIGNAL = 5.8; EXPRESSED IN BRAIN, SIGNAL = 7.2; EXPRESSED IN HEART, SIGNAL = 4.8; EXPRESSED IN BONE MARROW, SIGNAL = 6.9; EXPRESSED IN HELA, SIGNAL = 6.1; EXPRESSED IN LUNG, SIGNAL = 5.9; EXPRESSED IN BT474, SIGNAL = 4.5; EXPRESSED IN ADULT LIVER, SIGNAL = 4.5; EXPRESSED IN FETAL LIVER, SIGNAL = 4.5; EXPRESSED IN HBL100, SIGNAL = 4.2; EST_HUMAN HIT: D61156.1, EVALUE 1.60e+00
PGFVAVGLLHAACLSPWNFRFSTTRYCLPFCKQLLLYPRL

SEQ ID NO: 34157 - protein, 67 aa, Homo sapiens; identical to SEQ ID NO: 33589
  MAP TO AP000089.1; EXPRESSED IN PLACENTA, SIGNAL = 5.3; EXPRESSED IN BT474, SIGNAL = 8.7; EXPRESSED IN HBL100, SIGNAL = 8.9; EXPRESSED IN LUNG, SIGNAL = 5.2; EXPRESSED IN HELA, SIGNAL =   5; EXPRESSED IN BRAIN, SIGNAL =  11; EXPRESSED IN BONE MARROW, SIGNAL = 6.1; EXPRESSED IN FETAL LIVER, SIGNAL = 3.4; EXPRESSED IN ADULT LIVER, SIGNAL = 4.1; EXPRESSED IN HEART, SIGNAL = 3.2

SEQ ID NO: 34158 - protein, 44 aa, Homo sapiens
  MAP TO AP000089.1; EXPRESSED IN FETAL LIVER, SIGNAL =   2; EXPRESSED IN HELA, SIGNAL = 2.6; EXPRESSED IN ADULT LIVER, SIGNAL = 2.1; EXPRESSED IN BRAIN, SIGNAL = 1.8; EXPRESSED IN HEART, SIGNAL = 1.9; EXPRESSED IN PLACENTA, SIGNAL = 2.5; EXPRESSED IN LUNG, SIGNAL =   3; EXPRESSED IN HBL100, SIGNAL = 4.1; EXPRESSED IN BONE MARROW, SIGNAL = 2.4; EXPRESSED IN BT474, SIGNAL = 3.5; EST_HUMAN HIT: AU131304.1, EVALUE 2.00e-19; SWISSPROT HIT: Q95241, EVALUE 2.00e-20
PTTAASTPDAVDKYLETPGDENEHAHFQKAKERLEAKHRERMSQ

SEQ ID NO: 34159 - protein, 56 aa, Homo sapiens
  MAP TO AP000089.1; EXPRESSED IN BONE MARROW, SIGNAL = 4.1; EXPRESSED IN LUNG, SIGNAL = 6.8; EXPRESSED IN HELA, SIGNAL =  10; EXPRESSED IN ADULT LIVER, SIGNAL = 6.3; EXPRESSED IN BRAIN, SIGNAL = 8.9; EXPRESSED IN PLACENTA, SIGNAL = 3.4; EXPRESSED IN BT474, SIGNAL = 7.5; EXPRESSED IN HEART, SIGNAL = 3.3; EXPRESSED IN HBL100, SIGNAL = 7.4; EXPRESSED IN FETAL LIVER, SIGNAL = 5.2; EST_HUMAN HIT: BE168025.1, EVALUE 9.00e-31; SWISSPROT HIT: Q11015, EVALUE 4.50e+00
DGSISRRKWNLWNRKQPTRDSSWWRHTWPEWKPCSMTAAAWPWRTTSPLCRLFLLG

SEQ ID NO: 34160 - protein, 42 aa, Homo sapiens
  MAP TO AP000089.1; EXPRESSED IN BT474, SIGNAL = 8.3; EXPRESSED IN BONE MARROW, SIGNAL = 1.6; EXPRESSED IN LUNG, SIGNAL = 7.3; EXPRESSED IN ADULT LIVER, SIGNAL = 4.8; EXPRESSED IN HELA, SIGNAL =  12; EXPRESSED IN PLACENTA, SIGNAL = 4.7; EXPRESSED IN HEART, SIGNAL = 6.9; EXPRESSED IN BRAIN, SIGNAL =  17; EXPRESSED IN FETAL LIVER, SIGNAL = 5.3; EXPRESSED IN HBL100, SIGNAL = 4.4; EST_HUMAN HIT: AW862411.1, EVALUE 1.00e-18; SWISSPROT HIT: O31139, EVALUE 4.70e+00
SSRVQYAKEVCPRRTEGQTAHPKAFRACAHGGSQESRSDPVP

SEQ ID NO: 34161 - protein, 73 aa, Homo sapiens
  MAP TO AP000088.1; EXPRESSED IN PLACENTA, SIGNAL = 7.2; EXPRESSED IN BT474, SIGNAL =  14; EXPRESSED IN HBL100, SIGNAL = 9.5; EXPRESSED IN LUNG, SIGNAL =  13; EXPRESSED IN BRAIN, SIGNAL =  30; EXPRESSED IN BONE MARROW, SIGNAL = 2.7; EXPRESSED IN FETAL LIVER, SIGNAL = 8.5; EXPRESSED IN HELA, SIGNAL =   8; EXPRESSED IN ADULT LIVER, SIGNAL = 7.6; EXPRESSED IN HEART, SIGNAL =  11; SWISSPROT HIT: Q95241, EVALUE 1.00e-37; EST_HUMAN HIT: BE167331.1, EVALUE 1.00e-36
ELLQKEQNYSDDVLANMISEPRISYGNDALMPSLTETKTTVELLPVNGEFSLDDLQPWHSFGADSVPANTENE

SEQ ID NO: 34162 - protein, 17 aa, Homo sapiens
  MAP TO AP000088.1; EXPRESSED IN PLACENTA, SIGNAL = 7.2; EXPRESSED IN BT474, SIGNAL =  14; EXPRESSED IN HBL100, SIGNAL = 9.5; EXPRESSED IN LUNG, SIGNAL =  13; EXPRESSED IN BRAIN, SIGNAL =  30; EXPRESSED IN BONE MARROW, SIGNAL = 2.7; EXPRESSED IN FETAL LIVER, SIGNAL = 8.5; EXPRESSED IN HELA, SIGNAL =   8; EXPRESSED IN ADULT LIVER, SIGNAL = 7.6; EXPRESSED IN HEART, SIGNAL =  11; EST_HUMAN HIT: AU134772.1, EVALUE 4.00e-03
MSCFRKSKTIQMTSWPT

SEQ ID NO: 34163 - protein, 49 aa, Homo sapiens; identical to SEQ ID NO: 33582
  MAP TO AP000088.1; EXPRESSED IN HELA, SIGNAL = 6.4; EXPRESSED IN BT474, SIGNAL = 5.9; EXPRESSED IN BONE MARROW, SIGNAL = 2.3; EXPRESSED IN HBL100, SIGNAL = 6.1; EXPRESSED IN FETAL LIVER, SIGNAL =   3; EXPRESSED IN LUNG, SIGNAL = 4.6; EXPRESSED IN ADULT LIVER, SIGNAL = 3.1; EXPRESSED IN BRAIN, SIGNAL =  17; EXPRESSED IN PLACENTA, SIGNAL = 3.4; EXPRESSED IN HEART, SIGNAL =   5; SWISSPROT HIT: Q95241, EVALUE 4.00e-10; EST_HUMAN HIT: AU117224.1, EVALUE 5.00e-09

SEQ ID NO: 34164 - protein, 23 aa, Homo sapiens
  MAP TO AP000088.1; EXPRESSED IN HELA, SIGNAL = 6.4; EXPRESSED IN BT474, SIGNAL = 5.9; EXPRESSED IN BONE MARROW, SIGNAL = 2.3; EXPRESSED IN HBL100, SIGNAL = 6.1; EXPRESSED IN FETAL LIVER, SIGNAL =   3; EXPRESSED IN LUNG, SIGNAL = 4.6; EXPRESSED IN ADULT LIVER, SIGNAL = 3.1; EXPRESSED IN BRAIN, SIGNAL =  17; EXPRESSED IN PLACENTA, SIGNAL = 3.4; EXPRESSED IN HEART, SIGNAL =   5; EST_HUMAN HIT: F06018.1, EVALUE 6.00e-07
CSLQKMWVQTKVQSLDSWWAVLS

SEQ ID NO: 34165 - protein, 34 aa, Homo sapiens; identical to SEQ ID NO: 33625
  MAP TO AP000085.1; EXPRESSED IN BRAIN, SIGNAL =   2; EXPRESSED IN HBL100, SIGNAL = 1.7; EXPRESSED IN FETAL LIVER, SIGNAL = 1.8; EXPRESSED IN ADULT LIVER, SIGNAL = 1.8; EXPRESSED IN HEART, SIGNAL = 1.8; EXPRESSED IN BT474, SIGNAL = 1.8; EXPRESSED IN BONE MARROW, SIGNAL = 1.9; EXPRESSED IN HELA, SIGNAL = 1.9; EXPRESSED IN PLACENTA, SIGNAL = 1.7; EXPRESSED IN LUNG, SIGNAL =   2

SEQ ID NO: 34166 - protein, 32 aa, Homo sapiens
  MAP TO AP000085.1; EXPRESSED IN PLACENTA, SIGNAL = 4.9; EXPRESSED IN BT474, SIGNAL =  11; EXPRESSED IN BONE MARROW, SIGNAL = 3.1; EXPRESSED IN HEART, SIGNAL = 7.7; EXPRESSED IN BRAIN, SIGNAL = 5.4; EXPRESSED IN HBL100, SIGNAL = 5.8; EXPRESSED IN FETAL LIVER, SIGNAL = 5.6; EXPRESSED IN LUNG, SIGNAL = 8.3; EXPRESSED IN HELA, SIGNAL = 7.4; EXPRESSED IN ADULT LIVER, SIGNAL = 5.1
PCTLNCSRCCCCCCISSASSWRKLSALKALCN

SEQ ID NO: 34167 - protein, 67 aa, Homo sapiens; identical to SEQ ID NO: 33605
  MAP TO AP000055.1; EXPRESSED IN BRAIN, SIGNAL = 1.3; EXPRESSED IN BT474, SIGNAL = 1.6; EXPRESSED IN BONE MARROW, SIGNAL = 1.6; EXPRESSED IN PLACENTA, SIGNAL = 1.6; EXPRESSED IN HEART, SIGNAL = 1.3; EXPRESSED IN ADULT LIVER, SIGNAL = 1.7; EXPRESSED IN HELA, SIGNAL = 2.4; EXPRESSED IN LUNG, SIGNAL = 1.7; EXPRESSED IN FETAL LIVER, SIGNAL = 1.7; EXPRESSED IN HBL100, SIGNAL = 2.1; EST_HUMAN HIT: AI003369.1, EVALUE 5.00e-06; SWISSPROT HIT: P35543, EVALUE 2.60e+00

SEQ ID NO: 34168 - protein, 76 aa, Homo sapiens
  MAP TO AP000049.1; EXPRESSED IN HELA, SIGNAL = 0.9; EXPRESSED IN BT474, SIGNAL = 1.3; EXPRESSED IN FETAL LIVER, SIGNAL = 2.2; EXPRESSED IN LUNG, SIGNAL = 0.96; EXPRESSED IN PLACENTA, SIGNAL = 1.2; EXPRESSED IN BONE MARROW, SIGNAL = 0.98; EXPRESSED IN HBL100, SIGNAL = 1.4; EXPRESSED IN ADULT LIVER, SIGNAL = 1.5; EXPRESSED IN BRAIN, SIGNAL =   2; EXPRESSED IN HEART, SIGNAL = 1.3; SWISSPROT HIT: Q15811, EVALUE 9.00e-25; EST_HUMAN HIT: AA313515.1, EVALUE 5.00e-24
RAQERDKQWLEHVQQEDEHQRPRKLHEEEKLKREESVKKKDGEEKGKQEAQDKLGRLFHQHQEPAKPAVQAPWSTA

SEQ ID NO: 34169 - protein, 87 aa, Homo sapiens
  MAP TO AP000049.1; EXPRESSED IN BONE MARROW, SIGNAL = 3.3; EXPRESSED IN ADULT LIVER, SIGNAL = 3.2; EXPRESSED IN BRAIN, SIGNAL =   4; EXPRESSED IN PLACENTA, SIGNAL = 3.3; EXPRESSED IN BT474, SIGNAL =   3; EXPRESSED IN HBL100, SIGNAL = 2.9; EXPRESSED IN LUNG, SIGNAL = 3.2; EXPRESSED IN HELA, SIGNAL = 3.5; EXPRESSED IN FETAL LIVER, SIGNAL = 5.3; EXPRESSED IN HEART, SIGNAL = 2.9; EST_HUMAN HIT: AA815076.1, EVALUE 4.00e-09; SWISSPROT HIT: O35601, EVALUE 1.80e-01
TFEDKKRENFERGNLELEKRRQALLEQQRKEQERLAQLERAEQERKERERQEQERKRQLELEKQLEKQRELERQREEERRKEIERRE

SEQ ID NO: 34170 - protein, 32 aa, Homo sapiens
  MAP TO AP000045.1; EXPRESSED IN BT474, SIGNAL = 7.8; EXPRESSED IN HBL100, SIGNAL =   7; EXPRESSED IN FETAL LIVER, SIGNAL = 8.6; EXPRESSED IN BRAIN, SIGNAL = 6.4; EXPRESSED IN PLACENTA, SIGNAL = 7.5; EXPRESSED IN BONE MARROW, SIGNAL = 9.7; EXPRESSED IN LUNG, SIGNAL = 8.7; EXPRESSED IN HELA, SIGNAL = 4.8; EXPRESSED IN ADULT LIVER, SIGNAL = 5.8; EXPRESSED IN HEART, SIGNAL = 5.8; SWISSPROT HIT: P78574, EVALUE 2.80e+00; EST_HUMAN HIT: AW675704.1, EVALUE 1.00e-12
LANEPEPLGQVTQPVPARDTEWPFMYIHGVLA

SEQ ID NO: 34171 - protein, 25 aa, Homo sapiens
  MAP TO AP000045.1; EXPRESSED IN PLACENTA, SIGNAL = 1.7; EXPRESSED IN BONE MARROW, SIGNAL = 2.7; EXPRESSED IN HBL100, SIGNAL = 1.9; EXPRESSED IN FETAL LIVER, SIGNAL = 2.3; EXPRESSED IN LUNG, SIGNAL = 2.8; EXPRESSED IN HELA, SIGNAL = 1.7; EXPRESSED IN ADULT LIVER, SIGNAL = 2.5; EXPRESSED IN BRAIN, SIGNAL = 1.8; EXPRESSED IN BT474, SIGNAL = 1.7; EXPRESSED IN HEART, SIGNAL = 1.9; SWISSPROT HIT: P38484, EVALUE 9.00e-08; EST_HUMAN HIT: BE409310.1, EVALUE 4.00e-07
EQVLSWEPVALSNSTRPVVYQVQFK

SEQ ID NO: 34172 - protein, 65 aa, Homo sapiens
  MAP TO AP000044.1; EXPRESSED IN FETAL LIVER, SIGNAL = 2.3; EXPRESSED IN HELA, SIGNAL = 1.9; EXPRESSED IN ADULT LIVER, SIGNAL = 1.4; EXPRESSED IN PLACENTA, SIGNAL = 1.4; EXPRESSED IN HEART, SIGNAL = 1.2; EXPRESSED IN BRAIN, SIGNAL = 1.5; EXPRESSED IN HBL100, SIGNAL = 1.3; EXPRESSED IN LUNG, SIGNAL = 1.9; EXPRESSED IN BONE MARROW, SIGNAL = 1.3; EXPRESSED IN BT474, SIGNAL = 2.7; EST_HUMAN HIT: AW937895.1, EVALUE 1.00e-16; SWISSPROT HIT: P22415, EVALUE 3.00e-17
VCEGQLDVQTEGTGAISGYPTTQFMTQVVIQGDITSYDAVNTEGKAAEIHYTFPPLQWEMGQGVP

SEQ ID NO: 34173 - protein, 49 aa, Homo sapiens
  MAP TO AP000044.1; EXPRESSED IN BT474, SIGNAL = 1.2; EXPRESSED IN HBL100, SIGNAL = 1.9; EXPRESSED IN FETAL LIVER, SIGNAL = 1.5; EXPRESSED IN BRAIN, SIGNAL = 0.84; EXPRESSED IN BONE MARROW, SIGNAL = 1.4; EXPRESSED IN ADULT LIVER, SIGNAL = 1.7; EXPRESSED IN HEART, SIGNAL = 1.1; EXPRESSED IN PLACENTA, SIGNAL = 1.8; EXPRESSED IN LUNG, SIGNAL = 1.5; EXPRESSED IN HELA, SIGNAL = 0.74; SWISSPROT HIT: Q08334, EVALUE 2.00e-20; EST_HUMAN HIT: AI904079.1, EVALUE 1.00e-19
VILMASVFMVCLALLGCFALLWCVYKKTKYAFSPRNSLPQHLKEVGRME

SEQ ID NO: 34174 - protein, 24 aa, Homo sapiens
  MAP TO AP000039.1; EXPRESSED IN HEART, SIGNAL = 4.4; EXPRESSED IN PLACENTA, SIGNAL = 5.5; EXPRESSED IN BT474, SIGNAL =   4; EXPRESSED IN BONE MARROW, SIGNAL = 4.9; EXPRESSED IN HBL100, SIGNAL = 4.8; EXPRESSED IN FETAL LIVER, SIGNAL = 4.3; EXPRESSED IN LUNG, SIGNAL = 4.8; EXPRESSED IN HELA, SIGNAL = 4.8; EXPRESSED IN ADULT LIVER, SIGNAL =   5; EXPRESSED IN BRAIN, SIGNAL = 5.6; EST_HUMAN HIT: H86578.1, EVALUE 6.40e-01
AWDFHPLKPQPMLLHWPLSAAAGV

SEQ ID NO: 34175 - protein, 91 aa, Homo sapiens
  MAP TO AP000034.1; EXPRESSED IN HEART, SIGNAL =  17; EXPRESSED IN BT474, SIGNAL =   7; EXPRESSED IN FETAL LIVER, SIGNAL = 9.9; EXPRESSED IN HELA, SIGNAL =  12; EXPRESSED IN PLACENTA, SIGNAL = 9.7; EXPRESSED IN BONE MARROW, SIGNAL =  10; EXPRESSED IN HBL100, SIGNAL = 8.5; EXPRESSED IN LUNG, SIGNAL =  13; EXPRESSED IN ADULT LIVER, SIGNAL =  11; EXPRESSED IN BRAIN, SIGNAL =  16
EEEEKKKKKKKKKKKKEEEEEEEEEEEEEEERRGGGKERVRKEGRKERMNEGRQAGREGGERKREERRRRKEEEEGRGGGGRGEEEEKEED

SEQ ID NO: 34176 - protein, 34 aa, Homo sapiens
  MAP TO AP000034.1; EXPRESSED IN HELA, SIGNAL = 7.6; EXPRESSED IN BRAIN, SIGNAL = 6.2; EXPRESSED IN HEART, SIGNAL =   6; EXPRESSED IN BT474, SIGNAL = 4.3; EXPRESSED IN BONE MARROW, SIGNAL = 7.1; EXPRESSED IN HBL100, SIGNAL = 4.6; EXPRESSED IN LUNG, SIGNAL = 7.3; EXPRESSED IN ADULT LIVER, SIGNAL =   8; EXPRESSED IN PLACENTA, SIGNAL = 5.3; EXPRESSED IN FETAL LIVER, SIGNAL = 5.8; EST_HUMAN HIT: AI222985.1, EVALUE 7.70e-01
SIVIAFWVSLAAFVVLLFLILLYMSWSASPQMRW

SEQ ID NO: 34177 - protein, 29 aa, Homo sapiens
  MAP TO AP000034.1; EXPRESSED IN HELA, SIGNAL = 7.6; EXPRESSED IN BRAIN, SIGNAL = 6.2; EXPRESSED IN HEART, SIGNAL =   6; EXPRESSED IN BT474, SIGNAL = 4.3; EXPRESSED IN BONE MARROW, SIGNAL = 7.1; EXPRESSED IN HBL100, SIGNAL = 4.6; EXPRESSED IN LUNG, SIGNAL = 7.3; EXPRESSED IN ADULT LIVER, SIGNAL =   8; EXPRESSED IN PLACENTA, SIGNAL = 5.3; EXPRESSED IN FETAL LIVER, SIGNAL = 5.8; EST_HUMAN HIT: AI222985.1, EVALUE 2.40e-02
FHRDRILGEPGCLRGAALPHLALHVLVRL

SEQ ID NO: 34178 - protein, 121 aa, Homo sapiens
  MAP TO AP000025.1; EXPRESSED IN PLACENTA, SIGNAL = 0.98; EXPRESSED IN BT474, SIGNAL = 0.99; EXPRESSED IN BONE MARROW, SIGNAL = 0.86; EXPRESSED IN ADULT LIVER, SIGNAL = 0.99; EXPRESSED IN HELA, SIGNAL = 1.8; EXPRESSED IN LUNG, SIGNAL = 1.1; EXPRESSED IN FETAL LIVER, SIGNAL = 0.95; EXPRESSED IN HBL100, SIGNAL = 1.3; EXPRESSED IN HEART, SIGNAL = 0.87; EXPRESSED IN BRAIN, SIGNAL = 0.91; EST_HUMAN HIT: BE968588.1, EVALUE 4.00e-24; SWISSPROT HIT: P44811, EVALUE 6.80e+00
LSRDVFIIGITLHSIAHMVILVSRHERQSQHLHSISISPQAFPEKRAAQTIPLLVSYCLVMCWVDLIISSSSTLLWTCNPVFLSMQNLVGDVYATVVPLEQISSDKNIVDILQNMQSAIKL

SEQ ID NO: 34179 - protein, 77 aa, Homo sapiens
  MAP TO AL109760.1; EXPRESSED IN HBL100, SIGNAL = 2.1; EXPRESSED IN LUNG, SIGNAL = 2.3; EXPRESSED IN PLACENTA, SIGNAL = 5.7; EXPRESSED IN BT474, SIGNAL = 3.3; EXPRESSED IN BONE MARROW, SIGNAL = 1.8; EXPRESSED IN FETAL LIVER, SIGNAL = 3.2; EXPRESSED IN HELA, SIGNAL = 1.8; EXPRESSED IN ADULT LIVER, SIGNAL = 1.4; EXPRESSED IN BRAIN, SIGNAL = 2.1; EXPRESSED IN HEART, SIGNAL = 1.7; EST_HUMAN HIT: BF689427.1, EVALUE 5.80e-01; SWISSPROT HIT: O44221, EVALUE 5.90e+00
ITCHPASPQKNGSLGPWPWVPITEKEAGQLLVGKCPPVDGAILPPPSWNGRVIRLGFEEDHAASAAYVRGAKVRVRL

SEQ ID NO: 34180 - protein, 26 aa, Homo sapiens
  MAP TO AL096794.3; EXPRESSED IN BONE MARROW, SIGNAL = 1.8; EXPRESSED IN ADULT LIVER, SIGNAL = 1.4; EXPRESSED IN PLACENTA, SIGNAL = 1.3; EXPRESSED IN BT474, SIGNAL = 1.3; EXPRESSED IN HBL100, SIGNAL = 1.5; EXPRESSED IN FETAL LIVER, SIGNAL = 1.4; EXPRESSED IN LUNG, SIGNAL = 1.6; EXPRESSED IN HELA, SIGNAL = 1.8; EXPRESSED IN BRAIN, SIGNAL = 1.8; EXPRESSED IN HEART, SIGNAL = 1.8
PLQMKVSLKGKTVGRTFYGGFSLSLF

SEQ ID NO: 34181 - protein, 88 aa, Homo sapiens
  MAP TO AL096755.1; EXPRESSED IN PLACENTA, SIGNAL = 0.99; EXPRESSED IN HBL100, SIGNAL = 1.6; EXPRESSED IN BRAIN, SIGNAL = 1.1; EXPRESSED IN BT474, SIGNAL = 1.4; EXPRESSED IN BONE MARROW, SIGNAL = 0.9; EXPRESSED IN FETAL LIVER, SIGNAL = 1.6; EXPRESSED IN LUNG, SIGNAL = 1.1; EXPRESSED IN HELA, SIGNAL = 1.1; EXPRESSED IN ADULT LIVER, SIGNAL = 1.7; EXPRESSED IN HEART, SIGNAL = 1.1; EST_HUMAN HIT: BF527855.1, EVALUE 5.00e-02; SWISSPROT HIT: P53735, EVALUE 1.60e+00
GPTDCSSKMRKRHVTTTLRAEVLGKERKGANTGLESHGSESLRSNAGHCKRGEQIPAKPARKWLPPPPSTLHPERGQKAAVSRHVDLK

SEQ ID NO: 34182 - protein, 34 aa, Homo sapiens
  MAP TO AL080239.11; EXPRESSED IN BT474, SIGNAL = 0.73; EXPRESSED IN BONE MARROW, SIGNAL = 0.83; EXPRESSED IN FETAL LIVER, SIGNAL = 0.69; EXPRESSED IN LUNG, SIGNAL = 1.4; EXPRESSED IN HELA, SIGNAL = 0.71; EXPRESSED IN PLACENTA, SIGNAL = 1.5; EXPRESSED IN HEART, SIGNAL = 0.83; EXPRESSED IN BRAIN, SIGNAL = 1.4; EXPRESSED IN ADULT LIVER, SIGNAL = 0.67; EXPRESSED IN HBL100, SIGNAL = 1.5; EST_HUMAN HIT: BF530957.1, EVALUE 4.40e+00
SRLHHSQALHLPLHSPLLWVPFEVLLVGQCLCLF

SEQ ID NO: 34183 - protein, 575 aa, Homo sapiens
  MAP TO AL080239.11; EXPRESSED IN PLACENTA, SIGNAL = 1.9; EXPRESSED IN BT474, SIGNAL = 1.5; EXPRESSED IN BONE MARROW, SIGNAL = 1.7; EXPRESSED IN HBL100, SIGNAL = 1.4; EXPRESSED IN FETAL LIVER, SIGNAL = 1.8; EXPRESSED IN HEART, SIGNAL = 1.9; EXPRESSED IN LUNG, SIGNAL = 2.1; EXPRESSED IN HELA, SIGNAL = 1.7; EXPRESSED IN ADULT LIVER, SIGNAL = 1.9; EXPRESSED IN BRAIN, SIGNAL = 2.6; EST_HUMAN HIT: BE089592.1, EVALUE 2.00e-68; SWISSPROT HIT: Q27972, EVALUE 2.00e-15
YFSLFRSIQLFADCKKMFLWLFLILSALISSTNADSDISVEICNVCSCVSVENVLYVNCEKVSVYRPNQLKPPWSNFYHLNFQNNFLNILYPNTFLNFSHAVSLHLGNNKLQNIEGGAFLGLSALKQLHLNNNELKILRADTFLGIENLEYLQADYNLIKYIERGAFNKLHKLKVLILNDNLISFLPDNIFRFASLTHLDIRGNRIQKLPYIGVLEHIGRVVELQLEDNPWNCSCDLLPLKAWLENMPYNIYIGEAICETPSDLYGRLLKETNKQELCPMGTGSDFDVRILPPSQLENGYTTPNGHTTQTSLHRLVTKPPKTTNPSKISGIVAGKALSNRNLSQIVSYQTRVPPLTPCPAPCFCKTHPSDLGLSVNCQEKNIQSMSELIPKPLNAKKLHVNGNSIKDVDVSDFTDFEGLDLLHLGSNQITVIKGDVFHNLTNLRRLYLNGNQIERLYPEIFSGLHNLQYLYLEYNLIKEISAGTFDSMPNLQLLYLNNNLLKSLPVYIFSGAPLARLNLRNNKFMYLPVSGVLDQLQSLTQIDLEGNPWDCTCDLVALKLWVEKLSDGIVVKELK

SEQ ID NO: 34184 - protein, 37 aa, Homo sapiens
  MAP TO AL080239.11; EXPRESSED IN PLACENTA, SIGNAL = 1.9; EXPRESSED IN BT474, SIGNAL = 1.5; EXPRESSED IN BONE MARROW, SIGNAL = 1.7; EXPRESSED IN HBL100, SIGNAL = 1.4; EXPRESSED IN FETAL LIVER, SIGNAL = 1.8; EXPRESSED IN HEART, SIGNAL = 1.9; EXPRESSED IN LUNG, SIGNAL = 2.1; EXPRESSED IN HELA, SIGNAL = 1.7; EXPRESSED IN ADULT LIVER, SIGNAL = 1.9; EXPRESSED IN BRAIN, SIGNAL = 2.6; EST_HUMAN HIT: BE960636.1, EVALUE 7.40e+00
MQILTYRWKFAMCVPACQLRMCSMSTVRRFQSTDQIS

SEQ ID NO: 34185 - protein, 26 aa, Homo sapiens
  MAP TO AL079295.1; EXPRESSED IN FETAL LIVER, SIGNAL = 1.8; EXPRESSED IN LUNG, SIGNAL = 0.87; EXPRESSED IN HELA, SIGNAL = 2.3; EXPRESSED IN BRAIN, SIGNAL = 1.1; EXPRESSED IN HEART, SIGNAL = 2.3; EXPRESSED IN PLACENTA, SIGNAL = 0.74; EXPRESSED IN BT474, SIGNAL = 2.4; EXPRESSED IN BONE MARROW, SIGNAL = 0.7; EXPRESSED IN ADULT LIVER, SIGNAL = 1.9; EXPRESSED IN HBL100, SIGNAL = 2.2; EST_HUMAN HIT: AI422197.1, EVALUE 8.00e-08
QLLGESSQKHPQNQSFWFPSLVQQDL

SEQ ID NO: 34186 - protein, 33 aa, Homo sapiens
  MAP TO AL079295.1; EXPRESSED IN BT474, SIGNAL = 6.1; EXPRESSED IN BONE MARROW, SIGNAL = 1.4; EXPRESSED IN HBL100, SIGNAL = 6.7; EXPRESSED IN FETAL LIVER, SIGNAL = 5.6; EXPRESSED IN HELA, SIGNAL = 3.5; EXPRESSED IN BRAIN, SIGNAL = 3.5; EXPRESSED IN PLACENTA, SIGNAL = 2.3; EXPRESSED IN ADULT LIVER, SIGNAL = 3.7; EXPRESSED IN HEART, SIGNAL =   8; EXPRESSED IN LUNG, SIGNAL = 2.4; EST_HUMAN HIT: BE090973.1, EVALUE 3.00e-15
CCEPQQRCTSPGQRGDIDLAQRKQRFSHWHQDP

SEQ ID NO: 34187 - protein, 56 aa, Homo sapiens
  MAP TO AL078644.10; EXPRESSED IN HBL100, SIGNAL = 2.1; EXPRESSED IN FETAL LIVER, SIGNAL = 2.3; EXPRESSED IN LUNG, SIGNAL = 2.5; EXPRESSED IN HELA, SIGNAL = 2.9; EXPRESSED IN PLACENTA, SIGNAL = 2.8; EXPRESSED IN BT474, SIGNAL = 2.6; EXPRESSED IN BONE MARROW, SIGNAL = 3.1; EXPRESSED IN ADULT LIVER, SIGNAL = 2.7; EXPRESSED IN BRAIN, SIGNAL = 3.4; EXPRESSED IN HEART, SIGNAL = 2.7
ASSLYALGNTARFLSKGTNLTSYQLQMTEPMMYVRTSVPRGTSRLHTQLQRARTIN

SEQ ID NO: 34188 - protein, 74 aa, Homo sapiens
  MAP TO AL078644.10; EXPRESSED IN ADULT LIVER, SIGNAL = 1.8; EXPRESSED IN BT474, SIGNAL = 3.6; EXPRESSED IN BONE MARROW, SIGNAL = 4.3; EXPRESSED IN LUNG, SIGNAL = 3.6; EXPRESSED IN HELA, SIGNAL = 1.8; EXPRESSED IN PLACENTA, SIGNAL = 2.7; EXPRESSED IN HBL100, SIGNAL =   3; EXPRESSED IN FETAL LIVER, SIGNAL = 5.1; EXPRESSED IN BRAIN, SIGNAL = 1.9; EXPRESSED IN HEART, SIGNAL = 1.8; EST_HUMAN HIT: BE742555.1, EVALUE 5.00e-28
NTYLCLAVLDGIFCVIFLHGRNSPQSSPTSTPKLSKSLSFEMQQDELIEKPMSPMQYARSGLGTAEMNGKLIAA

SEQ ID NO: 34189 - protein, 86 aa, Homo sapiens
  MAP TO AL078598.4; EXPRESSED IN PLACENTA, SIGNAL = 1.9; EXPRESSED IN BT474, SIGNAL = 2.5; EXPRESSED IN HBL100, SIGNAL = 2.2; EXPRESSED IN HELA, SIGNAL = 2.7; EXPRESSED IN BRAIN, SIGNAL = 7.3; EXPRESSED IN HEART, SIGNAL = 2.6; EXPRESSED IN BONE MARROW, SIGNAL = 2.1; EXPRESSED IN FETAL LIVER, SIGNAL = 1.4; EXPRESSED IN LUNG, SIGNAL = 2.5; EXPRESSED IN ADULT LIVER, SIGNAL = 1.9; EST_HUMAN HIT: AW020986.1, EVALUE 8.00e-45; SWISSPROT HIT: P53986, EVALUE 5.90e+00
KQKCGKIKIQNQGITIRMPWKLTLMGFLIAQLEIMFGSSYYKYILNLAKSIDSRILLEESEWESKYTGGSNDKSTQRESWPSETMK

SEQ ID NO: 34190 - protein, 52 aa, Homo sapiens
  MAP TO AL078584.17; EXPRESSED IN PLACENTA, SIGNAL = 1.3; EXPRESSED IN LUNG, SIGNAL = 1.3; EXPRESSED IN HEART, SIGNAL = 1.3; EXPRESSED IN BONE MARROW, SIGNAL = 0.8; EXPRESSED IN BRAIN, SIGNAL = 1.9; EXPRESSED IN BT474, SIGNAL = 1.2; EXPRESSED IN ADULT LIVER, SIGNAL = 1.4; EXPRESSED IN HELA, SIGNAL = 1.5; EXPRESSED IN FETAL LIVER, SIGNAL = 0.77; EXPRESSED IN HBL100, SIGNAL = 1.2; SWISSPROT HIT: P15435, EVALUE 3.50e+00
TLPTFLPLPSFQELSWKPRSEGDKLEENGVIVSSFNIQNNLFEKEEITSRGR

SEQ ID NO: 34191 - protein, 105 aa, Homo sapiens
  MAP TO AL078584.17; EXPRESSED IN BONE MARROW, SIGNAL =   4; EXPRESSED IN HBL100, SIGNAL = 6.4; EXPRESSED IN PLACENTA, SIGNAL =   5; EXPRESSED IN FETAL LIVER, SIGNAL = 5.4; EXPRESSED IN HELA, SIGNAL =  11; EXPRESSED IN ADULT LIVER, SIGNAL =   8; EXPRESSED IN BRAIN, SIGNAL =  11; EXPRESSED IN HEART, SIGNAL = 4.5; EXPRESSED IN BT474, SIGNAL = 8.8; EXPRESSED IN LUNG, SIGNAL = 7.6
GGNGDDDYDDTDDDGGGGGSGWTGGSDDSGGSDYRDNNNCGGGKVMMIIIMMMIVVVVVLVMMVMVVMVVVVVMVMMIMMIMLMMVVVIMVVIVIVVVVVVMVVV

SEQ ID NO: 34192 - protein, 53 aa, Homo sapiens
  MAP TO AL078584.17; EXPRESSED IN BONE MARROW, SIGNAL =   4; EXPRESSED IN HBL100, SIGNAL = 6.4; EXPRESSED IN PLACENTA, SIGNAL =   5; EXPRESSED IN FETAL LIVER, SIGNAL = 5.4; EXPRESSED IN HELA, SIGNAL =  11; EXPRESSED IN ADULT LIVER, SIGNAL =   8; EXPRESSED IN BRAIN, SIGNAL =  11; EXPRESSED IN HEART, SIGNAL = 4.5; EXPRESSED IN BT474, SIGNAL = 8.8; EXPRESSED IN LUNG, SIGNAL = 7.6
SDGCSGGYGDDDYDDNVDDGGGDNGGDSYSCGGGGDGSGGEVMMMIFTMMVMV

SEQ ID NO: 34193 - protein, 98 aa, Homo sapiens
  MAP TO AL078475.2; EXPRESSED IN PLACENTA, SIGNAL = 2.7; EXPRESSED IN BRAIN, SIGNAL = 6.5; EXPRESSED IN BT474, SIGNAL = 3.6; EXPRESSED IN HBL100, SIGNAL = 2.2; EXPRESSED IN FETAL LIVER, SIGNAL = 2.9; EXPRESSED IN LUNG, SIGNAL = 2.8; EXPRESSED IN HELA, SIGNAL = 2.9; EXPRESSED IN ADULT LIVER, SIGNAL = 3.7; EXPRESSED IN BONE MARROW, SIGNAL = 1.7; EXPRESSED IN HEART, SIGNAL = 3.9; SWISSPROT HIT: Q92543, EVALUE 1.00e-46; EST_HUMAN HIT: AU135644.1, EVALUE 2.00e-45
LLLLLLTEQWKWLCIENMQKFLRLIFGTLVQRWLEVQVANLTSPQCWVQYLWLLQESIWPGGVLPKFPRPVRTQEQKLAAEKQALQSLMGVFPDLIVE

SEQ ID NO: 34194 - protein, 45 aa, Homo sapiens
  MAP TO AL050308.9; EXPRESSED IN PLACENTA, SIGNAL = 8.4; EXPRESSED IN BT474, SIGNAL = 4.1; EXPRESSED IN BONE MARROW, SIGNAL = 2.7; EXPRESSED IN HBL100, SIGNAL = 2.9; EXPRESSED IN FETAL LIVER, SIGNAL = 3.7; EXPRESSED IN HELA, SIGNAL = 3.3; EXPRESSED IN ADULT LIVER, SIGNAL = 2.8; EXPRESSED IN LUNG, SIGNAL =   3; EXPRESSED IN HEART, SIGNAL = 2.8; EXPRESSED IN BRAIN, SIGNAL = 3.5; EST_HUMAN HIT: AA781468.1, EVALUE 2.00e-04; SWISSPROT HIT: P37224, EVALUE 1.60e+00
AQEQWRAPLGASLIRRAEDTLLDLEEWKSMAGLRGRRSAVVDGGC

SEQ ID NO: 34195 - protein, 97 aa, Homo sapiens
  MAP TO AL049874.2; EXPRESSED IN PLACENTA, SIGNAL = 1.9; EXPRESSED IN HBL100, SIGNAL = 6.6; EXPRESSED IN HEART, SIGNAL = 0.98; EXPRESSED IN BONE MARROW, SIGNAL = 1.7; EXPRESSED IN ADULT LIVER, SIGNAL = 1.3; EXPRESSED IN BT474, SIGNAL = 2.6; EXPRESSED IN FETAL LIVER, SIGNAL = 1.3; EXPRESSED IN LUNG, SIGNAL = 1.6; EXPRESSED IN HELA, SIGNAL = 0.92; EXPRESSED IN BRAIN, SIGNAL = 0.96; EST_HUMAN HIT: BF437583.1, EVALUE 1.00e-36; SWISSPROT HIT: Q15475, EVALUE 2.00e-37
ENTENNNSSSNKQNQLSPLEGGKPLMSSSEEEFSPPQSPDQNSVLLLQGNMGHARSSNYSLPGLTASQPSHGLQTHQHQLQDSLLGPLTSSLVDLGS

SEQ ID NO: 34196 - protein, 18 aa, Homo sapiens
  MAP TO AL049859.7; EXPRESSED IN PLACENTA, SIGNAL = 2.2; EXPRESSED IN BONE MARROW, SIGNAL = 1.8; EXPRESSED IN ADULT LIVER, SIGNAL = 1.4; EXPRESSED IN BRAIN, SIGNAL = 3.6; EXPRESSED IN BT474, SIGNAL = 1.2; EXPRESSED IN HBL100, SIGNAL = 1.7; EXPRESSED IN FETAL LIVER, SIGNAL = 1.9; EXPRESSED IN LUNG, SIGNAL = 1.6; EXPRESSED IN HELA, SIGNAL = 1.8; EXPRESSED IN HEART, SIGNAL = 1.7
QQFLSYSPQKHRQQKENR

SEQ ID NO: 34197 - protein, 17 aa, Homo sapiens
  MAP TO AL049844.6; EXPRESSED IN BONE MARROW, SIGNAL = 2.5; EXPRESSED IN HBL100, SIGNAL = 1.5; EXPRESSED IN FETAL LIVER, SIGNAL = 1.4; EXPRESSED IN HELA, SIGNAL = 1.1; EXPRESSED IN ADULT LIVER, SIGNAL = 0.84; EXPRESSED IN BRAIN, SIGNAL = 1.4; EXPRESSED IN PLACENTA, SIGNAL = 4.8; EXPRESSED IN LUNG, SIGNAL = 1.7; EXPRESSED IN HEART, SIGNAL = 1.3; EST_HUMAN HIT: AU136661.1, EVALUE 9.00e-04
HRGATGPPQSPCGREAP

SEQ ID NO: 34198 - protein, 23 aa, Homo sapiens
  MAP TO AL049839.2; EXPRESSED IN HBL100, SIGNAL = 1.4; EXPRESSED IN PLACENTA, SIGNAL = 1.5; EXPRESSED IN HEART, SIGNAL =   2; EXPRESSED IN BRAIN, SIGNAL = 1.4; EXPRESSED IN ADULT LIVER, SIGNAL = 8.2e+02; EXPRESSED IN LUNG, SIGNAL = 4.3; EXPRESSED IN FETAL LIVER, SIGNAL = 2.9e+02; EXPRESSED IN BONE MARROW, SIGNAL = 0.8; EXPRESSED IN BT474, SIGNAL = 0.97
MKSALALPVYFSSTTVQDSSSSR

SEQ ID NO: 34199 - protein, 60 aa, Homo sapiens [sequence omitted]

SEQ ID NO: 34200 - protein, 21 aa, Homo sapiens
  MAP TO AL049839.2; EXPRESSED IN LUNG, SIGNAL = 1.4; EXPRESSED IN ADULT LIVER, SIGNAL = 3.3; EXPRESSED IN BT474, SIGNAL = 0.63; EXPRESSED IN FETAL LIVER, SIGNAL = 9.6; EXPRESSED IN HELA, SIGNAL = 0.59; EXPRESSED IN HEART, SIGNAL = 0.86; EST_HUMAN HIT: H82683.1, EVALUE 8.00e-05
VGPPELSEASVQQALSDVHCG

SEQ ID NO: 34201 - protein, 39 aa, Homo sapiens
  MAP TO AL049839.2; EXPRESSED IN FETAL LIVER, SIGNAL = 2.7e+02; EXPRESSED IN HELA, SIGNAL = 0.76; EXPRESSED IN ADULT LIVER, SIGNAL = 7.3e+02; EXPRESSED IN PLACENTA, SIGNAL = 1.4; EXPRESSED IN BONE MARROW, SIGNAL = 0.71; EXPRESSED IN BT474, SIGNAL =   1; EXPRESSED IN HEART, SIGNAL = 1.5; EXPRESSED IN BRAIN, SIGNAL = 1.2; EXPRESSED IN LUNG, SIGNAL = 3.4; EXPRESSED IN HBL100, SIGNAL = 1.5; SWISSPROT HIT: P12114, EVALUE 6.20e+00; EST_HUMAN HIT: AA336691.1, EVALUE 2.00e-16
RGESDPGEPRPRDTRGPRISLRQRGLRFQPVQAVSPEGP

SEQ ID NO: 34202 - protein, 171 aa, Homo sapiens
  MAP TO AL049839.2; EXPRESSED IN BT474, SIGNAL = 0.75; EXPRESSED IN FETAL LIVER, SIGNAL =  17; EXPRESSED IN PLACENTA, SIGNAL = 0.69; EXPRESSED IN ADULT LIVER, SIGNAL = 6.7; EXPRESSED IN HEART, SIGNAL = 0.99; SWISSPROT HIT: P05154, EVALUE 2.00e-77; EST_HUMAN HIT: AL045585.1, EVALUE 1.00e-76
MQLFLLLCLVLLSPQGASLHRHHPREMKKRVEDLHVGATVAPSSRRDFTFDLYRALASAAPSQSIFFSPVSISMSLAMLSLGAGSSTKMQILEGLGLNLQKSSEKELHRGFQQLLQELNQPRDGFQLSLGNALFTDLVVDLQDTFVSAMKTLYLADTFPTNFRDSAGAMKQ

SEQ ID NO: 34203 - protein, 23 aa, Homo sapiens
  MAP TO AL049839.2; EXPRESSED IN BT474, SIGNAL = 0.75; EXPRESSED IN FETAL LIVER, SIGNAL =  17; EXPRESSED IN PLACENTA, SIGNAL = 0.69; EXPRESSED IN ADULT LIVER, SIGNAL = 6.7; EXPRESSED IN HEART, SIGNAL = 0.99; EST_HUMAN HIT: BF091470.1, EVALUE 7.00e-08
EEESRGPPCRCHGGPQQQKGLYL

SEQ ID NO: 34204 - protein, 62 aa, Homo sapiens
  MAP TO AL049839.2; EXPRESSED IN BT474, SIGNAL = 0.75; EXPRESSED IN FETAL LIVER, SIGNAL =  17; EXPRESSED IN PLACENTA, SIGNAL = 0.69; EXPRESSED IN ADULT LIVER, SIGNAL = 6.7; EXPRESSED IN HEART, SIGNAL = 0.99; EST_HUMAN HIT: AV710231.1, EVALUE 4.00e-33; SWISSPROT HIT: P50168, EVALUE 1.70e-01
EKLREGAAQRLSAAPSGTQPAQRWLPAEPRQCPFHRPGGRPAGHLRKCHEDAVPGRHFPYQL

SEQ ID NO: 34205 - protein, 216 aa, Homo sapiens
  MAP TO AL049839.2; EXPRESSED IN ADULT LIVER, SIGNAL = 8.7; EXPRESSED IN PLACENTA, SIGNAL = 1.6; EXPRESSED IN BONE MARROW, SIGNAL = 2.4; EXPRESSED IN HBL100, SIGNAL = 1.4; EXPRESSED IN FETAL LIVER, SIGNAL =  13; EXPRESSED IN LUNG, SIGNAL = 2.3; EXPRESSED IN HELA, SIGNAL = 1.9; EXPRESSED IN BRAIN, SIGNAL = 1.8; EXPRESSED IN BT474, SIGNAL = 1.7; EXPRESSED IN HEART, SIGNAL = 2.1; EST_HUMAN HIT: N78158.1, EVALUE 4.00e-65; SWISSPROT HIT: P29622, EVALUE 1.00e-109
MHLIDYLLLLLVGLLALSHGQLHVEHDGESCSNSSHQQILETGEGSPSLKIAPANADFAFRFYYLIASETPGKNIFFSPLSISAAYAMLSLGACSHSRSQILEGLGFNLTELSESDVHRGFQHLLHTLNLPGHGLETRVGSALFLSHNLKFLAKFLNDTMAVYEAKLFHTNFYDTVGTIQLINDHVKKETRGKIVDLVSELKKDVLMVLVNYIYFK

SEQ ID NO: 34206 - protein, 25 aa, Homo sapiens
  MAP TO AL049834.2; EXPRESSED IN BT474, SIGNAL = 0.69; EXPRESSED IN HBL100, SIGNAL = 0.79; EXPRESSED IN HELA, SIGNAL = 0.75; EXPRESSED IN ADULT LIVER, SIGNAL =   1; EXPRESSED IN BRAIN, SIGNAL = 0.7; EXPRESSED IN PLACENTA, SIGNAL = 1.3; EXPRESSED IN FETAL LIVER, SIGNAL = 0.82; EXPRESSED IN LUNG, SIGNAL = 1.4; EXPRESSED IN HEART, SIGNAL = 1.6
QDTRVLPSFLSPQGNTLSSLPFLST

SEQ ID NO: 34207 - protein, 62 aa, Homo sapiens
  MAP TO AL049829.2; EXPRESSED IN HELA, SIGNAL =   1; EXPRESSED IN BT474, SIGNAL = 0.74; EXPRESSED IN LUNG, SIGNAL = 1.2; EXPRESSED IN ADULT LIVER, SIGNAL = 0.92; EXPRESSED IN HEART, SIGNAL = 3.4; EXPRESSED IN PLACENTA, SIGNAL = 0.85; EXPRESSED IN FETAL LIVER, SIGNAL = 0.88; EXPRESSED IN BRAIN, SIGNAL = 1.2; EXPRESSED IN BONE MARROW, SIGNAL = 1.2; SWISSPROT HIT: P13533, EVALUE 3.00e-30; EST_HUMAN HIT: AI351023.1, EVALUE 1.00e-14
MADFGAAAQYLRKSEKERLEAQTRPFDIRTECFVPDDKEEFVKAKILSREGGKVIAETENGK

SEQ ID NO: 34208 - protein, 103 aa, Homo sapiens
  MAP TO AL049829.2; EXPRESSED IN PLACENTA, SIGNAL = 0.71; EXPRESSED IN BT474, SIGNAL = 4.6; EXPRESSED IN BONE MARROW, SIGNAL = 0.64; EXPRESSED IN LUNG, SIGNAL = 0.96; EXPRESSED IN ADULT LIVER, SIGNAL = 0.71; EXPRESSED IN BRAIN, SIGNAL = 1.1; EXPRESSED IN HEART, SIGNAL = 1.1e+02; SWISSPROT HIT: P13533, EVALUE 3.00e-56; EST_HUMAN HIT: F00635.1, EVALUE 2.00e-28
PMGIMSILEEECMFPKATDMTFKAKLYDNHLGKSNNFQKPRNIKGKQEAHFSLIHYAGTVDYNILGWLEKNKDPLNETVVALYQKSSLKLMATLFSSYATADT

SEQ ID NO: 34209 - protein, 18 aa, Homo sapiens
  MAP TO AL049829.2; EXPRESSED IN PLACENTA, SIGNAL = 0.71; EXPRESSED IN BT474, SIGNAL = 4.6; EXPRESSED IN BONE MARROW, SIGNAL = 0.64; EXPRESSED IN LUNG, SIGNAL = 0.96; EXPRESSED IN ADULT LIVER, SIGNAL = 0.71; EXPRESSED IN BRAIN, SIGNAL = 1.1; EXPRESSED IN HEART, SIGNAL = 1.1e+02
AHGHHVHPGGGVHVPQGH

SEQ ID NO: 34210 - protein, 92 aa, Homo sapiens
  MAP TO AL049829.2; EXPRESSED IN HEART, SIGNAL = 1.7e+02; EXPRESSED IN LUNG, SIGNAL = 1.4; EXPRESSED IN BONE MARROW, SIGNAL = 0.63; EST_HUMAN HIT: C05089.1, EVALUE 3.00e-36; SWISSPROT HIT: P13533, EVALUE 3.00e-38
AAMMAEELKKEQDTSAHLERMKKNMEQTIKDLQHRLDEAEQIALKGGKKQLQKLEARVRELEGELEAEQKRNAESVKGMRKSERRIKELTYQ

SEQ ID NO: 34211 - protein, 54 aa, Homo sapiens
  MAP TO AL049829.2; EXPRESSED IN HEART, SIGNAL = 1.7e+02; EXPRESSED IN LUNG, SIGNAL = 1.4; EXPRESSED IN BONE MARROW, SIGNAL = 0.63; EST_HUMAN HIT: AA346303.1, EVALUE 2.00e-11; SWISSPROT HIT: P20009, EVALUE 2.00e+00
EKGDPWGAKGPGPWPMFLATSLLHTGRHDGRGAEEGAGHQRPPGAHEEEHGADH

SEQ ID NO: 34212 - protein, 45 aa, Homo sapiens
  MAP TO AL049829.2; EXPRESSED IN PLACENTA, SIGNAL = 2.5; EXPRESSED IN BT474, SIGNAL = 2.2; EXPRESSED IN LUNG, SIGNAL = 3.1; EXPRESSED IN HELA, SIGNAL = 3.3; EXPRESSED IN FETAL LIVER, SIGNAL = 2.3; EXPRESSED IN ADULT LIVER, SIGNAL = 2.7; EXPRESSED IN BRAIN, SIGNAL = 3.8; EXPRESSED IN BONE MARROW, SIGNAL = 3.6; EXPRESSED IN HBL100, SIGNAL = 2.3; EXPRESSED IN HEART, SIGNAL =  74; EST_HUMAN HIT: Z33564.1, EVALUE 4.00e-18; SWISSPROT HIT: P13539, EVALUE 5.00e-19
EEQANTNLSKFRKVQHELDEAEERADIAESQVNKLRAKSRDIGAK

SEQ ID NO: 34213 - protein, 49 aa, Homo sapiens
  MAP TO AL049829.2; EXPRESSED IN ADULT LIVER, SIGNAL = 1.5; EXPRESSED IN PLACENTA, SIGNAL = 1.1; EXPRESSED IN BT474, SIGNAL = 2.1; EXPRESSED IN BONE MARROW, SIGNAL = 1.4; EXPRESSED IN HBL100, SIGNAL = 1.5; EXPRESSED IN LUNG, SIGNAL = 0.9; EXPRESSED IN HELA, SIGNAL =   1; EXPRESSED IN BRAIN, SIGNAL = 2.3; EXPRESSED IN FETAL LIVER, SIGNAL = 0.94; EXPRESSED IN HEART, SIGNAL = 1.1; EST_HUMAN HIT: BE793530.1, EVALUE 2.00e-07; SWISSPROT HIT: P70345, EVALUE 3.00e-11
AEFTALYGDGALEEARRLREGNWASVRTVLTGAVALGALVTVGAFFASK

SEQ ID NO: 34214 - protein, 70 aa, Homo sapiens
  MAP TO AL049828.2; EXPRESSED IN BT474, SIGNAL = 2.2; EXPRESSED IN BONE MARROW, SIGNAL = 3.5; EXPRESSED IN LUNG, SIGNAL =   3; EXPRESSED IN HBL100, SIGNAL = 3.2; EXPRESSED IN FETAL LIVER, SIGNAL = 2.2; EXPRESSED IN HELA, SIGNAL = 3.1; EXPRESSED IN ADULT LIVER, SIGNAL = 3.1; EXPRESSED IN HEART, SIGNAL = 2.4; EXPRESSED IN PLACENTA, SIGNAL = 2.2; EXPRESSED IN BRAIN, SIGNAL = 3.5; EST_HUMAN HIT: BE177450.1, EVALUE 3.00e-11; SWISSPROT HIT: P08547, EVALUE 4.90e-01
NTTTTNVGKDVKQQELSFTADENAKWYSYFEGQFMVLTRLNILMPYYPTIIFLGIYVKEWTTYVYTETCR

SEQ ID NO: 34215 - protein, 17 aa, Homo sapiens
  MAP TO AL049798.7; EXPRESSED IN BRAIN, SIGNAL = 4.2; EXPRESSED IN HBL100, SIGNAL = 3.4; EXPRESSED IN FETAL LIVER, SIGNAL = 3.4; EXPRESSED IN ADULT LIVER, SIGNAL = 3.5; EXPRESSED IN HEART, SIGNAL = 3.4; EXPRESSED IN PLACENTA, SIGNAL = 3.6; EXPRESSED IN BT474, SIGNAL =   3; EXPRESSED IN BONE MARROW, SIGNAL = 4.2; EXPRESSED IN LUNG, SIGNAL = 3.4; EXPRESSED IN HELA, SIGNAL = 4.6
CYCREQRITMSWRNRRH

SEQ ID NO: 34216 - protein, 41 aa, Homo sapiens
  MAP TO AL049759.10; EXPRESSED IN BT474, SIGNAL = 0.95; EXPRESSED IN FETAL LIVER, SIGNAL = 0.71; EXPRESSED IN HEART, SIGNAL = 0.85; EXPRESSED IN PLACENTA, SIGNAL = 0.61; EXPRESSED IN HBL100, SIGNAL = 0.87; EXPRESSED IN LUNG, SIGNAL = 0.79; EXPRESSED IN HELA, SIGNAL = 0.75; EXPRESSED IN BRAIN, SIGNAL = 1.8; EST_HUMAN HIT: BE866848.1, EVALUE 1.00e-13; SWISSPROT HIT: P09379, EVALUE 3.10e-01
PELLDLYTVNLHRIEKDVQRCDRNYWYFTPANLEKLRNIMC

SEQ ID NO: 34217 - protein, 22 aa, Homo sapiens
  MAP TO AL049759.10; EXPRESSED IN BT474, SIGNAL = 0.95; EXPRESSED IN FETAL LIVER, SIGNAL = 0.71; EXPRESSED IN HEART, SIGNAL = 0.85; EXPRESSED IN PLACENTA, SIGNAL = 0.61; EXPRESSED IN HBL100, SIGNAL = 0.87; EXPRESSED IN LUNG, SIGNAL = 0.79; EXPRESSED IN HELA, SIGNAL = 0.75; EXPRESSED IN BRAIN, SIGNAL = 1.8; EST_HUMAN HIT: R36754.1, EVALUE 8.50e-01
EGCAEVRPQLLVLHARQLGEAA

SEQ ID NO: 34218 - protein, 39 aa, Homo sapiens
  MAP TO AL049759.10; EXPRESSED IN HBL100, SIGNAL = 0.67; EXPRESSED IN FETAL LIVER, SIGNAL = 1.1; EXPRESSED IN HELA, SIGNAL = 0.61; EXPRESSED IN ADULT LIVER, SIGNAL = 1.8; EXPRESSED IN BRAIN, SIGNAL = 0.79; EXPRESSED IN PLACENTA, SIGNAL = 0.65; EXPRESSED IN HEART, SIGNAL = 1.3; EXPRESSED IN LUNG, SIGNAL = 0.75; SWISSPROT HIT: Q61037, EVALUE 8.10e+00
AGFLRSNKIAALFMKVGKNFPPAEDLSRKVQDLEQLIES

SEQ ID NO: 34219 - protein, 79 aa, Homo sapiens
  MAP TO AL049759.10; EXPRESSED IN BONE MARROW, SIGNAL = 0.83; EXPRESSED IN ADULT LIVER, SIGNAL = 0.96; EXPRESSED IN BRAIN, SIGNAL = 2.3; EXPRESSED IN PLACENTA, SIGNAL =   1; EXPRESSED IN BT474, SIGNAL = 0.94; EXPRESSED IN HBL100, SIGNAL = 0.75; EXPRESSED IN FETAL LIVER, SIGNAL = 1.1; EXPRESSED IN LUNG, SIGNAL = 1.2; EXPRESSED IN HELA, SIGNAL = 1.3; EXPRESSED IN HEART, SIGNAL = 1.3; EST_HUMAN HIT: AU119101.1, EVALUE 3.80e+00; SWISSPROT HIT: Q05859, EVALUE 1.60e-01
MDEFMSITGSLDMALPEKDDVVMEGWRSSETEKHGQADSEDNLSEEPEMESLFPALASLAVTTSANEVSPVSSSGVTYS

SEQ ID NO: 34220 - protein, 29 aa, Homo sapiens
  MAP TO AL049759.10; EXPRESSED IN BONE MARROW, SIGNAL = 0.83; EXPRESSED IN ADULT LIVER, SIGNAL = 0.96; EXPRESSED IN BRAIN, SIGNAL = 2.3; EXPRESSED IN PLACENTA, SIGNAL =   1; EXPRESSED IN BT474, SIGNAL = 0.94; EXPRESSED IN HBL100, SIGNAL = 0.75; EXPRESSED IN FETAL LIVER, SIGNAL = 1.1; EXPRESSED IN LUNG, SIGNAL = 1.2; EXPRESSED IN HELA, SIGNAL = 1.3; EXPRESSED IN HEART, SIGNAL = 1.3; SWISSPROT HIT: Q13625, EVALUE 4.80e+00; EST_HUMAN HIT: AA860801.1, EVALUE 5.00e-11
QIGGETAQDPQWEPSERHLFPRLGSSFLP

SEQ ID NO: 34221 - protein, 58 aa, Homo sapiens
  MAP TO AL049744.7; EXPRESSED IN FETAL LIVER, SIGNAL = 8.1; EXPRESSED IN ADULT LIVER, SIGNAL =  13; EXPRESSED IN HEART, SIGNAL = 0.86; EXPRESSED IN LUNG, SIGNAL = 1.2; EST_HUMAN HIT: AW183105.1, EVALUE 1.00e-31; SWISSPROT HIT: P08603, EVALUE 1.00e-32
KCYFPYLENGYNQNHGRKFVQGKSIDVACHPGYALPKAQTTVTCMENGWSPTPRCIRV

SEQ ID NO: 34222 - protein, 58 aa, Homo sapiens
  MAP TO AL049744.7; EXPRESSED IN ADULT LIVER, SIGNAL = 5.5; EXPRESSED IN HEART, SIGNAL = 0.86; EXPRESSED IN FETAL LIVER, SIGNAL = 2.6; EST_HUMAN HIT: AV661231.1, EVALUE 5.00e-30; SWISSPROT HIT: P08603, EVALUE 4.00e-31
RECELPKIDVHLVPDRKKDQYKVGEVLKFSCKPGFTIVGPNSVQCYHFGLSPDLPICK

SEQ ID NO: 34223 - protein, 36 aa, Homo sapiens
  MAP TO AL049744.7; EXPRESSED IN HBL100, SIGNAL = 0.84; EXPRESSED IN FETAL LIVER, SIGNAL =  10; EXPRESSED IN BRAIN, SIGNAL = 1.1; EXPRESSED IN HEART, SIGNAL = 1.7; EXPRESSED IN BT474, SIGNAL = 0.77; EXPRESSED IN BONE MARROW, SIGNAL = 0.98; EXPRESSED IN LUNG, SIGNAL = 1.5; EXPRESSED IN ADULT LIVER, SIGNAL =  16; EXPRESSED IN HELA, SIGNAL = 5.5; EXPRESSED IN PLACENTA, SIGNAL = 1.2; EST_HUMAN HIT: AU117056.1, EVALUE 2.00e-14; SWISSPROT HIT: P08603, EVALUE 2.00e-15
IPNSHNMTTTLNYRDGEKVSVLCQENYLIQEGEEIT

SEQ ID NO: 34224 - protein, 51 aa, Homo sapiens
  MAP TO AL049744.7; EXPRESSED IN HBL100, SIGNAL = 0.84; EXPRESSED IN FETAL LIVER, SIGNAL =  10; EXPRESSED IN BRAIN, SIGNAL = 1.1; EXPRESSED IN HEART, SIGNAL = 1.7; EXPRESSED IN BT474, SIGNAL = 0.77; EXPRESSED IN BONE MARROW, SIGNAL = 0.98; EXPRESSED IN LUNG, SIGNAL = 1.5; EXPRESSED IN ADULT LIVER, SIGNAL =  16; EXPRESSED IN HELA, SIGNAL = 5.5; EXPRESSED IN PLACENTA, SIGNAL = 1.2; SWISSPROT HIT: Q06175, EVALUE 4.50e+00; EST_HUMAN HIT: AV661442.1, EVALUE 8.00e-22
IFFSGTNTIMPTSTSDSQFSQYDNHTELSGWRKSICSLPRKLSNSGRRRNY

SEQ ID NO: 34225 - protein, 60 aa, Homo sapiens
  MAP TO AL049694.9; EXPRESSED IN PLACENTA, SIGNAL = 2.1; EXPRESSED IN LUNG, SIGNAL = 1.5; EXPRESSED IN HELA, SIGNAL = 1.7; EXPRESSED IN BT474, SIGNAL = 3.7; EXPRESSED IN BONE MARROW, SIGNAL = 2.4; EXPRESSED IN HBL100, SIGNAL = 3.8; EXPRESSED IN FETAL LIVER, SIGNAL = 6.7; EXPRESSED IN ADULT LIVER, SIGNAL = 1.6; EXPRESSED IN BRAIN, SIGNAL = 1.6; EXPRESSED IN HEART, SIGNAL = 1.3; SWISSPROT HIT: P40617, EVALUE 2.00e-10; EST_HUMAN HIT: BE004436.1, EVALUE 4.00e-30
REKHFNLGHLFAPGNGEWAIRPDFYPVQPAFIQSFHIVILGLDCAGKTTVLYRLQFNEFV

SEQ ID NO: 34226 - protein, 38 aa, Homo sapiens [sequence omitted]

SEQ ID NO: 34227 - protein, 45 aa, Homo sapiens
  MAP TO AL049589.15; EXPRESSED IN HELA, SIGNAL = 2.4; EXPRESSED IN PLACENTA, SIGNAL = 1.4; EXPRESSED IN BT474, SIGNAL = 3.3; EXPRESSED IN FETAL LIVER, SIGNAL = 2.2; EXPRESSED IN LUNG, SIGNAL = 1.5; EXPRESSED IN BONE MARROW, SIGNAL = 1.6; EXPRESSED IN HBL100, SIGNAL = 6.1; EXPRESSED IN ADULT LIVER, SIGNAL = 1.4; EXPRESSED IN BRAIN, SIGNAL = 2.4; EXPRESSED IN HEART, SIGNAL = 1.9; EST_HUMAN HIT: AA053385.1, EVALUE 8.00e-20; SWISSPROT HIT: Q62880, EVALUE 3.00e-20
YVTTILDDAKIYSSHAKKPNVDADDVRLAIQCRADQSFTSPPPRD

SEQ ID NO: 34228 - protein, 69 aa, Homo sapiens
  MAP TO AL049589.15; EXPRESSED IN BONE MARROW, SIGNAL = 5.8; EXPRESSED IN ADULT LIVER, SIGNAL =   5; EXPRESSED IN BRAIN, SIGNAL =   8; EXPRESSED IN PLACENTA, SIGNAL = 2.9; EXPRESSED IN BT474, SIGNAL =  40; EXPRESSED IN HBL100, SIGNAL = 7.7; EXPRESSED IN LUNG, SIGNAL = 3.5; EXPRESSED IN HELA, SIGNAL =  17; EXPRESSED IN FETAL LIVER, SIGNAL = 6.3; EXPRESSED IN HEART, SIGNAL = 6.3; EST_HUMAN HIT: AA309430.1, EVALUE 4.00e-28; SWISSPROT HIT: P00558, EVALUE 6.00e-29
IGTSLFDEEGAKIVKDLMSKAEKNGVKITLPVDFVTADKFDENAKTGQATVASGIPAGWMVSHLSGLVV

SEQ ID NO: 34229 - protein, 27 aa, Homo sapiens
  MAP TO AL049589.15; EXPRESSED IN BT474, SIGNAL =   2; EXPRESSED IN HBL100, SIGNAL =   2; EXPRESSED IN FETAL LIVER, SIGNAL = 2.6; EXPRESSED IN HELA, SIGNAL = 3.4; EXPRESSED IN BRAIN, SIGNAL = 3.7; EXPRESSED IN PLACENTA, SIGNAL = 2.3; EXPRESSED IN BONE MARROW, SIGNAL = 3.1; EXPRESSED IN LUNG, SIGNAL =   3; EXPRESSED IN ADULT LIVER, SIGNAL = 2.8; EXPRESSED IN HEART, SIGNAL = 3.1; EST_HUMAN HIT: AI809921.1, EVALUE 4.80e-01
LPRLIKKRNVYFTVMEAKKSKIDKLHL

SEQ ID NO: 34230 - protein, 24 aa, Homo sapiens
  MAP TO AL049588.11; EXPRESSED IN FETAL LIVER, SIGNAL = 6.7; EXPRESSED IN BRAIN, SIGNAL = 2.2; EXPRESSED IN HEART, SIGNAL = 3.4; EXPRESSED IN BT474, SIGNAL = 4.4; EXPRESSED IN ADULT LIVER, SIGNAL =   7; EXPRESSED IN PLACENTA, SIGNAL =   2; EXPRESSED IN HELA, SIGNAL =  13; EXPRESSED IN LUNG, SIGNAL = 5.5; EXPRESSED IN HBL100, SIGNAL =  12; EXPRESSED IN BONE MARROW, SIGNAL = 7.2; SWISSPROT HIT: P11260, EVALUE 6.40e+00; EST_HUMAN HIT: AV759168.1, EVALUE 7.00e-03
VKLPNIRDKNRILKAAREKKQRAY

SEQ ID NO: 34231 - protein, 49 aa, Homo sapiens
  MAP TO AL049588.11; EXPRESSED IN BT474, SIGNAL = 7.9; EXPRESSED IN BONE MARROW, SIGNAL = 7.9; EXPRESSED IN BRAIN, SIGNAL =  10; EXPRESSED IN ADULT LIVER, SIGNAL = 9.1; EXPRESSED IN HELA, SIGNAL =  11; EXPRESSED IN LUNG, SIGNAL =  12; EXPRESSED IN HBL100, SIGNAL = 7.8; EXPRESSED IN PLACENTA, SIGNAL =  10; EXPRESSED IN HEART, SIGNAL = 8.9; EXPRESSED IN FETAL LIVER, SIGNAL = 9.9; EST_HUMAN HIT: BE062167.1, EVALUE 4.00e-16
MILTKMLVVIWTMKSRLRWSQMEMRNLLRTAVKVILAMQRDWWHFAPAL

SEQ ID NO: 34232 - protein, 28 aa, Homo sapiens
  MAP TO AL049569.13; EXPRESSED IN LUNG, SIGNAL = 1.8; EXPRESSED IN BRAIN, SIGNAL = 2.7; EXPRESSED IN HEART, SIGNAL = 1.6; EXPRESSED IN PLACENTA, SIGNAL = 1.8; EXPRESSED IN HBL100, SIGNAL = 1.8; EXPRESSED IN FETAL LIVER, SIGNAL = 1.6; EXPRESSED IN BT474, SIGNAL = 1.5; EXPRESSED IN BONE MARROW, SIGNAL = 2.5; EXPRESSED IN HELA, SIGNAL = 2.1; EXPRESSED IN ADULT LIVER, SIGNAL = 1.8; SWISSPROT HIT: Q9Y2J8, EVALUE 3.00e-09
LGGMSSKRITINKILSNESLVQENLYFQ

SEQ ID NO: 34233 - protein, 62 aa, Homo sapiens
  MAP TO AL049548.6; EXPRESSED IN PLACENTA, SIGNAL = 1.6; EXPRESSED IN LUNG, SIGNAL = 2.1; EXPRESSED IN ADULT LIVER, SIGNAL = 1.2; EXPRESSED IN BONE MARROW, SIGNAL = 4.7; EXPRESSED IN HBL100, SIGNAL = 1.1; EXPRESSED IN FETAL LIVER, SIGNAL = 1.3; EXPRESSED IN HELA, SIGNAL = 0.85; EXPRESSED IN BRAIN, SIGNAL = 1.9; EXPRESSED IN BT474, SIGNAL = 1.2; EXPRESSED IN HEART, SIGNAL = 2.1
QKTKRISAKKRDVQQQIAQAQQGEGGLPDRGHEELRKLESTLDGLERSRERQERRIQVGAGS

SEQ ID NO: 34234 - protein, 118 aa, Homo sapiens
  MAP TO AL049538.8; EXPRESSED IN PLACENTA, SIGNAL = 0.93; EXPRESSED IN BONE MARROW, SIGNAL = 0.68; EXPRESSED IN HBL100, SIGNAL = 1.2; EXPRESSED IN HEART, SIGNAL =  36; EXPRESSED IN BT474, SIGNAL = 1.3; EXPRESSED IN FETAL LIVER, SIGNAL = 0.9; EXPRESSED IN LUNG, SIGNAL = 2.8; EXPRESSED IN HELA, SIGNAL = 1.4; EXPRESSED IN ADULT LIVER, SIGNAL = 0.91; EXPRESSED IN BRAIN, SIGNAL = 1.2; EST_HUMAN HIT: R83499.1, EVALUE 2.00e-52; SWISSPROT HIT: P97680, EVALUE 2.00e-09
LTVSTFLFHLQNYLRVAFQEVNSGCTGKTLLVRPYITTEDVCQICAEKFKVGDPEEYSLFLFVDETWQQLAEDTYPQKIKAELHSRPQPHIFHFVYKRIKNDPYGIIFQNGEEDLTTS

SEQ ID NO: 34235 - protein, 303 aa, Homo sapiens
  MAP TO AL049538.8; EXPRESSED IN FETAL LIVER, SIGNAL = 8.4; EXPRESSED IN LUNG, SIGNAL = 9.7; EXPRESSED IN PLACENTA, SIGNAL = 9.1; EXPRESSED IN BONE MARROW, SIGNAL = 8.7; EXPRESSED IN HBL100, SIGNAL =   7; EXPRESSED IN ADULT LIVER, SIGNAL = 6.2; EXPRESSED IN BRAIN, SIGNAL =  10; EXPRESSED IN HEART, SIGNAL =  13; EXPRESSED IN BT474, SIGNAL = 6.7; EXPRESSED IN HELA, SIGNAL = 8.4; SWISSPROT HIT: P97680, EVALUE 2.00e-03
SGGLKRPSTRTPNANGTERTRSPPPRPPPPAINSLHTSPRLARTETQTSMPETVNHNKHGNVALPGTKPTPIPPPRLKKQASFLEAEGGAKTLSGGRPGAGPELELGTAGSPGGAPPEAAPGDCTRAPPPSSESRPPCHGGRQRLSDMSISTSSSDSLEFDRSMPLFGYEADTNSSLEDYEGESDQETMAPPIKSKKKRSSSFVLPKLVKSQLQKVSGVFSSFMTPEKRMVRRIAELSRDKCTYFGCLVQDYVSFLQENKECHVSSTDMLQTIRQFMTQVKNYLSQSSELDPPIESLIPEDQI

SEQ ID NO: 34236 - protein, 151 aa, Homo sapiens
  MAP TO AL049538.8; EXPRESSED IN HEART, SIGNAL =  54; EXPRESSED IN PLACENTA, SIGNAL = 0.79; EXPRESSED IN BT474, SIGNAL = 0.79; EXPRESSED IN LUNG, SIGNAL = 1.5; EXPRESSED IN HELA, SIGNAL = 0.63; EXPRESSED IN BONE MARROW, SIGNAL = 0.72; EXPRESSED IN HBL100, SIGNAL = 0.78; EXPRESSED IN FETAL LIVER, SIGNAL = 0.6; EXPRESSED IN BRAIN, SIGNAL = 0.9; EST_HUMAN HIT: AA425176.1, EVALUE 8.00e-52; SWISSPROT HIT: Q13671, EVALUE 2.00e-12
GVVCWLDVKVYNLCACNQCIELQMSIVRKQMLHFFFLQTIVIVATLSLADVVLEKAMHKCILKPLKGHVEAMLKDFHMADGSWKQLKENLQLVRQRNPQELGVFAPTPDFVDVEKIKVKFMTMQKMYSPEKKVMLLLRVCKLIYTVMENNS

SEQ ID NO: 34237 - protein, 110 aa, Homo sapiens
  MAP TO AL035659.21; EXPRESSED IN LUNG, SIGNAL = 2.3; EXPRESSED IN BRAIN, SIGNAL = 2.2; EXPRESSED IN HEART, SIGNAL = 1.9; EXPRESSED IN BONE MARROW, SIGNAL = 0.83; EXPRESSED IN PLACENTA, SIGNAL = 1.2; EXPRESSED IN BT474, SIGNAL =   2; EXPRESSED IN ADULT LIVER, SIGNAL = 9.1; EXPRESSED IN HELA, SIGNAL = 1.7; EXPRESSED IN FETAL LIVER, SIGNAL = 1.3; EXPRESSED IN HBL100, SIGNAL = 1.5; SWISSPROT HIT: Q10587, EVALUE 2.00e-33; EST_HUMAN HIT: BE783259.1, EVALUE 1.00e-28
FVSADKEKGKEKLEEDEAAAASTMAVSASLMPPIWDKTIPYDGESFHLEYMDLDEFLLENGIPASPTHLAHNLLLPVAELEGKESASSSTASPPSSSTAIFQPSETVSST

SEQ ID NO: 34238 - protein, 23 aa, Homo sapiens
  MAP TO AL035659.21; EXPRESSED IN LUNG, SIGNAL = 2.3; EXPRESSED IN BRAIN, SIGNAL = 2.2; EXPRESSED IN HEART, SIGNAL = 1.9; EXPRESSED IN BONE MARROW, SIGNAL = 0.83; EXPRESSED IN PLACENTA, SIGNAL = 1.2; EXPRESSED IN BT474, SIGNAL =   2; EXPRESSED IN ADULT LIVER, SIGNAL = 9.1; EXPRESSED IN HELA, SIGNAL = 1.7; EXPRESSED IN FETAL LIVER, SIGNAL = 1.3; EXPRESSED IN HBL100, SIGNAL = 1.5; EST_HUMAN HIT: BE783259.1, EVALUE 9.00e-08
RSRQHHGCLSLPHATHLGQDHPI

SEQ ID NO: 34239 - protein, 66 aa, Homo sapiens
  MAP TO AL035659.21; EXPRESSED IN ADULT LIVER, SIGNAL = 2.3; EXPRESSED IN PLACENTA, SIGNAL = 1.7; EXPRESSED IN BT474, SIGNAL = 2.5; EXPRESSED IN BONE MARROW, SIGNAL = 1.7; EXPRESSED IN FETAL LIVER, SIGNAL = 1.6; EXPRESSED IN LUNG, SIGNAL = 1.5; EXPRESSED IN HELA, SIGNAL = 1.5; EXPRESSED IN HBL100, SIGNAL = 2.9; EXPRESSED IN BRAIN, SIGNAL = 2.7; EXPRESSED IN HEART, SIGNAL = 1.5; SWISSPROT HIT: O95801, EVALUE 4.00e-04; EST_HUMAN HIT: BF057339.1, EVALUE 6.00e-32
AFLLKLVQNLFAEGNDLFREKDYKQALVQYMEGLNVADYAASDQVALPRELLCKLHVNRAACYFTM

SEQ ID NO: 34240 - protein, 156 aa, Homo sapiens
  MAP TO AL035604.15; EXPRESSED IN LUNG, SIGNAL =  17; EXPRESSED IN ADULT LIVER, SIGNAL =  47; EXPRESSED IN BRAIN, SIGNAL =  58; EXPRESSED IN PLACENTA, SIGNAL =  15; EXPRESSED IN BT474, SIGNAL = 2.2e+02; EXPRESSED IN BONE MARROW, SIGNAL =  30; EXPRESSED IN FETAL LIVER, SIGNAL =  70; EXPRESSED IN HELA, SIGNAL = 1e+02; EXPRESSED IN HEART, SIGNAL =  42; EXPRESSED IN HBL100, SIGNAL = 1.4e+02; EST_HUMAN HIT: BE744830.1, EVALUE 2.00e-60; SWISSPROT HIT: P04406, EVALUE 3.00e-61
TEYVVESTSIFTAMEKVGAHLQRGAKRVMIFAPSTEAIMFMMKVNYEKYDNSLKIISNASCTTNCLAPLAKVIHDNSGIVERLMITVHVITTTQKTVDGPCRKLRPDGHRALQNIIPASTSTAKAMVKVIPELNKKLTGMASHVPTAKVLVVDPTC

SEQ ID NO: 34241 - protein, 32 aa, Homo sapiens
  MAP TO AL035604.15; EXPRESSED IN BONE MARROW, SIGNAL = 1.5; EXPRESSED IN FETAL LIVER, SIGNAL = 1.3; EXPRESSED IN LUNG, SIGNAL = 1.3; EXPRESSED IN ADULT LIVER, SIGNAL = 1.4; EXPRESSED IN PLACENTA, SIGNAL = 1.9; EXPRESSED IN HEART, SIGNAL =   1; EXPRESSED IN BRAIN, SIGNAL = 1.1; EXPRESSED IN HELA, SIGNAL = 0.92; EXPRESSED IN HBL100, SIGNAL = 2.1; EXPRESSED IN BT474, SIGNAL = 1.8
SVFLMLQAKEENTVFNALAVFLFLQNTYCSKQ

SEQ ID NO: 34242 - protein, 43 aa, Homo sapiens
  MAP TO AL035604.15; EXPRESSED IN PLACENTA, SIGNAL =  29; EXPRESSED IN LUNG, SIGNAL =  32; EXPRESSED IN BT474, SIGNAL = 4e+02; EXPRESSED IN HBL100, SIGNAL = 2.6e+02; EXPRESSED IN FETAL LIVER, SIGNAL = 1.7e+02; EXPRESSED IN HELA, SIGNAL = 1.6e+02; EXPRESSED IN ADULT LIVER, SIGNAL = 1.1e+02; EXPRESSED IN BRAIN, SIGNAL = 1.8e+02; EXPRESSED IN BONE MARROW, SIGNAL =  59; EXPRESSED IN HEART, SIGNAL = 1.3e+02; EST_HUMAN HIT: BE383742.1, EVALUE 1.00e-08
FSRWQVGSTTNTLAVGTWEAMPVSFLFSSGMTLTIALAVLVDA

SEQ ID NO: 34243 - protein, 90 aa, Homo sapiens
  MAP TO AL035604.15; EXPRESSED IN PLACENTA, SIGNAL =  29; EXPRESSED IN LUNG, SIGNAL =  32; EXPRESSED IN BT474, SIGNAL = 4e+02; EXPRESSED IN HBL100, SIGNAL = 2.6e+02; EXPRESSED IN FETAL LIVER, SIGNAL = 1.7e+02; EXPRESSED IN HELA, SIGNAL = 1.6e+02; EXPRESSED IN ADULT LIVER, SIGNAL = 1.1e+02; EXPRESSED IN BRAIN, SIGNAL = 1.8e+02; EXPRESSED IN BONE MARROW, SIGNAL =  59; EXPRESSED IN HEART, SIGNAL = 1.3e+02; EST_HUMAN HIT: AV727478.1, EVALUE 8.00e-30; SWISSPROT HIT: P04406, EVALUE 2.00e-30
APLAKVIHDNSGIVERLMITVHVITTTQKTVDGPCRKLRPDGHRALQNIIPASTSTAKAMVKVIPELNKKLTGMASHVPTAKVLVVDPTC

SEQ ID NO: 34244 - protein, 40 aa, Homo sapiens
  MAP TO AL035469.7; EXPRESSED IN BT474, SIGNAL = 1.3; EXPRESSED IN FETAL LIVER, SIGNAL = 1.6; EXPRESSED IN LUNG, SIGNAL = 1.8; EXPRESSED IN HELA, SIGNAL = 1.6; EXPRESSED IN ADULT LIVER, SIGNAL = 1.3; EXPRESSED IN BRAIN, SIGNAL =   2; EXPRESSED IN HEART, SIGNAL = 1.6; EXPRESSED IN HBL100, SIGNAL =   1; EXPRESSED IN PLACENTA, SIGNAL = 1.4; EXPRESSED IN BONE MARROW, SIGNAL = 1.5; EST_HUMAN HIT: AW268451.1, EVALUE 3.20e-02
EVSNHGGRQRGSRHVTWQEQERERERERERGEGGKYYTFL

SEQ ID NO: 34245 - protein, 54 aa, Homo sapiens
  MAP TO AL035405.10; EXPRESSED IN LUNG, SIGNAL = 2.7; EXPRESSED IN BRAIN, SIGNAL = 3.4; EXPRESSED IN PLACENTA, SIGNAL =   4; EXPRESSED IN BT474, SIGNAL = 2.1; EXPRESSED IN FETAL LIVER, SIGNAL = 6.7; EXPRESSED IN HELA, SIGNAL = 2.7; EXPRESSED IN ADULT LIVER, SIGNAL =   3; EXPRESSED IN HEART, SIGNAL = 2.5; EXPRESSED IN BONE MARROW, SIGNAL = 2.2; EXPRESSED IN HBL100, SIGNAL = 1.9; EST_HUMAN HIT: AW295630.1, EVALUE 7.00e-27; SWISSPROT HIT: Q39575, EVALUE 1.50e+00
LPLGKIGRGFSSKDPDFHDDYGSLQNEDCGDDDPQSRLEQCRLEGYNSLEVTNV

SEQ ID NO: 34246 - protein, 20 aa, Homo sapiens
  MAP TO AL035405.10; EXPRESSED IN LUNG, SIGNAL = 2.7; EXPRESSED IN BRAIN, SIGNAL = 3.4; EXPRESSED IN PLACENTA, SIGNAL =   4; EXPRESSED IN BT474, SIGNAL = 2.1; EXPRESSED IN FETAL LIVER, SIGNAL = 6.7; EXPRESSED IN HELA, SIGNAL = 2.7; EXPRESSED IN ADULT LIVER, SIGNAL =   3; EXPRESSED IN HEART, SIGNAL = 2.5; EXPRESSED IN BONE MARROW, SIGNAL = 2.2; EXPRESSED IN HBL100, SIGNAL = 1.9; EST_HUMAN HIT: AI001948.1, EVALUE 1.00e-03
ELETFPRPSFLILVSLLPVL

SEQ ID NO: 34247 - protein, 53 aa, Homo sapiens
  MAP TO AL034555.2; EXPRESSED IN BT474, SIGNAL = 0.86; EXPRESSED IN BONE MARROW, SIGNAL = 0.87; EXPRESSED IN HEART, SIGNAL = 0.87; EXPRESSED IN PLACENTA, SIGNAL = 0.62; EXPRESSED IN HBL100, SIGNAL = 0.72; EXPRESSED IN FETAL LIVER, SIGNAL = 3.1; EXPRESSED IN LUNG, SIGNAL =   1; EXPRESSED IN HELA, SIGNAL = 0.64; EXPRESSED IN ADULT LIVER, SIGNAL = 3.7; SWISSPROT HIT: P11940, EVALUE 1.20e+00
FGKVTSVQIHGTSEERYGLVFFRQQEDQEKALTASKGKLFFGMQIEVTAWIGP

SEQ ID NO: 34248 - protein, 2665 aa, Homo sapiens
  MAP TO AL034555.2; EXPRESSED IN BONE MARROW, SIGNAL =  10; EXPRESSED IN FETAL LIVER, SIGNAL = 8.9; EXPRESSED IN ADULT LIVER, SIGNAL = 4.8; EXPRESSED IN PLACENTA, SIGNAL =  14; EXPRESSED IN HEART, SIGNAL = 7.2; EXPRESSED IN BRAIN, SIGNAL = 9.5; EXPRESSED IN HELA, SIGNAL = 7.1; EXPRESSED IN LUNG, SIGNAL = 9.3; EXPRESSED IN HBL100, SIGNAL = 7.7; EXPRESSED IN BT474, SIGNAL =  12; EST_HUMAN HIT: AU117052.1, EVALUE 0.00e+00; SWISSPROT HIT: P08640, EVALUE 3.00e-10
EERRASYDYNQDRTYYESVRTPGTYPEDSRRDYPARGREFYSEWETYQGDYYESRYYDDPREYRDYRNDPYEQDIREYSYRQRERERERERFESDRDRDHERRPIERSQSPVHLRRPQSPGASPSQAERLPSDSERRLYSRSSDRSGSCSSLSPPRYEKLDKSRLERYTKNEKTDKERTFDPERVERERRLIRKEKVEKDKTDKQKRKGKVHSPSSQSSETDQENEREQSPEKPRSCNKLSREKADKEGIAKNRLELMPCVVLTRVKEKEGKVIDHTPVEKLKAKLDNDTVKSSALDQKLQVSQTEPAKSDLSKLESVRMKVPKEKGLSSHVEVVEKEGRLKARKHLKPEQPADGVSAVDLEKLEARKRRFADSNLKAEKQKPEVKKSSPEMEDARVLSKKQPDVSSREVILLREGEAERKPVRKEILKRESKKIKLDRLNTVASPKDCQELASISVGSGSRPSSDLQARLGELAGESVENQEVQSKKPIPSKPQLKQLQVLDDQGPEREDVRKNYCSLRDETPERKSGQEKSHSVNTEEKIGIDIDHTQSYRKQMEQSRRKQQMEMEIAKSEKFGSPKKDVDEYERRSLVHEVGKPPQDVTDDSPPSKKKRMDHVDFDICTKRERNYRSSRQISEDSERTGGSPSVRHGSFHEDEDPIGSPRLLSVKGSPKVDEKVLPYSNITVREESLKFNPYDSSRREQMADMAKIKLSVLNSEDELNRWDSQMKQDAGRFDVSFPNSIIKRDSLRKRSVRDLEPGEVPSDSDEDGEHKSHSPRASALYESSRLSFLLRDREDKLRERDERLSSSLERNKFYSFALDKTITPDTKALLERAKSLSSSREENWSFLDWDSRFANFRNNKDKEKVDSAPRPIPSWYMKKKKIRTDSEGKMDDKKEDHKEEEQERQELFASRFLHSSIFEQDSKRLQHLERKEEDSDFISGRIYGKQTSEGANSTTDSIQEPVVLFHSRFMELTRMQQKEKEKDQKPKEVEKQEDTENHPKTPESAPENKDSELKTPPSVGPPSVTVVTLESAPSALEKTTGDKTVEAPLVTEEKTVEPATVSEEAKPASEPAPAPVEQLEQVDLPPGADPDKEAAMMPAGVEEGSSGDQPPYLDAKPPTPGASFSQAESNVDPEPDSTQPLSKPAQKSEEANEPKAEKPDATADAEPDANQKAEAAPESQPPASEDLEVDPPVAAKDKKPNKSKRSKTPVQAAAVSIVEKPVTRKSERIDREKLKRSNSPRGEAQKLLELKMEAEKITRTASKNSAADLEHPEPSLPLSRTRRRNVRSVYATMGDHENRSPVKEPVEQPRVTRKRLERELQEAAAVPTTPRRGRPPKTRRRADEEEENEAKEPAETLKPPEGWRSPRSQKTAAGGGPQGKKGKNEPKVDATRPEATTEVGPQIGVKESSMEPKAAEEEAGSEQKRDRKDAGTDKNPPETAPVEVVEKKPAPEKNSKSKRGRSRNSRLAVDKSASLKNVDAAVSPRGAAAQAGERESGVVAVSPEKSESPQKEDGLSSQLKSDPVDPDKEPEKEDVSASGPSPEATQLAKQMELEQAVEHIAKLAEASASAAYKADAPEGLAPEDRDKPAHQASETELAAAIGSIINDISGEPENFPAPPPYPGESQTDLQPPAGAQALQPSEEGMETDEAVSGILETEAATESSRPPVNAPDPSAGPTDTKEARGNSSETSHSVPEAKGSKEVEVTLVRKDKGRQKTTRSRRKRNTNKKVVAPVESHVPESNQAQGESPAANEGTTVQHPEAPQEEKQSEKPHSTPPQSCTSDLSKIPSTENSSQEISVEERTPTKASVPPDLPPPPQPAPVDEEPQARFRVHSIIESDPVTPPSDPSIPIPTLPSVTAAKLSPPVASGGIPHQSPPTKVTEWITRQEEPRAQSTPSPALPPDTKASDVDTSSSTLRKILMDPKYVSATSVTSTSVTTAIAEPVSAAPCLHEAPPPPVDSKKPLEEKTAPPVTNNSEIQASEVLVAADKEKVAPVIAPKITSVISRMPVSIDLENSQKITLAKPAPQTLTGLVSALTGLVNVSLVPVNALKGPVKGSVTTLKSLVSTPAGPVNVLKGPVNVLTGPVNVLTTPVNATVGTVNAAPGTVNAAASAVNATASAVTVTAGAVTAASGGVTATTGTVTMAGAVIAPSTKCKQRASANENSRFHPGSMPVIDDRPADAGSGAGLRVNTSEGVVLLSYSGQKTEGPQRISAKISQIPPASAMDIEFQQSVSKSQVKPDSVTASQPPSKGPQAPAGYANVATHSTLVLTAQTYNASPVISSVKADRPSLEKPEPIHLSVSTPVTQGGTVKVLTQGINTPPVLVHNQLVLTPSIVTTNKKLADPVTLKIETKVLQPANLGSTLTPHHPPALPSKLPTEVNHVPSGPSIPADRTVSHLAAAKLDAHSPRPSGPGPSSFPRASHPSSTASTALSTNATVMLAAGIPVPQFISSIHPEQSVIMPPHSITQTVSLSHLSQGEVRMNTPTLPSITYSIRPEALHSPRAPLQPQQIEVRAPQRASTPQPAPAGVPALASQHPPEEEVHYHLPVARATAPVQSEVLVMQSEYRLHPYTVPRDVRIMVHPHVTAVSEQPRAADGVVKVPPASKAPQQPGKEAAKTPDAKAAPTPTPAPVPVPVPLPAPAPAPHGEARILTVTPSNQLQGLP

SEQ ID NO: 34249 - protein, 33 aa, Homo sapiens
  MAP TO AL034449.1; EXPRESSED IN PLACENTA, SIGNAL = 1.4; EXPRESSED IN BT474, SIGNAL = 0.86; EXPRESSED IN BONE MARROW, SIGNAL = 0.98; EXPRESSED IN FETAL LIVER, SIGNAL = 0.85; EXPRESSED IN LUNG, SIGNAL = 1.5; EXPRESSED IN HELA, SIGNAL =   1; EXPRESSED IN HBL100, SIGNAL = 1.1; EXPRESSED IN ADULT LIVER, SIGNAL = 1.1; EXPRESSED IN BRAIN, SIGNAL = 1.5; EXPRESSED IN HEART, SIGNAL = 1.3
TTKKISSSGPFVLQSASHKNTGVTLGLGNATVL

SEQ ID NO: 34250 - protein, 38 aa, Homo sapiens
  MAP TO AL034449.1; EXPRESSED IN PLACENTA, SIGNAL = 2.4; EXPRESSED IN BONE MARROW, SIGNAL = 2.2; EXPRESSED IN LUNG, SIGNAL = 2.1; EXPRESSED IN ADULT LIVER, SIGNAL = 1.9; EXPRESSED IN BRAIN, SIGNAL = 2.7; EXPRESSED IN BT474, SIGNAL = 2.4; EXPRESSED IN HBL100, SIGNAL = 2.7; EXPRESSED IN FETAL LIVER, SIGNAL = 2.1; EXPRESSED IN HELA, SIGNAL = 2.7; EXPRESSED IN HEART, SIGNAL = 2.2; EST_HUMAN HIT: AA078318.1, EVALUE 4.00e-11; SWISSPROT HIT: P04025, EVALUE 4.70e+00
RELDRFLLSRDITLVHYIDDIMLIGSSEQEAANTLDLL

SEQ ID NO: 34251 - protein, 22 aa, Homo sapiens
  MAP TO AL034449.1; EXPRESSED IN PLACENTA, SIGNAL = 2.4; EXPRESSED IN BONE MARROW, SIGNAL = 2.2; EXPRESSED IN LUNG, SIGNAL = 2.1; EXPRESSED IN ADULT LIVER, SIGNAL = 1.9; EXPRESSED IN BRAIN, SIGNAL = 2.7; EXPRESSED IN BT474, SIGNAL = 2.4; EXPRESSED IN HBL100, SIGNAL = 2.7; EXPRESSED IN FETAL LIVER, SIGNAL = 2.1; EXPRESSED IN HELA, SIGNAL = 2.7; EXPRESSED IN HEART, SIGNAL = 2.2; EST_HUMAN HIT: AA078318.1, EVALUE 2.00e-04
ENLIAFCFPEISHWSITLMTLC

SEQ ID NO: 34252 - protein, 78 aa, Homo sapiens
  MAP TO AL034424.9; EXPRESSED IN HBL100, SIGNAL = 8.1; EXPRESSED IN BT474, SIGNAL =  11; EXPRESSED IN BONE MARROW, SIGNAL =  13; EXPRESSED IN FETAL LIVER, SIGNAL = 8.1; EXPRESSED IN HELA, SIGNAL =  12; EXPRESSED IN ADULT LIVER, SIGNAL =  10; EXPRESSED IN BRAIN, SIGNAL =  12; EXPRESSED IN PLACENTA, SIGNAL = 9.7; EXPRESSED IN LUNG, SIGNAL =  16; EXPRESSED IN HEART, SIGNAL =  11; SWISSPROT HIT: Q13183, EVALUE 5.00e-25; EST_HUMAN HIT: BE895402.1, EVALUE 2.00e-39
MAVYWCTEALPLSVTALLPIVLFPFMGILPSNKVCPQYFLDTNFLFLSGLIMASAIEEWNLHRRIALKILMLVGVQPA

SEQ ID NO: 34253 - protein, 109 aa, Homo sapiens
  MAP TO AL034395.6; EXPRESSED IN PLACENTA, SIGNAL = 6.3; EXPRESSED IN FETAL LIVER, SIGNAL =  10; EXPRESSED IN LUNG, SIGNAL =  15; EXPRESSED IN BT474, SIGNAL =  13; EXPRESSED IN HEART, SIGNAL =  16; EXPRESSED IN BRAIN, SIGNAL =  11; EXPRESSED IN ADULT LIVER, SIGNAL =  67; EXPRESSED IN HELA, SIGNAL =  11; EXPRESSED IN HBL100, SIGNAL =  16; EXPRESSED IN BONE MARROW, SIGNAL =  13; EST_HUMAN HIT: BF087982.1, EVALUE 2.30e+00; SWISSPROT HIT: P53188, EVALUE 4.50e+00
QISNSPTLPPSRNGERILANFKWQEWGLKKRDDINPTVFQVALAKLKQIRHVQWFKYTMFKSIKENERIHLLPLTRSLRPGCEDDTTGELTLKDAGMPVLKFTSFFLTL

SEQ ID NO: 34254 - protein, 28 aa, Homo sapiens
  MAP TO AL034395.6; EXPRESSED IN PLACENTA, SIGNAL = 6.3; EXPRESSED IN FETAL LIVER, SIGNAL =  10; EXPRESSED IN LUNG, SIGNAL =  15; EXPRESSED IN BT474, SIGNAL =  13; EXPRESSED IN HEART, SIGNAL =  16; EXPRESSED IN BRAIN, SIGNAL =  11; EXPRESSED IN ADULT LIVER, SIGNAL =  67; EXPRESSED IN HELA, SIGNAL =  11; EXPRESSED IN HBL100, SIGNAL =  16; EXPRESSED IN BONE MARROW, SIGNAL =  13
IKFLTLLPCHHQETVSVFLPISNGRSGD

SEQ ID NO: 34255 - protein, 33 aa, Homo sapiens
  MAP TO AL033525.10; EXPRESSED IN PLACENTA, SIGNAL = 1.9; EXPRESSED IN BONE MARROW, SIGNAL = 1.6; EXPRESSED IN BT474, SIGNAL = 1.4; EXPRESSED IN ADULT LIVER, SIGNAL = 1.7; EXPRESSED IN HELA, SIGNAL = 1.7; EXPRESSED IN LUNG, SIGNAL = 1.7; EXPRESSED IN FETAL LIVER, SIGNAL = 1.4; EXPRESSED IN HBL100, SIGNAL = 1.5; EXPRESSED IN HEART, SIGNAL = 1.7; EXPRESSED IN BRAIN, SIGNAL = 2.1
GSEHTGVTHVKEVEYTLEGIDSPLEELSQDGRG

SEQ ID NO: 34256 - protein, 26 aa, Homo sapiens
  MAP TO AL033524.11; EXPRESSED IN HBL100, SIGNAL = 5.7; EXPRESSED IN HEART, SIGNAL = 4.9; EXPRESSED IN PLACENTA, SIGNAL = 4.4; EXPRESSED IN BT474, SIGNAL =  13; EXPRESSED IN BONE MARROW, SIGNAL = 3.9; EXPRESSED IN FETAL LIVER, SIGNAL = 5.4; EXPRESSED IN LUNG, SIGNAL = 4.2; EXPRESSED IN HELA, SIGNAL = 9.7; EXPRESSED IN ADULT LIVER, SIGNAL = 3.4; EXPRESSED IN BRAIN, SIGNAL = 5.9; EST_HUMAN HIT: AW862350.1, EVALUE 4.70e-02
SQPPGGRLIMLDLFHHGKGRGLSSLE

SEQ ID NO: 34257 - protein, 36 aa, Homo sapiens
  MAP TO AL033379.2; EXPRESSED IN BRAIN, SIGNAL = 0.77; EXPRESSED IN HEART, SIGNAL = 0.9; EXPRESSED IN PLACENTA, SIGNAL = 0.72; EXPRESSED IN HBL100, SIGNAL = 1.8; EXPRESSED IN FETAL LIVER, SIGNAL = 1.3; EXPRESSED IN LUNG, SIGNAL = 0.93; EXPRESSED IN HELA, SIGNAL =   2; EXPRESSED IN BT474, SIGNAL = 0.97; EXPRESSED IN BONE MARROW, SIGNAL = 1.1; EXPRESSED IN ADULT LIVER, SIGNAL = 1.2
PLSLLLSHSHIVMDMIVLNADISEIQEGFLELHLCN

SEQ ID NO: 34258 - protein, 188 aa, Homo sapiens
  MAP TO AL033379.2; EXPRESSED IN FETAL LIVER, SIGNAL = 2.4; EXPRESSED IN BRAIN, SIGNAL = 3.2; EXPRESSED IN HEART, SIGNAL = 2.5; EXPRESSED IN BONE MARROW, SIGNAL =   2; EXPRESSED IN LUNG, SIGNAL = 3.4; EXPRESSED IN PLACENTA, SIGNAL = 1.8; EXPRESSED IN BT474, SIGNAL = 1.4; EXPRESSED IN ADULT LIVER, SIGNAL = 2.5; EXPRESSED IN HELA, SIGNAL =   3; EXPRESSED IN HBL100, SIGNAL = 1.9; EST_HUMAN HIT: BE798784.1, EVALUE 1.00e-11; SWISSPROT HIT: Q91081, EVALUE 6.00e-17
MAPTGLSSLTVNSTAVPTTPAAFKSLNLPLQITLSAIMIFILFVSFLGNLVVCLMVYQKAAMRSAINILLASLAFADMLLAVLNMPFALVTILTTRWIFGKFFCRVSAMFFWLFVIEGVAILLIISIDRFLIIVQRQDKLNPYRAKVLIAVSWATSFCVAFPLAVGNPDLQIPSRAPQCVFGYTTNPG

SEQ ID NO: 34259 - protein, 57 aa, Homo sapiens
  MAP TO AL031984.13; EXPRESSED IN BONE MARROW, SIGNAL = 9.1; EXPRESSED IN ADULT LIVER, SIGNAL = 5.3; EXPRESSED IN BRAIN, SIGNAL = 7.6; EXPRESSED IN PLACENTA, SIGNAL = 8.2; EXPRESSED IN BT474, SIGNAL = 5.3; EXPRESSED IN HBL100, SIGNAL = 5.8; EXPRESSED IN FETAL LIVER, SIGNAL = 7.6; EXPRESSED IN LUNG, SIGNAL =   6; EXPRESSED IN HELA, SIGNAL =   5; EXPRESSED IN HEART, SIGNAL = 4.5; SWISSPROT HIT: P39059, EVALUE 7.70e+00; EST_HUMAN HIT: AV737625.1, EVALUE 9.40e-01
TRGGELPSKLFPGKRVLALDPCGIPSPPGRERLLGLWEGRIFFNPSGSASKGGWQLG

SEQ ID NO: 34260 - protein, 59 aa, Homo sapiens
  MAP TO AL031965.7; EXPRESSED IN BONE MARROW, SIGNAL = 4.7; EXPRESSED IN LUNG, SIGNAL = 3.5; EXPRESSED IN HELA, SIGNAL = 9.6; EXPRESSED IN ADULT LIVER, SIGNAL = 3.6; EXPRESSED IN BRAIN, SIGNAL = 3.6; EXPRESSED IN HEART, SIGNAL =   2; EXPRESSED IN PLACENTA, SIGNAL = 3.3; EXPRESSED IN BT474, SIGNAL = 5.4; EXPRESSED IN HBL100, SIGNAL =  12; EXPRESSED IN FETAL LIVER, SIGNAL = 5.8; SWISSPROT HIT: Q59036, EVALUE 7.60e+00; EST_HUMAN HIT: BF669879.1, EVALUE 2.70e+00
PQTKVPCWGLFGIYVEGCKNMVDSKIKESYFESADQCLDGRLADCGPGSKPRNDPVSLQ

SEQ ID NO: 34261 - protein, 56 aa, Homo sapiens
  MAP TO AL031885.3; EXPRESSED IN FETAL LIVER, SIGNAL = 4.4; EXPRESSED IN BT474, SIGNAL = 3.1; EXPRESSED IN BONE MARROW, SIGNAL =   2; EXPRESSED IN HBL100, SIGNAL = 5.6; EXPRESSED IN HELA, SIGNAL = 3.7; EXPRESSED IN ADULT LIVER, SIGNAL =   3; EXPRESSED IN BRAIN, SIGNAL = 3.9; EXPRESSED IN PLACENTA, SIGNAL = 1.2; EXPRESSED IN LUNG, SIGNAL = 1.5; EXPRESSED IN HEART, SIGNAL = 2.7; EST_HUMAN HIT: BE744874.1, EVALUE 7.00e-18; SWISSPROT HIT: Q05470, EVALUE 2.60e+00
ILRMRMRMTTMEKNMMWKHMNEEKGTSLNLTPMKDYPINSRRPSHIGEIRRNAFSS

SEQ ID NO: 34262 - protein, 63 aa, Homo sapiens
  MAP TO AL031734.9; EXPRESSED IN HBL100, SIGNAL = 0.87; EXPRESSED IN PLACENTA, SIGNAL =  74; EXPRESSED IN BT474, SIGNAL = 0.84; EXPRESSED IN BONE MARROW, SIGNAL =   1; EXPRESSED IN FETAL LIVER, SIGNAL = 0.82; EXPRESSED IN LUNG, SIGNAL = 0.9; EXPRESSED IN HELA, SIGNAL = 0.89; EXPRESSED IN ADULT LIVER, SIGNAL = 0.8; EXPRESSED IN BRAIN, SIGNAL = 0.79; EXPRESSED IN HEART, SIGNAL =   1; EST_HUMAN HIT: AI075970.1, EVALUE 7.00e-03
GEGSYREAETFNSQVGLPILYFSGRRERLLLRPEVLAEIPREAFTVEAWVKPEGGQNNPAIIA

SEQ ID NO: 34263 - protein, 84 aa, Homo sapiens
  MAP TO AL031734.9; EXPRESSED IN LUNG, SIGNAL = 0.97; EXPRESSED IN HELA, SIGNAL = 0.88; EXPRESSED IN BRAIN, SIGNAL = 0.94; EXPRESSED IN HEART, SIGNAL = 0.85; EXPRESSED IN PLACENTA, SIGNAL = 1.8; EXPRESSED IN ADULT LIVER, SIGNAL = 0.8; EXPRESSED IN FETAL LIVER, SIGNAL = 0.78; EXPRESSED IN HBL100, SIGNAL = 0.75; EXPRESSED IN BONE MARROW, SIGNAL = 0.89; EXPRESSED IN BT474, SIGNAL = 0.65; EST_HUMAN HIT: BF343692.1, EVALUE 1.80e+00; SWISSPROT HIT: P25603, EVALUE 6.30e+00
NSIMFSGQYFGRQSPFLDPIKIPTKLLAASSAEACKEYQHGMGTNGQQYTFQPTIHISHVRVSKELREPRACGPGMCTVGCGEV

SEQ ID NO: 34264 - protein, 70 aa, Homo sapiens
  MAP TO AL031734.9; EXPRESSED IN BT474, SIGNAL = 1.6; EXPRESSED IN HELA, SIGNAL = 1.3; EXPRESSED IN PLACENTA, SIGNAL =  44; EXPRESSED IN FETAL LIVER, SIGNAL = 1.6; EXPRESSED IN LUNG, SIGNAL = 1.8; EXPRESSED IN ADULT LIVER, SIGNAL = 1.4; EXPRESSED IN BONE MARROW, SIGNAL = 1.9; EXPRESSED IN HBL100, SIGNAL = 1.1; EXPRESSED IN BRAIN, SIGNAL = 1.1; EXPRESSED IN HEART, SIGNAL = 4.6; SWISSPROT HIT: P28977, EVALUE 1.60e+00; EST_HUMAN HIT: BF366974.1, EVALUE 4.00e-36
VFDNCSHTVSDKGWALGIRSGKDKGKRDARFFFSLCTDRVKKATILISHSRYQPGTWTHVAATYDGRHMA

SEQ ID NO: 34265 - protein, 192 aa, Homo sapiens
  MAP TO AL031734.9; EXPRESSED IN BT474, SIGNAL = 1.6; EXPRESSED IN HELA, SIGNAL = 1.3; EXPRESSED IN PLACENTA, SIGNAL =  44; EXPRESSED IN FETAL LIVER, SIGNAL = 1.6; EXPRESSED IN LUNG, SIGNAL = 1.8; EXPRESSED IN ADULT LIVER, SIGNAL = 1.4; EXPRESSED IN BONE MARROW, SIGNAL = 1.9; EXPRESSED IN HBL100, SIGNAL = 1.1; EXPRESSED IN BRAIN, SIGNAL = 1.1; EXPRESSED IN HEART, SIGNAL = 4.6; EST_HUMAN HIT: AU140701.1, EVALUE 2.00e-53; SWISSPROT HIT: P07207, EVALUE 3.00e-04
DEKYPRLEVLQGFEPEPEILSPLQPPLCGQTVCDNVELISQYNGYWPLRGEKVIRYQVVNICDDEGLNPIVSEEQIRLQHEALNEAFSRYNISWQLSVHQVHNSTLRHRVVLVNCEPSKIGNDHCDPECEHPLTGYDGGDCRLQGRCYSWNRRDGLCHVECNNMLNDFDDGDCCDPQVADVRKTCFDPDSPK

SEQ ID NO: 34266 - protein, 27 aa, Homo sapiens
  MAP TO AL031734.9; EXPRESSED IN BT474, SIGNAL = 1.6; EXPRESSED IN HELA, SIGNAL = 1.3; EXPRESSED IN PLACENTA, SIGNAL =  44; EXPRESSED IN FETAL LIVER, SIGNAL = 1.6; EXPRESSED IN LUNG, SIGNAL = 1.8; EXPRESSED IN ADULT LIVER, SIGNAL = 1.4; EXPRESSED IN BONE MARROW, SIGNAL = 1.9; EXPRESSED IN HBL100, SIGNAL = 1.1; EXPRESSED IN BRAIN, SIGNAL = 1.1; EXPRESSED IN HEART, SIGNAL = 4.6; EST_HUMAN HIT: BF366974.1, EVALUE 1.00e-06
AGPWGSAQGRTRESGMLASSSPSAPTA

SEQ ID NO: 34267 - protein, 78 aa, Homo sapiens
  MAP TO AL031729.16; EXPRESSED IN FETAL LIVER, SIGNAL = 2.5; EXPRESSED IN HELA, SIGNAL =   3; EXPRESSED IN HEART, SIGNAL = 1.3; EXPRESSED IN BT474, SIGNAL = 1.5; EXPRESSED IN BONE MARROW, SIGNAL = 3.6; EXPRESSED IN BRAIN, SIGNAL = 1.7; EXPRESSED IN ADULT LIVER, SIGNAL = 1.8; EXPRESSED IN LUNG, SIGNAL = 3.1; EXPRESSED IN HBL100, SIGNAL = 1.6; EXPRESSED IN PLACENTA, SIGNAL =   2; SWISSPROT HIT: P09769, EVALUE 3.00e-40; EST_HUMAN HIT: BE561757.1, EVALUE 2.00e-41
EPGMGCVFCKKLEPVATAKEDAGLEGDFRSYGAADHYGPDPTKARPASSFAHIPNYSNFSSQAINPGFLDSGTIRGVS

SEQ ID NO: 34268 - protein, 26 aa, Homo sapiens
  MAP TO AL031729.16; EXPRESSED IN FETAL LIVER, SIGNAL = 2.5; EXPRESSED IN HELA, SIGNAL =   3; EXPRESSED IN HEART, SIGNAL = 1.3; EXPRESSED IN BT474, SIGNAL = 1.5; EXPRESSED IN BONE MARROW, SIGNAL = 3.6; EXPRESSED IN BRAIN, SIGNAL = 1.7; EXPRESSED IN ADULT LIVER, SIGNAL = 1.8; EXPRESSED IN LUNG, SIGNAL = 3.1; EXPRESSED IN HBL100, SIGNAL = 1.6; EXPRESSED IN PLACENTA, SIGNAL =   2; SWISSPROT HIT: Q98938, EVALUE 2.90e+00; EST_HUMAN HIT: BE561757.1, EVALUE 3.00e-10
AGGHGQGGCWPGRGLQKLRGSRPLWA

SEQ ID NO: 34269 - protein, 66 aa, Homo sapiens
  MAP TO AL031729.16; EXPRESSED IN BT474, SIGNAL =  17; EXPRESSED IN HBL100, SIGNAL =  34; EXPRESSED IN HELA, SIGNAL = 8.5; EXPRESSED IN BRAIN, SIGNAL =  14; EXPRESSED IN PLACENTA, SIGNAL = 6.1; EXPRESSED IN BONE MARROW, SIGNAL = 7.2; EXPRESSED IN FETAL LIVER, SIGNAL =  25; EXPRESSED IN LUNG, SIGNAL =  12; EXPRESSED IN ADULT LIVER, SIGNAL =  12; EXPRESSED IN HEART, SIGNAL =  13; EST_HUMAN HIT: BF681218.1, EVALUE 1.00e-16
VCGRGGRCHVRPRRWQEEATETAQEAGQGDGRGRQGFQAETKRGAEETRGAKSEGRGEGALGHRWN

SEQ ID NO: 34270 - protein, 35 aa, Homo sapiens
  MAP TO AL031655.7; EXPRESSED IN PLACENTA, SIGNAL =  11; EXPRESSED IN BT474, SIGNAL = 1.5; EXPRESSED IN LUNG, SIGNAL = 1.4; EXPRESSED IN HELA, SIGNAL = 1.1; EXPRESSED IN HBL100, SIGNAL = 1.3; EXPRESSED IN FETAL LIVER, SIGNAL = 1.8; EXPRESSED IN ADULT LIVER, SIGNAL = 1.7; EXPRESSED IN BRAIN, SIGNAL = 1.3; EXPRESSED IN BONE MARROW, SIGNAL = 1.6; EXPRESSED IN HEART, SIGNAL = 1.6; EST_HUMAN HIT: BF445366.1, EVALUE 5.70e+00
QMHPSIKTCWWITTSAPLPLMWDNSKICVITSHPQ

SEQ ID NO: 34271 - protein, 34 aa, Homo sapiens
  MAP TO AL031654.6; EXPRESSED IN PLACENTA, SIGNAL = 1.3; EXPRESSED IN FETAL LIVER, SIGNAL = 2.6; EXPRESSED IN LUNG, SIGNAL =   2; EXPRESSED IN HEART, SIGNAL = 1.8; EXPRESSED IN BT474, SIGNAL =   2; EXPRESSED IN BONE MARROW, SIGNAL = 1.9; EXPRESSED IN HBL100, SIGNAL = 3.1; EXPRESSED IN HELA, SIGNAL = 2.9; EXPRESSED IN ADULT LIVER, SIGNAL = 1.4; EXPRESSED IN BRAIN, SIGNAL = 1.3
LIMTTINIMIITIITTTSIIITSSIVVIIITTTT

SEQ ID NO: 34272 - protein, 80 aa, Homo sapiens
  MAP TO AL023804.1; EXPRESSED IN PLACENTA, SIGNAL =  13; EXPRESSED IN HBL100, SIGNAL =  52; EXPRESSED IN FETAL LIVER, SIGNAL =  36; EXPRESSED IN LUNG, SIGNAL =  18; EXPRESSED IN HELA, SIGNAL =  62; EXPRESSED IN BRAIN, SIGNAL =  36; EXPRESSED IN HEART, SIGNAL =  45; EXPRESSED IN BT474, SIGNAL =  83; EXPRESSED IN BONE MARROW, SIGNAL =  20; EXPRESSED IN ADULT LIVER, SIGNAL =  24; SWISSPROT HIT: Q28309, EVALUE 1.00e+00; EST_HUMAN HIT: BF207831.1, EVALUE 1.50e+00
VREGVNPVLVTPFWPRVEVQQYMTLFKLHFLILYSWWVVMQLTCILILYLATLLYHISGLSHNMVICWNKKPKISRTFND

SEQ ID NO: 34273 - protein, 46 aa, Homo sapiens
  MAP TO AL023799.5; EXPRESSED IN PLACENTA, SIGNAL = 2.4; EXPRESSED IN BT474, SIGNAL = 1.1; EXPRESSED IN FETAL LIVER, SIGNAL =   1; EXPRESSED IN LUNG, SIGNAL =   1; EXPRESSED IN HELA, SIGNAL = 0.97; EXPRESSED IN ADULT LIVER, SIGNAL =   1; EXPRESSED IN BONE MARROW, SIGNAL = 1.2; EXPRESSED IN HBL100, SIGNAL = 1.1; EXPRESSED IN BRAIN, SIGNAL = 0.95; EXPRESSED IN HEART, SIGNAL = 1.4; EST_HUMAN HIT: BE784775.1, EVALUE 6.00e-09; SWISSPROT HIT: Q01611, EVALUE 1.60e+00
CRRGIHKCIECHSKIKDFASHFSIYIHCSFCKYNTNCNKAFVNHMM

SEQ ID NO: 34274 - protein, 111 aa, Homo sapiens
  MAP TO AL022725.8; EXPRESSED IN HBL100, SIGNAL = 5.3; EXPRESSED IN BRAIN, SIGNAL = 4.9; EXPRESSED IN PLACENTA, SIGNAL =   4; EXPRESSED IN BT474, SIGNAL = 4.3; EXPRESSED IN BONE MARROW, SIGNAL = 4.8; EXPRESSED IN LUNG, SIGNAL = 5.5; EXPRESSED IN HELA, SIGNAL = 6.1; EXPRESSED IN ADULT LIVER, SIGNAL = 2.9; EXPRESSED IN FETAL LIVER, SIGNAL = 3.7; EXPRESSED IN HEART, SIGNAL = 4.6; SWISSPROT HIT: P77147, EVALUE 3.40e+00; EST_HUMAN HIT: BE184937.1, EVALUE 6.00e-01
TCAKYTHFKGTHHEQELTSAQRIRTTPSQKPICAEFRENKILQSGRRIPRSKKQGVRRHGSTRGQLRGACHAVLHTQVCCGMAGEAGAGVGTGVRSQCATQTVMGSILYAK

SEQ ID NO: 34275 - protein, 22 aa, Homo sapiens
  MAP TO AL022725.8; EXPRESSED IN HELA, SIGNAL = 2.4; EXPRESSED IN BRAIN, SIGNAL =   2; EXPRESSED IN HEART, SIGNAL = 1.3; EXPRESSED IN PLACENTA, SIGNAL =   4; EXPRESSED IN ADULT LIVER, SIGNAL = 1.4; EXPRESSED IN LUNG, SIGNAL = 1.7; EXPRESSED IN FETAL LIVER, SIGNAL = 2.1; EXPRESSED IN HBL100, SIGNAL = 2.9; EXPRESSED IN BONE MARROW, SIGNAL = 2.3; EXPRESSED IN BT474, SIGNAL = 5.6
FLMKLALFPPNFDFFKTIFFLL

SEQ ID NO: 34276 - protein, 52 aa, Homo sapiens
  MAP TO AL022399.2; EXPRESSED IN BONE MARROW, SIGNAL = 6.5; EXPRESSED IN PLACENTA, SIGNAL = 7.5; EXPRESSED IN BRAIN, SIGNAL = 8.6; EXPRESSED IN ADULT LIVER, SIGNAL =   6; EXPRESSED IN HELA, SIGNAL = 8.4; EXPRESSED IN LUNG, SIGNAL = 9.5; EXPRESSED IN HBL100, SIGNAL =   5; EXPRESSED IN BT474, SIGNAL = 7.4; EXPRESSED IN HEART, SIGNAL = 6.1; EXPRESSED IN FETAL LIVER, SIGNAL = 6.3; EST_HUMAN HIT: BE883728.1, EVALUE 2.00e-06
RKKIAAGIKASQKTSTRAVQRENVRMEAPHRVPTGTLLVELWKKGSCSPDSR

SEQ ID NO: 34277 - protein, 35 aa, Homo sapiens
  MAP TO AL008629.9; EXPRESSED IN HBL100, SIGNAL = 1.2; EXPRESSED IN FETAL LIVER, SIGNAL = 1.2; EXPRESSED IN BRAIN, SIGNAL = 1.3; EXPRESSED IN BT474, SIGNAL = 1.6; EXPRESSED IN BONE MARROW, SIGNAL = 1.6; EXPRESSED IN HELA, SIGNAL = 1.3; EXPRESSED IN ADULT LIVER, SIGNAL = 1.1; EXPRESSED IN PLACENTA, SIGNAL =   5; EXPRESSED IN LUNG, SIGNAL = 1.5; EXPRESSED IN HEART, SIGNAL = 1.4; EST_HUMAN HIT: AA368311.1, EVALUE 9.00e-04; SWISSPROT HIT: O35083, EVALUE 2.10e+00
IPFKLNYRILPPFPTKGSTPLDPRPIKDSKRLLRT

SEQ ID NO: 34278 - protein, 75 aa, Homo sapiens
  MAP TO AJ010598.1; EXPRESSED IN FETAL LIVER, SIGNAL = 2.2; EXPRESSED IN PLACENTA, SIGNAL = 1.5; EXPRESSED IN BT474, SIGNAL = 1.5; EXPRESSED IN BONE MARROW, SIGNAL = 1.2; EXPRESSED IN HBL100, SIGNAL = 1.6; EXPRESSED IN LUNG, SIGNAL = 1.2; EXPRESSED IN HELA, SIGNAL =   1; EXPRESSED IN ADULT LIVER, SIGNAL = 1.1; EXPRESSED IN BRAIN, SIGNAL = 1.2; EXPRESSED IN HEART, SIGNAL = 1.5; EST_HUMAN HIT: AU124141.1, EVALUE 5.00e-25; SWISSPROT HIT: Q9UHP3, EVALUE 8.00e-26
TTEQQGALSSELPSTSPSSVAAISSRSVIHKPFTQSRIPPDLPMHPAPRHITEEELSVLESCLHRWRTEIENDTR

SEQ ID NO: 34279 - protein, 47 aa, Homo sapiens
  MAP TO AJ006995.1; EXPRESSED IN PLACENTA, SIGNAL = 2.3; EXPRESSED IN BONE MARROW, SIGNAL = 2.2; EXPRESSED IN FETAL LIVER, SIGNAL = 2.1; EXPRESSED IN LUNG, SIGNAL = 1.9; EXPRESSED IN ADULT LIVER, SIGNAL = 1.5; EXPRESSED IN BRAIN, SIGNAL = 2.3; EXPRESSED IN HBL100, SIGNAL =   2; EXPRESSED IN HEART, SIGNAL = 2.2; EXPRESSED IN BT474, SIGNAL = 2.4; EXPRESSED IN HELA, SIGNAL = 1.7; EST_HUMAN HIT: AW842143.1, EVALUE 6.00e-02; SWISSPROT HIT: P15268, EVALUE 3.50e+00
QILQLLQCRQHQVLASVPALCKAAAGQVPHKQLALGNVVAPRSSEMP

SEQ ID NO: 34280 - protein, 41 aa, Homo sapiens
  MAP TO AF165142.1; EXPRESSED IN FETAL LIVER, SIGNAL = 1.1; EXPRESSED IN PLACENTA, SIGNAL = 1.1; EXPRESSED IN BONE MARROW, SIGNAL = 0.97; EXPRESSED IN HBL100, SIGNAL =   1; EXPRESSED IN LUNG, SIGNAL = 1.2; EXPRESSED IN HELA, SIGNAL = 2.5; EXPRESSED IN ADULT LIVER, SIGNAL = 0.95; EXPRESSED IN BRAIN, SIGNAL = 1.4; EXPRESSED IN BT474, SIGNAL = 2.2; EXPRESSED IN HEART, SIGNAL = 1.3
GWKVPDTPKGKFNGIADFTPGLVLMLQLGGQGAEWGNERLP

SEQ ID NO: 34281 - protein, 68 aa, Homo sapiens
  MAP TO AF157623.1; EXPRESSED IN HEART, SIGNAL = 2.8; EXPRESSED IN BONE MARROW, SIGNAL = 1.2; EXPRESSED IN ADULT LIVER, SIGNAL =  11; EXPRESSED IN BT474, SIGNAL = 1.2; EXPRESSED IN LUNG, SIGNAL = 2.8; EXPRESSED IN HELA, SIGNAL =   4; EXPRESSED IN BRAIN, SIGNAL = 8.8; EXPRESSED IN PLACENTA, SIGNAL =  33; EXPRESSED IN HBL100, SIGNAL = 1.8; EXPRESSED IN FETAL LIVER, SIGNAL = 3.9; EST_HUMAN HIT: AA340884.1, EVALUE 3.00e-32; SWISSPROT HIT: Q44597, EVALUE 3.00e-10
LPFSKREVPVASGSGFIVSEDGLIVTNAHVVTNKHRVKVELKNGATYEAKIKDVDEKADIALIKIDHQ

SEQ ID NO: 34282 - protein, 52 aa, Homo sapiens
  MAP TO AF157623.1; EXPRESSED IN ADULT LIVER, SIGNAL = 3.2; EXPRESSED IN PLACENTA, SIGNAL = 3.6; EXPRESSED IN BONE MARROW, SIGNAL = 4.4; EXPRESSED IN FETAL LIVER, SIGNAL = 2.8; EXPRESSED IN LUNG, SIGNAL = 3.8; EXPRESSED IN HELA, SIGNAL = 3.4; EXPRESSED IN BT474, SIGNAL = 3.3; EXPRESSED IN HBL100, SIGNAL = 2.3; EXPRESSED IN BRAIN, SIGNAL = 3.7; EXPRESSED IN HEART, SIGNAL = 2.9; EST_HUMAN HIT: AI167912.1, EVALUE 4.00e-07; SWISSPROT HIT: O67606, EVALUE 4.50e+00
ENKGRMTGGNAVTERNPDVRRRLGCISRVEKDFTSCTEQKMHPIGDDVMSPP

SEQ ID NO: 34283 - protein, 147 aa, Homo sapiens
  MAP TO AF146191.1; EXPRESSED IN HELA, SIGNAL = 2.4; EXPRESSED IN ADULT LIVER, SIGNAL = 1.1; EXPRESSED IN HEART, SIGNAL = 1.1; EXPRESSED IN PLACENTA, SIGNAL = 1.1; EXPRESSED IN BRAIN, SIGNAL = 1.7; EXPRESSED IN LUNG, SIGNAL = 1.2; EXPRESSED IN FETAL LIVER, SIGNAL = 1.7; EXPRESSED IN HBL100, SIGNAL = 3.1; EXPRESSED IN BONE MARROW, SIGNAL = 1.2; EXPRESSED IN BT474, SIGNAL = 1.6; EST_HUMAN HIT: BF203916.1, EVALUE 2.00e-29; SWISSPROT HIT: P04691, EVALUE 8.00e-27
WGWESGWGASVTQPRPVWPLPSPQFWEVISDEHAIDSAGTYHGDSHLQLERINVHHHEASGATPVLPPPPSWERGPPLAHALPPHAGGRYVSRAVLVDLEPGTMDSVRSGPFGQVFRPDNFISRELRARTGVRLLSQGSSKSRNAPR

SEQ ID NO: 34284 - protein, 199 aa, Homo sapiens
  MAP TO AF146191.1; EXPRESSED IN LUNG, SIGNAL = 8.9; EXPRESSED IN ADULT LIVER, SIGNAL =  14; EXPRESSED IN PLACENTA, SIGNAL = 5.8; EXPRESSED IN BT474, SIGNAL =  37; EXPRESSED IN FETAL LIVER, SIGNAL =  32; EXPRESSED IN HELA, SIGNAL =  38; EXPRESSED IN BRAIN, SIGNAL =  51; EXPRESSED IN HEART, SIGNAL = 7.5; EXPRESSED IN BONE MARROW, SIGNAL =  13; EXPRESSED IN HBL100, SIGNAL =  59; EST_HUMAN HIT: BE791523.1, EVALUE 1.00e-100; SWISSPROT HIT: P30883, EVALUE 1.00e-101
GDLNHLVSATMSGVTTCLCFPDQLNADLRKLAMNMVPFPRLHFFMPGFAPLTSRGSQQYRALTVAELTQQMFDAKNMMAARDPRHGRYLTAAAIFQGRMPMREVDEQMFNIQDKNSSYFADWFPNNVKTAVCDIPPWGLKMSVTFTGNNTAVQELKRVSEQFTATFRRKAFLHWYTGEGMDEMEFTEAESNMNDLVSEY

SEQ ID NO: 34285 - protein, 42 aa, Homo sapiens
  MAP TO AF130343.1; EXPRESSED IN HEART, SIGNAL = 1.3; EXPRESSED IN FETAL LIVER, SIGNAL = 1.9; EXPRESSED IN LUNG, SIGNAL = 2.6; EXPRESSED IN ADULT LIVER, SIGNAL = 1.5; EXPRESSED IN BRAIN, SIGNAL = 1.6; EXPRESSED IN PLACENTA, SIGNAL = 1.6; EXPRESSED IN BT474, SIGNAL = 2.5; EXPRESSED IN BONE MARROW, SIGNAL = 1.4; EXPRESSED IN HBL100, SIGNAL =   2; EXPRESSED IN HELA, SIGNAL = 3.2; SWISSPROT HIT: P19571, EVALUE 8.00e+00; EST_HUMAN HIT: BE463763.1, EVALUE 5.00e-12
MRPELPIINCVLSDPCSHKVGHAQQHSIIKWRWYIHDWAEGT

SEQ ID NO: 34286 - protein, 26 aa, Homo sapiens
  MAP TO AF130342.1; EXPRESSED IN BT474, SIGNAL =   1; EXPRESSED IN BONE MARROW, SIGNAL = 1.4; EXPRESSED IN HELA, SIGNAL =   1; EXPRESSED IN ADULT LIVER, SIGNAL = 1.3; EXPRESSED IN FETAL LIVER, SIGNAL = 2.3; EXPRESSED IN LUNG, SIGNAL = 1.2; EXPRESSED IN BRAIN, SIGNAL = 1.4; EXPRESSED IN HEART, SIGNAL = 1.5; EXPRESSED IN PLACENTA, SIGNAL = 2.4; EXPRESSED IN HBL100, SIGNAL = 1.1
LSIAGKKGPKPRTAINIFFSDAESGI

SEQ ID NO: 34287 - protein, 42 aa, Homo sapiens
  MAP TO AF130342.1; EXPRESSED IN HBL100, SIGNAL = 0.66; EXPRESSED IN PLACENTA, SIGNAL = 1.8; EXPRESSED IN BT474, SIGNAL = 0.63; EXPRESSED IN BONE MARROW, SIGNAL = 0.72; EXPRESSED IN LUNG, SIGNAL = 0.91; EXPRESSED IN HELA, SIGNAL = 0.76; EXPRESSED IN ADULT LIVER, SIGNAL = 0.79; EXPRESSED IN BRAIN, SIGNAL = 1.1; EXPRESSED IN FETAL LIVER, SIGNAL = 0.72; EXPRESSED IN HEART, SIGNAL =   1; SWISSPROT HIT: P04274, EVALUE 3.10e-01; EST_HUMAN HIT: BE548091.1, EVALUE 1.80e+00
GSLPWVMTQIKDAEGLQKGQEESSGKMCSQPPGSKQNGEGEG

SEQ ID NO: 34288 - protein, 81 aa, Homo sapiens
  MAP TO AF124731.2; EXPRESSED IN ADULT LIVER, SIGNAL = 6.1; EXPRESSED IN HELA, SIGNAL = 6.2; EXPRESSED IN PLACENTA, SIGNAL = 6.2; EXPRESSED IN BT474, SIGNAL = 4.6; EXPRESSED IN BONE MARROW, SIGNAL = 5.6; EXPRESSED IN HBL100, SIGNAL = 5.4; EXPRESSED IN LUNG, SIGNAL = 6.3; EXPRESSED IN BRAIN, SIGNAL = 5.4; EXPRESSED IN HEART, SIGNAL = 3.8; EXPRESSED IN FETAL LIVER, SIGNAL = 5.1; EST_HUMAN HIT: AW070642.1, EVALUE 8.00e-31; SWISSPROT HIT: P27434, EVALUE 1.60e+00
VHFHTADKGIPETRKKKRFNWTYSSTWLGKPQNHGGRQKPLLTWWWQEKNEEDAKVETPDKTISSHETYSLPQEQYGGTTP

SEQ ID NO: 34289 - protein, 2158 aa, Homo sapiens
  MAP TO AF111170.3; EXPRESSED IN LUNG, SIGNAL = 1.7; EXPRESSED IN ADULT LIVER, SIGNAL = 1.1; EXPRESSED IN BRAIN, SIGNAL = 1.2; EXPRESSED IN HEART, SIGNAL = 0.84; EXPRESSED IN PLACENTA, SIGNAL = 0.96; EXPRESSED IN BT474, SIGNAL = 2.1; EXPRESSED IN BONE MARROW, SIGNAL = 1.3; EXPRESSED IN HBL100, SIGNAL = 1.1; EXPRESSED IN FETAL LIVER, SIGNAL = 1.6; EXPRESSED IN HELA, SIGNAL = 2.2; SWISSPROT HIT: P14727, EVALUE 2.00e-12; EST_HUMAN HIT: BE906889.1, EVALUE 3.00e-03
QLGAGDSLAAPWHPQEQQPSISGERGHTTVRVVAQLGAGDSLAAPWHPQEQQPSISGERGHTTVRVVAQLGAGDSLAAPWHPQEQQPSISGERGHTTVRVVAQLGAGDSLAAPWHPQEQQPSISGERGHTTVRVVAQLGAGDSLAAPWHPQEQQPSISGERGHTTVRVVAQLGAGDSLAAPWHPQEQQPSISGERGHTTVRVVAQLGAGDSLAAPWHPQEQQPSISGERGHTTVRVVAQLGAGDSLAAPWHPQEQQPSISGERGHTTVRVVAQLGAGDSLAAPWHPQEQQPSISGERGHTTVRVVAQLGAGDSLAAPWHPQEQQPSISGERGHTTVRVVAQLGAGDSLAAPWHPQEQQPSISGERGHTTVRVVAQLGAGDSLAAPWHPQEQQPSISGERGHTTVRVVAQLGAGDSLTAPWHPQEQQPSISGERGHTTVRVVAQLGAGDSLAAPWHPQEQQPSISGERGHTTVRVVAQLGAGDSLTAPWHPQEQQPSISGERGHTTVRVVAQLGAGDSLTAPWHPQEQQPSISGERGHTTVRVVAQLGAGDSLTAPWHPQEQQPSISGERGHTTVRVVAQLGAGDSLAAPWHPQEQQPSISGERGHTTVRVVAQLGAGDSLTALWHPQEQQPSISGERGHTTVRVVAQLGAGDSLAAPWHPQEQQPSISGERGHTTVRVVAQLGAGDSLAALWHPQEQQPSISGERGHTTVRVVAQLGAGDSLAAPWHPQEQQPSISGERGHTTVRVVAQLGAGDSLAAPWHPQEQQPSISGERGHTTVRVVAQLGAGDSLAALWHPQEQQPSISGERGHTTVRVVAQLGAGDSLAAPWHPQEQQPSISGERGHTTVRVVAQLGAGDSLAAPWHPQEQQPSISGERGHTTVRVVAQLGAGDSLAALWHPQEQQPSISGERGHTTVRVVAQLGAGDSLAAPWHPQEQQPSISGERGHTTVRVVAQLGAGDSLAAPWHPQEQQPSISGERGHTTVRVVAQLGAGDSLAAPWHPQEQQPSISGERGHTTIRVVAQLGAGDSLAALWHPQEQQPSISGERGHTTIRVVAQLGAGDSLAAPWHPQEQQPSISGERGHTTVRVVAQLGAGDSLTAPWHPQEQQPSISGERGHTTVRVVAQLGAGDSLAAPWHPQEQQPSISGERGHTTVRVVAQLGAGDSLAAPWHPQEQQPSISGERGHTTVRVVAQLGAGDSLAAPWHPQEQQPSISGERGHTTVRVVAQLGAGDSLAAPWHPQEQQPSISGERGHTTVRVVAQLGAGDSLAAPWHPQEQQPSISGERGHTTVRVVAQLGAGDSLTAPWHPQEQQPSISGERGHTTVRVVAQLGAGDSLTAPWHPQEQQPSISGERGHTTVRVVAQLGAGDSLAAPWHPQEQQPSISGERGHTTVRVVAQLGAGDSLTAPWHPQEQQPSISGERGHTTVRVVAQLGAGDSLTAPWHPQEQQPSISGERGHTTVRVVAQLGAGDSLAALWHPQEQQPSISGERGHTTVRVVAQLGAGDSLAAPWHPQEQQPSISGERGHTTVRVVAQLGAGDSLAALWHPQEQQPSISGERGHTTVRVVAQLGAGDSLAALWHPQEQQPSISGERGHTTVRVVAQLGAGDSLAALWHPQEQQPSISGERGHTTVRVVAQLGAGDSLTALWHPQEQQPSISGERGHTTVRVVAQLGAGDSLAALWHPQEQQPSISGERGHTTVRVVAQLGAGDSLAAPWHPQEQQPSISGERGHTTVRVVAQLGAGDSLAAPWHPQEQQPSISGERGHTTVRVVAQLGAGDSLTAPWHPQEQQPSISGERGHTTVRVVAQLGAGDSLAAPWHPQEQQPSISGERGHTTVRVVAQLGAGDSLAAPWHPQEQQPSISGERGHTTVRVVAQLGAGDSLAAPWHPQEQQPSISGERGHTTVRVVAQLGAGDSLTALWHPQEQQPSISGERGHTTVRVVAQLGAGDSLAAPWHPQEQQPSISGERGHTTVRVVAQLGAGDSLTAPWHPQEQQPSISGERGHTTVRVVAQLGAGDSLAALWHPQEQQPSISGERGHTTVRVVAQLGAGDSLAALWHPQEQQPSISGERGHTTVRVVAQLGAGDSLTALWHPQEQQPSISGERGHTTVRVRSRAPRDHGQGCPCSRTPEVGNLGSRPLCPESSAPYARTRRGQRGSQEVLEG

SEQ ID NO: 34290 - protein, 364 aa, Homo sapiens
  MAP TO AF111170.3; EXPRESSED IN FETAL LIVER, SIGNAL = 2.7; EXPRESSED IN LUNG, SIGNAL = 2.2; EXPRESSED IN ADULT LIVER, SIGNAL =   2; EXPRESSED IN BRAIN, SIGNAL = 3.8; EXPRESSED IN HEART, SIGNAL = 2.2; EXPRESSED IN PLACENTA, SIGNAL = 1.2; EXPRESSED IN BT474, SIGNAL = 4.9; EXPRESSED IN BONE MARROW, SIGNAL = 1.6; EXPRESSED IN HELA, SIGNAL = 2.6; EXPRESSED IN HBL100, SIGNAL =   6; EST_HUMAN HIT: AW959703.1, EVALUE 1.00e-81; EST_HUMAN HIT: AW959703.1, EVALUE 1.00e-81; SWISSPROT HIT: O14682, EVALUE 1.00e-03
RPSPAMGAWEPAPDAGPASPRYMYSDEIDLEADTVLATLYAAKKYIVPALAKACVNFLETSLEAKNACVLLSQSRLFEEPELTQRCWEVIDAQAEMALRSEGFCEIDRQTLEIIVTREALNTKEAVVFEAVLNWAEAECKRQGLPITPRNKRHVLGRALYLVRIPTMTLEEFANGAAQSDILTLEETHSIFLWYTATNKPRLDFPLTKRKGLAPQRCHRFQSSAYRSNQWRYRGRCDSIQFAVDRRVFIAGLGLYGSSSGKAEYSVKIELKRLGVVLAQNLTKFMSDGSSNTFPVWFEHPVQVEQDTFYTASAVLDGSELSYFGQEGMTEVQCGKVAFQFQCSSDSTNGTGVQGGQIPELIFYA

SEQ ID NO: 34291 - protein, 92 aa, Homo sapiens
  MAP TO AC009309.1; EXPRESSED IN BT474, SIGNAL = 2.5; EXPRESSED IN BONE MARROW, SIGNAL = 4.3; EXPRESSED IN HELA, SIGNAL = 2.3; EXPRESSED IN ADULT LIVER, SIGNAL = 2.5; EXPRESSED IN BRAIN, SIGNAL = 3.2; EXPRESSED IN PLACENTA, SIGNAL = 4.6; EXPRESSED IN FETAL LIVER, SIGNAL = 3.2; EXPRESSED IN LUNG, SIGNAL = 2.9; EXPRESSED IN HEART, SIGNAL = 2.4; EXPRESSED IN HBL100, SIGNAL = 2.5; EST_HUMAN HIT: BE002832.1, EVALUE 2.00e-26; SWISSPROT HIT: O35134, EVALUE 2.00e-31; EST_HUMAN HIT: BE002832.1, EVALUE 2.00e-26
VIIREGELLCGVLDKAHYGSSAYGLVHCCYEIYGGETSGKVLTCLARLFTAYLQLYRGFTLGKCRARCPGAVTRQRSRLAISQAQDRESRPH

SEQ ID NO: 34292 - protein, 33 aa, Homo sapiens
  MAP TO AC009309.1; EXPRESSED IN BT474, SIGNAL = 2.5; EXPRESSED IN BONE MARROW, SIGNAL = 4.3; EXPRESSED IN HELA, SIGNAL = 2.3; EXPRESSED IN ADULT LIVER, SIGNAL = 2.5; EXPRESSED IN BRAIN, SIGNAL = 3.2; EXPRESSED IN PLACENTA, SIGNAL = 4.6; EXPRESSED IN FETAL LIVER, SIGNAL = 3.2; EXPRESSED IN LUNG, SIGNAL = 2.9; EXPRESSED IN HEART, SIGNAL = 2.4; EXPRESSED IN HBL100, SIGNAL = 2.5; EST_HUMAN HIT: BE002832.1, EVALUE 4.00e-13
SAECWTRRTMGAPPTAWSTAAMRSMEARPAARF

SEQ ID NO: 34293 - protein, 85 aa, Homo sapiens
  MAP TO AC009309.1; EXPRESSED IN HEART, SIGNAL = 2.3; EXPRESSED IN FETAL LIVER, SIGNAL = 1.7; EXPRESSED IN LUNG, SIGNAL = 2.5; EXPRESSED IN BRAIN, SIGNAL = 3.1; EXPRESSED IN PLACENTA, SIGNAL = 2.1; EXPRESSED IN BONE MARROW, SIGNAL = 2.4; EXPRESSED IN HBL100, SIGNAL = 2.6; EXPRESSED IN ADULT LIVER, SIGNAL = 2.1; EXPRESSED IN BT474, SIGNAL = 2.4; EXPRESSED IN HELA, SIGNAL = 3.3; EST_HUMAN HIT: BE221115.1, EVALUE 2.00e-24; SWISSPROT HIT: O35134, EVALUE 2.00e-46
VCRHVKNGDILLLNRQPTLHRPSIQAHRARILPEEKVLRLHYANCKAYNADFDGDEMNAHFPQSELGRAEAYVLACTDQQYLVPK

SEQ ID NO: 34294 - protein, 52 aa, Homo sapiens
  MAP TO AC009309.1; EXPRESSED IN BT474, SIGNAL = 1.8; EXPRESSED IN LUNG, SIGNAL = 1.7; EXPRESSED IN HELA, SIGNAL = 2.8; EXPRESSED IN ADULT LIVER, SIGNAL = 1.7; EXPRESSED IN BRAIN, SIGNAL = 1.6; EXPRESSED IN PLACENTA, SIGNAL = 1.4; EXPRESSED IN BONE MARROW, SIGNAL = 1.2; EXPRESSED IN HBL100, SIGNAL = 2.3; EXPRESSED IN FETAL LIVER, SIGNAL = 1.9; EXPRESSED IN HEART, SIGNAL = 1.7; EST_HUMAN HIT: BF431447.1, EVALUE 2.00e-21; SWISSPROT HIT: Q9Z6Y2, EVALUE 5.90e+00
SELLNELMDSAKVSNSPSQAIEVVELASAFSLPICEGLTQRVMSDFAINQEQ

SEQ ID NO: 34295 - protein, 74 aa, Homo sapiens
  MAP TO AC009309.1; EXPRESSED IN BT474, SIGNAL = 5.6; EXPRESSED IN BONE MARROW, SIGNAL = 2.2; EXPRESSED IN HBL100, SIGNAL = 6.5; EXPRESSED IN HELA, SIGNAL = 3.7; EXPRESSED IN ADULT LIVER, SIGNAL =   3; EXPRESSED IN BRAIN, SIGNAL = 2.5; EXPRESSED IN PLACENTA, SIGNAL = 3.4; EXPRESSED IN HEART, SIGNAL = 5.1; EXPRESSED IN LUNG, SIGNAL = 2.4; EXPRESSED IN FETAL LIVER, SIGNAL = 5.5; EST_HUMAN HIT: M85372.1, EVALUE 2.00e-35; SWISSPROT HIT: Q10411, EVALUE 2.00e-03
DKLSTDDLNSLIAHAHRRIDQLNRELAEQKATEKQHITLALEKQKLEEKRAFDSAVAKALEHHRSEIQAEQDRK

SEQ ID NO: 34296 - protein, 63 aa, Homo sapiens
  MAP TO AC009309.1; EXPRESSED IN HELA, SIGNAL = 1.8; EXPRESSED IN ADULT LIVER, SIGNAL = 0.83; EXPRESSED IN PLACENTA, SIGNAL = 1.4; EXPRESSED IN BONE MARROW, SIGNAL = 1.2; EXPRESSED IN HBL100, SIGNAL = 2.1; EXPRESSED IN LUNG, SIGNAL = 0.99; EXPRESSED IN BRAIN, SIGNAL = 0.73; EXPRESSED IN HEART, SIGNAL = 1.1; EXPRESSED IN BT474, SIGNAL = 1.2; EXPRESSED IN FETAL LIVER, SIGNAL = 1.4; EST_HUMAN HIT: BE246110.1, EVALUE 2.00e-17
LTTGKIAGAGLLFVGGGIGGTILYAKWDSHFRESVEKTIPYSDKLFEMVLGPAAYNVPLPKKS

SEQ ID NO: 34297 - protein, 199 aa, Homo sapiens
  MAP TO AC009309.1; EXPRESSED IN PLACENTA, SIGNAL = 1.3; EXPRESSED IN BONE MARROW, SIGNAL = 1.2; EXPRESSED IN HBL100, SIGNAL = 4.8; EXPRESSED IN BRAIN, SIGNAL = 2.5; EXPRESSED IN BT474, SIGNAL = 3.6; EXPRESSED IN FETAL LIVER, SIGNAL = 3.7; EXPRESSED IN LUNG, SIGNAL = 1.7; EXPRESSED IN HELA, SIGNAL = 4.1; EXPRESSED IN ADULT LIVER, SIGNAL = 2.4; EXPRESSED IN HEART, SIGNAL = 2.7; SWISSPROT HIT: P36112, EVALUE 2.20e-01; EST_HUMAN HIT: BE793643.1, EVALUE 1.00e-90
HAVAEEEARKAHQLWLSVEALKYSMKTSSAETPTIPLGSAVEAIKANCSDNEFTQALTAAIPPESLTRGVYSEETLRARFYAVQKLARRVAMIDETRNSLYQYFLSYLQSLLLFPPQQLKPPPELCPEDINTFKLLSYASYCIEHGDLELAAKFVNQLKGESRRVAQDWLKEARMTLETKQIVEILTAYASAVGIGTTQ

SEQ ID NO: 34298 - protein, 41 aa, Homo sapiens
  MAP TO AC009305.1; EXPRESSED IN BT474, SIGNAL = 2.5; EXPRESSED IN HELA, SIGNAL = 0.66; EXPRESSED IN PLACENTA, SIGNAL = 0.77; EXPRESSED IN HEART, SIGNAL = 1.3; EST_HUMAN HIT: AV725303.1, EVALUE 1.80e+00
FLISMGTGNAELISFQSKAKKCDILFLLWDFIKDKQTNEAC

SEQ ID NO: 34299 - protein, 25 aa, Homo sapiens
  MAP TO AC009304.1; EXPRESSED IN BT474, SIGNAL = 1.6; EXPRESSED IN HBL100, SIGNAL = 1.5; EXPRESSED IN LUNG, SIGNAL = 1.6; EXPRESSED IN HELA, SIGNAL = 1.4; EXPRESSED IN BRAIN, SIGNAL = 1.3; EXPRESSED IN PLACENTA, SIGNAL = 2.1; EXPRESSED IN FETAL LIVER, SIGNAL = 1.4; EXPRESSED IN HEART, SIGNAL = 1.6; EXPRESSED IN BONE MARROW, SIGNAL = 1.8; EXPRESSED IN ADULT LIVER, SIGNAL = 1.2
KPTTNKKGLILNLRLVNTPIGRKNT

SEQ ID NO: 34300 - protein, 50 aa, Homo sapiens
  MAP TO AC009299.1; EXPRESSED IN PLACENTA, SIGNAL = 0.99; EXPRESSED IN LUNG, SIGNAL = 0.84; EXPRESSED IN BRAIN, SIGNAL = 1.4; EXPRESSED IN BT474, SIGNAL = 1.7; EXPRESSED IN HBL100, SIGNAL = 2.6; EXPRESSED IN FETAL LIVER, SIGNAL = 1.4; EXPRESSED IN HELA, SIGNAL = 3.3; EXPRESSED IN ADULT LIVER, SIGNAL = 1.6; EXPRESSED IN BONE MARROW, SIGNAL = 0.76; EXPRESSED IN HEART, SIGNAL = 1.6; EST_HUMAN HIT: AU138633.1, EVALUE 8.00e-24; SWISSPROT HIT: P41878, EVALUE 1.00e-22
PEMVVGWYHSHPGFGCWLSGVDINTQQSFEALSERAVAVVVDPIQSVKGK

SEQ ID NO: 34301 - protein, 43 aa, Homo sapiens
  MAP TO AC009299.1; EXPRESSED IN PLACENTA, SIGNAL = 0.99; EXPRESSED IN LUNG, SIGNAL = 0.84; EXPRESSED IN BRAIN, SIGNAL = 1.4; EXPRESSED IN BT474, SIGNAL = 1.7; EXPRESSED IN HBL100, SIGNAL = 2.6; EXPRESSED IN FETAL LIVER, SIGNAL = 1.4; EXPRESSED IN HELA, SIGNAL = 3.3; EXPRESSED IN ADULT LIVER, SIGNAL = 1.6; EXPRESSED IN BONE MARROW, SIGNAL = 0.76; EXPRESSED IN HEART, SIGNAL = 1.6; EST_HUMAN HIT: BE879386.1, EVALUE 1.00e-19; SWISSPROT HIT: Q55774, EVALUE 6.10e+00
RRWLLVGITVTLALVVGFLVWISTLSRALKPCRRELWQWLWIP

SEQ ID NO: 34302 - protein, 271 aa, Homo sapiens
  MAP TO AC009299.1; EXPRESSED IN BRAIN, SIGNAL = 1.9; EXPRESSED IN HELA, SIGNAL = 0.95; EXPRESSED IN ADULT LIVER, SIGNAL = 1.8; EXPRESSED IN BT474, SIGNAL = 7.4; EXPRESSED IN BONE MARROW, SIGNAL = 0.76; EXPRESSED IN HBL100, SIGNAL = 0.8; EXPRESSED IN HEART, SIGNAL =   1; EXPRESSED IN PLACENTA, SIGNAL = 2.4; EXPRESSED IN FETAL LIVER, SIGNAL = 0.94; EXPRESSED IN LUNG, SIGNAL = 1.6; SWISSPROT HIT: P16356, EVALUE 6.00e-04; EST_HUMAN HIT: BF373869.1, EVALUE 7.00e-25
MKPLGSPVSSSEDSSESPRSSIIYHMFLLPSPSSSPPALGESPVSPSYSPNNPRFQLESALHTQESPTNSRASRCSSPMSFNSSPPGLRDSPVSPSFSPAFPRFLPQSAPGTQGNPGHSQASRDYLPMTCIYTGMAPTHPSVTPNPSPLTLRHSQGLTATPRYCPSVRSPGQSTSQHDAATWPFLHISGEGPTPSRRKAPPAFHPHTQACPSTCYCHTLASRRGPCNGRYHRPVYPHPTAMQRDPPAGPRGCQSPCWHYTPACRRLRATLP

SEQ ID NO: 34303 - protein, 67 aa, Homo sapiens
  MAP TO AC009299.1; EXPRESSED IN BRAIN, SIGNAL = 1.9; EXPRESSED IN HELA, SIGNAL = 0.95; EXPRESSED IN ADULT LIVER, SIGNAL = 1.8; EXPRESSED IN BT474, SIGNAL = 7.4; EXPRESSED IN BONE MARROW, SIGNAL = 0.76; EXPRESSED IN HBL100, SIGNAL = 0.8; EXPRESSED IN HEART, SIGNAL =   1; EXPRESSED IN PLACENTA, SIGNAL = 2.4; EXPRESSED IN FETAL LIVER, SIGNAL = 0.94; EXPRESSED IN LUNG, SIGNAL = 1.6; EST_HUMAN HIT: N43182.1, EVALUE 6.00e-32; SWISSPROT HIT: P31783, EVALUE 1.00e+00
IWGCLESSWETQETPRELGVSCWVMAVGTCGILLMNVVTLKNPQRRTRESPMASLIAHHGEDREMGA

SEQ ID NO: 34304 - protein, 193 aa, Homo sapiens
  MAP TO AC009299.1; EXPRESSED IN PLACENTA, SIGNAL = 0.97; EXPRESSED IN BT474, SIGNAL = 1.3; EXPRESSED IN BONE MARROW, SIGNAL = 1.2; EXPRESSED IN HBL100, SIGNAL = 1.1; EXPRESSED IN HELA, SIGNAL = 2.1; EXPRESSED IN FETAL LIVER, SIGNAL = 2.1; EXPRESSED IN HEART, SIGNAL = 0.97; EXPRESSED IN LUNG, SIGNAL = 1.4; EXPRESSED IN ADULT LIVER, SIGNAL = 1.7; EST_HUMAN HIT: AV717224.1, EVALUE 1.00e-103; SWISSPROT HIT: Q93705, EVALUE 3.30e+00
TQCSVPIQCTDKTDKQEALFKPQAKDDINRGAPSITSVTPRGLCRDEEDTSFESLSKFNVKFPPMDNDSTFLHSTPERPGILSPATSEAVCQEKFNMEFRDNPGNFVKTEETLFEIQGIDPIASAIQNLKTTDKTKPSNLVNTCIRTTLDRAACLPPGDHNALYVNSFPLLDPSDAPFPSLDSPGKAIRGPQQ

SEQ ID NO: 34305 - protein, 28 aa, Homo sapiens
  MAP TO AC009299.1; EXPRESSED IN PLACENTA, SIGNAL = 0.97; EXPRESSED IN BT474, SIGNAL = 1.3; EXPRESSED IN BONE MARROW, SIGNAL = 1.2; EXPRESSED IN HBL100, SIGNAL = 1.1; EXPRESSED IN HELA, SIGNAL = 2.1; EXPRESSED IN FETAL LIVER, SIGNAL = 2.1; EXPRESSED IN HEART, SIGNAL = 0.97; EXPRESSED IN LUNG, SIGNAL = 1.4; EXPRESSED IN ADULT LIVER, SIGNAL = 1.7; EST_HUMAN HIT: AA484829.1, EVALUE 9.00e-09
KHSALCLYSVRIKQINKKRCLSLRLKMI

SEQ ID NO: 34306 - protein, 48 aa, Homo sapiens
  MAP TO AC009298.1; EXPRESSED IN PLACENTA, SIGNAL = 1.7; EXPRESSED IN LUNG, SIGNAL =   1; EXPRESSED IN BONE MARROW, SIGNAL = 1.4; EXPRESSED IN HBL100, SIGNAL = 1.2; EXPRESSED IN FETAL LIVER, SIGNAL = 1.6; EXPRESSED IN HELA, SIGNAL = 0.71; EXPRESSED IN BRAIN, SIGNAL =   1; EXPRESSED IN BT474, SIGNAL = 1.9; EXPRESSED IN HEART, SIGNAL =   1; EST_HUMAN HIT: AW606025.1, EVALUE 2.00e-20; SWISSPROT HIT: Q01147, EVALUE 2.00e-21
NGTDGVQGLQTLTMTNAAATQPGTTILQYAQTTDGQQILVPSNQVVVQ

SEQ ID NO: 34307 - protein, 25 aa, Homo sapiens
  MAP TO AC009269.1; EXPRESSED IN PLACENTA, SIGNAL =  10; EXPRESSED IN FETAL LIVER, SIGNAL =  76; EXPRESSED IN LUNG, SIGNAL =  26; EXPRESSED IN HELA, SIGNAL =  49; EXPRESSED IN BT474, SIGNAL =  48; EXPRESSED IN BONE MARROW, SIGNAL =  18; EXPRESSED IN HBL100, SIGNAL =  85; EXPRESSED IN ADULT LIVER, SIGNAL =  26; EXPRESSED IN BRAIN, SIGNAL =  17; EXPRESSED IN HEART, SIGNAL =  30; SWISSPROT HIT: Q95281, EVALUE 5.00e-06; EST_HUMAN HIT: BE880966.1, EVALUE 7.00e-05
KMQANSAKAMSARAKAIKALVKPKE

SEQ ID NO: 34308 - protein, 54 aa, Homo sapiens
  MAP TO AC009238.1; EXPRESSED IN PLACENTA, SIGNAL = 6.8; EXPRESSED IN LUNG, SIGNAL = 1.8; EXPRESSED IN HELA, SIGNAL = 1.4; EXPRESSED IN BT474, SIGNAL = 1.3; EXPRESSED IN HBL100, SIGNAL = 1.3; EXPRESSED IN FETAL LIVER, SIGNAL = 1.9; EXPRESSED IN BRAIN, SIGNAL = 3.3; EXPRESSED IN BONE MARROW, SIGNAL =  62; EXPRESSED IN ADULT LIVER, SIGNAL = 1.9; EXPRESSED IN HEART, SIGNAL = 1.4; EST_HUMAN HIT: AI002818.1, EVALUE 5.00e-24
EVTKASDGSLLGDLGHTPLSKKEGIKWQRPRLSRQALMRCCLVKWILSSTAPQG

SEQ ID NO: 34309 - protein, 72 aa, Homo sapiens
  MAP TO AC009238.1; EXPRESSED IN ADULT LIVER, SIGNAL = 2.2; EXPRESSED IN BRAIN, SIGNAL = 1.6; EXPRESSED IN BT474, SIGNAL = 1.7; EXPRESSED IN HBL100, SIGNAL = 4.3; EXPRESSED IN FETAL LIVER, SIGNAL = 1.8; EXPRESSED IN HELA, SIGNAL = 1.7; EXPRESSED IN HEART, SIGNAL = 1.6; EXPRESSED IN PLACENTA, SIGNAL = 0.93; EXPRESSED IN BONE MARROW, SIGNAL = 1.8; EXPRESSED IN LUNG, SIGNAL = 0.95; SWISSPROT HIT: O28058, EVALUE 2.00e-12; EST_HUMAN HIT: BE261417.1, EVALUE 3.00e-36
ALAAQLPVLPRSEVTFLAPVTRPDKVVCVGMNYVDHCKEQNVPVPKEPIIFSKFASSIVGPYDEVVLPPQSQ

SEQ ID NO: 34310 - protein, 54 aa, Homo sapiens
  MAP TO AC009238.1; EXPRESSED IN HEART, SIGNAL =   1; EXPRESSED IN BONE MARROW, SIGNAL = 0.93; EXPRESSED IN LUNG, SIGNAL = 0.93; EXPRESSED IN HELA, SIGNAL = 1.6; EXPRESSED IN ADULT LIVER, SIGNAL =   2; EXPRESSED IN BRAIN, SIGNAL = 2.3; EXPRESSED IN PLACENTA, SIGNAL = 0.73; EXPRESSED IN BT474, SIGNAL = 1.6; EXPRESSED IN HBL100, SIGNAL = 3.3; EXPRESSED IN FETAL LIVER, SIGNAL = 1.6; SWISSPROT HIT: Q59050, EVALUE 6.00e-07; EST_HUMAN HIT: AI884989.1, EVALUE 3.00e-26
ATDAMAHVAGFTVAHDVSARDWQMRRNGKQWLLGKTFDTFCPLGPALVTKDSVA

SEQ ID NO: 34311 - protein, 31 aa, Homo sapiens
  MAP TO AC009229.1; EXPRESSED IN BT474, SIGNAL = 0.93; EXPRESSED IN BONE MARROW, SIGNAL = 0.71; EXPRESSED IN PLACENTA, SIGNAL = 1.5; EXPRESSED IN HEART, SIGNAL = 1.3; EXPRESSED IN BRAIN, SIGNAL = 0.82; EXPRESSED IN HELA, SIGNAL = 1.1; EXPRESSED IN LUNG, SIGNAL = 1.1; EXPRESSED IN FETAL LIVER, SIGNAL = 0.82; EXPRESSED IN HBL100, SIGNAL = 0.81; EXPRESSED IN ADULT LIVER, SIGNAL = 0.97; EST_HUMAN HIT: AW947373.1, EVALUE 5.20e+00
HTTSSHFSFYWCFLLPLCSFSTTPSSFLQSY

SEQ ID NO: 34312 - protein, 192 aa, Homo sapiens
  MAP TO AC009229.1; EXPRESSED IN ADULT LIVER, SIGNAL = 4.3; EXPRESSED IN BRAIN, SIGNAL = 3.5; EXPRESSED IN PLACENTA, SIGNAL =   2; EXPRESSED IN BT474, SIGNAL = 2.9; EXPRESSED IN BONE MARROW, SIGNAL = 3.4; EXPRESSED IN HBL100, SIGNAL = 2.8; EXPRESSED IN FETAL LIVER, SIGNAL = 3.3; EXPRESSED IN LUNG, SIGNAL = 4.4; EXPRESSED IN HELA, SIGNAL = 5.5; EXPRESSED IN HEART, SIGNAL = 3.6; EST_HUMAN HIT: AU120297.1, EVALUE 1.00e-102; SWISSPROT HIT: Q16678, EVALUE 1.00e-111
YPDVQTRVQAELDQVVGRDRLPCMGDQPNLPYVLAFLYEAMRFSSFVPVTIPHATTANTSVLGYHIPKDTVVFVNQWSVNHDPVKWPNPENFDPARFLDKDGLINKDLTSRVMIFSVGKRRCIGEELSKMQLFLFISILAHQCDFRANPNEPAKMNFSYGLTIKPKSFKVNVTLRESMELLDSAVQNLQAKE

SEQ ID NO: 34313 - protein, 70 aa, Homo sapiens
  MAP TO AC009229.1; EXPRESSED IN ADULT LIVER, SIGNAL = 4.3; EXPRESSED IN BRAIN, SIGNAL = 3.5; EXPRESSED IN PLACENTA, SIGNAL =   2; EXPRESSED IN BT474, SIGNAL = 2.9; EXPRESSED IN BONE MARROW, SIGNAL = 3.4; EXPRESSED IN HBL100, SIGNAL = 2.8; EXPRESSED IN FETAL LIVER, SIGNAL = 3.3; EXPRESSED IN LUNG, SIGNAL = 4.4; EXPRESSED IN HELA, SIGNAL = 5.5; EXPRESSED IN HEART, SIGNAL = 3.6; SWISSPROT HIT: P22534, EVALUE 1.10e+00; EST_HUMAN HIT: AU120297.1, EVALUE 2.00e-39
RQNWIRSWGGTVCLVWVTSPTCPMSWPSFMKPCASPALCLSLFLMPPLPTPLSWATTFPRTLWFLSTSGL

SEQ ID NO: 34314 - protein, 117 aa, Homo sapiens
  MAP TO AC009228.2; EXPRESSED IN HELA, SIGNAL = 2.4; EXPRESSED IN BRAIN, SIGNAL = 2.3; EXPRESSED IN HEART, SIGNAL = 1.9; EXPRESSED IN BT474, SIGNAL =   3; EXPRESSED IN BONE MARROW, SIGNAL = 2.5; EXPRESSED IN HBL100, SIGNAL =   2; EXPRESSED IN LUNG, SIGNAL = 2.3; EXPRESSED IN ADULT LIVER, SIGNAL = 2.1; EXPRESSED IN PLACENTA, SIGNAL = 2.3; EXPRESSED IN FETAL LIVER, SIGNAL = 2.1; EST_HUMAN HIT: H54944.1, EVALUE 2.00e-05; SWISSPROT HIT: P28973, EVALUE 4.40e-01
ALRVRKKTGGEKMPVQMIGDILAAELSHMQAYIRFCSCQLNGAALLQQKTDEDTDFKEFLKVIPFWALRVRLLLRLEATAHSSPTGNPSNGEGHPHQFPKETPKRQRIFRLFCVAFM

SEQ ID NO: 34315 - protein, 80 aa, Homo sapiens
  MAP TO AC009228.2; EXPRESSED IN BONE MARROW, SIGNAL = 1.6; EXPRESSED IN HELA, SIGNAL = 5.5; EXPRESSED IN HBL100, SIGNAL = 2.2; EXPRESSED IN LUNG, SIGNAL = 3.5; EXPRESSED IN ADULT LIVER, SIGNAL =   2; EXPRESSED IN BRAIN, SIGNAL = 2.5; EXPRESSED IN PLACENTA, SIGNAL = 2.7; EXPRESSED IN BT474, SIGNAL = 2.4; EXPRESSED IN HEART, SIGNAL = 1.7; EXPRESSED IN FETAL LIVER, SIGNAL = 2.6; EST_HUMAN HIT: AA226154.1, EVALUE 1.10e+00; SWISSPROT HIT: Q11100, EVALUE 4.40e+00
SEIFFLFKQLIFNSLTNCLGPRKLLHSGKLYKTKSNKELHGFLFNDFLLLTYMVKQFAVSSGSEKLFSSKSNAQFKMYKT

SEQ ID NO: 34316 - protein, 71 aa, Homo sapiens
  MAP TO AC009228.2; EXPRESSED IN BONE MARROW, SIGNAL = 1.6; EXPRESSED IN HELA, SIGNAL = 5.5; EXPRESSED IN HBL100, SIGNAL = 2.2; EXPRESSED IN LUNG, SIGNAL = 3.5; EXPRESSED IN ADULT LIVER, SIGNAL =   2; EXPRESSED IN BRAIN, SIGNAL = 2.5; EXPRESSED IN PLACENTA, SIGNAL = 2.7; EXPRESSED IN BT474, SIGNAL = 2.4; EXPRESSED IN HEART, SIGNAL = 1.7; EXPRESSED IN FETAL LIVER, SIGNAL = 2.6; SWISSPROT HIT: P20646, EVALUE 3.30e+00; EST_HUMAN HIT: BE260311.1, EVALUE 1.00e-01
VKFSFSLSNLFSTLSPTAWGPGSSYTVGNYTRPRATRNCTDSSSMTSCFLPTWSSSLLFPLALRNFSARSP

SEQ ID NO: 34317 - protein, 29 aa, Homo sapiens
  MAP TO AC009228.2; EXPRESSED IN BT474, SIGNAL = 0.99; EXPRESSED IN HELA, SIGNAL = 1.8; EXPRESSED IN PLACENTA, SIGNAL = 2.2; EXPRESSED IN BONE MARROW, SIGNAL = 0.76; EXPRESSED IN FETAL LIVER, SIGNAL = 0.84; EXPRESSED IN LUNG, SIGNAL = 3.8; EXPRESSED IN ADULT LIVER, SIGNAL = 1.1; EXPRESSED IN BRAIN, SIGNAL = 1.1; EXPRESSED IN HEART, SIGNAL = 0.96; EXPRESSED IN HBL100, SIGNAL = 1.1; EST_HUMAN HIT: AI829638.1, EVALUE 4.00e-10
VTVPPFVDPLFQRQQEVDEERRTGLQCET

SEQ ID NO: 34318 - protein, 28 aa, Homo sapiens
  MAP TO AC009228.2; EXPRESSED IN HEART, SIGNAL = 2.9; EXPRESSED IN BONE MARROW, SIGNAL = 3.6; EXPRESSED IN HBL100, SIGNAL = 2.2; EXPRESSED IN FETAL LIVER, SIGNAL = 2.9; EXPRESSED IN LUNG, SIGNAL = 2.9; EXPRESSED IN ADULT LIVER, SIGNAL = 1.7; EXPRESSED IN BRAIN, SIGNAL = 3.5; EXPRESSED IN PLACENTA, SIGNAL = 2.4; EXPRESSED IN BT474, SIGNAL = 2.8; EXPRESSED IN HELA, SIGNAL = 3.8; EST_HUMAN HIT: T06573.1, EVALUE 8.10e-01
APSLSQPQAVQLAATPKVTPSFCLKGGE

SEQ ID NO: 34319 - protein, 40 aa, Homo sapiens
  MAP TO AC009228.2; EXPRESSED IN LUNG, SIGNAL = 1.3; EXPRESSED IN HELA, SIGNAL =   2; EXPRESSED IN BRAIN, SIGNAL = 1.9; EXPRESSED IN HEART, SIGNAL = 1.2; EXPRESSED IN PLACENTA, SIGNAL = 1.1; EXPRESSED IN BT474, SIGNAL = 1.2; EXPRESSED IN BONE MARROW, SIGNAL = 1.9; EXPRESSED IN HBL100, SIGNAL = 1.6; EXPRESSED IN FETAL LIVER, SIGNAL = 1.7; EXPRESSED IN ADULT LIVER, SIGNAL = 1.2; EST_HUMAN HIT: N94713.1, EVALUE 1.00e-14; SWISSPROT HIT: O95823, EVALUE 6.30e+00
CADLQTLDTMQPIERKRQGYIHELIQTEERYMADLQLVVE

SEQ ID NO: 34320 - protein, 474 aa, Homo sapiens
  MAP TO AC009224.1; EXPRESSED IN LUNG, SIGNAL = 2.3; EXPRESSED IN HEART, SIGNAL = 2.2; EXPRESSED IN BONE MARROW, SIGNAL = 2.4; EXPRESSED IN FETAL LIVER, SIGNAL = 5.5; EXPRESSED IN HELA, SIGNAL = 9.7; EXPRESSED IN ADULT LIVER, SIGNAL = 7.9; EXPRESSED IN BRAIN, SIGNAL = 2.5; EXPRESSED IN PLACENTA, SIGNAL = 1.5; EXPRESSED IN BT474, SIGNAL =  10; EXPRESSED IN HBL100, SIGNAL =  10; EST_HUMAN HIT: AU132907.1, EVALUE 0.00e+00; SWISSPROT HIT: P38646, EVALUE 0.00e+00
MAGMALVMRLLELFQGRIMRQKQSMEQLVVFIWVLPTPVWQLWKVNKQRCWRMPKVPELPLQLWPLQQMVSDLLACQSSNRLSPTQTMHSMLPNVSLSSYPEVQKDIKNIPFKIVCASNGDAWVEAHGKLYSPSQIGAFVSMKMKETAENYLGHTAKNAVIAVPAYFNDLQRQATKDAGQISGLNVLRVINEPTAAALAYGLDKSKDKVIAVYDLGGGTFDISILEFQKGVFEVKSTNGDTFLGGEDFDQALLQHIVKEFKRETGVDLTKDNVAFQRVWEAAEKAKCELSSSVQTDINLPYLTMDSSGPKHLNTKLTHAQFEGIVTDLIRRTIAPCQKAMQDAEVSKSDIGEVILVGGMTRMPKFNRLCRTFFGRAPSKAVNPDEAVALELPFREMCWPAMSQMCCSLMSFPCLWVLKLCEVSLPNLLIGIPLFQPRRARYSQLLLMGRHKWKLKCVRVRERWLETTNSLDSLL

SEQ ID NO: 34321 - protein, 30 aa, Homo sapiens
  MAP TO AC008278.1; EXPRESSED IN PLACENTA, SIGNAL = 1.4; EXPRESSED IN HBL100, SIGNAL = 2.6; EXPRESSED IN FETAL LIVER, SIGNAL = 2.1; EXPRESSED IN LUNG, SIGNAL = 4.8; EXPRESSED IN HELA, SIGNAL = 2.9; EXPRESSED IN ADULT LIVER, SIGNAL =   2; EXPRESSED IN BRAIN, SIGNAL = 2.6; EXPRESSED IN HEART, SIGNAL = 2.8; EXPRESSED IN BT474, SIGNAL =   3; EXPRESSED IN BONE MARROW, SIGNAL =   1; EST_HUMAN HIT: AA043875.1, EVALUE 4.00e-10; SWISSPROT HIT: Q92499, EVALUE 5.00e-12
GEEEFKFPPKDGFVALSKAPDGYIVKSQHS

SEQ ID NO: 34322 - protein, 30 aa, Homo sapiens
  MAP TO AC008278.1; EXPRESSED IN PLACENTA, SIGNAL = 1.4; EXPRESSED IN HBL100, SIGNAL = 2.6; EXPRESSED IN FETAL LIVER, SIGNAL = 2.1; EXPRESSED IN LUNG, SIGNAL = 4.8; EXPRESSED IN HELA, SIGNAL = 2.9; EXPRESSED IN ADULT LIVER, SIGNAL =   2; EXPRESSED IN BRAIN, SIGNAL = 2.6; EXPRESSED IN HEART, SIGNAL = 2.8; EXPRESSED IN BT474, SIGNAL =   3; EXPRESSED IN BONE MARROW, SIGNAL =   1; EST_HUMAN HIT: AA043875.1, EVALUE 2.00e-09
VKRNLSFHQKMALLLFPRHRMVTLSNHSTQ

SEQ ID NO: 34323 - protein, 73 aa, Homo sapiens
  MAP TO AC008269.1; EXPRESSED IN FETAL LIVER, SIGNAL = 3.2; EXPRESSED IN HELA, SIGNAL = 4.4; EXPRESSED IN HEART, SIGNAL = 3.8; EXPRESSED IN BT474, SIGNAL = 3.2; EXPRESSED IN BONE MARROW, SIGNAL = 2.4; EXPRESSED IN PLACENTA, SIGNAL = 2.6; EXPRESSED IN BRAIN, SIGNAL = 2.9; EXPRESSED IN ADULT LIVER, SIGNAL = 2.5; EXPRESSED IN LUNG, SIGNAL = 2.6; EXPRESSED IN HBL100, SIGNAL = 3.1; SWISSPROT HIT: P48040, EVALUE 2.70e+00; EST_HUMAN HIT: BE622887.1, EVALUE 1.40e+00
PHDVSLHISLESCYHLLLLLLQKTVSDGSGLFTIINLARQSPVPGHLANCRPACILATLVSLLVQHLGQSNRI

SEQ ID NO: 34324 - protein, 104 aa, Homo sapiens
  MAP TO AC008269.1; EXPRESSED IN BRAIN, SIGNAL = 1.6; EXPRESSED IN HBL100, SIGNAL = 1.9; EXPRESSED IN FETAL LIVER, SIGNAL = 1.6; EXPRESSED IN HELA, SIGNAL = 1.9; EXPRESSED IN ADULT LIVER, SIGNAL = 1.6; EXPRESSED IN HEART, SIGNAL = 1.6; EXPRESSED IN PLACENTA, SIGNAL = 1.4; EXPRESSED IN BT474, SIGNAL = 2.3; EXPRESSED IN BONE MARROW, SIGNAL = 0.78; EXPRESSED IN LUNG, SIGNAL = 1.3; EST_HUMAN HIT: AI221878.1, EVALUE 1.00e-29; SWISSPROT HIT: P14152, EVALUE 1.30e-02
VSICTKVEEAFRQAHVIVVLDDSTNKEVFTLEDCLRSRVPLCRLYGYLIEKNAHESVRVIVGGRTFVNLKTVLLMRYAPRIAHNIIAVALGVEGEAKRILARKL

SEQ ID NO: 34325 - protein, 40 aa, Homo sapiens
  MAP TO AC008268.1; EXPRESSED IN PLACENTA, SIGNAL = 1.6; EXPRESSED IN BT474, SIGNAL = 1.7; EXPRESSED IN LUNG, SIGNAL = 1.5; EXPRESSED IN HELA, SIGNAL = 1.1; EXPRESSED IN BRAIN, SIGNAL = 1.3; EXPRESSED IN HBL100, SIGNAL = 1.5; EXPRESSED IN FETAL LIVER, SIGNAL = 1.6; EXPRESSED IN ADULT LIVER, SIGNAL = 1.4; EXPRESSED IN BONE MARROW, SIGNAL = 1.9; EXPRESSED IN HEART, SIGNAL = 1.6; SWISSPROT HIT: P73930, EVALUE 6.20e+00
MGAGEGICSMQVAQGFRLIEALLSGTVASANFLAGEDTDG

SEQ ID NO: 34326 - protein, 17 aa, Homo sapiens
  MAP TO AC008268.1; EXPRESSED IN PLACENTA, SIGNAL = 1.6; EXPRESSED IN BT474, SIGNAL = 1.7; EXPRESSED IN LUNG, SIGNAL = 1.5; EXPRESSED IN HELA, SIGNAL = 1.1; EXPRESSED IN BRAIN, SIGNAL = 1.3; EXPRESSED IN HBL100, SIGNAL = 1.5; EXPRESSED IN FETAL LIVER, SIGNAL = 1.6; EXPRESSED IN ADULT LIVER, SIGNAL = 1.4; EXPRESSED IN BONE MARROW, SIGNAL = 1.9; EXPRESSED IN HEART, SIGNAL = 1.6
WGLARESAPCRSLRDSG

SEQ ID NO: 34327 - protein, 43 aa, Homo sapiens
  MAP TO AC008268.1; EXPRESSED IN BRAIN, SIGNAL =   2; EXPRESSED IN ADULT LIVER, SIGNAL = 1.8; EXPRESSED IN BT474, SIGNAL = 1.4; EXPRESSED IN BONE MARROW, SIGNAL = 1.6; EXPRESSED IN HBL100, SIGNAL = 1.2; EXPRESSED IN FETAL LIVER, SIGNAL = 1.5; EXPRESSED IN HELA, SIGNAL = 1.5; EXPRESSED IN HEART, SIGNAL = 1.5; EXPRESSED IN PLACENTA, SIGNAL = 1.6; EXPRESSED IN LUNG, SIGNAL = 1.9
VLVAGGDTNMNKTWWSLLFRDSQSSWEGEEGVPEVVGVPDKDS

SEQ ID NO: 34328 - protein, 63 aa, Homo sapiens
  MAP TO AC008268.1; EXPRESSED IN FETAL LIVER, SIGNAL = 1.4; EXPRESSED IN HEART, SIGNAL = 2.3; EXPRESSED IN PLACENTA, SIGNAL = 1.1; EXPRESSED IN BT474, SIGNAL = 1.6; EXPRESSED IN BONE MARROW, SIGNAL = 1.5; EXPRESSED IN HBL100, SIGNAL = 1.4; EXPRESSED IN LUNG, SIGNAL = 0.8; EXPRESSED IN HELA, SIGNAL = 1.1; EXPRESSED IN ADULT LIVER, SIGNAL = 1.1; EXPRESSED IN BRAIN, SIGNAL = 1.4; SWISSPROT HIT: Q22949, EVALUE 2.00e-04
VIEQLLVSGQPLLIFLEEPPGALGPRLSALGQAWVGFVVQAVQVGIVPDALLVPVAVTYDLVP

SEQ ID NO: 34329 - protein, 43 aa, Homo sapiens
  MAP TO AC008268.1; EXPRESSED IN HBL100, SIGNAL = 3.2; EXPRESSED IN FETAL LIVER, SIGNAL = 1.7; EXPRESSED IN HELA, SIGNAL =   2; EXPRESSED IN BRAIN, SIGNAL = 3.6; EXPRESSED IN BT474, SIGNAL = 6.2; EXPRESSED IN BONE MARROW, SIGNAL = 2.7; EXPRESSED IN LUNG, SIGNAL = 1.7; EXPRESSED IN ADULT LIVER, SIGNAL = 0.89; EXPRESSED IN PLACENTA, SIGNAL = 0.81; EXPRESSED IN HEART, SIGNAL = 1.5; EST_HUMAN HIT: AV721898.1, EVALUE 1.00e-19
PLPGQSLQGQLKASLPLLLQWNCPCYPQTDEGANTLIYTFNKL

SEQ ID NO: 34330 - protein, 80 aa, Homo sapiens
  MAP TO AC008174.1; EXPRESSED IN HEART, SIGNAL = 1.6; EXPRESSED IN FETAL LIVER, SIGNAL = 0.67; EXPRESSED IN HELA, SIGNAL = 0.82; EXPRESSED IN ADULT LIVER, SIGNAL = 0.82; EXPRESSED IN BRAIN, SIGNAL = 1.9; EXPRESSED IN PLACENTA, SIGNAL = 0.89; EXPRESSED IN HBL100, SIGNAL = 1.3; EXPRESSED IN LUNG, SIGNAL =   1
PAYYSKLSYDQSPPGDNVLNVIQEISRDSAQSVTTKKVSSSTNKNISAKEKEEEEREKEKVREEIKSEPSKPDDPQNQRE

SEQ ID NO: 34331 - protein, 22 aa, Homo sapiens
  MAP TO AC008174.1; EXPRESSED IN HEART, SIGNAL = 1.6; EXPRESSED IN FETAL LIVER, SIGNAL = 0.67; EXPRESSED IN HELA, SIGNAL = 0.82; EXPRESSED IN ADULT LIVER, SIGNAL = 0.82; EXPRESSED IN BRAIN, SIGNAL = 1.9; EXPRESSED IN PLACENTA, SIGNAL = 0.89; EXPRESSED IN HBL100, SIGNAL = 1.3; EXPRESSED IN LUNG, SIGNAL =   1
MRNTTQIMNMFKMSLKIFLKMF

SEQ ID NO: 34332 - protein, 63 aa, Homo sapiens
  MAP TO AC008174.1; EXPRESSED IN BT474, SIGNAL = 1.2; EXPRESSED IN HELA, SIGNAL = 0.87; EXPRESSED IN BRAIN, SIGNAL = 0.86; EXPRESSED IN PLACENTA, SIGNAL = 1.2; EXPRESSED IN BONE MARROW, SIGNAL = 1.9; EXPRESSED IN HBL100, SIGNAL =   1; EXPRESSED IN FETAL LIVER, SIGNAL = 1.5; EXPRESSED IN LUNG, SIGNAL = 1.5; EXPRESSED IN ADULT LIVER, SIGNAL = 1.7; EXPRESSED IN HEART, SIGNAL = 1.4; SWISSPROT HIT: P49587, EVALUE 8.70e-01; EST_HUMAN HIT: AW273851.1, EVALUE 6.00e-03
LSLSKCCQTTASANIESTEAISNQVIESKETHVKRAVAELDMATPKTMPETASSSWEEKPQCK

SEQ ID NO: 34333 - protein, 311 aa, Homo sapiens
  MAP TO AC008165.2; EXPRESSED IN PLACENTA, SIGNAL = 1.5; EXPRESSED IN BONE MARROW, SIGNAL = 1.9; EXPRESSED IN FETAL LIVER, SIGNAL =   2; EXPRESSED IN LUNG, SIGNAL = 0.97; EXPRESSED IN ADULT LIVER, SIGNAL =   1; EXPRESSED IN BRAIN, SIGNAL = 2.2; EXPRESSED IN HEART, SIGNAL = 1.7; EXPRESSED IN BT474, SIGNAL = 2.3; EXPRESSED IN HBL100, SIGNAL = 2.5; EXPRESSED IN HELA, SIGNAL = 1.7; SWISSPROT HIT: P52742, EVALUE 1.00e-115; EST_HUMAN HIT: AU133067.1, EVALUE 3.00e-85
TLECRVCGKTFSKNSNLRRHEMIHTGEKPHGCHLCGKAFTHCSDLRKHERTHTGEKPYGCHLCGKAFSKSSNLRRHEMIHTREKAQICHLCGKAFTHCSDLRKHERTHLGDKPYGCLLCGKAFSKCSYLRQHERTHNGEKPYECHLCGKAFSHCSHLRQHERSHNGEKPHGCHLCGKAFTESSVLKRHERIHTGEKPYECHVCGKAFTESSDLRRHERTHTGEKPYECHLCGKAFNHSSVLRRHERTHTGEKPYECNICGKAFNRSYNFRLHRRVHTGEKPYVCPLCGKAFSKFFNLRQHERTHTKKAMNM

SEQ ID NO: 34334 - protein, 105 aa, Homo sapiens
  MAP TO AC008164.2; EXPRESSED IN BT474, SIGNAL = 3.4; EXPRESSED IN BONE MARROW, SIGNAL = 1.9; EXPRESSED IN LUNG, SIGNAL = 2.7; EXPRESSED IN HELA, SIGNAL = 2.3; EXPRESSED IN ADULT LIVER, SIGNAL =   3; EXPRESSED IN BRAIN, SIGNAL = 2.2; EXPRESSED IN PLACENTA, SIGNAL = 4.4; EXPRESSED IN HBL100, SIGNAL = 3.2; EXPRESSED IN FETAL LIVER, SIGNAL = 1.9; EXPRESSED IN HEART, SIGNAL = 1.6; EST_HUMAN HIT: AA971603.1, EVALUE 3.00e-37; SWISSPROT HIT: P19028, EVALUE 2.00e-07
ISRNQEVEVEVAPLTLTPSNPLAKFFLPVPVTLHSAGLEVLVPEGGTLPPGDTTTIPLNWKLRLPPGHFGLLQSLSQQAKKGVTVLAGVINLNYQDEISLLHHKG

SEQ ID NO: 34335 - protein, 90 aa, Homo sapiens
  MAP TO AC008159.1; EXPRESSED IN PLACENTA, SIGNAL = 1.5; EXPRESSED IN BONE MARROW, SIGNAL = 2.1; EXPRESSED IN HBL100, SIGNAL =   3; EXPRESSED IN LUNG, SIGNAL =   2; EXPRESSED IN HELA, SIGNAL = 2.8; EXPRESSED IN BT474, SIGNAL = 2.4; EXPRESSED IN FETAL LIVER, SIGNAL = 2.1; EXPRESSED IN BRAIN, SIGNAL = 1.9; EXPRESSED IN HEART, SIGNAL = 1.9; EXPRESSED IN ADULT LIVER, SIGNAL = 1.7; EST_HUMAN HIT: AU128864.1, EVALUE 1.00e-43; SWISSPROT HIT: P55285, EVALUE 3.00e-45
  unsure 3
MDXLKYILSGDGAGDLFIINENTGDIQATKRLDREEKPVYILRAQAINRRTGRPVEPESEFIIKIHDINDNEPIFTKEVYTATVPEMSDV

SEQ ID NO: 34336 - protein, 46 aa, Homo sapiens
  MAP TO AC008159.1; EXPRESSED IN PLACENTA, SIGNAL = 1.5; EXPRESSED IN BONE MARROW, SIGNAL = 2.1; EXPRESSED IN HBL100, SIGNAL =   3; EXPRESSED IN LUNG, SIGNAL =   2; EXPRESSED IN HELA, SIGNAL = 2.8; EXPRESSED IN BT474, SIGNAL = 2.4; EXPRESSED IN FETAL LIVER, SIGNAL = 2.1; EXPRESSED IN BRAIN, SIGNAL = 1.9; EXPRESSED IN HEART, SIGNAL = 1.9; EXPRESSED IN ADULT LIVER, SIGNAL = 1.7; EST_HUMAN HIT: AU128864.1, EVALUE 2.00e-19; SWISSPROT HIT: P81204, EVALUE 2.70e+00
  unsure 2
WXHLNISFQEMEQEISSLLMKTQATYRPPRGWTGKKNPFTSFELKL

SEQ ID NO: 34337 - protein, 29 aa, Homo sapiens
  MAP TO AC008159.1; EXPRESSED IN HBL100, SIGNAL = 4.3; EXPRESSED IN BRAIN, SIGNAL = 3.5; EXPRESSED IN PLACENTA, SIGNAL = 1.8; EXPRESSED IN BT474, SIGNAL = 2.5; EXPRESSED IN BONE MARROW, SIGNAL =   2; EXPRESSED IN FETAL LIVER, SIGNAL = 2.4; EXPRESSED IN LUNG, SIGNAL = 1.4; EXPRESSED IN HELA, SIGNAL = 2.9; EXPRESSED IN ADULT LIVER, SIGNAL = 1.1; EXPRESSED IN HEART, SIGNAL = 2.7; EST_HUMAN HIT: AW237908.1, EVALUE 1.00e-11
LTHHIRYHQCLMHLDKLIGYTFQDRCLLQ

SEQ ID NO: 34338 - protein, 21 aa, Homo sapiens
  MAP TO AC008109.1; EXPRESSED IN BONE MARROW, SIGNAL = 2.1; EXPRESSED IN ADULT LIVER, SIGNAL = 1.1; EXPRESSED IN BT474, SIGNAL = 2.5; EXPRESSED IN FETAL LIVER, SIGNAL = 1.9; EXPRESSED IN LUNG, SIGNAL = 1.7; EXPRESSED IN HELA, SIGNAL = 1.3; EXPRESSED IN BRAIN, SIGNAL = 1.9; EXPRESSED IN HEART, SIGNAL = 1.3; EXPRESSED IN PLACENTA, SIGNAL = 2.3; EXPRESSED IN HBL100, SIGNAL = 1.6
KPEKDTSKTENYRQANISDEY

SEQ ID NO: 34339 - protein, 46 aa, Homo sapiens
  MAP TO AC008085.1; EXPRESSED IN PLACENTA, SIGNAL = 1.3; EXPRESSED IN BT474, SIGNAL = 5.9; EXPRESSED IN FETAL LIVER, SIGNAL = 5.9; EXPRESSED IN LUNG, SIGNAL = 1.4; EXPRESSED IN ADULT LIVER, SIGNAL = 4.5; EXPRESSED IN BRAIN, SIGNAL = 2.4; EXPRESSED IN BONE MARROW, SIGNAL = 5.9; EXPRESSED IN HBL100, SIGNAL = 9.8; EXPRESSED IN HELA, SIGNAL = 3.1; EXPRESSED IN HEART, SIGNAL = 5.4; SWISSPROT HIT: Q9Y6M9, EVALUE 4.00e-21; EST_HUMAN HIT: BE645844.1, EVALUE 5.00e-20
DDWHPSEKAMYPDYFAKRKQWKKLRRESWKREVKQLQEETPPAGKE

SEQ ID NO: 34340 - protein, 93 aa, Homo sapiens
  MAP TO AC008079.7; EXPRESSED IN HEART, SIGNAL = 2.5; EXPRESSED IN BT474, SIGNAL = 2.8; EXPRESSED IN BRAIN, SIGNAL = 3.6; EXPRESSED IN PLACENTA, SIGNAL = 2.7; EXPRESSED IN BONE MARROW, SIGNAL = 3.2; EXPRESSED IN HBL100, SIGNAL = 3.9; EXPRESSED IN FETAL LIVER, SIGNAL = 3.3; EXPRESSED IN LUNG, SIGNAL = 3.2; EXPRESSED IN HELA, SIGNAL = 7.5; EXPRESSED IN ADULT LIVER, SIGNAL = 2.6; EST_HUMAN HIT: AW797166.1, EVALUE 1.00e-08; SWISSPROT HIT: P24709, EVALUE 3.80e+00
KMQEPGAVLDVVGAWLQDPANQNLPEYGALAEFHVQRVLLPLGCLSEAEELVVGSAAFGEERRLDVLQAIHTARQQQKQEHSGSEEAQKPNLE

SEQ ID NO: 34341 - protein, 48 aa, Homo sapiens
  MAP TO AC008079.7; EXPRESSED IN HEART, SIGNAL = 2.5; EXPRESSED IN BT474, SIGNAL = 2.8; EXPRESSED IN BRAIN, SIGNAL = 3.6; EXPRESSED IN PLACENTA, SIGNAL = 2.7; EXPRESSED IN BONE MARROW, SIGNAL = 3.2; EXPRESSED IN HBL100, SIGNAL = 3.9; EXPRESSED IN FETAL LIVER, SIGNAL = 3.3; EXPRESSED IN LUNG, SIGNAL = 3.2; EXPRESSED IN HELA, SIGNAL = 7.5; EXPRESSED IN ADULT LIVER, SIGNAL = 2.6; EST_HUMAN HIT: AW341059.1, EVALUE 1.30e-01; SWISSPROT HIT: P26476, EVALUE 6.00e+00
QNARAWSCAGCGGCLAPRPSQSKPSRIWSLGRISRAAGAAASGLLIGG

SEQ ID NO: 34342 - protein, 229 aa, Homo sapiens
  MAP TO AC008079.7; EXPRESSED IN PLACENTA, SIGNAL =  14; EXPRESSED IN BT474, SIGNAL =  58; EXPRESSED IN BONE MARROW, SIGNAL =  28; EXPRESSED IN HBL100, SIGNAL = 1.3e+02; EXPRESSED IN FETAL LIVER, SIGNAL =  72; EXPRESSED IN LUNG, SIGNAL =  20; EXPRESSED IN HELA, SIGNAL =  69; EXPRESSED IN ADULT LIVER, SIGNAL =  13; EXPRESSED IN BRAIN, SIGNAL = 1.2e+02; EXPRESSED IN HEART, SIGNAL =  38; EST_HUMAN HIT: BE792619.1, EVALUE 1.00e-112; SWISSPROT HIT: P09643, EVALUE 1.00e-120
TDACSGLQGFLIFHSFGGGTGSGFTSLLMERLSLDYGKKSKLEFAIYPAPQVSTAVVEPYNSILTTHTTLEHSDCAFMVDNEAIYDICRRNLDIERPTYTNLNRLISQIVSSITASLRFDGALNVDLTEFQTNLVPYPRIHFPLVTYAPIISAEKAYHEQLSVAEITSSCFEPNSQMVKCDPRHGKYMACCMLYRGDVVPKDVNVAIAAIKTKRTIQFVDWCPTGFKVR

SEQ ID NO: 34343 - protein, 69 aa, Homo sapiens
  MAP TO AC008074.1; EXPRESSED IN PLACENTA, SIGNAL = 2.5; EXPRESSED IN HBL100, SIGNAL = 3.1; EXPRESSED IN BRAIN, SIGNAL = 1.7; EXPRESSED IN HEART, SIGNAL = 1.3; EXPRESSED IN ADULT LIVER, SIGNAL = 1.5; EXPRESSED IN BT474, SIGNAL = 4.7; EXPRESSED IN BONE MARROW, SIGNAL = 1.8; EXPRESSED IN FETAL LIVER, SIGNAL = 2.9; EXPRESSED IN LUNG, SIGNAL = 2.2; EXPRESSED IN HELA, SIGNAL = 1.4; SWISSPROT HIT: P21961, EVALUE 9.70e+00; EST_HUMAN HIT: R51995.1, EVALUE 1.00e-31
NRLLIIYQKNVNWQENLVEQALNLLQNLKMGKKVRLDILILCQIFRMTAMVFKTLMILQTSVQLVLAKL

SEQ ID NO: 34344 - protein, 67 aa, Homo sapiens
  MAP TO AC008044.3; EXPRESSED IN BT474, SIGNAL = 7.7; EXPRESSED IN HELA, SIGNAL =   3; EXPRESSED IN ADULT LIVER, SIGNAL = 1.8; EXPRESSED IN BRAIN, SIGNAL = 2.4; EXPRESSED IN BONE MARROW, SIGNAL = 2.2; EXPRESSED IN HBL100, SIGNAL =  11; EXPRESSED IN FETAL LIVER, SIGNAL = 6.3; EXPRESSED IN LUNG, SIGNAL = 3.1; EXPRESSED IN PLACENTA, SIGNAL = 2.9; EXPRESSED IN HEART, SIGNAL = 2.3; EST_HUMAN HIT: AV689564.1, EVALUE 6.00e-33
LFPTRSFLVQTVDREAEKDQFSLRKILLVWTSFWKKPNSMVALKDPQIAAAPRNTSMKARRGGRNRH

SEQ ID NO: 34345 - protein, 52 aa, Homo sapiens
  MAP TO AC008044.3; EXPRESSED IN BT474, SIGNAL = 7.7; EXPRESSED IN HELA, SIGNAL =   3; EXPRESSED IN ADULT LIVER, SIGNAL = 1.8; EXPRESSED IN BRAIN, SIGNAL = 2.4; EXPRESSED IN BONE MARROW, SIGNAL = 2.2; EXPRESSED IN HBL100, SIGNAL =  11; EXPRESSED IN FETAL LIVER, SIGNAL = 6.3; EXPRESSED IN LUNG, SIGNAL = 3.1; EXPRESSED IN PLACENTA, SIGNAL = 2.9; EXPRESSED IN HEART, SIGNAL = 2.3; EST_HUMAN HIT: AA164495.1, EVALUE 9.00e-25; SWISSPROT HIT: Q13573, EVALUE 7.00e-26
FVPDKEFSGSDRRQRGREGPVQFEEDPFGLDKFLEEAKQHGGSKRPSDSSRP

SEQ ID NO: 34346 - protein, 142 aa, Homo sapiens
  MAP TO AC008044.3; EXPRESSED IN PLACENTA, SIGNAL = 2.8; EXPRESSED IN BONE MARROW, SIGNAL = 3.9; EXPRESSED IN HBL100, SIGNAL = 4.3; EXPRESSED IN LUNG, SIGNAL = 3.1; EXPRESSED IN ADULT LIVER, SIGNAL = 2.6; EXPRESSED IN BRAIN, SIGNAL = 3.5; EXPRESSED IN HEART, SIGNAL = 3.3; EXPRESSED IN BT474, SIGNAL = 4.4; EXPRESSED IN HELA, SIGNAL = 3.3; EXPRESSED IN FETAL LIVER, SIGNAL = 4.2; EST_HUMAN HIT: AA760913.1, EVALUE 9.00e-70; SWISSPROT HIT: Q9SA98, EVALUE 2.00e-08
FGQSAIFLLGGLQRDEAPTAMFMHSGDIMIMSGFSRLLNHAVPRVLPNPEGEGLPHCLEAPLPAVLPRDSMVEPCSMEDWQVCASYLKTARVNMTVRQVLATDQNFPLEPIEDEKRDISTEGFCHLDDQNSEVKRARINPDS

SEQ ID NO: 34347 - protein, 18 aa, Homo sapiens
  MAP TO AC008039.1; EXPRESSED IN PLACENTA, SIGNAL = 2.9; EXPRESSED IN HBL100, SIGNAL = 1.9; EXPRESSED IN LUNG, SIGNAL = 2.9; EXPRESSED IN HELA, SIGNAL = 2.4; EXPRESSED IN BT474, SIGNAL =   2; EXPRESSED IN BONE MARROW, SIGNAL = 2.6; EXPRESSED IN FETAL LIVER, SIGNAL = 2.6; EXPRESSED IN ADULT LIVER, SIGNAL = 2.2; EXPRESSED IN BRAIN, SIGNAL = 3.3; EXPRESSED IN HEART, SIGNAL = 2.4
PWVGRCYHKGVSSSQFNL

SEQ ID NO: 34348 - protein, 27 aa, Homo sapiens
  MAP TO AC008038.1; EXPRESSED IN HEART, SIGNAL = 1.6; EXPRESSED IN BONE MARROW, SIGNAL = 1.8; EXPRESSED IN ADULT LIVER, SIGNAL = 2.2; EXPRESSED IN BT474, SIGNAL = 6.6; EXPRESSED IN LUNG, SIGNAL = 2.8; EXPRESSED IN HELA, SIGNAL = 2.7; EXPRESSED IN BRAIN, SIGNAL = 2.4; EXPRESSED IN PLACENTA, SIGNAL = 2.5; EXPRESSED IN HBL100, SIGNAL = 6.7; EXPRESSED IN FETAL LIVER, SIGNAL = 6.8
SLSILVSDEELKRRVAEELALEQAKKE

SEQ ID NO: 34349 - protein, 82 aa, Homo sapiens
  MAP TO AC008009.4; EXPRESSED IN FETAL LIVER, SIGNAL = 1.5; EXPRESSED IN LUNG, SIGNAL =   1; EXPRESSED IN HELA, SIGNAL = 2.5; EXPRESSED IN ADULT LIVER, SIGNAL = 0.97; EXPRESSED IN BRAIN, SIGNAL = 0.96; EXPRESSED IN HBL100, SIGNAL = 2.4; EXPRESSED IN PLACENTA, SIGNAL = 1.2; EXPRESSED IN HEART, SIGNAL = 1.6; EXPRESSED IN BT474, SIGNAL = 2.2; EXPRESSED IN BONE MARROW, SIGNAL = 0.86; EST_HUMAN HIT: AW451314.1, EVALUE 2.00e-28; SWISSPROT HIT: P51114, EVALUE 8.00e-28
TLKRIFLASDMNIVLKDPDSNPYSLLDNTESDQTADTDASESHHSTNRRRRSRRRRTDEDAVLMDGMTESDTASVNENGLGM

SEQ ID NO: 34350 - protein, 50 aa, Homo sapiens
  MAP TO AC008009.4; EXPRESSED IN PLACENTA, SIGNAL = 1.4; EXPRESSED IN BT474, SIGNAL =   2; EXPRESSED IN BONE MARROW, SIGNAL = 1.5; EXPRESSED IN HBL100, SIGNAL = 6.9; EXPRESSED IN FETAL LIVER, SIGNAL = 1.5; EXPRESSED IN LUNG, SIGNAL = 1.4; EXPRESSED IN HELA, SIGNAL = 1.3; EXPRESSED IN ADULT LIVER, SIGNAL = 0.96; EXPRESSED IN BRAIN, SIGNAL = 1.4; EXPRESSED IN HEART, SIGNAL = 1.9; EST_HUMAN HIT: AU139197.1, EVALUE 3.00e-23; SWISSPROT HIT: P51114, EVALUE 2.00e-24
FYVIEYAACDATYNEIVTFERLRPVNQNKTVKKNTFFKCTVDVPEDLREA

SEQ ID NO: 34351 - protein, 33 aa, Homo sapiens
  MAP TO AC008008.2; EXPRESSED IN HELA, SIGNAL = 5.2; EXPRESSED IN ADULT LIVER, SIGNAL = 5.3; EXPRESSED IN BT474, SIGNAL = 5.3; EXPRESSED IN LUNG, SIGNAL = 5.7; EXPRESSED IN HEART, SIGNAL = 4.6; EXPRESSED IN PLACENTA, SIGNAL = 6.2; EXPRESSED IN BONE MARROW, SIGNAL = 6.7; EXPRESSED IN FETAL LIVER, SIGNAL = 4.8; EXPRESSED IN BRAIN, SIGNAL = 5.6; EXPRESSED IN HBL100, SIGNAL = 5.6; EST_HUMAN HIT: AU128564.1, EVALUE 2.00e-11
CIERSASLISQAEHSLKENDHARFLQTAKNITE

SEQ ID NO: 34352 - protein, 47 aa, Homo sapiens
  MAP TO AC007969.2; EXPRESSED IN HBL100, SIGNAL = 2.2; EXPRESSED IN ADULT LIVER, SIGNAL = 1.9; EXPRESSED IN BRAIN, SIGNAL = 2.6; EXPRESSED IN HEART, SIGNAL = 1.9; EXPRESSED IN BT474, SIGNAL = 2.1; EXPRESSED IN PLACENTA, SIGNAL = 2.5; EXPRESSED IN HELA, SIGNAL = 2.8; EXPRESSED IN LUNG, SIGNAL = 2.9; EXPRESSED IN FETAL LIVER, SIGNAL = 2.1; EXPRESSED IN BONE MARROW, SIGNAL = 2.5; EST_HUMAN HIT: AU131202.1, EVALUE 7.00e-06
MPPLLFEVSSLENAFQIGGHPWHYIVTPNKKKQKGVFHICALKDNSL

SEQ ID NO: 34353 - protein, 39 aa, Homo sapiens
  MAP TO AC007969.2; EXPRESSED IN HBL100, SIGNAL = 2.2; EXPRESSED IN ADULT LIVER, SIGNAL = 1.9; EXPRESSED IN BRAIN, SIGNAL = 2.6; EXPRESSED IN HEART, SIGNAL = 1.9; EXPRESSED IN BT474, SIGNAL = 2.1; EXPRESSED IN PLACENTA, SIGNAL = 2.5; EXPRESSED IN HELA, SIGNAL = 2.8; EXPRESSED IN LUNG, SIGNAL = 2.9; EXPRESSED IN FETAL LIVER, SIGNAL = 2.1; EXPRESSED IN BONE MARROW, SIGNAL = 2.5; EST_HUMAN HIT: AU131202.1, EVALUE 1.00e-03
TCHHCSLRCHPWRMLFRLEAILGTTSSHLIRRNRKEFSI

SEQ ID NO: 34354 - protein, 52 aa, Homo sapiens
  MAP TO AC007969.2; EXPRESSED IN HELA, SIGNAL = 1.1; EXPRESSED IN BRAIN, SIGNAL = 0.77; EXPRESSED IN HEART, SIGNAL = 1.2; EXPRESSED IN BONE MARROW, SIGNAL = 1.5; EXPRESSED IN HBL100, SIGNAL = 1.8; EXPRESSED IN LUNG, SIGNAL = 2.4; EXPRESSED IN FETAL LIVER, SIGNAL = 1.5; EST_HUMAN HIT: R06965.1, EVALUE 3.00e-06; SWISSPROT HIT: P10897, EVALUE 6.00e-02
TWKCSKLLMKSIHAGLNAVAAILAIISVVAVFENHNVNNIANMYSLHSWVGL

SEQ ID NO: 34355 - protein, 101 aa, Homo sapiens
  MAP TO AC007969.2; EXPRESSED IN PLACENTA, SIGNAL =   2; EXPRESSED IN BONE MARROW, SIGNAL = 1.9; EXPRESSED IN HELA, SIGNAL =  10; EXPRESSED IN HBL100, SIGNAL = 3.2; EXPRESSED IN ADULT LIVER, SIGNAL = 3.5; EXPRESSED IN BRAIN, SIGNAL = 2.3; EXPRESSED IN BT474, SIGNAL = 4.6; EXPRESSED IN HEART, SIGNAL = 3.6; EXPRESSED IN LUNG, SIGNAL = 2.9; EXPRESSED IN FETAL LIVER, SIGNAL = 4.9; EST_HUMAN HIT: BF349595.1, EVALUE 1.00e-46; SWISSPROT HIT: P51398, EVALUE 1.00e-47
GITRVRNTTDAAGIVLKELKRQSSLGVFHLLVAVDGINALWGRTALKREDKCPIAPEELALVHNLRKMMKNDWHGGAIVLTLNQTGSLFKPRKAYLLQELL

SEQ ID NO: 34356 - protein, 49 aa, Homo sapiens
  MAP TO AC007964.2; EXPRESSED IN BONE MARROW, SIGNAL = 3.9; EXPRESSED IN FETAL LIVER, SIGNAL = 3.1; EXPRESSED IN ADULT LIVER, SIGNAL = 2.5; EXPRESSED IN BRAIN, SIGNAL = 3.7; EXPRESSED IN HEART, SIGNAL = 2.5; EXPRESSED IN PLACENTA, SIGNAL = 3.3; EXPRESSED IN BT474, SIGNAL = 2.6; EXPRESSED IN HBL100, SIGNAL = 2.5; EXPRESSED IN LUNG, SIGNAL = 3.1; EXPRESSED IN HELA, SIGNAL = 3.1; SWISSPROT HIT: P92666, EVALUE 2.70e+00
LNIFQRQAIVAYFYYVKEQPVWCGLQPLGSAVLHDTALGALAKVQEQIV

SEQ ID NO: 34357 - protein, 55 aa, Homo sapiens
  MAP TO AC007949.1; EXPRESSED IN BONE MARROW, SIGNAL = 4.7; EXPRESSED IN ADULT LIVER, SIGNAL = 3.1; EXPRESSED IN HEART, SIGNAL = 2.9; EXPRESSED IN LUNG, SIGNAL = 3.9; EXPRESSED IN PLACENTA, SIGNAL = 4.4; EXPRESSED IN BT474, SIGNAL = 3.9; EXPRESSED IN HBL100, SIGNAL = 3.3; EXPRESSED IN FETAL LIVER, SIGNAL = 4.3; EXPRESSED IN HELA, SIGNAL = 2.6; EXPRESSED IN BRAIN, SIGNAL = 3.3; EST_HUMAN HIT: BF000357.1, EVALUE 3.70e+00
CSFGRRQDDLISSSVPSTTSTPTVTSAAGLQKSLLSSTSTTTKITTGSSSAGTQS

SEQ ID NO: 34358 - protein, 53 aa, Homo sapiens
  MAP TO AC007944.1; EXPRESSED IN BONE MARROW, SIGNAL =   1; EXPRESSED IN HEART, SIGNAL = 0.97; EXPRESSED IN PLACENTA, SIGNAL = 0.98; EXPRESSED IN BT474, SIGNAL = 1.2; EXPRESSED IN HBL100, SIGNAL =   1; EXPRESSED IN LUNG, SIGNAL = 1.6; EXPRESSED IN HELA, SIGNAL = 0.86; EXPRESSED IN ADULT LIVER, SIGNAL = 1.4e+02; EXPRESSED IN BRAIN, SIGNAL = 1.6; EXPRESSED IN FETAL LIVER, SIGNAL = 1.3; EST_HUMAN HIT: BE739699.1, EVALUE 2.50e-01; SWISSPROT HIT: Q9QYC0, EVALUE 2.40e-01
  unsure 52
QPGPHLEEPGRALPLWEQDGAEPDPEPSAAPQPVQHQNFLQSRRARGWGPAXK

SEQ ID NO: 34359 - protein, 106 aa, Homo sapiens
  MAP TO AC007944.1; EXPRESSED IN ADULT LIVER, SIGNAL = 0.86; EXPRESSED IN LUNG, SIGNAL = 1.7; EXPRESSED IN HELA, SIGNAL = 2.1; EXPRESSED IN HEART, SIGNAL = 0.94; EXPRESSED IN PLACENTA, SIGNAL = 1.1; EXPRESSED IN BT474, SIGNAL = 1.2; EXPRESSED IN BONE MARROW, SIGNAL = 0.95; EXPRESSED IN FETAL LIVER, SIGNAL = 1.3; EXPRESSED IN BRAIN, SIGNAL = 1.6; EXPRESSED IN HBL100, SIGNAL = 1.3; SWISSPROT HIT: Q04944, EVALUE 6.10e+00; EST_HUMAN HIT: AA609940.1, EVALUE 1.00e-44
CASGASRRAWGMWSRRDLYGQCPRTVSDLALQNAFGDRWGPYFAEYDWCSTCSSSSESDNEGYFLGEPIPQPARLRYVTSDELLHKYSSYGLPKSSTLGGRGQLHS

SEQ ID NO: 34360 - protein, 32 aa, Homo sapiens
  MAP TO AC007939.1; EXPRESSED IN HBL100, SIGNAL = 1.2; EXPRESSED IN BRAIN, SIGNAL = 1.6; EXPRESSED IN BT474, SIGNAL = 1.2; EXPRESSED IN BONE MARROW, SIGNAL =   1; EXPRESSED IN FETAL LIVER, SIGNAL = 1.3; EXPRESSED IN HELA, SIGNAL = 3.1; EXPRESSED IN ADULT LIVER, SIGNAL = 1.5; EXPRESSED IN HEART, SIGNAL = 1.2; EXPRESSED IN PLACENTA, SIGNAL = 2.1; EXPRESSED IN LUNG, SIGNAL = 1.3
VKTPPIEITNVLLPSGFSHYLGSDVTLTPEVE

SEQ ID NO: 34361 - protein, 47 aa, Homo sapiens
  MAP TO AC007939.1; EXPRESSED IN HEART, SIGNAL = 0.81; EXPRESSED IN BONE MARROW, SIGNAL = 0.99; EXPRESSED IN FETAL LIVER, SIGNAL = 0.87; EXPRESSED IN LUNG, SIGNAL = 0.89; EXPRESSED IN PLACENTA, SIGNAL = 1.5; EXPRESSED IN HELA, SIGNAL = 2.3; EXPRESSED IN ADULT LIVER, SIGNAL = 2.1; EXPRESSED IN BRAIN, SIGNAL = 0.98; SWISSPROT HIT: P54359, EVALUE 1.20e+00
ICRKMLHRHMLIFRLPNLQMLDGSPVNSDDRAKAEFHLAELQAKKNS

SEQ ID NO: 34362 - protein, 29 aa, Homo sapiens
  MAP TO AC007939.1; EXPRESSED IN PLACENTA, SIGNAL = 1.4; EXPRESSED IN ADULT LIVER, SIGNAL = 2.4; EXPRESSED IN BRAIN, SIGNAL =   1; EXPRESSED IN HEART, SIGNAL = 0.88; EXPRESSED IN BT474, SIGNAL = 0.64; EXPRESSED IN FETAL LIVER, SIGNAL = 0.84; EXPRESSED IN LUNG, SIGNAL = 0.85; EXPRESSED IN HELA, SIGNAL = 0.79; EXPRESSED IN BONE MARROW, SIGNAL =   1; SWISSPROT HIT: P27920, EVALUE 6.40e+00
DQFRNVCNVNLQNNHLTSFSGLIYLPNVK

SEQ ID NO: 34363 - protein, 57 aa, Homo sapiens
  MAP TO AC007939.1; EXPRESSED IN BONE MARROW, SIGNAL =   2; EXPRESSED IN PLACENTA, SIGNAL = 2.1; EXPRESSED IN BT474, SIGNAL = 1.4; EXPRESSED IN BRAIN, SIGNAL = 1.8; EXPRESSED IN ADULT LIVER, SIGNAL = 1.7; EXPRESSED IN HELA, SIGNAL = 1.4; EXPRESSED IN LUNG, SIGNAL = 1.7; EXPRESSED IN FETAL LIVER, SIGNAL = 1.6; EXPRESSED IN HBL100, SIGNAL = 1.5; EXPRESSED IN HEART, SIGNAL = 1.9; SWISSPROT HIT: P40456, EVALUE 1.20e+00; EST_HUMAN HIT: BE740015.1, EVALUE 1.60e+00
KGSGKGHSDGSNNSKVTDPETLKSCETVTEEPSLQQKILAKLNALNERVTFWNKKLD

SEQ ID NO: 34364 - protein, 44 aa, Homo sapiens
  MAP TO AC007939.1; EXPRESSED IN HEART, SIGNAL = 2.1; EXPRESSED IN BT474, SIGNAL = 3.4; EXPRESSED IN BONE MARROW, SIGNAL = 3.4; EXPRESSED IN HELA, SIGNAL = 2.7; EXPRESSED IN PLACENTA, SIGNAL = 2.6; EXPRESSED IN HBL100, SIGNAL = 3.3; EXPRESSED IN FETAL LIVER, SIGNAL = 2.2; EXPRESSED IN LUNG, SIGNAL = 2.5; EXPRESSED IN ADULT LIVER, SIGNAL =   2; EXPRESSED IN BRAIN, SIGNAL = 3.8; SWISSPROT HIT: Q24314, EVALUE 4.60e+00
YYNMRIKTLQRHLKEDLEKLNDQKCKLQKLPEERVKLFSFVKKT

SEQ ID NO: 34365 - protein, 163 aa, Homo sapiens
  MAP TO AC007939.1; EXPRESSED IN ADULT LIVER, SIGNAL = 2.3; EXPRESSED IN BRAIN, SIGNAL = 2.2; EXPRESSED IN HEART, SIGNAL = 3.6; EXPRESSED IN BONE MARROW, SIGNAL = 2.6; EXPRESSED IN HBL100, SIGNAL = 5.8; EXPRESSED IN FETAL LIVER, SIGNAL = 2.9; EXPRESSED IN LUNG, SIGNAL =   2; EXPRESSED IN PLACENTA, SIGNAL = 1.9; EXPRESSED IN BT474, SIGNAL = 2.7; EXPRESSED IN HELA, SIGNAL = 2.5; EST_HUMAN HIT: BE005208.1, EVALUE 8.00e-87; SWISSPROT HIT: P08432, EVALUE 6.20e-02
  unsure 16
NCRKHPVILQKLAELXEVFEDAFEQEYTRVCSLNEHFGNVLTPCTVLPVKLYSDARNVLSGIIDSHENLKEFKGDLIKVLVWILVQYCSKRPGMKENVHNTENKGKAPLMLPALNTLPPPKSPEDIDSLNSETFNDWSDDNIFDDEPTIKKVIEEKHQLKDLP

SEQ ID NO: 34366 - protein, 47 aa, Homo sapiens
  MAP TO AC007935.1; EXPRESSED IN HBL100, SIGNAL = 1.8; EXPRESSED IN ADULT LIVER, SIGNAL = 1.8; EXPRESSED IN BRAIN, SIGNAL = 2.7; EXPRESSED IN BT474, SIGNAL = 2.3; EXPRESSED IN HEART, SIGNAL = 1.9; EXPRESSED IN FETAL LIVER, SIGNAL = 2.3; EXPRESSED IN PLACENTA, SIGNAL = 2.7; EXPRESSED IN HELA, SIGNAL = 2.3; EXPRESSED IN LUNG, SIGNAL = 3.1; EXPRESSED IN BONE MARROW, SIGNAL = 2.6; EST_HUMAN HIT: BE258453.1, EVALUE 1.20e+00
SEERDHPFLPRSPHSQGLQLSFLDCHYPREVLRPCSCRNAAPCHCLP

SEQ ID NO: 34367 - protein, 36 aa, Homo sapiens
  MAP TO AC007935.1; EXPRESSED IN BONE MARROW, SIGNAL = 1.2; EXPRESSED IN HBL100, SIGNAL =   1; EXPRESSED IN BRAIN, SIGNAL = 1.3; EXPRESSED IN HEART, SIGNAL = 1.3; EXPRESSED IN BT474, SIGNAL = 1.3; EXPRESSED IN HELA, SIGNAL = 1.1; EXPRESSED IN PLACENTA, SIGNAL = 2.4; EXPRESSED IN FETAL LIVER, SIGNAL = 1.1; EXPRESSED IN LUNG, SIGNAL = 2.8; EXPRESSED IN ADULT LIVER, SIGNAL =   1; EST_HUMAN HIT: AU119344.1, EVALUE 1.00e-09; SWISSPROT HIT: P48826, EVALUE 3.60e+00
IFCVFISREHDKDPESFFKVLMHLKDLGLNFHVSVL

SEQ ID NO: 34368 - protein, 40 aa, Homo sapiens
  MAP TO AC007935.1; EXPRESSED IN BONE MARROW, SIGNAL = 1.9; EXPRESSED IN HBL100, SIGNAL = 2.3; EXPRESSED IN ADULT LIVER, SIGNAL = 2.8; EXPRESSED IN BRAIN, SIGNAL = 2.2; EXPRESSED IN PLACENTA, SIGNAL = 8.4; EXPRESSED IN BT474, SIGNAL = 1.3; EXPRESSED IN FETAL LIVER, SIGNAL = 2.4; EXPRESSED IN LUNG, SIGNAL = 2.7; EXPRESSED IN HELA, SIGNAL = 4.2; EXPRESSED IN HEART, SIGNAL = 1.9; SWISSPROT HIT: O88813, EVALUE 8.10e+00; EST_HUMAN HIT: AU119344.1, EVALUE 4.00e-17
ALGSSVLHWGYLPSKDDYFQVLCMADVVISTAKHEFFGVA

SEQ ID NO: 34369 - protein, 54 aa, Homo sapiens
  MAP TO AC007914.1; EXPRESSED IN HEART, SIGNAL =   4; EXPRESSED IN BT474, SIGNAL = 3.4; EXPRESSED IN BONE MARROW, SIGNAL = 6.2; EXPRESSED IN HBL100, SIGNAL = 4.3; EXPRESSED IN FETAL LIVER, SIGNAL = 4.4; EXPRESSED IN LUNG, SIGNAL = 5.2; EXPRESSED IN HELA, SIGNAL = 6.5; EXPRESSED IN BRAIN, SIGNAL = 6.1; EXPRESSED IN PLACENTA, SIGNAL =  13; EXPRESSED IN ADULT LIVER, SIGNAL = 4.7; SWISSPROT HIT: P98082, EVALUE 4.00e-25; EST_HUMAN HIT: BE818834.1, EVALUE 4.00e-24
SSANDLLASDIFAPPVSEPSGQASPTGQPTALQPNPLDLFKTSAPVPVGPLVGL

SEQ ID NO: 34370 - protein, 39 aa, Homo sapiens
  MAP TO AC007914.1; EXPRESSED IN BT474, SIGNAL = 1.1; EXPRESSED IN BONE MARROW, SIGNAL = 1.3; EXPRESSED IN HBL100, SIGNAL = 1.1; EXPRESSED IN LUNG, SIGNAL =   1; EXPRESSED IN HELA, SIGNAL = 1.6; EXPRESSED IN ADULT LIVER, SIGNAL =  12; EXPRESSED IN HEART, SIGNAL = 1.1; EXPRESSED IN PLACENTA, SIGNAL = 1.7; EXPRESSED IN FETAL LIVER, SIGNAL = 2.1; EXPRESSED IN BRAIN, SIGNAL = 1.2; EST_HUMAN HIT: AV659020.1, EVALUE 6.00e-12
ALPPHSQPTQQEQHVSLPELCSCNLHFRNKHPHSTVHDQ

SEQ ID NO: 34371 - protein, 31 aa, Homo sapiens
  MAP TO AC007914.1; EXPRESSED IN BT474, SIGNAL = 1.1; EXPRESSED IN BONE MARROW, SIGNAL = 1.3; EXPRESSED IN HBL100, SIGNAL = 1.1; EXPRESSED IN LUNG, SIGNAL =   1; EXPRESSED IN HELA, SIGNAL = 1.6; EXPRESSED IN ADULT LIVER, SIGNAL =  12; EXPRESSED IN HEART, SIGNAL = 1.1; EXPRESSED IN PLACENTA, SIGNAL = 1.7; EXPRESSED IN FETAL LIVER, SIGNAL = 2.1; EXPRESSED IN BRAIN, SIGNAL = 1.2; EST_HUMAN HIT: AV661851.1, EVALUE 1.00e-03; SWISSPROT HIT: P02748, EVALUE 2.00e-03
  unsure 8
PCHPTRSXPSKSSMSACRSFAVAICILEISI

SEQ ID NO: 34372 - protein, 33 aa, Homo sapiens
  MAP TO AC007914.1; EXPRESSED IN BT474, SIGNAL = 1.2; EXPRESSED IN HBL100, SIGNAL = 2.1; EXPRESSED IN FETAL LIVER, SIGNAL = 1.5; EXPRESSED IN LUNG, SIGNAL = 1.3; EXPRESSED IN HELA, SIGNAL = 0.85; EXPRESSED IN BRAIN, SIGNAL = 1.1; EXPRESSED IN PLACENTA, SIGNAL = 1.5; EXPRESSED IN BONE MARROW, SIGNAL = 1.3; EXPRESSED IN ADULT LIVER, SIGNAL =   1; EXPRESSED IN HEART, SIGNAL = 2.4
IIIIIIIIIIIIIIIIIITSSPSLDEETNPKLK

SEQ ID NO: 34373 - protein, 18 aa, Homo sapiens
  MAP TO AC007914.1; EXPRESSED IN BT474, SIGNAL = 1.2; EXPRESSED IN HBL100, SIGNAL = 2.1; EXPRESSED IN FETAL LIVER, SIGNAL = 1.5; EXPRESSED IN LUNG, SIGNAL = 1.3; EXPRESSED IN HELA, SIGNAL = 0.85; EXPRESSED IN BRAIN, SIGNAL = 1.1; EXPRESSED IN PLACENTA, SIGNAL = 1.5; EXPRESSED IN BONE MARROW, SIGNAL = 1.3; EXPRESSED IN ADULT LIVER, SIGNAL =   1; EXPRESSED IN HEART, SIGNAL = 2.4
HHHHHHHHHHHHVITIIG

SEQ ID NO: 34374 - protein, 30 aa, Homo sapiens
  MAP TO AC007914.1; EXPRESSED IN FETAL LIVER, SIGNAL =  10; EXPRESSED IN ADULT LIVER, SIGNAL =   6; EXPRESSED IN PLACENTA, SIGNAL = 5.6; EXPRESSED IN BT474, SIGNAL = 7.6; EXPRESSED IN BONE MARROW, SIGNAL = 9.8; EXPRESSED IN HBL100, SIGNAL =  12; EXPRESSED IN LUNG, SIGNAL = 7.9; EXPRESSED IN HELA, SIGNAL =  13; EXPRESSED IN BRAIN, SIGNAL =  13; EXPRESSED IN HEART, SIGNAL = 9.3
  unsure 22
MTTLKLRSSNLAKDKNWLSSRXAIAAPLSN

SEQ ID NO: 34375 - protein, 52 aa, Homo sapiens
  MAP TO AC007899.2; EXPRESSED IN BT474, SIGNAL =   6; EXPRESSED IN BONE MARROW, SIGNAL = 6.5; EXPRESSED IN HBL100, SIGNAL = 6.3; EXPRESSED IN FETAL LIVER, SIGNAL = 8.8; EXPRESSED IN HELA, SIGNAL = 7.2; EXPRESSED IN ADULT LIVER, SIGNAL = 6.7; EXPRESSED IN BRAIN, SIGNAL =  10; EXPRESSED IN HEART, SIGNAL = 7.4; EXPRESSED IN PLACENTA, SIGNAL = 8.5; EXPRESSED IN LUNG, SIGNAL = 8.8; EST_HUMAN HIT: BE889286.1, EVALUE 2.00e-25; SWISSPROT HIT: P19525, EVALUE 1.00e-26
KAEREVKALAKLDHVNIVHYNGCWDGFDYDPETSDDSLESSDYDPENSKNSS

SEQ ID NO: 34376 - protein, 39 aa, Homo sapiens
  MAP TO AC007899.2; EXPRESSED IN BONE MARROW, SIGNAL = 1.9; EXPRESSED IN LUNG, SIGNAL = 1.3; EXPRESSED IN HEART, SIGNAL = 1.3; EXPRESSED IN PLACENTA, SIGNAL = 1.1; EXPRESSED IN BT474, SIGNAL = 1.1; EXPRESSED IN HBL100, SIGNAL = 1.1; EXPRESSED IN FETAL LIVER, SIGNAL = 1.3; EXPRESSED IN HELA, SIGNAL = 1.4; EXPRESSED IN ADULT LIVER, SIGNAL = 2.7; EXPRESSED IN BRAIN, SIGNAL = 1.6; EST_HUMAN HIT: AV714334.1, EVALUE 5.00e-15; SWISSPROT HIT: Q03410, EVALUE 7.10e-01
KSGIGHEASLKRKAEEKLESYRKKIHMKNQAEEKAAEQF

SEQ ID NO: 34377 - protein, 83 aa, Homo sapiens
  MAP TO AC007899.2; EXPRESSED IN BRAIN, SIGNAL = 2.2; EXPRESSED IN ADULT LIVER, SIGNAL = 2.2; EXPRESSED IN HEART, SIGNAL = 1.9; EXPRESSED IN PLACENTA, SIGNAL = 1.7; EXPRESSED IN BT474, SIGNAL = 2.9; EXPRESSED IN HBL100, SIGNAL = 1.6; EXPRESSED IN FETAL LIVER, SIGNAL = 2.1; EXPRESSED IN HELA, SIGNAL = 2.1; EXPRESSED IN BONE MARROW, SIGNAL = 2.4; EXPRESSED IN LUNG, SIGNAL = 1.9; EST_HUMAN HIT: AA314462.1, EVALUE 6.00e-09; SWISSPROT HIT: P31574, EVALUE 2.40e+00
AYVVFVTTLGGQWLERSFATFLSHVLDLVSHPRATQTHVEAVYSRRCVSFILRATVGSLLGEKAQIAAAKEICQAIGKQMKAV

SEQ ID NO: 34378 - protein, 37 aa, Homo sapiens
  MAP TO AC007899.2; EXPRESSED IN PLACENTA, SIGNAL = 1.4; EXPRESSED IN HBL100, SIGNAL = 1.7; EXPRESSED IN FETAL LIVER, SIGNAL = 2.3; EXPRESSED IN HELA, SIGNAL = 5.1; EXPRESSED IN BRAIN, SIGNAL =   2; EXPRESSED IN HEART, SIGNAL = 2.5; EXPRESSED IN BT474, SIGNAL = 2.3; EXPRESSED IN BONE MARROW, SIGNAL = 1.1; EXPRESSED IN LUNG, SIGNAL = 1.6; EXPRESSED IN ADULT LIVER, SIGNAL = 1.5; EST_HUMAN HIT: BF222686.1, EVALUE 7.40e+00
ERDDWLHNRDAKSIIKKKKHFKKKRIKTTQKTKKQRK

SEQ ID NO: 34379 - protein, 38 aa, Homo sapiens
  MAP TO AC007899.2; EXPRESSED IN PLACENTA, SIGNAL = 1.4; EXPRESSED IN HBL100, SIGNAL = 1.7; EXPRESSED IN FETAL LIVER, SIGNAL = 2.3; EXPRESSED IN HELA, SIGNAL = 5.1; EXPRESSED IN BRAIN, SIGNAL =   2; EXPRESSED IN HEART, SIGNAL = 2.5; EXPRESSED IN BT474, SIGNAL = 2.3; EXPRESSED IN BONE MARROW, SIGNAL = 1.1; EXPRESSED IN LUNG, SIGNAL = 1.6; EXPRESSED IN ADULT LIVER, SIGNAL = 1.5; EST_HUMAN HIT: BE465659.1, EVALUE 2.00e-04
LNVMTGYTTEMQKVSSRKRNILKRRGLKPLKKLKNKGN

SEQ ID NO: 34380 - protein, 36 aa, Homo sapiens
  MAP TO AC007875.2; EXPRESSED IN PLACENTA, SIGNAL = 2.5; EXPRESSED IN FETAL LIVER, SIGNAL = 2.9; EXPRESSED IN HBL100, SIGNAL = 3.1; EXPRESSED IN HELA, SIGNAL = 3.8; EXPRESSED IN ADULT LIVER, SIGNAL = 2.2; EXPRESSED IN BT474, SIGNAL =   3; EXPRESSED IN BONE MARROW, SIGNAL = 3.9; EXPRESSED IN LUNG, SIGNAL = 2.7; EXPRESSED IN BRAIN, SIGNAL = 3.4; EXPRESSED IN HEART, SIGNAL =   2; EST_HUMAN HIT: R37775.1, EVALUE 1.00e-06
VTATPTFSNHHPNQSAAINISKTFLQDKDYDSLKVQ

SEQ ID NO: 34381 - protein, 32 aa, Homo sapiens
  MAP TO AC007875.2; EXPRESSED IN PLACENTA, SIGNAL = 2.5; EXPRESSED IN FETAL LIVER, SIGNAL = 2.9; EXPRESSED IN HBL100, SIGNAL = 3.1; EXPRESSED IN HELA, SIGNAL = 3.8; EXPRESSED IN ADULT LIVER, SIGNAL = 2.2; EXPRESSED IN BT474, SIGNAL =   3; EXPRESSED IN BONE MARROW, SIGNAL = 3.9; EXPRESSED IN LUNG, SIGNAL = 2.7; EXPRESSED IN BRAIN, SIGNAL = 3.4; EXPRESSED IN HEART, SIGNAL =   2; EST_HUMAN HIT: R37775.1, EVALUE 1.00e-04; SWISSPROT HIT: Q20765, EVALUE 8.50e+00
SQPPQPSATTTLISQQPSTSARPSSRIKIMTR

SEQ ID NO: 34382 - protein, 50 aa, Homo sapiens
  MAP TO AC007875.2; EXPRESSED IN HBL100, SIGNAL = 1.2; EXPRESSED IN FETAL LIVER, SIGNAL = 0.91; EXPRESSED IN ADULT LIVER, SIGNAL =   1; EXPRESSED IN BRAIN, SIGNAL = 1.1; EXPRESSED IN HEART, SIGNAL = 1.4; EXPRESSED IN BT474, SIGNAL = 0.99; EXPRESSED IN PLACENTA, SIGNAL = 1.5; EXPRESSED IN HELA, SIGNAL = 1.6; EXPRESSED IN LUNG, SIGNAL = 1.3; EXPRESSED IN BONE MARROW, SIGNAL =   1; EST_HUMAN HIT: AA904628.1, EVALUE 1.10e+00; SWISSPROT HIT: Q60654, EVALUE 5.30e-01
MGKGKVLLEELAREQMSQNLGWYCGGKTWGDQGNHVGVGEEKRRQEMEES

SEQ ID NO: 34383 - protein, 24 aa, Homo sapiens
  MAP TO AC007869.1; EXPRESSED IN HBL100, SIGNAL = 3.1; EXPRESSED IN BRAIN, SIGNAL = 4.7; EXPRESSED IN PLACENTA, SIGNAL = 3.8; EXPRESSED IN BT474, SIGNAL = 3.4; EXPRESSED IN BONE MARROW, SIGNAL = 4.2; EXPRESSED IN FETAL LIVER, SIGNAL =   4; EXPRESSED IN LUNG, SIGNAL = 4.8; EXPRESSED IN HELA, SIGNAL = 3.9; EXPRESSED IN ADULT LIVER, SIGNAL = 3.6; EXPRESSED IN HEART, SIGNAL = 3.9
MNVASQSGPVPNSMWLLVPCVTLG

SEQ ID NO: 34384 - protein, 27 aa, Homo sapiens
  MAP TO AC007869.1; EXPRESSED IN HBL100, SIGNAL = 3.1; EXPRESSED IN BRAIN, SIGNAL = 4.7; EXPRESSED IN PLACENTA, SIGNAL = 3.8; EXPRESSED IN BT474, SIGNAL = 3.4; EXPRESSED IN BONE MARROW, SIGNAL = 4.2; EXPRESSED IN FETAL LIVER, SIGNAL =   4; EXPRESSED IN LUNG, SIGNAL = 4.8; EXPRESSED IN HELA, SIGNAL = 3.9; EXPRESSED IN ADULT LIVER, SIGNAL = 3.6; EXPRESSED IN HEART, SIGNAL = 3.9
RPASPASPSPESLAFPRRSLKPPWSAG

SEQ ID NO: 34385 - protein, 36 aa, Homo sapiens
  MAP TO AC007869.1; EXPRESSED IN ADULT LIVER, SIGNAL = 1.8; EXPRESSED IN BRAIN, SIGNAL = 1.8; EXPRESSED IN PLACENTA, SIGNAL = 1.5; EXPRESSED IN BONE MARROW, SIGNAL = 1.7; EXPRESSED IN HEART, SIGNAL = 1.4; EXPRESSED IN BT474, SIGNAL = 2.4; EXPRESSED IN HBL100, SIGNAL = 1.2; EXPRESSED IN FETAL LIVER, SIGNAL = 1.3; EXPRESSED IN LUNG, SIGNAL = 1.4; EXPRESSED IN HELA, SIGNAL = 1.5; EST_HUMAN HIT: AW363031.1, EVALUE 7.40e+00; SWISSPROT HIT: P34692, EVALUE 8.20e+00
METTSSLRRDLGSSPKLHFMTLGKSPDLSEPHQHNQ

SEQ ID NO: 34386 - protein, 36 aa, Homo sapiens
  MAP TO AC007869.1; EXPRESSED IN FETAL LIVER, SIGNAL = 3.2; EXPRESSED IN LUNG, SIGNAL = 4.3; EXPRESSED IN HEART, SIGNAL = 2.6; EXPRESSED IN BONE MARROW, SIGNAL = 4.4; EXPRESSED IN PLACENTA, SIGNAL = 3.5; EXPRESSED IN BRAIN, SIGNAL = 3.5; EXPRESSED IN ADULT LIVER, SIGNAL = 2.9; EXPRESSED IN HELA, SIGNAL = 3.3; EXPRESSED IN HBL100, SIGNAL = 2.6; EXPRESSED IN BT474, SIGNAL = 2.8
MLLWAWGPRFENHSPSSTITSNSPPIASNGVLVIWP

SEQ ID NO: 34387 - protein, 105 aa, Homo sapiens
  MAP TO AC007869.1; EXPRESSED IN HELA, SIGNAL = 2.1; EXPRESSED IN BT474, SIGNAL = 5.6; EXPRESSED IN FETAL LIVER, SIGNAL = 5.8; EXPRESSED IN LUNG, SIGNAL = 2.8; EXPRESSED IN PLACENTA, SIGNAL = 1.9; EXPRESSED IN BONE MARROW, SIGNAL = 1.9; EXPRESSED IN HBL100, SIGNAL = 3.8; EXPRESSED IN ADULT LIVER, SIGNAL = 1.6; EXPRESSED IN BRAIN, SIGNAL = 2.8; EXPRESSED IN HEART, SIGNAL =   2; EST_HUMAN HIT: BE086814.1, EVALUE 2.00e-36; SWISSPROT HIT: P21414, EVALUE 2.00e-27
ERCAGYAVTTLDTVVEARSLPQGTSAQKSELIALIPALELSEGKTVNTYTDSQYAFLQVHGALYKEKGRLNSGGKDIKFQQEILQLLEVVWKPHKVAVMHCRGHQ

SEQ ID NO: 34388 - protein, 38 aa, Homo sapiens
  MAP TO AC007869.1; EXPRESSED IN BONE MARROW, SIGNAL = 5.4; EXPRESSED IN ADULT LIVER, SIGNAL = 3.2; EXPRESSED IN BRAIN, SIGNAL = 4.4; EXPRESSED IN PLACENTA, SIGNAL = 3.8; EXPRESSED IN BT474, SIGNAL = 3.4; EXPRESSED IN HBL100, SIGNAL = 3.5; EXPRESSED IN FETAL LIVER, SIGNAL = 4.2; EXPRESSED IN LUNG, SIGNAL = 4.4; EXPRESSED IN HELA, SIGNAL = 3.6; EXPRESSED IN HEART, SIGNAL = 3.6; EST_HUMAN HIT: BF315595.1, EVALUE 2.50e+00; SWISSPROT HIT: P22736, EVALUE 3.60e+00
HWQGETSMGPPEGLRATEQVEEEAGPRQLISKFMFSPH

SEQ ID NO: 34389 - protein, 279 aa, Homo sapiens
  MAP TO AC007869.1; EXPRESSED IN PLACENTA, SIGNAL = 3.8; EXPRESSED IN FETAL LIVER, SIGNAL = 4.2; EXPRESSED IN ADULT LIVER, SIGNAL = 4.2; EXPRESSED IN BRAIN, SIGNAL =   6; EXPRESSED IN BT474, SIGNAL = 5.2; EXPRESSED IN HEART, SIGNAL = 3.8; EXPRESSED IN HELA, SIGNAL = 4.3; EXPRESSED IN LUNG, SIGNAL = 5.1; EXPRESSED IN HBL100, SIGNAL = 4.3; EXPRESSED IN BONE MARROW, SIGNAL = 5.5; EST_HUMAN HIT: BE378534.1, EVALUE 4.00e-43; SWISSPROT HIT: P34410, EVALUE 2.00e-11
YGHAAPGTDAGKAFCMFYAVLGIPLTLVMFQSLGERMNTFVRYLLKRIKKCCGMRNTDVSMENMVTVGFFSCMGTLCIGAAAFSQCEEWSFFHAYYYCFITLTTIGFGDYVALQTKGALQKKPLYVAFSFMYILVGLTVIGAFLNLVVLRFLTMNSEDERRDAEERASLAGNRNSMVIHIPEEPRPSRPRYKADVPDLQSVCSCTCYRSQDYGGRSVAPQNSFSAKLAPHYFHSISYKIEEISPSTLKNSLFPSPISSISPGLHSFTDHQRLMKRRKSV

SEQ ID NO: 34390 - protein, 25 aa, Homo sapiens
  MAP TO AC007869.1; EXPRESSED IN PLACENTA, SIGNAL = 3.8; EXPRESSED IN FETAL LIVER, SIGNAL = 4.2; EXPRESSED IN ADULT LIVER, SIGNAL = 4.2; EXPRESSED IN BRAIN, SIGNAL =   6; EXPRESSED IN BT474, SIGNAL = 5.2; EXPRESSED IN HEART, SIGNAL = 3.8; EXPRESSED IN HELA, SIGNAL = 4.3; EXPRESSED IN LUNG, SIGNAL = 5.1; EXPRESSED IN HBL100, SIGNAL = 4.3; EXPRESSED IN BONE MARROW, SIGNAL = 5.5; EST_HUMAN HIT: AI377328.1, EVALUE 4.20e+00; SWISSPROT HIT: P26800, EVALUE 6.40e+00
VMGTLHLAPMRARPSACSTPCWASR

SEQ ID NO: 34391 - protein, 66 aa, Homo sapiens
  MAP TO AC007859.1; EXPRESSED IN HBL100, SIGNAL = 3.4; EXPRESSED IN HELA, SIGNAL = 4.7; EXPRESSED IN ADULT LIVER, SIGNAL = 2.6; EXPRESSED IN BRAIN, SIGNAL = 2.8; EXPRESSED IN PLACENTA, SIGNAL = 2.8; EXPRESSED IN BT474, SIGNAL =   3; EXPRESSED IN BONE MARROW, SIGNAL = 3.1; EXPRESSED IN LUNG, SIGNAL = 3.6; EXPRESSED IN FETAL LIVER, SIGNAL = 3.8; EXPRESSED IN HEART, SIGNAL = 2.8; EST_HUMAN HIT: AW085709.1, EVALUE 3.70e+00; SWISSPROT HIT: Q12697, EVALUE 1.60e-01
  unsure 6
  unsure 14
KVTTSXDTKSYEKXTRQAPQANDSHSTLMLPLNPGVFFIFNFPGSDWQFGFLWCLFESLEDLVLNI

SEQ ID NO: 34392 - protein, 37 aa, Homo sapiens
  MAP TO AC007859.1; EXPRESSED IN BT474, SIGNAL =  10; EXPRESSED IN HELA, SIGNAL = 9.3; EXPRESSED IN BRAIN, SIGNAL = 6.4; EXPRESSED IN PLACENTA, SIGNAL = 5.4; EXPRESSED IN HBL100, SIGNAL =  15; EXPRESSED IN FETAL LIVER, SIGNAL =  12; EXPRESSED IN LUNG, SIGNAL = 5.2; EXPRESSED IN ADULT LIVER, SIGNAL = 7.2; EXPRESSED IN BONE MARROW, SIGNAL = 9.8; EXPRESSED IN HEART, SIGNAL = 9.5; EST_HUMAN HIT: AA844387.1, EVALUE 6.50e+00
MEGAVESQPSFFKTSQDIVTCTWVENCYSSSSRRPLE

SEQ ID NO: 34393 - protein, 63 aa, Homo sapiens
  MAP TO AC007785.1; EXPRESSED IN ADULT LIVER, SIGNAL = 4.2; EXPRESSED IN BRAIN, SIGNAL = 2.4; EXPRESSED IN HEART, SIGNAL = 2.6; EXPRESSED IN PLACENTA, SIGNAL = 3.7; EXPRESSED IN BT474, SIGNAL = 3.5; EXPRESSED IN BONE MARROW, SIGNAL = 5.2; EXPRESSED IN FETAL LIVER, SIGNAL = 4.6; EXPRESSED IN HELA, SIGNAL = 4.8; EXPRESSED IN HBL100, SIGNAL =   4; EXPRESSED IN LUNG, SIGNAL = 3.9; EST_HUMAN HIT: N66951.1, EVALUE 1.00e-15
AAPRQAEPGPNSSSASTPPPYNPSITSPPHTWSGLQFCTATSPPPPAQQFPLKEVAGAKGIVK

SEQ ID NO: 34394 - protein, 36 aa, Homo sapiens
  MAP TO AC007784.7; EXPRESSED IN HBL100, SIGNAL = 2.9; EXPRESSED IN FETAL LIVER, SIGNAL = 3.2; EXPRESSED IN BRAIN, SIGNAL = 2.5; EXPRESSED IN HEART, SIGNAL = 2.6; EXPRESSED IN BT474, SIGNAL = 2.7; EXPRESSED IN BONE MARROW, SIGNAL = 2.9; EXPRESSED IN LUNG, SIGNAL = 3.4; EXPRESSED IN PLACENTA, SIGNAL = 2.8; EXPRESSED IN ADULT LIVER, SIGNAL = 2.6; EXPRESSED IN HELA, SIGNAL = 3.5
LMVMMGIVTIAIFTFQRENLRCSFPYCTIVMSIKLR

SEQ ID NO: 34395 - protein, 25 aa, Homo sapiens
  MAP TO AC007745.2; EXPRESSED IN HBL100, SIGNAL =  14; EXPRESSED IN FETAL LIVER, SIGNAL =  19; EXPRESSED IN BRAIN, SIGNAL =   7; EXPRESSED IN BT474, SIGNAL =  15; EXPRESSED IN BONE MARROW, SIGNAL =  10; EXPRESSED IN HELA, SIGNAL =  26; EXPRESSED IN ADULT LIVER, SIGNAL = 8.7; EXPRESSED IN HEART, SIGNAL =  13; EXPRESSED IN PLACENTA, SIGNAL = 6.3; EXPRESSED IN LUNG, SIGNAL =  11; SWISSPROT HIT: Q99500, EVALUE 8.40e+00
KFVHFAGERSRALPLLGWNPAFNLP

SEQ ID NO: 34396 - protein, 25 aa, Homo sapiens
  MAP TO AC007745.2; EXPRESSED IN HBL100, SIGNAL =  14; EXPRESSED IN FETAL LIVER, SIGNAL =  19; EXPRESSED IN BRAIN, SIGNAL =   7; EXPRESSED IN BT474, SIGNAL =  15; EXPRESSED IN BONE MARROW, SIGNAL =  10; EXPRESSED IN HELA, SIGNAL =  26; EXPRESSED IN ADULT LIVER, SIGNAL = 8.7; EXPRESSED IN HEART, SIGNAL =  13; EXPRESSED IN PLACENTA, SIGNAL = 6.3; EXPRESSED IN LUNG, SIGNAL =  11
SLCTSQGKGAGLFLFLGGTRHSICQ

SEQ ID NO: 34397 - protein, 50 aa, Homo sapiens
  MAP TO AC007739.1; EXPRESSED IN FETAL LIVER, SIGNAL = 1.4; EXPRESSED IN PLACENTA, SIGNAL = 1.6; EXPRESSED IN BONE MARROW, SIGNAL = 1.4; EXPRESSED IN HBL100, SIGNAL = 1.3; EXPRESSED IN LUNG, SIGNAL = 1.4; EXPRESSED IN ADULT LIVER, SIGNAL = 1.1; EXPRESSED IN BRAIN, SIGNAL = 1.8; EXPRESSED IN HEART, SIGNAL = 1.2; EXPRESSED IN BT474, SIGNAL = 1.4; EXPRESSED IN HELA, SIGNAL = 1.3; EST_HUMAN HIT: AW803448.1, EVALUE 3.40e+00
YPLMSGVEDKGKERELLFLLISSWFIVQFPSQFLRTAGGSGLGVRWTRQE

SEQ ID NO: 34398 - protein, 40 aa, Homo sapiens
  MAP TO AC007735.2; EXPRESSED IN BT474, SIGNAL = 1.4; EXPRESSED IN FETAL LIVER, SIGNAL = 1.5; EXPRESSED IN LUNG, SIGNAL = 1.3; EXPRESSED IN ADULT LIVER, SIGNAL = 1.3; EXPRESSED IN BRAIN, SIGNAL =   1; EXPRESSED IN HEART, SIGNAL = 1.3; EXPRESSED IN BONE MARROW, SIGNAL = 0.82; EXPRESSED IN HELA, SIGNAL = 2.9; EXPRESSED IN HBL100, SIGNAL = 1.6
SAYPIPLGRGPRTRNSLNCRSKRAVKLLLAELLVVGVKEL

SEQ ID NO: 34399 - protein, 30 aa, Homo sapiens
  MAP TO AC007735.2; EXPRESSED IN BT474, SIGNAL = 1.4; EXPRESSED IN FETAL LIVER, SIGNAL = 1.5; EXPRESSED IN LUNG, SIGNAL = 1.3; EXPRESSED IN ADULT LIVER, SIGNAL = 1.3; EXPRESSED IN BRAIN, SIGNAL =   1; EXPRESSED IN HEART, SIGNAL = 1.3; EXPRESSED IN BONE MARROW, SIGNAL = 0.82; EXPRESSED IN HELA, SIGNAL = 2.9; EXPRESSED IN HBL100, SIGNAL = 1.6; SWISSPROT HIT: Q9Z0J4, EVALUE 6.30e+00; EST_HUMAN HIT: BF037898.1, EVALUE 2.60e+00
VRIPYSSWTWAKNPELTELQKQKSCKAPAC

SEQ ID NO: 34400 - protein, 44 aa, Homo sapiens; identical to SEQ ID NO: 33932
  MAP TO AC007685.1; EXPRESSED IN HBL100, SIGNAL = 1.7; EXPRESSED IN FETAL LIVER, SIGNAL = 1.3; EXPRESSED IN BRAIN, SIGNAL = 0.9; EXPRESSED IN PLACENTA, SIGNAL = 0.82; EXPRESSED IN BT474, SIGNAL = 2.4; EXPRESSED IN BONE MARROW, SIGNAL = 0.96; EXPRESSED IN LUNG, SIGNAL = 1.3; EXPRESSED IN HELA, SIGNAL = 1.1; EXPRESSED IN ADULT LIVER, SIGNAL = 0.86; EXPRESSED IN HEART, SIGNAL = 1.1; EST_HUMAN HIT: AI935203.1, EVALUE 4.00e-19; SWISSPROT HIT: P51817, EVALUE 4.00e-20

SEQ ID NO: 34401 - protein, 52 aa, Homo sapiens
  MAP TO AC007685.1; EXPRESSED IN HBL100, SIGNAL = 1.7; EXPRESSED IN FETAL LIVER, SIGNAL = 1.3; EXPRESSED IN BRAIN, SIGNAL = 0.9; EXPRESSED IN PLACENTA, SIGNAL = 0.82; EXPRESSED IN BT474, SIGNAL = 2.4; EXPRESSED IN BONE MARROW, SIGNAL = 0.96; EXPRESSED IN LUNG, SIGNAL = 1.3; EXPRESSED IN HELA, SIGNAL = 1.1; EXPRESSED IN ADULT LIVER, SIGNAL = 0.86; EXPRESSED IN HEART, SIGNAL = 1.1; EST_HUMAN HIT: BE675757.1, EVALUE 6.00e-09; SWISSPROT HIT: P22420, EVALUE 5.90e+00
SSTCSWSTCRAASSSATCATGGASPAPRGSSTLQRSSVPSSTCTPKRSSTGT

SEQ ID NO: 34402 - protein, 18 aa, Homo sapiens
  MAP TO AC007685.1; EXPRESSED IN BONE MARROW, SIGNAL =  34; EXPRESSED IN FETAL LIVER, SIGNAL =  23; EXPRESSED IN HELA, SIGNAL =  18; EXPRESSED IN ADULT LIVER, SIGNAL =  12; EXPRESSED IN BRAIN, SIGNAL = 4.3; EXPRESSED IN HEART, SIGNAL = 5.7; EXPRESSED IN PLACENTA, SIGNAL = 9.3; EXPRESSED IN BT474, SIGNAL =  20; EXPRESSED IN HBL100, SIGNAL =  47; EXPRESSED IN LUNG, SIGNAL = 9.7
ASLSLPSAVKLPPNCRFS

SEQ ID NO: 34403 - protein, 46 aa, Homo sapiens
  MAP TO AC007679.2; EXPRESSED IN BT474, SIGNAL = 1.9; EXPRESSED IN BONE MARROW, SIGNAL = 1.3; EXPRESSED IN HELA, SIGNAL = 0.74; EXPRESSED IN ADULT LIVER, SIGNAL = 0.94; EXPRESSED IN FETAL LIVER, SIGNAL = 1.4; EXPRESSED IN LUNG, SIGNAL = 1.2; EXPRESSED IN BRAIN, SIGNAL = 0.89; EXPRESSED IN HEART, SIGNAL = 0.78; EXPRESSED IN PLACENTA, SIGNAL = 1.6; EXPRESSED IN HBL100, SIGNAL = 0.98; EST_HUMAN HIT: AW504943.1, EVALUE 1.00e-20
QFSAPANVGLTSATLISQSALGERAFPGQFHGLHDGSHASQRPHPA

SEQ ID NO: 34404 - protein, 24 aa, Homo sapiens
  MAP TO AC007679.2; EXPRESSED IN BT474, SIGNAL = 1.6; EXPRESSED IN HBL100, SIGNAL = 2.2; EXPRESSED IN HELA, SIGNAL = 0.74; EXPRESSED IN ADULT LIVER, SIGNAL =   1; EXPRESSED IN PLACENTA, SIGNAL = 1.2; EXPRESSED IN BONE MARROW, SIGNAL = 2.3; EXPRESSED IN FETAL LIVER, SIGNAL = 1.2; EXPRESSED IN LUNG, SIGNAL =   1; EXPRESSED IN BRAIN, SIGNAL = 0.96; EXPRESSED IN HEART, SIGNAL = 0.86; EST_HUMAN HIT: BF308518.1, EVALUE 4.00e-06
GTATATCRYLALSRKKRGRKRMIL

SEQ ID NO: 34405 - protein, 144 aa, Homo sapiens
  MAP TO AC007679.2; EXPRESSED IN HEART, SIGNAL = 3.2; EXPRESSED IN BRAIN, SIGNAL = 1.5; EXPRESSED IN PLACENTA, SIGNAL = 4.6; EXPRESSED IN BT474, SIGNAL = 8.3; EXPRESSED IN BONE MARROW, SIGNAL =  13; EXPRESSED IN HBL100, SIGNAL =  34; EXPRESSED IN FETAL LIVER, SIGNAL =  10; EXPRESSED IN LUNG, SIGNAL = 5.8; EXPRESSED IN ADULT LIVER, SIGNAL = 6.3; EXPRESSED IN HELA, SIGNAL =  10; SWISSPROT HIT: P08526, EVALUE 3.00e-52; EST_HUMAN HIT: BF128745.1, EVALUE 2.00e-54
PSVVAVKMGKCMKPGKVVLVLASSILAEHKAVIVKNINDGTSDCPYIQALVVGIDRYPCKVTAAMGKKKITRRSKIESFVKVYNYNHLTPTVHSVDILLHKTVIHKDVFRDPALKHKSQWEAKVKLKERYKTGKNKQFFQKLQF

SEQ ID NO: 34406 - protein, 60 aa, Homo sapiens
  MAP TO AC007664.7; EXPRESSED IN BT474, SIGNAL =  16; EXPRESSED IN HELA, SIGNAL = 8.7; EXPRESSED IN PLACENTA, SIGNAL =   4; EXPRESSED IN BONE MARROW, SIGNAL = 8.1; EXPRESSED IN HBL100, SIGNAL =  37; EXPRESSED IN FETAL LIVER, SIGNAL =  16; EXPRESSED IN LUNG, SIGNAL =   4; EXPRESSED IN ADULT LIVER, SIGNAL =   3; EXPRESSED IN BRAIN, SIGNAL =  24; EXPRESSED IN HEART, SIGNAL =  10; SWISSPROT HIT: P34090, EVALUE 2.60e+00; EST_HUMAN HIT: BF126025.1, EVALUE 4.00e-06
HREPLHEQRHEPRDGAAPKAVEDGEALQSHAQISLREIRQCEPMPVEATPPTSTKPGPLL

SEQ ID NO: 34407 - protein, 76 aa, Homo sapiens
  MAP TO AC007664.7; EXPRESSED IN HBL100, SIGNAL =  82; EXPRESSED IN BT474, SIGNAL =  52; EXPRESSED IN BONE MARROW, SIGNAL =  21; EXPRESSED IN LUNG, SIGNAL =  11; EXPRESSED IN HELA, SIGNAL =  28; EXPRESSED IN ADULT LIVER, SIGNAL = 7.5; EXPRESSED IN BRAIN, SIGNAL =  44; EXPRESSED IN PLACENTA, SIGNAL =  20; EXPRESSED IN FETAL LIVER, SIGNAL =  37; EXPRESSED IN HEART, SIGNAL =  12; SWISSPROT HIT: O43474, EVALUE 1.20e+00; EST_HUMAN HIT: AI000062.1, EVALUE 1.00e-28
FLSGRSVHGTAGLPHLPQLWGRHWLWVRVSAHEAALGGLREEVQAGVCHLPSPPGLHGHDGALQLHPDHLHDPGTF

SEQ ID NO: 34408 - protein, 155 aa, Homo sapiens
  MAP TO AC007664.7; EXPRESSED IN FETAL LIVER, SIGNAL = 6.3; EXPRESSED IN LUNG, SIGNAL = 3.4; EXPRESSED IN PLACENTA, SIGNAL = 4.5; EXPRESSED IN BT474, SIGNAL = 5.5; EXPRESSED IN BONE MARROW, SIGNAL = 5.2; EXPRESSED IN HBL100, SIGNAL = 4.8; EXPRESSED IN HELA, SIGNAL = 3.8; EXPRESSED IN ADULT LIVER, SIGNAL = 3.4; EXPRESSED IN BRAIN, SIGNAL = 5.5; EXPRESSED IN HEART, SIGNAL =   2; SWISSPROT HIT: P52591, EVALUE 5.00e-07; EST_HUMAN HIT: AL042278.1, EVALUE 6.00e-63
MDSLWGPGAGSHPFGVHNSRLSPDLCPGKIVLRALKESGAGMPEQDKDPRVQENPGDQRRVPEVTGDAPSAFRPLRDNRGLSPFVPGPGPLQTDLHAQRSEIRYNQTSQTSWTSSCTNRNAISSSYSSTGGLPGLKRRRGPASSHCQLTLSSSKT

SEQ ID NO: 34409 - protein, 42 aa, Homo sapiens
  MAP TO AC007664.7; EXPRESSED IN FETAL LIVER, SIGNAL = 6.3; EXPRESSED IN LUNG, SIGNAL = 3.4; EXPRESSED IN PLACENTA, SIGNAL = 4.5; EXPRESSED IN BT474, SIGNAL = 5.5; EXPRESSED IN BONE MARROW, SIGNAL = 5.2; EXPRESSED IN HBL100, SIGNAL = 4.8; EXPRESSED IN HELA, SIGNAL = 3.8; EXPRESSED IN ADULT LIVER, SIGNAL = 3.4; EXPRESSED IN BRAIN, SIGNAL = 5.5; EXPRESSED IN HEART, SIGNAL =   2; EST_HUMAN HIT: AL042278.1, EVALUE 2.00e-17; SWISSPROT HIT: P28345, EVALUE 2.10e+00
GLSVGPRSRESPLWGPQQPAVPRLVSREDSVEGPQGERGRDA

SEQ ID NO: 34410 - protein, 46 aa, Homo sapiens
  MAP TO AC007655.1; EXPRESSED IN ADULT LIVER, SIGNAL = 1.1; EXPRESSED IN HEART, SIGNAL = 0.9; EXPRESSED IN BONE MARROW, SIGNAL =  20; EXPRESSED IN FETAL LIVER, SIGNAL =   3; EXPRESSED IN LUNG, SIGNAL = 2.8; EXPRESSED IN HELA, SIGNAL = 0.7; EXPRESSED IN PLACENTA, SIGNAL = 1.1; EXPRESSED IN BT474, SIGNAL = 1.3; EST_HUMAN HIT: BF208855.1, EVALUE 6.00e-14; SWISSPROT HIT: P52566, EVALUE 5.00e-14
IRMTEKAPEPHVEEDDDDELDSKLNYKPPPQKSLKELQEMDKDDES

SEQ ID NO: 34411 - protein, 29 aa, Homo sapiens
  MAP TO AC007655.1; EXPRESSED IN BONE MARROW, SIGNAL =  11; EXPRESSED IN HBL100, SIGNAL =  13; EXPRESSED IN FETAL LIVER, SIGNAL =  12; EXPRESSED IN LUNG, SIGNAL = 8.8; EXPRESSED IN ADULT LIVER, SIGNAL = 7.6; EXPRESSED IN PLACENTA, SIGNAL = 6.3; EXPRESSED IN BT474, SIGNAL = 8.3; EXPRESSED IN HELA, SIGNAL =  12; EXPRESSED IN BRAIN, SIGNAL = 9.6; EXPRESSED IN HEART, SIGNAL =   9; EST_HUMAN HIT: AI203531.1, EVALUE 2.00e-08; SWISSPROT HIT: Q93070, EVALUE 2.00e-09
SSKKCIPDPIAIASLSFLTSVIIFSKSRV

SEQ ID NO: 34412 - protein, 97 aa, Homo sapiens
  MAP TO AC007655.1; EXPRESSED IN HELA, SIGNAL = 1.8; EXPRESSED IN ADULT LIVER, SIGNAL = 1.2; EXPRESSED IN BRAIN, SIGNAL = 1.1; EXPRESSED IN HEART, SIGNAL = 0.95; EXPRESSED IN BT474, SIGNAL = 2.7; EXPRESSED IN BONE MARROW, SIGNAL = 1.8; EXPRESSED IN HBL100, SIGNAL = 4.4; EXPRESSED IN FETAL LIVER, SIGNAL = 2.2; EXPRESSED IN PLACENTA, SIGNAL = 1.4; EXPRESSED IN LUNG, SIGNAL = 1.3; EST_HUMAN HIT: U25915.1, EVALUE 2.00e-06
QEIPEEGREVEEFSEDDDEDDSDDSEAEKQSQKQHKEESHSDGTSTASSQQQAPPQSVPPSQIQAPPMPGPPPLGPPPAPPLRPPGPPTGLPPGPPP

SEQ ID NO: 34413 - protein, 20 aa, Homo sapiens
  MAP TO AC007655.1; EXPRESSED IN BONE MARROW, SIGNAL = 1.3; EXPRESSED IN HBL100, SIGNAL = 1.2; EXPRESSED IN ADULT LIVER, SIGNAL = 1.5; EXPRESSED IN PLACENTA, SIGNAL = 1.2; EXPRESSED IN HEART, SIGNAL =   1; EXPRESSED IN BRAIN, SIGNAL = 0.92; EXPRESSED IN HELA, SIGNAL = 0.79; EXPRESSED IN LUNG, SIGNAL = 0.71; EXPRESSED IN FETAL LIVER, SIGNAL = 2.2; EXPRESSED IN BT474, SIGNAL = 1.4; EST_HUMAN HIT: AI147650.1, EVALUE 4.00e-04
SVGTYLLEKCLQSQKRIKRD

SEQ ID NO: 34414 - protein, 38 aa, Homo sapiens
  MAP TO AC007639.5; EXPRESSED IN BRAIN, SIGNAL =  22; EXPRESSED IN HEART, SIGNAL =  15; EXPRESSED IN PLACENTA, SIGNAL =  12; EXPRESSED IN BT474, SIGNAL =  12; EXPRESSED IN BONE MARROW, SIGNAL =  18; EXPRESSED IN HBL100, SIGNAL =  12; EXPRESSED IN LUNG, SIGNAL =  14; EXPRESSED IN ADULT LIVER, SIGNAL =  15; EXPRESSED IN FETAL LIVER, SIGNAL =  11; EXPRESSED IN HELA, SIGNAL =  17; EST_HUMAN HIT: T52252.1, EVALUE 5.00e-09; SWISSPROT HIT: P39188, EVALUE 8.00e-06
ISAHCSLDFLGSRNPPVSAFRVAVITVVCHHAQVIFFI

SEQ ID NO: 34415 - protein, 91 aa, Homo sapiens
  MAP TO AC007629.3; EXPRESSED IN BT474, SIGNAL = 1.6; EXPRESSED IN HELA, SIGNAL = 1.1; EXPRESSED IN ADULT LIVER, SIGNAL = 1.3; EXPRESSED IN BONE MARROW, SIGNAL = 1.7; EXPRESSED IN FETAL LIVER, SIGNAL = 1.6; EXPRESSED IN LUNG, SIGNAL = 1.6; EXPRESSED IN PLACENTA, SIGNAL = 1.6; EXPRESSED IN HBL100, SIGNAL = 3.1; EXPRESSED IN BRAIN, SIGNAL = 1.6; EXPRESSED IN HEART, SIGNAL = 1.4; EST_HUMAN HIT: AW969958.1, EVALUE 5.00e-34; SWISSPROT HIT: Q9Z714, EVALUE 5.80e-01
ETDEQKLQTLDIGSNLEKEKLENSRSLECRSDPESPIKKTSLSPTSKLGYSYSRDLDLAKKKHASLRQTESDPDADRTTLNHADHSSKIVQ

SEQ ID NO: 34416 - protein, 35 aa, Homo sapiens
  MAP TO AC007629.3; EXPRESSED IN PLACENTA, SIGNAL = 3.9; EXPRESSED IN BONE MARROW, SIGNAL = 4.2; EXPRESSED IN HBL100, SIGNAL = 6.9; EXPRESSED IN LUNG, SIGNAL = 5.2; EXPRESSED IN ADULT LIVER, SIGNAL = 3.8; EXPRESSED IN BRAIN, SIGNAL = 3.5; EXPRESSED IN BT474, SIGNAL =   4; EXPRESSED IN FETAL LIVER, SIGNAL = 6.2; EXPRESSED IN HELA, SIGNAL = 5.2; EXPRESSED IN HEART, SIGNAL = 3.6; EST_HUMAN HIT: D53891.1, EVALUE 8.00e-05
ENDNIEIDTNEEIPEGFVVGGGDELTNLENDLDTP

SEQ ID NO: 34417 - protein, 57 aa, Homo sapiens
  MAP TO AC007625.2; EXPRESSED IN BT474, SIGNAL =  24; EXPRESSED IN BONE MARROW, SIGNAL =  27; EXPRESSED IN HELA, SIGNAL =  25; EXPRESSED IN ADULT LIVER, SIGNAL =  21; EXPRESSED IN BRAIN, SIGNAL =  29; EXPRESSED IN PLACENTA, SIGNAL =  34; EXPRESSED IN HBL100, SIGNAL =  24; EXPRESSED IN HEART, SIGNAL =  33; EXPRESSED IN LUNG, SIGNAL =  29; EXPRESSED IN FETAL LIVER, SIGNAL =  26; EST_HUMAN HIT: AA609333.1, EVALUE 6.30e-02; SWISSPROT HIT: P08547, EVALUE 1.20e+00
RQLLKKKIKNMKLPSNSAILRNKYSKELKAESLKGIYTSMVIAALFTMLQHGSQPSV

SEQ ID NO: 34418 - protein, 38 aa, Homo sapiens
  MAP TO AC007555.1; EXPRESSED IN BONE MARROW, SIGNAL = 2.2; EXPRESSED IN HBL100, SIGNAL = 1.8; EXPRESSED IN ADULT LIVER, SIGNAL = 1.2; EXPRESSED IN BT474, SIGNAL = 1.2; EXPRESSED IN LUNG, SIGNAL = 1.5; EXPRESSED IN HELA, SIGNAL =   2; EXPRESSED IN BRAIN, SIGNAL = 1.8; EXPRESSED IN PLACENTA, SIGNAL = 1.7; EXPRESSED IN FETAL LIVER, SIGNAL = 1.9; EXPRESSED IN HEART, SIGNAL = 1.6; EST_HUMAN HIT: AU133383.1, EVALUE 2.00e-08
KSFRGTRRCRKTERPLVATALGATAVLVWMTHWDKLGL

SEQ ID NO: 34419 - protein, 76 aa, Homo sapiens
  MAP TO AC007554.1; EXPRESSED IN HEART, SIGNAL = 0.89; EXPRESSED IN PLACENTA, SIGNAL = 1.5; EXPRESSED IN FETAL LIVER, SIGNAL = 0.86; EXPRESSED IN LUNG, SIGNAL = 1.1; EXPRESSED IN BONE MARROW, SIGNAL = 5.9; EST_HUMAN HIT: AU119744.1, EVALUE 2.00e-43; SWISSPROT HIT: P13611, EVALUE 9.00e-33
ACGQPPVVENAKTFGKMKPRYEINSLIRYHCKDGFIQRHLPTIRCLGNGRWAIPKITCMNRKWSFRKNGLPCYNNY

SEQ ID NO: 34420 - protein, 79 aa, Homo sapiens
  MAP TO AC007554.1; EXPRESSED IN LUNG, SIGNAL = 1.3; EXPRESSED IN PLACENTA, SIGNAL = 0.96; EXPRESSED IN BONE MARROW, SIGNAL = 2.2; EXPRESSED IN FETAL LIVER, SIGNAL =   1; EXPRESSED IN HEART, SIGNAL = 1.5; EST_HUMAN HIT: AU132935.1, EVALUE 6.00e-33; SWISSPROT HIT: P13611, EVALUE 4.00e-33
  unsure 70
INPETQAALIRGQDSTIAASEQQVAARILDSNDQATVNPVEFNTEVATPPFSLLETSNETDFLIGINEEXSGRHGNLFT

SEQ ID NO: 34421 - protein, 21 aa, Homo sapiens
  MAP TO AC007554.1; EXPRESSED IN LUNG, SIGNAL = 1.3; EXPRESSED IN PLACENTA, SIGNAL = 0.96; EXPRESSED IN BONE MARROW, SIGNAL = 2.2; EXPRESSED IN FETAL LIVER, SIGNAL =   1; EXPRESSED IN HEART, SIGNAL = 1.5; EST_HUMAN HIT: AU119374.1, EVALUE 1.00e-04
FNQRAGFHDSSIRTASGSENS

SEQ ID NO: 34422 - protein, 45 aa, Homo sapiens
  MAP TO AC007554.1; EXPRESSED IN PLACENTA, SIGNAL = 6.3; EXPRESSED IN HBL100, SIGNAL =  11; EXPRESSED IN FETAL LIVER, SIGNAL = 7.8; EXPRESSED IN LUNG, SIGNAL = 8.4; EXPRESSED IN BRAIN, SIGNAL = 6.6; EXPRESSED IN BT474, SIGNAL = 7.4; EXPRESSED IN BONE MARROW, SIGNAL = 5.6; EXPRESSED IN HELA, SIGNAL =  14; EXPRESSED IN ADULT LIVER, SIGNAL = 4.4; EXPRESSED IN HEART, SIGNAL = 6.1; SWISSPROT HIT: P13611, EVALUE 2.00e-21; EST_HUMAN HIT: BE785931.1, EVALUE 6.90e+00
PTRPPTVEDKEAFGPQALSTPQPPASTKFHPDINVYIIEVRENKT

SEQ ID NO: 34423 - protein, 22 aa, Homo sapiens
  MAP TO AC007554.1; EXPRESSED IN PLACENTA, SIGNAL = 6.3; EXPRESSED IN HBL100, SIGNAL =  11; EXPRESSED IN FETAL LIVER, SIGNAL = 7.8; EXPRESSED IN LUNG, SIGNAL = 8.4; EXPRESSED IN BRAIN, SIGNAL = 6.6; EXPRESSED IN BT474, SIGNAL = 7.4; EXPRESSED IN BONE MARROW, SIGNAL = 5.6; EXPRESSED IN HELA, SIGNAL =  14; EXPRESSED IN ADULT LIVER, SIGNAL = 4.4; EXPRESSED IN HEART, SIGNAL = 6.1
QRGLWTSGAFYATAPSKHKISP

SEQ ID NO: 34424 - protein, 89 aa, Homo sapiens
  MAP TO AC007539.8; EXPRESSED IN BRAIN, SIGNAL = 1.4; EXPRESSED IN HBL100, SIGNAL =   1; EXPRESSED IN HELA, SIGNAL = 2.8; EXPRESSED IN ADULT LIVER, SIGNAL = 1.5; EXPRESSED IN HEART, SIGNAL = 1.1; EXPRESSED IN BT474, SIGNAL = 0.9; EXPRESSED IN BONE MARROW, SIGNAL = 0.89; EXPRESSED IN FETAL LIVER, SIGNAL =   1; EXPRESSED IN PLACENTA, SIGNAL = 1.3; EXPRESSED IN LUNG, SIGNAL = 1.2; EST_HUMAN HIT: W23234.1, EVALUE 2.00e-05; SWISSPROT HIT: P39678, EVALUE 6.60e+00
NLVMFLSVLVDWMIPDIPTDISDQIKKEKSLLVDFFLKEEHEKLKLMDEPALRSPGGGDRSRSRAASSAPSGQSQLGSMMSSGSQHTNV

SEQ ID NO: 34425 - protein, 45 aa, Homo sapiens
  MAP TO AC007539.8; EXPRESSED IN BT474, SIGNAL = 0.68; EXPRESSED IN FETAL LIVER, SIGNAL = 1.1; EXPRESSED IN HELA, SIGNAL = 2.5; EXPRESSED IN ADULT LIVER, SIGNAL = 0.83; EXPRESSED IN PLACENTA, SIGNAL = 1.1; EXPRESSED IN BRAIN, SIGNAL = 1.6; EXPRESSED IN HEART, SIGNAL = 0.82; EXPRESSED IN LUNG, SIGNAL = 0.64; EXPRESSED IN BONE MARROW, SIGNAL = 1.5; SWISSPROT HIT: O94069, EVALUE 1.20e+00; EST_HUMAN HIT: AA018293.1, EVALUE 5.00e-08
MELCIQLSIIMLGKQLIQNNIFEIGVPYVMNSSNLSPCCQGLAQK

SEQ ID NO: 34426 - protein, 61 aa, Homo sapiens
  MAP TO AC007539.8; EXPRESSED IN PLACENTA, SIGNAL = 1.6; EXPRESSED IN LUNG, SIGNAL = 1.7; EXPRESSED IN BONE MARROW, SIGNAL = 1.9; EXPRESSED IN HBL100, SIGNAL = 2.4; EXPRESSED IN FETAL LIVER, SIGNAL = 2.6; EXPRESSED IN HELA, SIGNAL = 6.7; EXPRESSED IN ADULT LIVER, SIGNAL = 1.7; EXPRESSED IN BRAIN, SIGNAL = 1.4; EXPRESSED IN BT474, SIGNAL = 2.4; EXPRESSED IN HEART, SIGNAL = 1.7; EST_HUMAN HIT: AA382811.1, EVALUE 2.00e-09
AAALSLNKATRSNVRVTVTATAVIINLVVILILDEIYGAVAKWLTKIGTVSPRLLAVLGPL

SEQ ID NO: 34427 - protein, 110 aa, Homo sapiens
  MAP TO AC007535.3; EXPRESSED IN ADULT LIVER, SIGNAL = 4.2; EXPRESSED IN BRAIN, SIGNAL = 4.6; EXPRESSED IN HEART, SIGNAL = 4.1; EXPRESSED IN BONE MARROW, SIGNAL = 4.6; EXPRESSED IN HBL100, SIGNAL = 3.3; EXPRESSED IN FETAL LIVER, SIGNAL = 3.7; EXPRESSED IN LUNG, SIGNAL = 4.7; EXPRESSED IN PLACENTA, SIGNAL = 3.7; EXPRESSED IN BT474, SIGNAL = 3.5; EXPRESSED IN HELA, SIGNAL = 3.9; EST_HUMAN HIT: BE174476.1, EVALUE 5.50e-01; SWISSPROT HIT: O42615, EVALUE 6.80e+00
VLQSLEGDFLFDSDIPKAGTRVRGLEGASAKRLYSMFLIPNILSKVALRDNIPTNEIEPFKEIRSNITSSIKSVRENMVSKLAFSVLLCAFQEFHIKNVSLYKTHTHKNS

SEQ ID NO: 34428 - protein, 49 aa, Homo sapiens
  MAP TO AC007529.5; EXPRESSED IN HELA, SIGNAL = 1.3; EXPRESSED IN PLACENTA, SIGNAL = 1.4; EXPRESSED IN BT474, SIGNAL = 1.4; EXPRESSED IN FETAL LIVER, SIGNAL = 1.5; EXPRESSED IN LUNG, SIGNAL = 1.5; EXPRESSED IN BONE MARROW, SIGNAL = 1.9; EXPRESSED IN HBL100, SIGNAL = 1.4; EXPRESSED IN ADULT LIVER, SIGNAL = 1.1; EXPRESSED IN BRAIN, SIGNAL = 1.3; EXPRESSED IN HEART, SIGNAL = 1.3; SWISSPROT HIT: P50817, EVALUE 1.60e+00; EST_HUMAN HIT: BE966911.2, EVALUE 5.10e+00
IEHFQFLNQKNKITENYYYNGLKYEHSDKRIQHSLENTNAKLNGMLFKN

SEQ ID NO: 34429 - protein, 50 aa, Homo sapiens
  MAP TO AC007465.2; EXPRESSED IN BT474, SIGNAL = 6.2; EXPRESSED IN HBL100, SIGNAL = 6.1; EXPRESSED IN FETAL LIVER, SIGNAL = 4.9; EXPRESSED IN HELA, SIGNAL = 3.7; EXPRESSED IN BRAIN, SIGNAL = 5.6; EXPRESSED IN PLACENTA, SIGNAL = 7.6; EXPRESSED IN BONE MARROW, SIGNAL = 7.4; EXPRESSED IN LUNG, SIGNAL = 5.7; EXPRESSED IN ADULT LIVER, SIGNAL = 3.2; EXPRESSED IN HEART, SIGNAL = 5.5; EST_HUMAN HIT: AV713061.1, EVALUE 6.60e+00
MKMDSINLSVMWLCKMIQHVGTATFKTYISCLLVPKLFLLQLMALQCNTQ

SEQ ID NO: 34430 - protein, 53 aa, Homo sapiens
  MAP TO AC007464.2; EXPRESSED IN FETAL LIVER, SIGNAL =  28; EXPRESSED IN HELA, SIGNAL =  18; EXPRESSED IN ADULT LIVER, SIGNAL =  16; EXPRESSED IN PLACENTA, SIGNAL =  23; EXPRESSED IN BT474, SIGNAL =  11; EXPRESSED IN BONE MARROW, SIGNAL =  11; EXPRESSED IN LUNG, SIGNAL =  25; EXPRESSED IN HBL100, SIGNAL =  10; EXPRESSED IN BRAIN, SIGNAL =  28; EXPRESSED IN HEART, SIGNAL =  19; SWISSPROT HIT: P41996, EVALUE 2.60e+00
KQKEKQDVPQHLFSAPYPEEYAHLYCDAKCSSFPALKPTREKTAFMTFNECHS

SEQ ID NO: 34431 - protein, 58 aa, Homo sapiens
  MAP TO AC007464.2; EXPRESSED IN BONE MARROW, SIGNAL = 1.2; EXPRESSED IN LUNG, SIGNAL = 1.2; EXPRESSED IN HEART, SIGNAL = 1.3; EXPRESSED IN PLACENTA, SIGNAL = 1.5; EXPRESSED IN BT474, SIGNAL = 0.92; EXPRESSED IN HBL100, SIGNAL = 0.93; EXPRESSED IN FETAL LIVER, SIGNAL = 0.76; EXPRESSED IN HELA, SIGNAL = 1.2; EXPRESSED IN ADULT LIVER, SIGNAL = 0.95; EXPRESSED IN BRAIN, SIGNAL = 1.4
MEEGKGKAGMSYPLEQEEERGRENGGGEEERAGGGEEERAGGGEEERAGGGEEERAGG

SEQ ID NO: 34432 - protein, 100 aa, Homo sapiens
  MAP TO AC007464.2; EXPRESSED IN ADULT LIVER, SIGNAL = 7.9; EXPRESSED IN BRAIN, SIGNAL = 8.3; EXPRESSED IN HEART, SIGNAL = 7.7; EXPRESSED IN PLACENTA, SIGNAL = 7.6; EXPRESSED IN BT474, SIGNAL = 6.8; EXPRESSED IN HBL100, SIGNAL =  11; EXPRESSED IN FETAL LIVER, SIGNAL =  10; EXPRESSED IN HELA, SIGNAL =  11; EXPRESSED IN BONE MARROW, SIGNAL = 7.9; EXPRESSED IN LUNG, SIGNAL = 9.2; SWISSPROT HIT: Q9WV30, EVALUE 5.30e-01; EST_HUMAN HIT: BE790680.1, EVALUE 4.30e-01
MVFFLNYTRAPLRSTSLSMSYRHPSLLSASLVENLQPKSVSNRDPTSGPVKQDHISPRLSGKAHMDPTEFQNPQPSFPGFQRPTNPITQIFLRSFARAAQ

SEQ ID NO: 34433 - protein, 85 aa, Homo sapiens
  MAP TO AC007429.11; EXPRESSED IN BT474, SIGNAL = 7.6; EXPRESSED IN BONE MARROW, SIGNAL =  12; EXPRESSED IN FETAL LIVER, SIGNAL = 9.6; EXPRESSED IN LUNG, SIGNAL =  12; EXPRESSED IN HELA, SIGNAL =  11; EXPRESSED IN PLACENTA, SIGNAL = 9.2; EXPRESSED IN HBL100, SIGNAL =  10; EXPRESSED IN ADULT LIVER, SIGNAL = 9.6; EXPRESSED IN BRAIN, SIGNAL =  16; EXPRESSED IN HEART, SIGNAL =  10; EST_HUMAN HIT: AV728031.1, EVALUE 4.00e-17; SWISSPROT HIT: P39188, EVALUE 2.00e-14
DYGSLQHSRPPLPGSSDPPTSVSQVAGTAGACHHAQLIFLCFVEMGSHNVPQAGVELLGSAILLPQPPKVLELQERGNIFYQESL

SEQ ID NO: 34434 - protein, 42 aa, Homo sapiens
  MAP TO AC007429.11; EXPRESSED IN ADULT LIVER, SIGNAL = 1.9; EXPRESSED IN PLACENTA, SIGNAL = 0.85; EXPRESSED IN HEART, SIGNAL = 1.4; EXPRESSED IN BT474, SIGNAL = 1.3; EXPRESSED IN BONE MARROW, SIGNAL = 1.5; EXPRESSED IN HBL100, SIGNAL = 4.1; EXPRESSED IN FETAL LIVER, SIGNAL = 1.7; EXPRESSED IN LUNG, SIGNAL = 1.4; EXPRESSED IN HELA, SIGNAL = 3.1; EST_HUMAN HIT: AA970047.1, EVALUE 1.60e-01; SWISSPROT HIT: P34262, EVALUE 8.00e+00
GIMQNILCKNIMTIKNKKRLLSHTRGDLGNKTAKCNVESWIG

SEQ ID NO: 34435 - protein, 24 aa, Homo sapiens
  MAP TO AC007405.2; EXPRESSED IN ADULT LIVER, SIGNAL =  10; EXPRESSED IN PLACENTA, SIGNAL =  12; EXPRESSED IN BT474, SIGNAL = 9.4; EXPRESSED IN BONE MARROW, SIGNAL =  14; EXPRESSED IN HBL100, SIGNAL =  14; EXPRESSED IN FETAL LIVER, SIGNAL =  18; EXPRESSED IN LUNG, SIGNAL =  18; EXPRESSED IN HELA, SIGNAL =  15; EXPRESSED IN BRAIN, SIGNAL =  18; EXPRESSED IN HEART, SIGNAL =  13
FLMIIIIMAALIPLSTNSIICIKS

SEQ ID NO: 34436 - protein, 80 aa, Homo sapiens
  MAP TO AC007405.2; EXPRESSED IN BT474, SIGNAL = 3.5; EXPRESSED IN HELA, SIGNAL = 2.3; EXPRESSED IN PLACENTA, SIGNAL = 2.2; EXPRESSED IN HBL100, SIGNAL = 5.5; EXPRESSED IN FETAL LIVER, SIGNAL = 3.1; EXPRESSED IN LUNG, SIGNAL = 1.6; EXPRESSED IN ADULT LIVER, SIGNAL = 1.2; EXPRESSED IN BRAIN, SIGNAL = 6.8; EXPRESSED IN BONE MARROW, SIGNAL = 8.3; EXPRESSED IN HEART, SIGNAL = 2.3; EST_HUMAN HIT: AA627193.1, EVALUE 2.00e-40; SWISSPROT HIT: P48319, EVALUE 7.00e-42
LLPAKNGEEQTVQFLLEVVDILLNYVRKTFDRSTKVLDFHHPHQLLEGMEGFNLELSDHPESLEQILVDCRDTLKYGVRT

SEQ ID NO: 34437 - protein, 66 aa, Homo sapiens
  MAP TO AC007405.2; EXPRESSED IN BT474, SIGNAL = 3.5; EXPRESSED IN HELA, SIGNAL = 2.3; EXPRESSED IN PLACENTA, SIGNAL = 2.2; EXPRESSED IN HBL100, SIGNAL = 5.5; EXPRESSED IN FETAL LIVER, SIGNAL = 3.1; EXPRESSED IN LUNG, SIGNAL = 1.6; EXPRESSED IN ADULT LIVER, SIGNAL = 1.2; EXPRESSED IN BRAIN, SIGNAL = 6.8; EXPRESSED IN BONE MARROW, SIGNAL = 8.3; EXPRESSED IN HEART, SIGNAL = 2.3; EST_HUMAN HIT: AA627193.1, EVALUE 5.00e-26
RSKPCNSSWKWWTYSSTMSARHLIAPPRCWTFITHTSCWKAWRASTWSSLTTPSPWSRSWLTAETP

SEQ ID NO: 34438 - protein, 33 aa, Homo sapiens
  MAP TO AC007405.2; EXPRESSED IN LUNG, SIGNAL = 1.9; EXPRESSED IN HEART, SIGNAL = 1.6; EXPRESSED IN PLACENTA, SIGNAL = 1.8; EXPRESSED IN BT474, SIGNAL = 1.4; EXPRESSED IN BONE MARROW, SIGNAL = 1.9; EXPRESSED IN HBL100, SIGNAL = 1.4; EXPRESSED IN FETAL LIVER, SIGNAL = 1.7; EXPRESSED IN HELA, SIGNAL = 1.7; EXPRESSED IN BRAIN, SIGNAL = 2.4; EXPRESSED IN ADULT LIVER, SIGNAL = 1.7; EST_HUMAN HIT: BE614823.1, EVALUE 8.80e-01; SWISSPROT HIT: Q11131, EVALUE 9.50e-01
SSSLWRGPSREARRPCTSTSCSSQPWCELGSGS

SEQ ID NO: 34439 - protein, 100 aa, Homo sapiens
  MAP TO AC007404.2; EXPRESSED IN PLACENTA, SIGNAL = 1.1; EXPRESSED IN BT474, SIGNAL = 1.6; EXPRESSED IN HBL100, SIGNAL = 0.98; EXPRESSED IN FETAL LIVER, SIGNAL = 1.8; EXPRESSED IN HELA, SIGNAL = 0.8; EXPRESSED IN BRAIN, SIGNAL = 1.9; EXPRESSED IN BONE MARROW, SIGNAL = 1.1; EXPRESSED IN ADULT LIVER, SIGNAL = 1.1; EXPRESSED IN HEART, SIGNAL = 1.6; EXPRESSED IN LUNG, SIGNAL = 1.4; EST_HUMAN HIT: N46697.1, EVALUE 5.00e-35; SWISSPROT HIT: P54296, EVALUE 7.60e+00
VQLLALLVPTLISYLLDENSFASASSASKDLHEFALQNLMHIGPLYPHAFKTVMGAAPELKVRLETAVRASQASKAKAAARQPAPAIHSAPTIKLKTSFF

SEQ ID NO: 34440 - protein, 61 aa, Homo sapiens
  MAP TO AC007404.2; EXPRESSED IN BONE MARROW, SIGNAL =  15; EXPRESSED IN HEART, SIGNAL =  11; EXPRESSED IN PLACENTA, SIGNAL = 7.9; EXPRESSED IN BT474, SIGNAL =  18; EXPRESSED IN HBL100, SIGNAL =  18; EXPRESSED IN LUNG, SIGNAL =  16; EXPRESSED IN HELA, SIGNAL =  18; EXPRESSED IN ADULT LIVER, SIGNAL =  11; EXPRESSED IN BRAIN, SIGNAL =  14; EXPRESSED IN FETAL LIVER, SIGNAL =  12; SWISSPROT HIT: P54003, EVALUE 2.60e+00
AENKSTLGPEEVRKSALTLVMGPLDNPNPILRCAAGEALGRMAQVVGEATFIARMAQYSFD

SEQ ID NO: 34441 - protein, 85 aa, Homo sapiens
  MAP TO AC007395.2; EXPRESSED IN PLACENTA, SIGNAL = 6.5; EXPRESSED IN ADULT LIVER, SIGNAL = 4.6; EXPRESSED IN HEART, SIGNAL = 3.6; EXPRESSED IN BONE MARROW, SIGNAL =  46; EXPRESSED IN BRAIN, SIGNAL = 2.7; EXPRESSED IN BT474, SIGNAL =  24; EXPRESSED IN HELA, SIGNAL = 8.4; EXPRESSED IN LUNG, SIGNAL = 8.4; EXPRESSED IN FETAL LIVER, SIGNAL =  16; EXPRESSED IN HBL100, SIGNAL =  71; EST_HUMAN HIT: BE781997.1, EVALUE 2.00e-08; SWISSPROT HIT: P02314, EVALUE 4.00e-09
KTEGDVKGDKAKVDTPQRRSTRLSAKPAPPKPEPKPKKAPAKKGEKVPKGKKGKADAGKEGNYPAEKGDAITDQAREAEGDGEAK

SEQ ID NO: 34442 - protein, 46 aa, Homo sapiens
  MAP TO AC007395.2; EXPRESSED IN PLACENTA, SIGNAL = 6.5; EXPRESSED IN ADULT LIVER, SIGNAL = 4.6; EXPRESSED IN HEART, SIGNAL = 3.6; EXPRESSED IN BONE MARROW, SIGNAL =  46; EXPRESSED IN BRAIN, SIGNAL = 2.7; EXPRESSED IN BT474, SIGNAL =  24; EXPRESSED IN HELA, SIGNAL = 8.4; EXPRESSED IN LUNG, SIGNAL = 8.4; EXPRESSED IN FETAL LIVER, SIGNAL =  16; EXPRESSED IN HBL100, SIGNAL =  71; EST_HUMAN HIT: BE874888.1, EVALUE 1.00e-07
LNLLLQSQSPSLKRPLQRRERRYLKGKREKLMLARRGITLQKKEMP

SEQ ID NO: 34443 - protein, 30 aa, Homo sapiens
  MAP TO AC007395.2; EXPRESSED IN BONE MARROW, SIGNAL = 1.9; EXPRESSED IN PLACENTA, SIGNAL = 1.7; EXPRESSED IN HBL100, SIGNAL = 1.8; EXPRESSED IN FETAL LIVER, SIGNAL = 1.5; EXPRESSED IN HELA, SIGNAL = 1.9; EXPRESSED IN ADULT LIVER, SIGNAL = 1.6; EXPRESSED IN BRAIN, SIGNAL = 1.8; EXPRESSED IN HEART, SIGNAL = 1.7; EXPRESSED IN BT474, SIGNAL = 1.4; EXPRESSED IN LUNG, SIGNAL =   2
LVPGKTPTVRAALICLTLVLVASVLLQAVL

SEQ ID NO: 34444 - protein, 24 aa, Homo sapiens
  MAP TO AC007394.2; EXPRESSED IN HELA, SIGNAL = 1.4; EXPRESSED IN ADULT LIVER, SIGNAL = 0.96; EXPRESSED IN BRAIN, SIGNAL = 1.1; EXPRESSED IN BT474, SIGNAL =   1; EXPRESSED IN BONE MARROW, SIGNAL = 0.9; EXPRESSED IN LUNG, SIGNAL = 1.1; EXPRESSED IN HEART, SIGNAL =   1; EXPRESSED IN PLACENTA, SIGNAL = 1.6; EXPRESSED IN HBL100, SIGNAL = 1.2; EXPRESSED IN FETAL LIVER, SIGNAL = 0.92; EST_HUMAN HIT: BF222876.1, EVALUE 4.80e-02
RTLKAAPTPTIPMDAFCLGQCQGH

SEQ ID NO: 34445 - protein, 24 aa, Homo sapiens
  MAP TO AC007389.2; EXPRESSED IN PLACENTA, SIGNAL =  48; EXPRESSED IN FETAL LIVER, SIGNAL =  34; EXPRESSED IN LUNG, SIGNAL =  11; EXPRESSED IN ADULT LIVER, SIGNAL =  40; EXPRESSED IN BONE MARROW, SIGNAL = 3.3; EXPRESSED IN HBL100, SIGNAL =  36; EXPRESSED IN BRAIN, SIGNAL = 3.7; EXPRESSED IN HEART, SIGNAL = 4.2; EXPRESSED IN BT474, SIGNAL = 1.9e+02; EXPRESSED IN HELA, SIGNAL =  34; EST_HUMAN HIT: AA196273.1, EVALUE 6.00e-07
CTWSQSWHRPGQRDSARPRSTRPC

SEQ ID NO: 34446 - protein, 70 aa, Homo sapiens
  MAP TO AC007389.2; EXPRESSED IN BONE MARROW, SIGNAL = 1.9; EXPRESSED IN HBL100, SIGNAL = 5.2; EXPRESSED IN ADULT LIVER, SIGNAL = 2.4; EXPRESSED IN BRAIN, SIGNAL = 3.6; EXPRESSED IN PLACENTA, SIGNAL = 0.89; EXPRESSED IN BT474, SIGNAL = 1.7; EXPRESSED IN FETAL LIVER, SIGNAL = 3.5; EXPRESSED IN LUNG, SIGNAL = 1.6; EXPRESSED IN HELA, SIGNAL = 3.1; EXPRESSED IN HEART, SIGNAL = 3.3; SWISSPROT HIT: P41891, EVALUE 6.50e-01; EST_HUMAN HIT: AV760073.1, EVALUE 5.00e-15
AAGAMSGHKGGKKQPLKQHKEQAKEMDKEDVAFKQKQTEAEGALDTGGVKKSGKKISTPTVENSMEVPQK

SEQ ID NO: 34447 - protein, 22 aa, Homo sapiens
  MAP TO AC007389.2; EXPRESSED IN BONE MARROW, SIGNAL = 1.9; EXPRESSED IN HBL100, SIGNAL = 5.2; EXPRESSED IN ADULT LIVER, SIGNAL = 2.4; EXPRESSED IN BRAIN, SIGNAL = 3.6; EXPRESSED IN PLACENTA, SIGNAL = 0.89; EXPRESSED IN BT474, SIGNAL = 1.7; EXPRESSED IN FETAL LIVER, SIGNAL = 3.5; EXPRESSED IN LUNG, SIGNAL = 1.6; EXPRESSED IN HELA, SIGNAL = 3.1; EXPRESSED IN HEART, SIGNAL = 3.3
CHMFLKRQQVPCLDTKVARSSP

SEQ ID NO: 34448 - protein, 68 aa, Homo sapiens
  MAP TO AC007389.2; EXPRESSED IN LUNG, SIGNAL = 5.5; EXPRESSED IN HELA, SIGNAL =  35; EXPRESSED IN ADULT LIVER, SIGNAL =  14; EXPRESSED IN BRAIN, SIGNAL = 0.75; EXPRESSED IN HEART, SIGNAL =   1; EXPRESSED IN PLACENTA, SIGNAL = 8.6; EXPRESSED IN BT474, SIGNAL =  52; EXPRESSED IN BONE MARROW, SIGNAL = 1.2; EXPRESSED IN HBL100, SIGNAL =  15; EXPRESSED IN FETAL LIVER, SIGNAL = 8.6; SWISSPROT HIT: P05783, EVALUE 4.00e-29; EST_HUMAN HIT: BE799458.1, EVALUE 4.00e-28
VRRLDTKNRKLESKIREHLEKKGPQVRDWSHYFKTVEDLRAQIFANTVDNARIVLQVDNAHLADDFRV

SEQ ID NO: 34449 - protein, 72 aa, Homo sapiens
  MAP TO AC007319.2; EXPRESSED IN PLACENTA, SIGNAL = 0.89; EXPRESSED IN BONE MARROW, SIGNAL =   1; EXPRESSED IN ADULT LIVER, SIGNAL = 0.98; EXPRESSED IN HEART, SIGNAL = 1.1; EXPRESSED IN HELA, SIGNAL = 0.6; EXPRESSED IN BT474, SIGNAL =   1; EXPRESSED IN HBL100, SIGNAL = 0.8; EXPRESSED IN FETAL LIVER, SIGNAL = 0.97; EXPRESSED IN LUNG, SIGNAL = 3.4; EXPRESSED IN BRAIN, SIGNAL = 0.8; EST_HUMAN HIT: AA298652.1, EVALUE 2.00e-34; SWISSPROT HIT: Q16602, EVALUE 8.00e-36
VNLFFLLNIVRVLITKLKVTHQAESNLYMKAVRATLILVPLLGIEFVLIPWRPEGKIAEEVYDYIMHILMHF

SEQ ID NO: 34450 - protein, 50 aa, Homo sapiens
  MAP TO AC007314.3; EXPRESSED IN BONE MARROW, SIGNAL =   9; EXPRESSED IN FETAL LIVER, SIGNAL =  17; EXPRESSED IN ADULT LIVER, SIGNAL = 8.2; EXPRESSED IN BRAIN, SIGNAL = 7.9; EXPRESSED IN PLACENTA, SIGNAL =  11; EXPRESSED IN BT474, SIGNAL =  13; EXPRESSED IN HBL100, SIGNAL =  15; EXPRESSED IN LUNG, SIGNAL =  16; EXPRESSED IN HELA, SIGNAL =  21; EXPRESSED IN HEART, SIGNAL = 7.5; EST_HUMAN HIT: AU142750.1, EVALUE 2.00e-04; SWISSPROT HIT: P48234, EVALUE 7.00e-05
VLLYDLRSDKPLLVKDHQYGLPIKSVHFQDSLDLILSADSRIVKMWNKNS

SEQ ID NO: 34451 - protein, 65 aa, Homo sapiens
  MAP TO AC007285.2; EXPRESSED IN PLACENTA, SIGNAL = 2.1; EXPRESSED IN HBL100, SIGNAL = 1.2; EXPRESSED IN FETAL LIVER, SIGNAL = 1.5; EXPRESSED IN HELA, SIGNAL =   2; EXPRESSED IN BRAIN, SIGNAL = 1.5; EXPRESSED IN HEART, SIGNAL = 2.1; EXPRESSED IN BT474, SIGNAL = 1.6; EXPRESSED IN BONE MARROW, SIGNAL = 1.6; EXPRESSED IN LUNG, SIGNAL = 2.2; EXPRESSED IN ADULT LIVER, SIGNAL = 1.4; EST_HUMAN HIT: AW961713.1, EVALUE 3.00e-32; SWISSPROT HIT: O60046, EVALUE 2.00e-03
MRLFLWNAVLTLFVTSLIGALIPEPEVKIEVLQKPFICHRKTKGGDLMLVHYEGYLEKDGSLFHS

SEQ ID NO: 34452 - protein, 53 aa, Homo sapiens
  MAP TO AC007285.2; EXPRESSED IN PLACENTA, SIGNAL = 2.2; EXPRESSED IN LUNG, SIGNAL = 2.1; EXPRESSED IN HELA, SIGNAL = 0.59; EXPRESSED IN BT474, SIGNAL = 4.3; EXPRESSED IN BONE MARROW, SIGNAL = 1.7; EXPRESSED IN HBL100, SIGNAL = 1.5; EXPRESSED IN FETAL LIVER, SIGNAL = 1.3; EXPRESSED IN ADULT LIVER, SIGNAL = 2.3; EXPRESSED IN BRAIN, SIGNAL = 3.1; EXPRESSED IN HEART, SIGNAL = 1.9; EST_HUMAN HIT: AW503822.1, EVALUE 9.00e-25
MAAAPPSYCFVAFPPRAKDGLVVFGKNSARPRDEVQEVVYFSAADHEPESKVE

SEQ ID NO: 34453 - protein, 44 aa, Homo sapiens
  MAP TO AC007285.2; EXPRESSED IN PLACENTA, SIGNAL = 2.2; EXPRESSED IN LUNG, SIGNAL = 2.1; EXPRESSED IN HELA, SIGNAL = 0.59; EXPRESSED IN BT474, SIGNAL = 4.3; EXPRESSED IN BONE MARROW, SIGNAL = 1.7; EXPRESSED IN HBL100, SIGNAL = 1.5; EXPRESSED IN FETAL LIVER, SIGNAL = 1.3; EXPRESSED IN ADULT LIVER, SIGNAL = 2.3; EXPRESSED IN BRAIN, SIGNAL = 3.1; EXPRESSED IN HEART, SIGNAL = 1.9; EST_HUMAN HIT: AI371175.1, EVALUE 3.00e-20
WLQLLQVTVLLPSLHVLRMVWWYLGKIQPGPEMKCKRLCISRLL

SEQ ID NO: 34454 - protein, 39 aa, Homo sapiens
  MAP TO AC007275.3; EXPRESSED IN HBL100, SIGNAL = 3.8; EXPRESSED IN FETAL LIVER, SIGNAL =   5; EXPRESSED IN ADULT LIVER, SIGNAL = 4.3; EXPRESSED IN BRAIN, SIGNAL =   4; EXPRESSED IN HEART, SIGNAL = 3.6; EXPRESSED IN BT474, SIGNAL = 3.7; EXPRESSED IN LUNG, SIGNAL = 5.2; EXPRESSED IN PLACENTA, SIGNAL =  21; EXPRESSED IN HELA, SIGNAL = 5.2; EXPRESSED IN BONE MARROW, SIGNAL = 4.5; EST_HUMAN HIT: R24807.1, EVALUE 1.00e-09; SWISSPROT HIT: P05108, EVALUE 2.70e+00
VHKEKLWHIAYCWAQHPYDVTLLPMTEPPNIHRHIFGPL

SEQ ID NO: 34455 - protein, 19 aa, Homo sapiens
  MAP TO AC007275.3; EXPRESSED IN HBL100, SIGNAL = 3.8; EXPRESSED IN FETAL LIVER, SIGNAL =   5; EXPRESSED IN ADULT LIVER, SIGNAL = 4.3; EXPRESSED IN BRAIN, SIGNAL =   4; EXPRESSED IN HEART, SIGNAL = 3.6; EXPRESSED IN BT474, SIGNAL = 3.7; EXPRESSED IN LUNG, SIGNAL = 5.2; EXPRESSED IN PLACENTA, SIGNAL =  21; EXPRESSED IN HELA, SIGNAL = 5.2; EXPRESSED IN BONE MARROW, SIGNAL = 4.5
CIKRNYGILHIAGPSTLMM

SEQ ID NO: 34456 - protein, 40 aa, Homo sapiens
  MAP TO AC007254.2; EXPRESSED IN BT474, SIGNAL = 1.3; EXPRESSED IN BONE MARROW, SIGNAL = 1.4; EXPRESSED IN FETAL LIVER, SIGNAL = 1.1; EXPRESSED IN HELA, SIGNAL = 0.8; EXPRESSED IN ADULT LIVER, SIGNAL = 1.1; EXPRESSED IN BRAIN, SIGNAL = 1.6; EXPRESSED IN PLACENTA, SIGNAL = 1.9; EXPRESSED IN HBL100, SIGNAL = 1.1; EXPRESSED IN HEART, SIGNAL = 1.2; EXPRESSED IN LUNG, SIGNAL = 1.2; EST_HUMAN HIT: T11909.1, EVALUE 3.30e-01
SSFFPMVGILVRWTYPNVLLFPAVSLTMSFLLSTLTFQVR

SEQ ID NO: 34457 - protein, 67 aa, Homo sapiens
  MAP TO AC007245.3; EXPRESSED IN BONE MARROW, SIGNAL = 2.9; EXPRESSED IN HBL100, SIGNAL = 1.9; EXPRESSED IN ADULT LIVER, SIGNAL = 2.3; EXPRESSED IN BRAIN, SIGNAL = 3.2; EXPRESSED IN PLACENTA, SIGNAL = 3.3; EXPRESSED IN BT474, SIGNAL = 1.7; EXPRESSED IN FETAL LIVER, SIGNAL = 2.2; EXPRESSED IN LUNG, SIGNAL = 2.7; EXPRESSED IN HELA, SIGNAL = 2.6; EXPRESSED IN HEART, SIGNAL = 2.2; EST_HUMAN HIT: N58977.1, EVALUE 3.00e-28; SWISSPROT HIT: O42280, EVALUE 5.20e-01
TMRKHSEKCVLRRFHPCVNIVECNVVEHKPRWHSLLHRGYRCSLLFLGYKAVQHVTVLSAAGNCNTL

SEQ ID NO: 34458 - protein, 85 aa, Homo sapiens
  MAP TO AC007239.2; EXPRESSED IN BONE MARROW, SIGNAL =   3; EXPRESSED IN HBL100, SIGNAL =   6; EXPRESSED IN ADULT LIVER, SIGNAL = 2.3; EXPRESSED IN BT474, SIGNAL = 3.6; EXPRESSED IN FETAL LIVER, SIGNAL = 2.9; EXPRESSED IN LUNG, SIGNAL = 2.2; EXPRESSED IN HELA, SIGNAL = 2.7; EXPRESSED IN BRAIN, SIGNAL = 1.8; EXPRESSED IN PLACENTA, SIGNAL =   3; EXPRESSED IN HEART, SIGNAL = 2.8
SETGHSSHFNLNLTVIEITPFFQEFLSALPGFINRGHCGTTTTNSLSSQQNNKEKFIHSVNNHLLNVIRHYCQALGIRKCIKEAV

SEQ ID NO: 34459 - protein, 56 aa, Homo sapiens
  MAP TO AC007224.2; EXPRESSED IN BT474, SIGNAL = 3.1; EXPRESSED IN BONE MARROW, SIGNAL = 1.8; EXPRESSED IN HBL100, SIGNAL = 2.4; EXPRESSED IN FETAL LIVER, SIGNAL = 2.4; EXPRESSED IN HELA, SIGNAL = 1.8; EXPRESSED IN ADULT LIVER, SIGNAL = 6.8; EXPRESSED IN BRAIN, SIGNAL = 3.1; EXPRESSED IN PLACENTA, SIGNAL = 6.2; EXPRESSED IN LUNG, SIGNAL = 2.9; EXPRESSED IN HEART, SIGNAL = 1.5; EST_HUMAN HIT: AI815143.1, EVALUE 6.00e-11; SWISSPROT HIT: P50554, EVALUE 3.00e-30
HGCAFLVDEVQTGGGCTGKFWAHEHWGLDDPADVMTFSKKMMTGGFFHKEEFRPNA

SEQ ID NO: 34460 - protein, 37 aa, Homo sapiens
  MAP TO AC007224.2; EXPRESSED IN PLACENTA, SIGNAL = 2.9; EXPRESSED IN LUNG, SIGNAL = 3.4; EXPRESSED IN ADULT LIVER, SIGNAL = 2.3; EXPRESSED IN BONE MARROW, SIGNAL = 3.8; EXPRESSED IN HBL100, SIGNAL = 3.6; EXPRESSED IN FETAL LIVER, SIGNAL = 3.6; EXPRESSED IN HELA, SIGNAL =   3; EXPRESSED IN BRAIN, SIGNAL =   3; EXPRESSED IN BT474, SIGNAL = 3.3; EXPRESSED IN HEART, SIGNAL = 4.5; SWISSPROT HIT: P40389, EVALUE 2.40e-01; EST_HUMAN HIT: BE393108.1, EVALUE 4.00e-14
ILFRQDLFRGCTALELGAGTGLASIIAATMARTVYCT

SEQ ID NO: 34461 - protein, 23 aa, Homo sapiens
  MAP TO AC007224.2; EXPRESSED IN PLACENTA, SIGNAL = 2.9; EXPRESSED IN LUNG, SIGNAL = 3.4; EXPRESSED IN ADULT LIVER, SIGNAL = 2.3; EXPRESSED IN BONE MARROW, SIGNAL = 3.8; EXPRESSED IN HBL100, SIGNAL = 3.6; EXPRESSED IN FETAL LIVER, SIGNAL = 3.6; EXPRESSED IN HELA, SIGNAL =   3; EXPRESSED IN BRAIN, SIGNAL =   3; EXPRESSED IN BT474, SIGNAL = 3.3; EXPRESSED IN HEART, SIGNAL = 4.5; EST_HUMAN HIT: BE393108.1, EVALUE 2.00e-07
HPVPTGPLPRMYSAGARGRHGAR

SEQ ID NO: 34462 - protein, 65 aa, Homo sapiens
  MAP TO AC007219.1; EXPRESSED IN HELA, SIGNAL = 1.8; EXPRESSED IN ADULT LIVER, SIGNAL = 1.1; EXPRESSED IN BRAIN, SIGNAL = 1.4; EXPRESSED IN PLACENTA, SIGNAL = 1.3; EXPRESSED IN BT474, SIGNAL = 1.3; EXPRESSED IN HBL100, SIGNAL = 2.4; EXPRESSED IN LUNG, SIGNAL = 1.4; EXPRESSED IN HEART, SIGNAL = 1.2; EXPRESSED IN BONE MARROW, SIGNAL = 1.4; EXPRESSED IN FETAL LIVER, SIGNAL = 1.3; EST_HUMAN HIT: N45126.1, EVALUE 1.10e+00; SWISSPROT HIT: P42433, EVALUE 1.10e+00
TVIIGRVVSVDCDTDCDIGSLTLGQIGQSSGKQNSLSVYSGSSCGIHGGHTPTGKLFCCDTLCSA

SEQ ID NO: 34463 - protein, 20 aa, Homo sapiens
  MAP TO AC007219.1; EXPRESSED IN HELA, SIGNAL = 1.8; EXPRESSED IN ADULT LIVER, SIGNAL = 1.1; EXPRESSED IN BRAIN, SIGNAL = 1.4; EXPRESSED IN PLACENTA, SIGNAL = 1.3; EXPRESSED IN BT474, SIGNAL = 1.3; EXPRESSED IN HBL100, SIGNAL = 2.4; EXPRESSED IN LUNG, SIGNAL = 1.4; EXPRESSED IN HEART, SIGNAL = 1.2; EXPRESSED IN BONE MARROW, SIGNAL = 1.4; EXPRESSED IN FETAL LIVER, SIGNAL = 1.3
QSSLAGLCLSTAILTVILAL

SEQ ID NO: 34464 - protein, 37 aa, Homo sapiens
  MAP TO AC007179.3; EXPRESSED IN BT474, SIGNAL = 1.1; EXPRESSED IN HELA, SIGNAL = 1.3; EXPRESSED IN HEART, SIGNAL = 1.2; EXPRESSED IN PLACENTA, SIGNAL = 1.4; EXPRESSED IN FETAL LIVER, SIGNAL = 0.85; EXPRESSED IN LUNG, SIGNAL =   1; EXPRESSED IN ADULT LIVER, SIGNAL = 1.2; EXPRESSED IN BRAIN, SIGNAL = 1.1; EXPRESSED IN BONE MARROW, SIGNAL = 0.88; EXPRESSED IN HBL100, SIGNAL = 1.2; EST_HUMAN HIT: BF310193.1, EVALUE 7.40e+00; SWISSPROT HIT: P21573, EVALUE 4.70e+00
LLNEEGEKEQEYRGRPQGADSLKSNPNVRLAGQVLQS

SEQ ID NO: 34465 - protein, 37 aa, Homo sapiens
  MAP TO AC007179.3; EXPRESSED IN BT474, SIGNAL = 1.1; EXPRESSED IN HELA, SIGNAL = 1.3; EXPRESSED IN HEART, SIGNAL = 1.2; EXPRESSED IN PLACENTA, SIGNAL = 1.4; EXPRESSED IN FETAL LIVER, SIGNAL = 0.85; EXPRESSED IN LUNG, SIGNAL =   1; EXPRESSED IN ADULT LIVER, SIGNAL = 1.2; EXPRESSED IN BRAIN, SIGNAL = 1.1; EXPRESSED IN BONE MARROW, SIGNAL = 0.88; EXPRESSED IN HBL100, SIGNAL = 1.2; SWISSPROT HIT: Q9T1W6, EVALUE 8.40e+00
SLMRRGRRSRNIVEGLREPTALNQILMCALLARSFRA

SEQ ID NO: 34466 - protein, 52 aa, Homo sapiens
  MAP TO AC007179.3; EXPRESSED IN PLACENTA, SIGNAL = 0.91; EXPRESSED IN BT474, SIGNAL = 1.3; EXPRESSED IN LUNG, SIGNAL = 1.2; EXPRESSED IN FETAL LIVER, SIGNAL = 0.79; EXPRESSED IN ADULT LIVER, SIGNAL =   1; EXPRESSED IN BRAIN, SIGNAL = 1.2; EXPRESSED IN BONE MARROW, SIGNAL = 0.79; EXPRESSED IN HBL100, SIGNAL = 1.3; EXPRESSED IN HELA, SIGNAL = 1.7; EXPRESSED IN HEART, SIGNAL = 1.6; EST_HUMAN HIT: AA811868.1, EVALUE 1.50e+00; SWISSPROT HIT: P27799, EVALUE 1.50e+00
SFLPQRVQHIFLSARSSVGEFSWIGSSTECNRSKTFKGLIVGLAAPPVADIG

SEQ ID NO: 34467 - protein, 38 aa, Homo sapiens
  MAP TO AC007179.3; EXPRESSED IN PLACENTA, SIGNAL = 0.91; EXPRESSED IN BT474, SIGNAL = 1.3; EXPRESSED IN LUNG, SIGNAL = 1.2; EXPRESSED IN FETAL LIVER, SIGNAL = 0.79; EXPRESSED IN ADULT LIVER, SIGNAL =   1; EXPRESSED IN BRAIN, SIGNAL = 1.2; EXPRESSED IN BONE MARROW, SIGNAL = 0.79; EXPRESSED IN HBL100, SIGNAL = 1.3; EXPRESSED IN HELA, SIGNAL = 1.7; EXPRESSED IN HEART, SIGNAL = 1.6; EST_HUMAN HIT: Z40902.1, EVALUE 3.20e+00
HSCRRESSTFSYLHAPQLGSFLGLVVPQNATEAKLSRV

SEQ ID NO: 34468 - protein, 60 aa, Homo sapiens
  MAP TO AC007129.2; EXPRESSED IN HBL100, SIGNAL = 4.2; EXPRESSED IN LUNG, SIGNAL =   3; EXPRESSED IN BT474, SIGNAL = 5.3; EXPRESSED IN BONE MARROW, SIGNAL = 3.3; EXPRESSED IN FETAL LIVER, SIGNAL =   3; EXPRESSED IN HELA, SIGNAL = 3.2; EXPRESSED IN ADULT LIVER, SIGNAL = 3.6; EXPRESSED IN BRAIN, SIGNAL = 2.8; EXPRESSED IN PLACENTA, SIGNAL = 2.6; EXPRESSED IN HEART, SIGNAL =   3; SWISSPROT HIT: Q12446, EVALUE 3.00e-01; EST_HUMAN HIT: AV694164.1, EVALUE 2.40e-01
SYITTSPGGPQPPQMSEGQSQTPQPALTLTYPHTRKELQESSLHLTPSPFAPFLKTLFGI

SEQ ID NO: 34469 - protein, 19 aa, Homo sapiens
  MAP TO AC007068.17; EXPRESSED IN BONE MARROW, SIGNAL =  24; EXPRESSED IN HBL100, SIGNAL =  94; EXPRESSED IN ADULT LIVER, SIGNAL = 8.6; EXPRESSED IN BRAIN, SIGNAL =  11; EXPRESSED IN PLACENTA, SIGNAL = 8.5; EXPRESSED IN BT474, SIGNAL =  38; EXPRESSED IN LUNG, SIGNAL =  10; EXPRESSED IN HELA, SIGNAL =  42; EXPRESSED IN FETAL LIVER, SIGNAL =  24; EXPRESSED IN HEART, SIGNAL = 9.6
FLVIIIIIIFIIIIISSSS

SEQ ID NO: 34470 - protein, 18 aa, Homo sapiens
  MAP TO AC007068.17; EXPRESSED IN LUNG, SIGNAL = 2.8; EXPRESSED IN HELA, SIGNAL =  11; EXPRESSED IN BRAIN, SIGNAL = 6.5; EXPRESSED IN HEART, SIGNAL = 7.1; EXPRESSED IN BONE MARROW, SIGNAL =   4; EXPRESSED IN PLACENTA, SIGNAL = 2.8; EXPRESSED IN BT474, SIGNAL =  15; EXPRESSED IN ADULT LIVER, SIGNAL = 7.5; EXPRESSED IN FETAL LIVER, SIGNAL = 6.6; EXPRESSED IN HBL100, SIGNAL =  12
SDSDDECYSYEEKKAKIF

SEQ ID NO: 34471 - protein, 50 aa, Homo sapiens
  MAP TO AC007055.3; EXPRESSED IN ADULT LIVER, SIGNAL = 1.2; EXPRESSED IN BONE MARROW, SIGNAL = 1.4; EXPRESSED IN HBL100, SIGNAL = 1.7; EXPRESSED IN LUNG, SIGNAL = 1.1; EXPRESSED IN HELA, SIGNAL = 1.7; EXPRESSED IN PLACENTA, SIGNAL = 1.7; EXPRESSED IN BT474, SIGNAL = 1.9; EXPRESSED IN FETAL LIVER, SIGNAL = 1.3; EXPRESSED IN BRAIN, SIGNAL = 1.3; EXPRESSED IN HEART, SIGNAL = 1.8; EST_HUMAN HIT: R88112.1, EVALUE 1.30e-01
KYKNYPTSEWVNRVLPGEYDTPRRAREVHSLPRTAPQTQTEAYGGRVHSR

SEQ ID NO: 34472 - protein, 50 aa, Homo sapiens
  MAP TO AC007055.3; EXPRESSED IN ADULT LIVER, SIGNAL = 1.2; EXPRESSED IN BONE MARROW, SIGNAL = 1.4; EXPRESSED IN HBL100, SIGNAL = 1.7; EXPRESSED IN LUNG, SIGNAL = 1.1; EXPRESSED IN HELA, SIGNAL = 1.7; EXPRESSED IN PLACENTA, SIGNAL = 1.7; EXPRESSED IN BT474, SIGNAL = 1.9; EXPRESSED IN FETAL LIVER, SIGNAL = 1.3; EXPRESSED IN BRAIN, SIGNAL = 1.3; EXPRESSED IN HEART, SIGNAL = 1.8; EST_HUMAN HIT: AA041301.1, EVALUE 2.60e+00
STRITQPVSGSIGFSLGSMTLPDEQGKYTHSPGRLRRRRPKLMVGGCILG

SEQ ID NO: 34473 - protein, 37 aa, Homo sapiens
  MAP TO AC007055.3; EXPRESSED IN BONE MARROW, SIGNAL = 2.5; EXPRESSED IN HBL100, SIGNAL = 4.9; EXPRESSED IN FETAL LIVER, SIGNAL =   3; EXPRESSED IN LUNG, SIGNAL = 2.7; EXPRESSED IN ADULT LIVER, SIGNAL = 4.6; EXPRESSED IN BRAIN, SIGNAL = 3.4; EXPRESSED IN PLACENTA, SIGNAL = 3.6; EXPRESSED IN BT474, SIGNAL = 5.9; EXPRESSED IN HELA, SIGNAL = 5.8; EXPRESSED IN HEART, SIGNAL = 4.6; EST_HUMAN HIT: BE250097.1, EVALUE 4.00e-15; SWISSPROT HIT: P49755, EVALUE 3.00e-16
ITDSAGHILYSKEDATKGKFAFTTEDYDMFEVCFESK

SEQ ID NO: 34474 - protein, 30 aa, Homo sapiens
  MAP TO AC007055.3; EXPRESSED IN BONE MARROW, SIGNAL = 2.5; EXPRESSED IN HBL100, SIGNAL = 4.9; EXPRESSED IN FETAL LIVER, SIGNAL =   3; EXPRESSED IN LUNG, SIGNAL = 2.7; EXPRESSED IN ADULT LIVER, SIGNAL = 4.6; EXPRESSED IN BRAIN, SIGNAL = 3.4; EXPRESSED IN PLACENTA, SIGNAL = 3.6; EXPRESSED IN BT474, SIGNAL = 5.9; EXPRESSED IN HELA, SIGNAL = 5.8; EXPRESSED IN HEART, SIGNAL = 4.6; EST_HUMAN HIT: BF182944.1, EVALUE 5.00e-10
SQILLAIFSTPKRMQPRGNLPLPLKIMTCL

SEQ ID NO: 34475 - protein, 45 aa, Homo sapiens
  MAP TO AC007024.4; EXPRESSED IN PLACENTA, SIGNAL = 1.5; EXPRESSED IN BT474, SIGNAL = 1.4; EXPRESSED IN BONE MARROW, SIGNAL = 1.7; EXPRESSED IN HBL100, SIGNAL = 1.6; EXPRESSED IN LUNG, SIGNAL = 1.5; EXPRESSED IN ADULT LIVER, SIGNAL = 1.3; EXPRESSED IN BRAIN, SIGNAL = 1.8; EXPRESSED IN FETAL LIVER, SIGNAL = 1.4; EXPRESSED IN HELA, SIGNAL = 1.3; EXPRESSED IN HEART, SIGNAL = 1.4
PVLCFFRVGWRRGGGKSGERKGVEGFCWEMHYHEETHWRPWCVLV

SEQ ID NO: 34476 - protein, 22 aa, Homo sapiens
  MAP TO AC007024.4; EXPRESSED IN PLACENTA, SIGNAL = 1.5; EXPRESSED IN BT474, SIGNAL = 1.4; EXPRESSED IN BONE MARROW, SIGNAL = 1.7; EXPRESSED IN HBL100, SIGNAL = 1.6; EXPRESSED IN LUNG, SIGNAL = 1.5; EXPRESSED IN ADULT LIVER, SIGNAL = 1.3; EXPRESSED IN BRAIN, SIGNAL = 1.8; EXPRESSED IN FETAL LIVER, SIGNAL = 1.4; EXPRESSED IN HELA, SIGNAL = 1.3; EXPRESSED IN HEART, SIGNAL = 1.4
STVLLQSGMEKRRWKEWGEKRC

SEQ ID NO: 34477 - protein, 89 aa, Homo sapiens
  MAP TO AC006999.2; EXPRESSED IN HBL100, SIGNAL = 1.8; EXPRESSED IN BRAIN, SIGNAL = 0.85; EXPRESSED IN BT474, SIGNAL = 2.9; EXPRESSED IN BONE MARROW, SIGNAL = 0.82; EXPRESSED IN FETAL LIVER, SIGNAL = 1.1; EXPRESSED IN LUNG, SIGNAL = 3.2; EXPRESSED IN HELA, SIGNAL = 1.5; EXPRESSED IN ADULT LIVER, SIGNAL = 1.5; EXPRESSED IN PLACENTA, SIGNAL =   6; EXPRESSED IN HEART, SIGNAL = 1.1; SWISSPROT HIT: P98092, EVALUE 1.40e+00; EST_HUMAN HIT: N44936.1, EVALUE 1.60e+00
FVLKSATEMSEGCWPPMEKNETCVPGCQQTPGGFAHGCSSTCVPQTFAIVCTALETWAKWVSLLNNQLSSIYILDIHSISLAKGSTAKN

SEQ ID NO: 34478 - protein, 32 aa, Homo sapiens
  MAP TO AC006999.2; EXPRESSED IN HEART, SIGNAL = 1.4; EXPRESSED IN PLACENTA, SIGNAL = 5.3; EXPRESSED IN BT474, SIGNAL = 3.9; EXPRESSED IN FETAL LIVER, SIGNAL =   2; EXPRESSED IN LUNG, SIGNAL = 3.1; EXPRESSED IN HELA, SIGNAL = 1.8; EXPRESSED IN ADULT LIVER, SIGNAL = 2.1; EXPRESSED IN BRAIN, SIGNAL = 0.82; EXPRESSED IN BONE MARROW, SIGNAL = 3.4; EXPRESSED IN HBL100, SIGNAL = 3.2; EST_HUMAN HIT: BE168410.1, EVALUE 2.00e-10; SWISSPROT HIT: P31792, EVALUE 4.90e-02
DPTDHMSQITWTVLPQGFRDRLHLFGQALAQD

SEQ ID NO: 34479 - protein, 32 aa, Homo sapiens
  MAP TO AC006999.2; EXPRESSED IN HEART, SIGNAL = 1.4; EXPRESSED IN PLACENTA, SIGNAL = 5.3; EXPRESSED IN BT474, SIGNAL = 3.9; EXPRESSED IN FETAL LIVER, SIGNAL =   2; EXPRESSED IN LUNG, SIGNAL = 3.1; EXPRESSED IN HELA, SIGNAL = 1.8; EXPRESSED IN ADULT LIVER, SIGNAL = 2.1; EXPRESSED IN BRAIN, SIGNAL = 0.82; EXPRESSED IN BONE MARROW, SIGNAL = 3.4; EXPRESSED IN HBL100, SIGNAL = 3.2; EST_HUMAN HIT: AV731083.1, EVALUE 1.00e-07
NGSWFWTSRITSSLFPCTLTPNFSLPLRIPQT

SEQ ID NO: 34480 - protein, 49 aa, Homo sapiens
  MAP TO AC006985.2; EXPRESSED IN BT474, SIGNAL = 2.5; EXPRESSED IN HBL100, SIGNAL = 1.7; EXPRESSED IN LUNG, SIGNAL = 1.7; EXPRESSED IN HELA, SIGNAL = 1.5; EXPRESSED IN ADULT LIVER, SIGNAL = 1.3; EXPRESSED IN PLACENTA, SIGNAL = 1.7; EXPRESSED IN BONE MARROW, SIGNAL = 1.5; EXPRESSED IN FETAL LIVER, SIGNAL = 1.4; EXPRESSED IN BRAIN, SIGNAL = 1.1; EXPRESSED IN HEART, SIGNAL = 1.1; EST_HUMAN HIT: BE386510.1, EVALUE 4.40e+00
EFWVRLLCYIMETDYVEALTPICISLTNLAEHQLHGQDVDVSVAGKSRQ

SEQ ID NO: 34481 - protein, 32 aa, Homo sapiens
  MAP TO AC006984.2; EXPRESSED IN BT474, SIGNAL =   1; EXPRESSED IN BRAIN, SIGNAL = 0.82; EXPRESSED IN PLACENTA, SIGNAL = 2.4; EXPRESSED IN HBL100, SIGNAL = 0.7; EXPRESSED IN FETAL LIVER, SIGNAL = 0.79; EXPRESSED IN LUNG, SIGNAL = 1.7; EXPRESSED IN HELA, SIGNAL = 0.77; EXPRESSED IN ADULT LIVER, SIGNAL = 0.68; EXPRESSED IN HEART, SIGNAL = 1.4
QQCGRQELHLQAGFHDGENTWSRPAVICSYHV

SEQ ID NO: 34482 - protein, 34 aa, Homo sapiens
  MAP TO AC006984.2; EXPRESSED IN BONE MARROW, SIGNAL = 4.7; EXPRESSED IN HBL100, SIGNAL = 2.9; EXPRESSED IN FETAL LIVER, SIGNAL =   3; EXPRESSED IN ADULT LIVER, SIGNAL = 1.9; EXPRESSED IN BRAIN, SIGNAL = 3.3; EXPRESSED IN PLACENTA, SIGNAL = 2.9; EXPRESSED IN BT474, SIGNAL = 2.3; EXPRESSED IN LUNG, SIGNAL =   4; EXPRESSED IN HELA, SIGNAL = 2.7; EXPRESSED IN HEART, SIGNAL = 2.6; EST_HUMAN HIT: BE885207.1, EVALUE 1.50e-02
AANDPEDLAKIIKESAYSEEQIFNAEKQPSVGRR

SEQ ID NO: 34483 - protein, 32 aa, Homo sapiens
  MAP TO AC006975.2; EXPRESSED IN FETAL LIVER, SIGNAL = 0.78; EXPRESSED IN LUNG, SIGNAL = 1.4; EXPRESSED IN HELA, SIGNAL = 0.95; EXPRESSED IN ADULT LIVER, SIGNAL = 0.8; EXPRESSED IN BRAIN, SIGNAL = 1.1; EXPRESSED IN HEART, SIGNAL = 0.85; EXPRESSED IN PLACENTA, SIGNAL = 1.5; EXPRESSED IN BT474, SIGNAL = 0.94; EXPRESSED IN BONE MARROW, SIGNAL = 0.78; EXPRESSED IN HBL100, SIGNAL = 0.81; SWISSPROT HIT: Q16348, EVALUE 3.70e+00
TFAYPEYFSKIHVQLGYSDIHKHIKIYNKALP

SEQ ID NO: 34484 - protein, 32 aa, Homo sapiens
  MAP TO AC006975.2; EXPRESSED IN FETAL LIVER, SIGNAL = 0.78; EXPRESSED IN LUNG, SIGNAL = 1.4; EXPRESSED IN HELA, SIGNAL = 0.95; EXPRESSED IN ADULT LIVER, SIGNAL = 0.8; EXPRESSED IN BRAIN, SIGNAL = 1.1; EXPRESSED IN HEART, SIGNAL = 0.85; EXPRESSED IN PLACENTA, SIGNAL = 1.5; EXPRESSED IN BT474, SIGNAL = 0.94; EXPRESSED IN BONE MARROW, SIGNAL = 0.78; EXPRESSED IN HBL100, SIGNAL = 0.81
PLHTQNILVKFMYSLVIQIFTNILKYTIRLCL

SEQ ID NO: 34485 - protein, 73 aa, Homo sapiens
  MAP TO AC006548.19; EXPRESSED IN PLACENTA, SIGNAL = 5.2; EXPRESSED IN BT474, SIGNAL = 5.8; EXPRESSED IN BONE MARROW, SIGNAL =  17; EXPRESSED IN ADULT LIVER, SIGNAL = 5.7; EXPRESSED IN HELA, SIGNAL = 4.5; EXPRESSED IN LUNG, SIGNAL =  12; EXPRESSED IN FETAL LIVER, SIGNAL = 4.6; EXPRESSED IN HEART, SIGNAL = 3.4; EXPRESSED IN BRAIN, SIGNAL = 4.3; EXPRESSED IN HBL100, SIGNAL =   4; EST_HUMAN HIT: AW407873.1, EVALUE 3.00e-29; SWISSPROT HIT: P01614, EVALUE 8.00e-30
SSGDIVMTQTPLSLPVTPGEPASISCRSSESLLDTDDEYTYLNWYLQKPGQSPQLLIYEVSNRASGVPDRFSG

SEQ ID NO: 34486 - protein, 62 aa, Homo sapiens
  MAP TO AC006548.19; EXPRESSED IN PLACENTA, SIGNAL = 4.4; EXPRESSED IN BT474, SIGNAL = 4.1; EXPRESSED IN BONE MARROW, SIGNAL = 2.9; EXPRESSED IN LUNG, SIGNAL = 3.7; EXPRESSED IN HELA, SIGNAL = 3.3; EXPRESSED IN BRAIN, SIGNAL = 3.4; EXPRESSED IN HBL100, SIGNAL = 3.6; EXPRESSED IN FETAL LIVER, SIGNAL = 3.5; EXPRESSED IN ADULT LIVER, SIGNAL = 1.7; EXPRESSED IN HEART, SIGNAL = 4.1; EST_HUMAN HIT: AW612347.1, EVALUE 3.00e-20; SWISSPROT HIT: O41033, EVALUE 2.00e-04
DKNGVTVLAAVIDPDYQDEVSPLLHNGSEEEYAWNTGDPLGRLLGLSCTLIKVNGKLQQPNP

SEQ ID NO: 34487 - protein, 103 aa, Homo sapiens
  MAP TO AC006548.19; EXPRESSED IN FETAL LIVER, SIGNAL =   2; EXPRESSED IN BT474, SIGNAL = 1.8; EXPRESSED IN BONE MARROW, SIGNAL = 1.8; EXPRESSED IN HBL100, SIGNAL = 1.7; EXPRESSED IN HELA, SIGNAL = 1.7; EXPRESSED IN ADULT LIVER, SIGNAL = 1.7; EXPRESSED IN BRAIN, SIGNAL =   2; EXPRESSED IN HEART, SIGNAL = 1.9; EXPRESSED IN PLACENTA, SIGNAL =   2; EXPRESSED IN LUNG, SIGNAL = 3.3; SWISSPROT HIT: P41064, EVALUE 1.30e+00; EST_HUMAN HIT: AU140898.1, EVALUE 9.00e-26
SASFSQGSEAPFIMRRNTAMQNLAQHSGYSVDGVSGHIHGFHSLSKPSQHNAEFRGSTHRIPWSLASHGHTRGSLTGSEADNEGVYPFKAPRSTLFQEFGGHL

SEQ ID NO: 34488 - protein, 43 aa, Homo sapiens
  MAP TO AC006499.11; EXPRESSED IN BT474, SIGNAL = 2.1; EXPRESSED IN PLACENTA, SIGNAL = 2.4; EXPRESSED IN HBL100, SIGNAL = 1.6; EXPRESSED IN FETAL LIVER, SIGNAL =   2; EXPRESSED IN HELA, SIGNAL = 2.2; EXPRESSED IN ADULT LIVER, SIGNAL = 1.8; EXPRESSED IN BRAIN, SIGNAL = 2.5; EXPRESSED IN HEART, SIGNAL = 1.9; EXPRESSED IN BONE MARROW, SIGNAL = 2.2; EXPRESSED IN LUNG, SIGNAL = 2.6
QCLLFFLGHNDLERSTFLFVNKMFISAFTQGFETFGCASSPEV

SEQ ID NO: 34489 - protein, 20 aa, Homo sapiens
  MAP TO AC006499.11; EXPRESSED IN HBL100, SIGNAL = 2.1; EXPRESSED IN LUNG, SIGNAL = 1.8; EXPRESSED IN ADULT LIVER, SIGNAL = 2.4; EXPRESSED IN BRAIN, SIGNAL = 1.7; EXPRESSED IN HEART, SIGNAL = 1.4; EXPRESSED IN BT474, SIGNAL = 2.7; EXPRESSED IN PLACENTA, SIGNAL = 1.6; EXPRESSED IN HELA, SIGNAL = 1.8; EXPRESSED IN FETAL LIVER, SIGNAL = 2.1; EXPRESSED IN BONE MARROW, SIGNAL = 1.2; EST_HUMAN HIT: AI557328.1, EVALUE 6.60e-01
SRHGCSPWVPPKVSSSASGS

SEQ ID NO: 34490 - protein, 146 aa, Homo sapiens
  MAP TO AC006474.3; EXPRESSED IN FETAL LIVER, SIGNAL = 2.1; EXPRESSED IN LUNG, SIGNAL = 1.8; EXPRESSED IN ADULT LIVER, SIGNAL = 0.98; EXPRESSED IN HEART, SIGNAL = 1.1; EXPRESSED IN BT474, SIGNAL = 3.2; EXPRESSED IN BONE MARROW, SIGNAL = 1.2; EXPRESSED IN PLACENTA, SIGNAL = 2.9; EXPRESSED IN BRAIN, SIGNAL = 1.5; EXPRESSED IN HELA, SIGNAL = 1.4; EXPRESSED IN HBL100, SIGNAL = 0.89; EST_HUMAN HIT: AW884708.1, EVALUE 2.00e-30
QMRQKSKQQAKIEATQKLEQVKNEQQQQQQQQFGSQHLLVQSGSDTPSSGIQSPLTPQPGNGNMSPAQSFHKELFTKQPPSTPTSTSSDDVFVKPQAPPPPPAPSRIPIQDSLSQAQTSQPPSPQVFSPGSSNSRPPSPMDPYAKM

SEQ ID NO: 34491 - protein, 20 aa, Homo sapiens
  MAP TO AC006474.3; EXPRESSED IN FETAL LIVER, SIGNAL = 2.1; EXPRESSED IN LUNG, SIGNAL = 1.8; EXPRESSED IN ADULT LIVER, SIGNAL = 0.98; EXPRESSED IN HEART, SIGNAL = 1.1; EXPRESSED IN BT474, SIGNAL = 3.2; EXPRESSED IN BONE MARROW, SIGNAL = 1.2; EXPRESSED IN PLACENTA, SIGNAL = 2.9; EXPRESSED IN BRAIN, SIGNAL = 1.5; EXPRESSED IN HELA, SIGNAL = 1.4; EXPRESSED IN HBL100, SIGNAL = 0.89; EST_HUMAN HIT: AW845270.1, EVALUE 2.00e-04
KCVRKVSSKLKLKPHRNLNR

SEQ ID NO: 34492 - protein, 283 aa, Homo sapiens
  MAP TO AC006474.3; EXPRESSED IN BT474, SIGNAL = 5.2; EXPRESSED IN BONE MARROW, SIGNAL = 1.6; EXPRESSED IN FETAL LIVER, SIGNAL = 2.5; EXPRESSED IN HELA, SIGNAL =   1; EXPRESSED IN PLACENTA, SIGNAL = 3.3; EXPRESSED IN HBL100, SIGNAL = 1.6; EXPRESSED IN LUNG, SIGNAL = 2.2; EXPRESSED IN ADULT LIVER, SIGNAL = 1.4; EXPRESSED IN BRAIN, SIGNAL = 1.8; EXPRESSED IN HEART, SIGNAL = 1.3; SWISSPROT HIT: P08640, EVALUE 2.00e-06; EST_HUMAN HIT: BE255205.1, EVALUE 1.00e-105
PHPAVNESFAHPSRAFSQPGTISRPTSQDPYSQPPGTPRPVVDSYSQSSGTARSNTDPYSQPPGTPRPTTVDPYSQQPQTPRPSTQTDLFVTPVTNQRHSDPYAHPPGTPRPGISVPYSQPPATPRPRISEGFTRSSMTRPVLMPNQDPFLQAAQNRGPALPGPLVRPPDTCSQTPRPPGPGLSDTFSRVSPSAARDPYDQSPMTPRSQSDSFGTSQTAHDVADQPRPGSEGSFCASSNSPMHSQGQQFSGVSQLPGPVPTSGVTDTQNTVNMAQADTEKLRQ

SEQ ID NO: 34493 - protein, 154 aa, Homo sapiens
  MAP TO AC006474.3; EXPRESSED IN PLACENTA, SIGNAL = 2.5; EXPRESSED IN ADULT LIVER, SIGNAL = 0.86; EXPRESSED IN BONE MARROW, SIGNAL = 1.7; EXPRESSED IN HBL100, SIGNAL = 1.1; EXPRESSED IN FETAL LIVER, SIGNAL =   2; EXPRESSED IN LUNG, SIGNAL = 1.2; EXPRESSED IN HELA, SIGNAL = 1.6; EXPRESSED IN BRAIN, SIGNAL = 1.5; EXPRESSED IN BT474, SIGNAL = 4.2; EXPRESSED IN HEART, SIGNAL = 0.95; EST_HUMAN HIT: AA135076.1, EVALUE 3.00e-25; SWISSPROT HIT: P05142, EVALUE 9.00e-03
FGFPGGSHGTMPSQERFLVPPQQIQGSGVSPQLRRSVSVDMPRPLNNSQMNNPVGLPQHFSPQSLPVQQHNILGQAYIELRHRAPDGRQRLPFSAPPGSVVEASSNLRHGNFIPRPDFPGPRHTDPMRRPPQGLPNQLPVHPDLEQVPPSQQEQ

SEQ ID NO: 34494 - protein, 48 aa, Homo sapiens
  MAP TO AC006459.2; EXPRESSED IN PLACENTA, SIGNAL = 0.95; EXPRESSED IN BT474, SIGNAL = 1.6; EXPRESSED IN LUNG, SIGNAL = 1.1; EXPRESSED IN HELA, SIGNAL = 2.7; EXPRESSED IN ADULT LIVER, SIGNAL = 0.86; EXPRESSED IN HEART, SIGNAL =   1; EXPRESSED IN BONE MARROW, SIGNAL = 1.1; EXPRESSED IN HBL100, SIGNAL = 2.6; EXPRESSED IN FETAL LIVER, SIGNAL = 1.3; EXPRESSED IN BRAIN, SIGNAL = 0.99; SWISSPROT HIT: P54676, EVALUE 1.20e+00
NKWQCFLCQEDQISLGGCTIRHYPLYEQLCQLVYSCNMKARFTPLFEA

SEQ ID NO: 34495 - protein, 32 aa, Homo sapiens
  MAP TO AC006459.2; EXPRESSED IN PLACENTA, SIGNAL = 0.95; EXPRESSED IN BT474, SIGNAL = 1.6; EXPRESSED IN LUNG, SIGNAL = 1.1; EXPRESSED IN HELA, SIGNAL = 2.7; EXPRESSED IN ADULT LIVER, SIGNAL = 0.86; EXPRESSED IN HEART, SIGNAL =   1; EXPRESSED IN BONE MARROW, SIGNAL = 1.1; EXPRESSED IN HBL100, SIGNAL = 2.6; EXPRESSED IN FETAL LIVER, SIGNAL = 1.3; EXPRESSED IN BRAIN, SIGNAL = 0.99
QTSGNVFYAKKIKLVLVAVLLDITLCMNNYAN

SEQ ID NO: 34496 - protein, 167 aa, Homo sapiens
  MAP TO AC006459.2; EXPRESSED IN HEART, SIGNAL = 2.5; EXPRESSED IN ADULT LIVER, SIGNAL = 3.1; EXPRESSED IN BRAIN, SIGNAL =   2; EXPRESSED IN PLACENTA, SIGNAL = 4.5; EXPRESSED IN BT474, SIGNAL = 6.9; EXPRESSED IN BONE MARROW, SIGNAL = 5.6; EXPRESSED IN HBL100, SIGNAL =  17; EXPRESSED IN FETAL LIVER, SIGNAL = 6.3; EXPRESSED IN HELA, SIGNAL =  11; EXPRESSED IN LUNG, SIGNAL = 4.5; EST_HUMAN HIT: AW562328.1, EVALUE 4.00e-59; SWISSPROT HIT: P08548, EVALUE 1.00e-51
IMVKGLVPQENITILNTYASNTEAPKFIKQLLIDLRNEIDSNIVIVGNFNTPVTAIDRSSKPKVNKETMDLNYTLEQMDLTDIYRTFHPTTAEYTFYSTVHETISKIDHMIGHKMSINTFKKIEIMSSTLTDHSGIKLKINSERNLQNHANTWKLNNLFLSEHWVKN

SEQ ID NO: 34497 - protein, 80 aa, Homo sapiens
  MAP TO AC006459.2; EXPRESSED IN LUNG, SIGNAL = 2.7; EXPRESSED IN ADULT LIVER, SIGNAL = 1.7; EXPRESSED IN BONE MARROW, SIGNAL = 2.8; EXPRESSED IN HELA, SIGNAL = 2.7; EXPRESSED IN BRAIN, SIGNAL = 2.4; EXPRESSED IN HEART, SIGNAL = 1.5; EXPRESSED IN PLACENTA, SIGNAL = 2.7; EXPRESSED IN BT474, SIGNAL = 2.8; EXPRESSED IN HBL100, SIGNAL = 2.9; EXPRESSED IN FETAL LIVER, SIGNAL = 2.3; EST_HUMAN HIT: AA504795.1, EVALUE 6.00e-21; SWISSPROT HIT: P31696, EVALUE 1.80e+00
IQGSRNQGVEVEVAPLTIIPSDPLAKLLLPVPVTLHSAAPEVLVSEGGVLPPGDTTTIKLNWKLSLPPGHFGLLLPLSQQ

SEQ ID NO: 34498 - protein, 41 aa, Homo sapiens
  MAP TO AC006455.2; EXPRESSED IN ADULT LIVER, SIGNAL = 4.5; EXPRESSED IN LUNG, SIGNAL = 7.4; EXPRESSED IN HELA, SIGNAL = 7.9; EXPRESSED IN HEART, SIGNAL = 5.2; EXPRESSED IN PLACENTA, SIGNAL = 4.3; EXPRESSED IN BT474, SIGNAL =   5; EXPRESSED IN BONE MARROW, SIGNAL = 6.7; EXPRESSED IN FETAL LIVER, SIGNAL = 5.8; EXPRESSED IN BRAIN, SIGNAL = 7.7; EXPRESSED IN HBL100, SIGNAL = 5.7; EST_HUMAN HIT: AU117621.1, EVALUE 6.00e-16; SWISSPROT HIT: O55131, EVALUE 5.00e-17
THMQDLKDVTNNVHCENYGSRKLAAVTYNGVDNNKNKGQLT

SEQ ID NO: 34499 - protein, 28 aa, Homo sapiens
  MAP TO AC006454.3; EXPRESSED IN ADULT LIVER, SIGNAL =  12; EXPRESSED IN HEART, SIGNAL =  10; EXPRESSED IN PLACENTA, SIGNAL =  16; EXPRESSED IN BT474, SIGNAL = 8.3; EXPRESSED IN BONE MARROW, SIGNAL =  15; EXPRESSED IN FETAL LIVER, SIGNAL =  21; EXPRESSED IN LUNG, SIGNAL =  11; EXPRESSED IN HELA, SIGNAL =  12; EXPRESSED IN HBL100, SIGNAL =  12; EXPRESSED IN BRAIN, SIGNAL =  15; EST_HUMAN HIT: AW838943.1, EVALUE 4.00e-10
VYSYYAQNEVVATDDLDFRHHSYKDMRQ

SEQ ID NO: 34500 - protein, 27 aa, Homo sapiens
  MAP TO AC006454.3; EXPRESSED IN ADULT LIVER, SIGNAL =  12; EXPRESSED IN HEART, SIGNAL =  10; EXPRESSED IN PLACENTA, SIGNAL =  16; EXPRESSED IN BT474, SIGNAL = 8.3; EXPRESSED IN BONE MARROW, SIGNAL =  15; EXPRESSED IN FETAL LIVER, SIGNAL =  21; EXPRESSED IN LUNG, SIGNAL =  11; EXPRESSED IN HELA, SIGNAL =  12; EXPRESSED IN HBL100, SIGNAL =  12; EXPRESSED IN BRAIN, SIGNAL =  15; EST_HUMAN HIT: BE243977.1, EVALUE 7.00e-11
LSTATTHRMRWWPPMTWISGTTATRTC

SEQ ID NO: 34501 - protein, 27 aa, Homo sapiens
  MAP TO AC006454.3; EXPRESSED IN HEART, SIGNAL = 1.8; EXPRESSED IN BT474, SIGNAL = 1.6; EXPRESSED IN BONE MARROW, SIGNAL = 2.3; EXPRESSED IN HELA, SIGNAL = 1.8; EXPRESSED IN ADULT LIVER, SIGNAL = 1.8; EXPRESSED IN PLACENTA, SIGNAL = 2.9; EXPRESSED IN HBL100, SIGNAL = 1.5; EXPRESSED IN FETAL LIVER, SIGNAL = 1.7; EXPRESSED IN LUNG, SIGNAL =   2; EXPRESSED IN BRAIN, SIGNAL = 2.1; EST_HUMAN HIT: BE799829.1, EVALUE 4.10e-01
PPPAAGTLPGSALPAQGGGWEQSGWGG

SEQ ID NO: 34502 - protein, 57 aa, Homo sapiens
  MAP TO AC006449.13; EXPRESSED IN BT474, SIGNAL = 9.8; EXPRESSED IN HELA, SIGNAL = 8.2; EXPRESSED IN ADULT LIVER, SIGNAL = 5.9; EXPRESSED IN BRAIN, SIGNAL = 7.6; EXPRESSED IN HEART, SIGNAL = 6.4; EXPRESSED IN PLACENTA, SIGNAL = 7.2; EXPRESSED IN BONE MARROW, SIGNAL = 8.9; EXPRESSED IN HBL100, SIGNAL = 8.2; EXPRESSED IN FETAL LIVER, SIGNAL = 6.4; EXPRESSED IN LUNG, SIGNAL = 8.6; SWISSPROT HIT: P53854, EVALUE 4.50e-02; EST_HUMAN HIT: BF686724.1, EVALUE 3.00e-09
NLKKSWHPQTLRNVEKVWKAEQKHEAERKKIEELQRELREERAREEMQRYAEDVGAV

SEQ ID NO: 34503 - protein, 36 aa, Homo sapiens
  MAP TO AC006449.13; EXPRESSED IN BT474, SIGNAL = 9.8; EXPRESSED IN HELA, SIGNAL = 8.2; EXPRESSED IN ADULT LIVER, SIGNAL = 5.9; EXPRESSED IN BRAIN, SIGNAL = 7.6; EXPRESSED IN HEART, SIGNAL = 6.4; EXPRESSED IN PLACENTA, SIGNAL = 7.2; EXPRESSED IN BONE MARROW, SIGNAL = 8.9; EXPRESSED IN HBL100, SIGNAL = 8.2; EXPRESSED IN FETAL LIVER, SIGNAL = 6.4; EXPRESSED IN LUNG, SIGNAL = 8.6; EST_HUMAN HIT: BF678573.1, EVALUE 3.00e-03
PRIIITFFLFTTESEEELAPADPQECGESVEGRAEA

SEQ ID NO: 34504 - protein, 73 aa, Homo sapiens
  MAP TO AC006449.13; EXPRESSED IN PLACENTA, SIGNAL = 3.8; EXPRESSED IN ADULT LIVER, SIGNAL = 4.3; EXPRESSED IN BRAIN, SIGNAL = 5.6; EXPRESSED IN HEART, SIGNAL = 3.4; EXPRESSED IN BT474, SIGNAL =  12; EXPRESSED IN BONE MARROW, SIGNAL = 5.2; EXPRESSED IN HBL100, SIGNAL = 4.2; EXPRESSED IN FETAL LIVER, SIGNAL = 4.2; EXPRESSED IN LUNG, SIGNAL = 4.8; EXPRESSED IN HELA, SIGNAL = 4.9; EST_HUMAN HIT: AA864649.1, EVALUE 9.00e-26; SWISSPROT HIT: P53807, EVALUE 9.00e-11
FLAQLKIMDYSLLVGIHDVDRAEQEEMEVEERAEDEECENDGVGGNLLCSYGTPPDSPGNLLSFPRFFGPGEF

SEQ ID NO: 34505 - protein, 46 aa, Homo sapiens
  MAP TO AC006449.13; EXPRESSED IN PLACENTA, SIGNAL = 3.8; EXPRESSED IN ADULT LIVER, SIGNAL = 4.3; EXPRESSED IN BRAIN, SIGNAL = 5.6; EXPRESSED IN HEART, SIGNAL = 3.4; EXPRESSED IN BT474, SIGNAL =  12; EXPRESSED IN BONE MARROW, SIGNAL = 5.2; EXPRESSED IN HBL100, SIGNAL = 4.2; EXPRESSED IN FETAL LIVER, SIGNAL = 4.2; EXPRESSED IN LUNG, SIGNAL = 4.8; EXPRESSED IN HELA, SIGNAL = 4.9
IFPSLPFLVLGTAEDHGLQPAGGHPRRGPGRAGGDGGGGAGRGRGV

SEQ ID NO: 34506 - protein, 65 aa, Homo sapiens
  MAP TO AC006449.13; EXPRESSED IN FETAL LIVER, SIGNAL =  11; EXPRESSED IN LUNG, SIGNAL =  14; EXPRESSED IN HELA, SIGNAL =  12; EXPRESSED IN ADULT LIVER, SIGNAL = 8.6; EXPRESSED IN BRAIN, SIGNAL =  12; EXPRESSED IN HEART, SIGNAL =   9; EXPRESSED IN PLACENTA, SIGNAL =  12; EXPRESSED IN BT474, SIGNAL =  10; EXPRESSED IN BONE MARROW, SIGNAL =  16; EXPRESSED IN HBL100, SIGNAL =  10; EST_HUMAN HIT: BE146301.1, EVALUE 3.70e+00
ILVDGAVVMGMERARTGRGYSFVQVTCPLQPSSLWSPERTLEAELLLLLEDLCYNLPWVDQGRTK

SEQ ID NO: 34507 - protein, 51 aa, Homo sapiens
  MAP TO AC006365.3; EXPRESSED IN PLACENTA, SIGNAL = 8.8; EXPRESSED IN FETAL LIVER, SIGNAL =  11; EXPRESSED IN LUNG, SIGNAL =  11; EXPRESSED IN ADULT LIVER, SIGNAL = 8.8; EXPRESSED IN BRAIN, SIGNAL =  12; EXPRESSED IN BT474, SIGNAL = 9.3; EXPRESSED IN HEART, SIGNAL = 9.3; EXPRESSED IN HELA, SIGNAL =  11; EXPRESSED IN HBL100, SIGNAL = 9.5; EXPRESSED IN BONE MARROW, SIGNAL =  10
METDSSSLFLFYLFLSLRGSRSFSVVFIHQNYYSVGVFLIKGLRFLKFEGE

SEQ ID NO: 34508 - protein, 17 aa, Homo sapiens
  MAP TO AC006365.3; EXPRESSED IN PLACENTA, SIGNAL = 8.8; EXPRESSED IN FETAL LIVER, SIGNAL =  11; EXPRESSED IN LUNG, SIGNAL =  11; EXPRESSED IN ADULT LIVER, SIGNAL = 8.8; EXPRESSED IN BRAIN, SIGNAL =  12; EXPRESSED IN BT474, SIGNAL = 9.3; EXPRESSED IN HEART, SIGNAL = 9.3; EXPRESSED IN HELA, SIGNAL =  11; EXPRESSED IN HBL100, SIGNAL = 9.5; EXPRESSED IN BONE MARROW, SIGNAL =  10
YGNGFIFTLPVLPFSKS

SEQ ID NO: 34509 - protein, 77 aa, Homo sapiens
  MAP TO AC006365.3; EXPRESSED IN FETAL LIVER, SIGNAL = 9.5; EXPRESSED IN HEART, SIGNAL = 8.4; EXPRESSED IN PLACENTA, SIGNAL = 5.8; EXPRESSED IN BT474, SIGNAL =  10; EXPRESSED IN BONE MARROW, SIGNAL =   6; EXPRESSED IN BRAIN, SIGNAL = 9.1; EXPRESSED IN ADULT LIVER, SIGNAL = 7.3; EXPRESSED IN HELA, SIGNAL =  19; EXPRESSED IN LUNG, SIGNAL = 9.5; EXPRESSED IN HBL100, SIGNAL = 7.3; SWISSPROT HIT: O60813, EVALUE 9.30e+00; EST_HUMAN HIT: AI239729.1, EVALUE 1.00e-31
KGYTHQQFCHESTPNKGDKVIYNLTRPLYCCVQFPMAGTGPHILYLSRLASNLELFKRGKGRGEQSKEEVTCGMLRK

SEQ ID NO: 34510 - protein, 21 aa, Homo sapiens
  MAP TO AC006365.3; EXPRESSED IN FETAL LIVER, SIGNAL = 9.5; EXPRESSED IN HEART, SIGNAL = 8.4; EXPRESSED IN PLACENTA, SIGNAL = 5.8; EXPRESSED IN BT474, SIGNAL =  10; EXPRESSED IN BONE MARROW, SIGNAL =   6; EXPRESSED IN BRAIN, SIGNAL = 9.1; EXPRESSED IN ADULT LIVER, SIGNAL = 7.3; EXPRESSED IN HELA, SIGNAL =  19; EXPRESSED IN LUNG, SIGNAL = 9.5; EXPRESSED IN HBL100, SIGNAL = 7.3; EST_HUMAN HIT: AI700592.1, EVALUE 8.00e-04
RVHSPAVLPREYAEQRRQGHL

SEQ ID NO: 34511 - protein, 28 aa, Homo sapiens
  MAP TO AC006344.2; EXPRESSED IN LUNG, SIGNAL =  16; EXPRESSED IN HELA, SIGNAL =  12; EXPRESSED IN BRAIN, SIGNAL =  16; EXPRESSED IN HEART, SIGNAL =  13; EXPRESSED IN BONE MARROW, SIGNAL =  13; EXPRESSED IN PLACENTA, SIGNAL =  12; EXPRESSED IN BT474, SIGNAL =  10; EXPRESSED IN ADULT LIVER, SIGNAL =  13; EXPRESSED IN FETAL LIVER, SIGNAL =  11; EXPRESSED IN HBL100, SIGNAL =  12
PRCSRASSSADSCGSGFSGAFGMTQKRC

SEQ ID NO: 34512 - protein, 29 aa, Homo sapiens
  MAP TO AC006344.2; EXPRESSED IN LUNG, SIGNAL =  16; EXPRESSED IN HELA, SIGNAL =  12; EXPRESSED IN BRAIN, SIGNAL =  16; EXPRESSED IN HEART, SIGNAL =  13; EXPRESSED IN BONE MARROW, SIGNAL =  13; EXPRESSED IN PLACENTA, SIGNAL =  12; EXPRESSED IN BT474, SIGNAL =  10; EXPRESSED IN ADULT LIVER, SIGNAL =  13; EXPRESSED IN FETAL LIVER, SIGNAL =  11; EXPRESSED IN HBL100, SIGNAL =  12; SWISSPROT HIT: O95178, EVALUE 5.00e-13; EST_HUMAN HIT: AV745411.1, EVALUE 7.00e-12
SQVFQSEFFSGLMWFWILWRFWHDSEEVL

SEQ ID NO: 34513 - protein, 63 aa, Homo sapiens
  MAP TO AC006344.2; EXPRESSED IN BT474, SIGNAL = 6.9; EXPRESSED IN BRAIN, SIGNAL =  10; EXPRESSED IN PLACENTA, SIGNAL = 7.1; EXPRESSED IN BONE MARROW, SIGNAL =  17; EXPRESSED IN HBL100, SIGNAL = 8.8; EXPRESSED IN FETAL LIVER, SIGNAL =  11; EXPRESSED IN LUNG, SIGNAL =  12; EXPRESSED IN HELA, SIGNAL = 7.5; EXPRESSED IN ADULT LIVER, SIGNAL = 6.9; EXPRESSED IN HEART, SIGNAL = 7.3; SWISSPROT HIT: Q02981, EVALUE 1.50e+00; EST_HUMAN HIT: BE877541.1, EVALUE 5.00e-22
VHADLHPGNILVQGANGLSSSQEAQLQQADICDTLVVAVPSSLCPLRLVLLDAGIVAELQAPD

SEQ ID NO: 34514 - protein, 61 aa, Homo sapiens
  MAP TO AC006328.3; EXPRESSED IN HELA, SIGNAL = 2.1; EXPRESSED IN ADULT LIVER, SIGNAL = 1.4; EXPRESSED IN BRAIN, SIGNAL = 1.4; EXPRESSED IN HEART, SIGNAL = 1.2; EXPRESSED IN PLACENTA, SIGNAL = 1.4; EXPRESSED IN HBL100, SIGNAL = 2.8; EXPRESSED IN FETAL LIVER, SIGNAL = 1.6; EXPRESSED IN LUNG, SIGNAL = 2.3; EXPRESSED IN BT474, SIGNAL =   3; EXPRESSED IN BONE MARROW, SIGNAL = 1.3; EST_HUMAN HIT: AI929065.1, EVALUE 3.00e-18
HFSTPLEPVPRRSKACAASPWLTQWPHPRKSQRQRPQPQRLGVNLCVGTPTGPCRRPWRSC

SEQ ID NO: 34515 - protein, 23 aa, Homo sapiens
  MAP TO AC006328.3; EXPRESSED IN PLACENTA, SIGNAL = 2.7; EXPRESSED IN BT474, SIGNAL = 9.6; EXPRESSED IN BONE MARROW, SIGNAL = 7.1; EXPRESSED IN HBL100, SIGNAL = 5.1; EXPRESSED IN LUNG, SIGNAL = 9.3; EXPRESSED IN FETAL LIVER, SIGNAL = 6.6; EXPRESSED IN HELA, SIGNAL =   9; EXPRESSED IN ADULT LIVER, SIGNAL = 4.8; EXPRESSED IN BRAIN, SIGNAL = 6.3; EXPRESSED IN HEART, SIGNAL = 3.6; EST_HUMAN HIT: AI918098.1, EVALUE 4.00e-07; SWISSPROT HIT: Q01593, EVALUE 6.50e+00
NPWPQSPQQGPLRWSSYKMRPTT

SEQ ID NO: 34516 - protein, 117 aa, Homo sapiens
  MAP TO AC006328.3; EXPRESSED IN PLACENTA, SIGNAL = 4.9; EXPRESSED IN LUNG, SIGNAL = 5.5; EXPRESSED IN HBL100, SIGNAL = 4.9; EXPRESSED IN FETAL LIVER, SIGNAL = 6.9; EXPRESSED IN HELA, SIGNAL = 5.4; EXPRESSED IN BRAIN, SIGNAL = 9.1; EXPRESSED IN BT474, SIGNAL = 8.4; EXPRESSED IN BONE MARROW, SIGNAL = 6.2; EXPRESSED IN ADULT LIVER, SIGNAL = 4.5; EXPRESSED IN HEART, SIGNAL = 3.6; SWISSPROT HIT: O73673, EVALUE 5.40e+00; EST_HUMAN HIT: BE155728.1, EVALUE 6.00e-17
MHTPSFPRFVCRTSCPCCPSSFSWHLPQSSLWDPCSSSQRPCSHHQHLFHLQLKIHEVPRRSCSHQSHGAAHKAEAPPTGPPPNWHHCCPCPYSQPHVTLRQRQWWGSQGSVKSLSQ

SEQ ID NO: 34517 - protein, 58 aa, Homo sapiens
  MAP TO AC006328.3; EXPRESSED IN HELA, SIGNAL = 1.6; EXPRESSED IN ADULT LIVER, SIGNAL =   1; EXPRESSED IN BRAIN, SIGNAL = 1.7; EXPRESSED IN BT474, SIGNAL = 1.1; EXPRESSED IN HBL100, SIGNAL = 2.5; EXPRESSED IN HEART, SIGNAL = 1.3; EXPRESSED IN PLACENTA, SIGNAL = 1.7; EXPRESSED IN BONE MARROW, SIGNAL = 0.98; EXPRESSED IN FETAL LIVER, SIGNAL = 1.3; EXPRESSED IN LUNG, SIGNAL = 1.7; SWISSPROT HIT: Q00657, EVALUE 8.00e-12; EST_HUMAN HIT: BF530254.1, EVALUE 8.00e-09
LQFREVQKQGAGGVEGAEWWATQSFHQQDVEQGHMRYLSTNPQHYAEDTVKNLDLQVQ

SEQ ID NO: 34518 - protein, 42 aa, Homo sapiens
  MAP TO AC006269.8; EXPRESSED IN HBL100, SIGNAL = 1.8; EXPRESSED IN BRAIN, SIGNAL =   3; EXPRESSED IN BT474, SIGNAL = 1.3; EXPRESSED IN BONE MARROW, SIGNAL =   2; EXPRESSED IN FETAL LIVER, SIGNAL = 1.9; EXPRESSED IN HELA, SIGNAL = 3.8; EXPRESSED IN ADULT LIVER, SIGNAL =   2; EXPRESSED IN PLACENTA, SIGNAL = 1.9; EXPRESSED IN LUNG, SIGNAL = 1.9; EXPRESSED IN HEART, SIGNAL = 1.7; SWISSPROT HIT: P33450, EVALUE 9.20e-01
MEFYLEIDPVTLNLIILVASYVILLLVFLISCVLYDCRGKDP

SEQ ID NO: 34519 - protein, 57 aa, Homo sapiens
  MAP TO AC006235.11; EXPRESSED IN HELA, SIGNAL = 5.5; EXPRESSED IN BRAIN, SIGNAL =   7; EXPRESSED IN HEART, SIGNAL = 7.1; EXPRESSED IN PLACENTA, SIGNAL = 7.7; EXPRESSED IN BONE MARROW, SIGNAL = 6.2; EXPRESSED IN BT474, SIGNAL = 5.6; EXPRESSED IN ADULT LIVER, SIGNAL =   5; EXPRESSED IN LUNG, SIGNAL = 7.3; EXPRESSED IN FETAL LIVER, SIGNAL = 6.5; EXPRESSED IN HBL100, SIGNAL = 6.2; EST_HUMAN HIT: BE391229.1, EVALUE 1.10e+00
  unsure 28
  unsure 32
WRQRSHMYKAVHTQGLARRGYSDTPESXGSAXREHEDAAARPQSWAAPVRSLALPLP

SEQ ID NO: 34520 - protein, 80 aa, Homo sapiens
  MAP TO AC006235.11; EXPRESSED IN BT474, SIGNAL =  11; EXPRESSED IN HBL100, SIGNAL =  14; EXPRESSED IN PLACENTA, SIGNAL =  10; EXPRESSED IN HEART, SIGNAL = 9.4; EXPRESSED IN BRAIN, SIGNAL =  14; EXPRESSED IN ADULT LIVER, SIGNAL = 9.9; EXPRESSED IN HELA, SIGNAL =  11; EXPRESSED IN LUNG, SIGNAL =  12; EXPRESSED IN FETAL LIVER, SIGNAL =  11; EXPRESSED IN BONE MARROW, SIGNAL =  11
  unsure 62
  unsure 64
SLAMRYIIVIIIIIIITNTTITITSITIITITTAINSIITTTTIIDITTITRTITTIIIITXHXPLSAPSPPPPSQPASL

SEQ ID NO: 34521 - protein, 35 aa, Homo sapiens
  MAP TO AC006229.14; EXPRESSED IN BONE MARROW, SIGNAL = 1.4; EXPRESSED IN HBL100, SIGNAL = 1.3; EXPRESSED IN ADULT LIVER, SIGNAL = 1.4; EXPRESSED IN BRAIN, SIGNAL = 1.8; EXPRESSED IN PLACENTA, SIGNAL = 1.2; EXPRESSED IN BT474, SIGNAL = 1.2; EXPRESSED IN FETAL LIVER, SIGNAL = 1.4; EXPRESSED IN LUNG, SIGNAL = 1.3; EXPRESSED IN HELA, SIGNAL = 1.6; EXPRESSED IN HEART, SIGNAL = 1.4
PVLPILMKCILSQIVPVRIMSQLSLPNLSLWTLRR

SEQ ID NO: 34522 - protein, 34 aa, Homo sapiens
  MAP TO AC006149.3; EXPRESSED IN PLACENTA, SIGNAL = 1.9; EXPRESSED IN BT474, SIGNAL = 1.6; EXPRESSED IN BRAIN, SIGNAL = 1.6; EXPRESSED IN HEART, SIGNAL = 1.7; EXPRESSED IN ADULT LIVER, SIGNAL = 1.3; EXPRESSED IN BONE MARROW, SIGNAL = 2.1; EXPRESSED IN HBL100, SIGNAL = 1.4; EXPRESSED IN FETAL LIVER, SIGNAL = 1.5; EXPRESSED IN LUNG, SIGNAL = 1.7; EXPRESSED IN HELA, SIGNAL = 1.4; EST_HUMAN HIT: AA557657.1, EVALUE 1.00e-11
VFYLYVLSHWRIFRDNNRHGAVISYDNNVFFWNT

SEQ ID NO: 34523 - protein, 69 aa, Homo sapiens
  MAP TO AC006028.2; EXPRESSED IN FETAL LIVER, SIGNAL =   6; EXPRESSED IN HELA, SIGNAL = 5.8; EXPRESSED IN HEART, SIGNAL = 5.2; EXPRESSED IN BT474, SIGNAL = 4.9; EXPRESSED IN LUNG, SIGNAL = 6.5; EXPRESSED IN ADULT LIVER, SIGNAL = 5.5; EXPRESSED IN BRAIN, SIGNAL =   8; EXPRESSED IN PLACENTA, SIGNAL = 4.7; EXPRESSED IN BONE MARROW, SIGNAL = 5.8; EXPRESSED IN HBL100, SIGNAL =  14; EST_HUMAN HIT: BE071726.1, EVALUE 5.40e-01
DKRACEKPLSSSLGHIVRLHLNNNNNNKTKQNNTQKERKKKNKQKQSNMDASLGSRANGILCLLLCVST

SEQ ID NO: 34524 - protein, 24 aa, Homo sapiens
  MAP TO AC005949.8; EXPRESSED IN HEART, SIGNAL = 1.5; EXPRESSED IN ADULT LIVER, SIGNAL = 1.4; EXPRESSED IN BT474, SIGNAL =   2; EXPRESSED IN BONE MARROW, SIGNAL = 2.2; EXPRESSED IN HBL100, SIGNAL = 1.6; EXPRESSED IN LUNG, SIGNAL = 1.8; EXPRESSED IN HELA, SIGNAL = 1.4; EXPRESSED IN PLACENTA, SIGNAL =   2; EXPRESSED IN FETAL LIVER, SIGNAL = 1.7; EXPRESSED IN BRAIN, SIGNAL = 2.1; EST_HUMAN HIT: AI222315.1, EVALUE 8.40e-01
IKPGNASGPGCWLGKGTACIYWPR

SEQ ID NO: 34525 - protein, 21 aa, Homo sapiens
  MAP TO AC005949.8; EXPRESSED IN BONE MARROW, SIGNAL = 1.2; EXPRESSED IN HBL100, SIGNAL = 0.88; EXPRESSED IN FETAL LIVER, SIGNAL =   1; EXPRESSED IN LUNG, SIGNAL = 1.4; EXPRESSED IN ADULT LIVER, SIGNAL = 1.1; EXPRESSED IN BRAIN, SIGNAL = 1.5; EXPRESSED IN PLACENTA, SIGNAL = 1.6; EXPRESSED IN BT474, SIGNAL = 1.2; EXPRESSED IN HELA, SIGNAL = 1.2; EXPRESSED IN HEART, SIGNAL = 1.4
ELSPPPLAKGSDGYHGEPPEM

SEQ ID NO: 34526 - protein, 63 aa, Homo sapiens
  MAP TO AC005769.9; EXPRESSED IN PLACENTA, SIGNAL = 6.6; EXPRESSED IN BT474, SIGNAL = 6.2; EXPRESSED IN LUNG, SIGNAL = 7.7; EXPRESSED IN BRAIN, SIGNAL =  10; EXPRESSED IN HBL100, SIGNAL = 7.2; EXPRESSED IN FETAL LIVER, SIGNAL = 8.2; EXPRESSED IN HELA, SIGNAL = 6.2; EXPRESSED IN ADULT LIVER, SIGNAL = 5.9; EXPRESSED IN BONE MARROW, SIGNAL = 8.3; EXPRESSED IN HEART, SIGNAL = 7.4; SWISSPROT HIT: P26808, EVALUE 7.50e+00; EST_HUMAN HIT: BF307088.1, EVALUE 1.20e+00
DPKALEKQKMALHKTTTIDTSIIALPSSAEYTRDHHHQPGAEPNRAALWKNGTKSTREGTQEK

SEQ ID NO: 34527 - protein, 66 aa, Homo sapiens
  MAP TO AC005694.3; EXPRESSED IN BRAIN, SIGNAL = 1.9; EXPRESSED IN HELA, SIGNAL = 3.8; EXPRESSED IN ADULT LIVER, SIGNAL = 3.1; EXPRESSED IN BT474, SIGNAL = 6.1; EXPRESSED IN BONE MARROW, SIGNAL = 4.9; EXPRESSED IN HBL100, SIGNAL = 5.8; EXPRESSED IN HEART, SIGNAL = 1.6; EXPRESSED IN PLACENTA, SIGNAL = 2.4; EXPRESSED IN FETAL LIVER, SIGNAL = 4.7; EXPRESSED IN LUNG, SIGNAL = 5.1; EST_HUMAN HIT: BE265514.1, EVALUE 2.00e-09; SWISSPROT HIT: P35240, EVALUE 3.00e-10
VKKQILDEKIYCPPEASVLLASYAVQAKVGSKKKNVFFLGVNLGHGITPIFSFFGFSVLQRDLPQK

SEQ ID NO: 34528 - protein, 50 aa, Homo sapiens
  MAP TO AC005694.3; EXPRESSED IN FETAL LIVER, SIGNAL = 9.8; EXPRESSED IN HELA, SIGNAL =  12; EXPRESSED IN HEART, SIGNAL = 9.4; EXPRESSED IN PLACENTA, SIGNAL = 9.1; EXPRESSED IN BT474, SIGNAL =  10; EXPRESSED IN BONE MARROW, SIGNAL =  10; EXPRESSED IN HBL100, SIGNAL =  12; EXPRESSED IN LUNG, SIGNAL =  11; EXPRESSED IN ADULT LIVER, SIGNAL = 8.6; EXPRESSED IN BRAIN, SIGNAL =  12; EST_HUMAN HIT: AI277884.1, EVALUE 8.00e-18; SWISSPROT HIT: P38045, EVALUE 6.00e+00
IKVLQVPTRLRSPAGFTQWILHRGRRWGCLPVPRHAPALLSRRTVDGTGR

SEQ ID NO: 34529 - protein, 51 aa, Homo sapiens
  MAP TO AC005694.3; EXPRESSED IN FETAL LIVER, SIGNAL = 9.8; EXPRESSED IN HELA, SIGNAL =  12; EXPRESSED IN HEART, SIGNAL = 9.4; EXPRESSED IN PLACENTA, SIGNAL = 9.1; EXPRESSED IN BT474, SIGNAL =  10; EXPRESSED IN BONE MARROW, SIGNAL =  10; EXPRESSED IN HBL100, SIGNAL =  12; EXPRESSED IN LUNG, SIGNAL =  11; EXPRESSED IN ADULT LIVER, SIGNAL = 8.6; EXPRESSED IN BRAIN, SIGNAL =  12; EST_HUMAN HIT: AI277884.1, EVALUE 3.00e-15; SWISSPROT HIT: P24728, EVALUE 4.50e+00
RPVPSTVRRLRSAGAWRGTGRQPHLRPRCRIHWVKPAGLLSLVGTWRTFMS

SEQ ID NO: 34530 - protein, 62 aa, Homo sapiens
  MAP TO AC005674.9; EXPRESSED IN HBL100, SIGNAL = 1.8; EXPRESSED IN HELA, SIGNAL = 1.3; EXPRESSED IN HEART, SIGNAL = 1.4; EXPRESSED IN BRAIN, SIGNAL = 1.7; EXPRESSED IN ADULT LIVER, SIGNAL = 2.1; EXPRESSED IN LUNG, SIGNAL = 2.4; EXPRESSED IN FETAL LIVER, SIGNAL = 3.1; EXPRESSED IN BONE MARROW, SIGNAL = 2.3; EXPRESSED IN BT474, SIGNAL = 1.7; EXPRESSED IN PLACENTA, SIGNAL = 2.1; SWISSPROT HIT: P43427, EVALUE 2.00e-07; EST_HUMAN HIT: BF035577.1, EVALUE 6.00e-28
FQTFLGKADISQEVEEVLAESRVQRSIRLVSVLELLRAPYVRWQVVTVIVTMACYQLCGLNA

SEQ ID NO: 34531 - protein, 20 aa, Homo sapiens
  MAP TO AC005674.9; EXPRESSED IN HBL100, SIGNAL = 1.8; EXPRESSED IN HELA, SIGNAL = 1.3; EXPRESSED IN HEART, SIGNAL = 1.4; EXPRESSED IN BRAIN, SIGNAL = 1.7; EXPRESSED IN ADULT LIVER, SIGNAL = 2.1; EXPRESSED IN LUNG, SIGNAL = 2.4; EXPRESSED IN FETAL LIVER, SIGNAL = 3.1; EXPRESSED IN BONE MARROW, SIGNAL = 2.3; EXPRESSED IN BT474, SIGNAL = 1.7; EXPRESSED IN PLACENTA, SIGNAL = 2.1; EST_HUMAN HIT: F00548.1, EVALUE 2.00e-07
RSWLRAACRGASAWCPCWSC

SEQ ID NO: 34532 - protein, 33 aa, Homo sapiens
  MAP TO AC005674.9; EXPRESSED IN PLACENTA, SIGNAL = 1.2; EXPRESSED IN BT474, SIGNAL = 1.1; EXPRESSED IN BONE MARROW, SIGNAL = 1.1; EXPRESSED IN FETAL LIVER, SIGNAL = 1.5; EXPRESSED IN LUNG, SIGNAL = 1.2; EXPRESSED IN ADULT LIVER, SIGNAL = 1.5; EXPRESSED IN BRAIN, SIGNAL = 1.5; EXPRESSED IN HBL100, SIGNAL = 1.3; EXPRESSED IN HELA, SIGNAL = 1.9; EXPRESSED IN HEART, SIGNAL = 1.3
TPDPCPVSTLRSHSLSAPAMWKNSTRLLSKKSL

SEQ ID NO: 34533 - protein, 24 aa, Homo sapiens
  MAP TO AC005534.2; EXPRESSED IN BRAIN, SIGNAL =   8; EXPRESSED IN BT474, SIGNAL =  14; EXPRESSED IN HBL100, SIGNAL = 6.4; EXPRESSED IN LUNG, SIGNAL = 6.8; EXPRESSED IN HELA, SIGNAL = 5.9; EXPRESSED IN ADULT LIVER, SIGNAL = 5.7; EXPRESSED IN PLACENTA, SIGNAL = 8.9; EXPRESSED IN BONE MARROW, SIGNAL = 7.1; EXPRESSED IN FETAL LIVER, SIGNAL = 8.8; EXPRESSED IN HEART, SIGNAL = 4.7; EST_HUMAN HIT: AA722746.1, EVALUE 3.30e-02
LVGDDWIMGEDFLHAVFVMVSELS

SEQ ID NO: 34534 - protein, 74 aa, Homo sapiens
  MAP TO AC005534.2; EXPRESSED IN BT474, SIGNAL = 2.3; EXPRESSED IN FETAL LIVER, SIGNAL = 2.6; EXPRESSED IN PLACENTA, SIGNAL = 2.2; EXPRESSED IN BONE MARROW, SIGNAL =   3; EXPRESSED IN HBL100, SIGNAL = 2.4; EXPRESSED IN LUNG, SIGNAL = 2.4; EXPRESSED IN HELA, SIGNAL = 3.6; EXPRESSED IN ADULT LIVER, SIGNAL = 2.3; EXPRESSED IN BRAIN, SIGNAL = 3.4; EXPRESSED IN HEART, SIGNAL = 2.2
QVVLTRQIGNRDGGFVPVSLLDLEFPKGRDFFSYSSLHTLEPKVVPETYWELQSSLSLLSQRQKKKVLAAVLGL

SEQ ID NO: 34535 - protein, 57 aa, Homo sapiens
  MAP TO AC005534.2; EXPRESSED IN BRAIN, SIGNAL = 2.6; EXPRESSED IN BT474, SIGNAL = 2.9; EXPRESSED IN HELA, SIGNAL = 1.9; EXPRESSED IN HEART, SIGNAL = 1.9; EXPRESSED IN PLACENTA, SIGNAL = 2.2; EXPRESSED IN BONE MARROW, SIGNAL =   2; EXPRESSED IN HBL100, SIGNAL = 1.8; EXPRESSED IN FETAL LIVER, SIGNAL = 1.9; EXPRESSED IN LUNG, SIGNAL = 2.5; EXPRESSED IN ADULT LIVER, SIGNAL = 2.1; EST_HUMAN HIT: AI926297.1, EVALUE 4.10e+00; SWISSPROT HIT: P55709, EVALUE 4.50e+00
LREKYFLNICPVEVLLCGHRPHDDHLVNNRPLAYVTVATADDHGAEPFLPAVAWRLL

SEQ ID NO: 34536 - protein, 41 aa, Homo sapiens
  MAP TO AC005519.2; EXPRESSED IN PLACENTA, SIGNAL = 1.1; EXPRESSED IN LUNG, SIGNAL = 1.1; EXPRESSED IN HELA, SIGNAL = 0.98; EXPRESSED IN HEART, SIGNAL = 0.93; EXPRESSED IN BT474, SIGNAL = 0.99; EXPRESSED IN BONE MARROW, SIGNAL = 2.1; EXPRESSED IN HBL100, SIGNAL = 1.3; EXPRESSED IN FETAL LIVER, SIGNAL = 1.2; EXPRESSED IN BRAIN, SIGNAL = 1.3; EXPRESSED IN ADULT LIVER, SIGNAL =   1; EST_HUMAN HIT: AU137038.1, EVALUE 1.00e-17; SWISSPROT HIT: O14678, EVALUE 1.00e-18
TGWLGPVSIFGYFILGTVVNKTLMGPIVMKLVHQEKLEGDF

SEQ ID NO: 34537 - protein, 50 aa, Homo sapiens
  MAP TO AC005519.2; EXPRESSED IN ADULT LIVER, SIGNAL =  60; EXPRESSED IN HEART, SIGNAL =  46; EXPRESSED IN PLACENTA, SIGNAL =  30; EXPRESSED IN BT474, SIGNAL = 1.9e+02; EXPRESSED IN BONE MARROW, SIGNAL =  46; EXPRESSED IN HBL100, SIGNAL = 2.8e+02; EXPRESSED IN FETAL LIVER, SIGNAL = 1.6e+02; EXPRESSED IN LUNG, SIGNAL =  62; EXPRESSED IN HELA, SIGNAL =  97; EXPRESSED IN BRAIN, SIGNAL =  24; SWISSPROT HIT: O18789, EVALUE 2.00e-19; EST_HUMAN HIT: BF184529.1, EVALUE 2.00e-18
MKIKSLKEIYIFSLPIKESEIIDLSLGASLKDEVLKIMPVQKQTRAGQRT

SEQ ID NO: 34538 - protein, 97 aa, Homo sapiens
  MAP TO AC005399.14; EXPRESSED IN HBL100, SIGNAL = 2.8; EXPRESSED IN LUNG, SIGNAL = 4.4; EXPRESSED IN BRAIN, SIGNAL =   3; EXPRESSED IN HEART, SIGNAL = 2.8; EXPRESSED IN BT474, SIGNAL =   4; EXPRESSED IN BONE MARROW, SIGNAL = 3.6; EXPRESSED IN PLACENTA, SIGNAL = 3.2; EXPRESSED IN ADULT LIVER, SIGNAL = 2.9; EXPRESSED IN HELA, SIGNAL = 3.7; EXPRESSED IN FETAL LIVER, SIGNAL = 3.1; SWISSPROT HIT: P40601, EVALUE 1.40e+00; EST_HUMAN HIT: BF342057.1, EVALUE 1.20e-01
LQPNARPHHPSAAHFSSFYFCPLSINFPLCRSKNTNFSMPLMFLPAENLSKSTHYTVSKMQALFLGLLGQPYLAWRPCLHPLPQLPTCWPAFLWPLK

SEQ ID NO: 34539 - protein, 24 aa, Homo sapiens
  MAP TO AC005399.14; EXPRESSED IN HBL100, SIGNAL = 2.8; EXPRESSED IN LUNG, SIGNAL = 4.4; EXPRESSED IN BRAIN, SIGNAL =   3; EXPRESSED IN HEART, SIGNAL = 2.8; EXPRESSED IN BT474, SIGNAL =   4; EXPRESSED IN BONE MARROW, SIGNAL = 3.6; EXPRESSED IN PLACENTA, SIGNAL = 3.2; EXPRESSED IN ADULT LIVER, SIGNAL = 2.9; EXPRESSED IN HELA, SIGNAL = 3.7; EXPRESSED IN FETAL LIVER, SIGNAL = 3.1
ATQCKAPSSLSCSLQQLLLLSPFH

SEQ ID NO: 34540 - protein, 68 aa, Homo sapiens
  MAP TO AC005399.14; EXPRESSED IN HEART, SIGNAL = 1.3; EXPRESSED IN BONE MARROW, SIGNAL =   2; EXPRESSED IN PLACENTA, SIGNAL = 1.3; EXPRESSED IN BT474, SIGNAL = 1.1; EXPRESSED IN LUNG, SIGNAL = 3.3; EXPRESSED IN HELA, SIGNAL = 0.67; EXPRESSED IN BRAIN, SIGNAL = 1.1; EXPRESSED IN HBL100, SIGNAL = 1.1; EXPRESSED IN FETAL LIVER, SIGNAL = 1.4; EST_HUMAN HIT: BE245850.1, EVALUE 8.00e-32; SWISSPROT HIT: P47382, EVALUE 8.50e-01
KEKMMRLGGRLVLNTKEELANERLMTLKIAEMKEAMRTLIFPPSMHFFQAKHLIERSQVFNILRMMPK

SEQ ID NO: 34541 - protein, 46 aa, Homo sapiens
  MAP TO AC005105.2; EXPRESSED IN HEART, SIGNAL = 1.1; EXPRESSED IN BT474, SIGNAL = 0.65; EXPRESSED IN BONE MARROW, SIGNAL = 1.1; EXPRESSED IN HELA, SIGNAL = 1.1; EXPRESSED IN ADULT LIVER, SIGNAL = 1.4; EXPRESSED IN PLACENTA, SIGNAL = 2.2; EXPRESSED IN FETAL LIVER, SIGNAL = 3.5; EXPRESSED IN LUNG, SIGNAL = 1.1; EXPRESSED IN BRAIN, SIGNAL = 1.6; EXPRESSED IN HBL100, SIGNAL = 0.98; SWISSPROT HIT: Q09874, EVALUE 2.10e+00
VRFTGDELWDLQYYQKIEDISGETCCLTFVPMYDLFPQRNMQEKLH

SEQ ID NO: 34542 - protein, 41 aa, Homo sapiens
  MAP TO AC005105.2; EXPRESSED IN HEART, SIGNAL = 1.1; EXPRESSED IN BT474, SIGNAL = 0.65; EXPRESSED IN BONE MARROW, SIGNAL = 1.1; EXPRESSED IN HELA, SIGNAL = 1.1; EXPRESSED IN ADULT LIVER, SIGNAL = 1.4; EXPRESSED IN PLACENTA, SIGNAL = 2.2; EXPRESSED IN FETAL LIVER, SIGNAL = 3.5; EXPRESSED IN LUNG, SIGNAL = 1.1; EXPRESSED IN BRAIN, SIGNAL = 1.6; EXPRESSED IN HBL100, SIGNAL = 0.98; SWISSPROT HIT: Q41062, EVALUE 4.70e+00
GCDLLVMSSGTFNTTRRLRTYQGRPVASLLSQCMTCFHRET

SEQ ID NO: 34543 - protein, 65 aa, Homo sapiens
  MAP TO AC005089.2; EXPRESSED IN LUNG, SIGNAL =   1; EXPRESSED IN ADULT LIVER, SIGNAL = 1.2; EXPRESSED IN BRAIN, SIGNAL = 0.73; EXPRESSED IN HEART, SIGNAL = 0.78; EXPRESSED IN PLACENTA, SIGNAL = 1.1; EXPRESSED IN BONE MARROW, SIGNAL = 1.8; EXPRESSED IN HBL100, SIGNAL = 2.2; EXPRESSED IN FETAL LIVER, SIGNAL = 1.3; EXPRESSED IN BT474, SIGNAL = 2.3; EXPRESSED IN HELA, SIGNAL = 1.3; SWISSPROT HIT: Q84133, EVALUE 5.20e-01; EST_HUMAN HIT: BE258324.1, EVALUE 3.00e-32
ISNVPADSLIRTERPPNKEIVRYFIRHNALRAGTGENAPWVVEDELVKKYSLPSKFSDFLLDPYK

SEQ ID NO: 34544 - protein, 69 aa, Homo sapiens
  MAP TO AC005089.2; EXPRESSED IN HBL100, SIGNAL = 1.4; EXPRESSED IN FETAL LIVER, SIGNAL = 1.3; EXPRESSED IN LUNG, SIGNAL = 1.1; EXPRESSED IN ADULT LIVER, SIGNAL = 0.9; EXPRESSED IN BRAIN, SIGNAL = 0.8; EXPRESSED IN BT474, SIGNAL = 2.5; EXPRESSED IN HEART, SIGNAL =   1; EXPRESSED IN PLACENTA, SIGNAL =   1; EXPRESSED IN HELA, SIGNAL = 2.4; EXPRESSED IN BONE MARROW, SIGNAL = 0.72; EST_HUMAN HIT: AI498634.1, EVALUE 5.00e-32; SWISSPROT HIT: P13816, EVALUE 1.70e-01
VGKEKMLKVKIVKIHPLEKVDEEATEKKSDGACDSPSSDKENSSQIAQDHQKKETVVKEDEGRRESISM

SEQ ID NO: 34545 - protein, 56 aa, Homo sapiens
  MAP TO AC005089.2; EXPRESSED IN BT474, SIGNAL = 2.5; EXPRESSED IN BONE MARROW, SIGNAL = 1.1; EXPRESSED IN HELA, SIGNAL = 1.2; EXPRESSED IN PLACENTA, SIGNAL = 1.9; EXPRESSED IN FETAL LIVER, SIGNAL =   3; EXPRESSED IN LUNG, SIGNAL = 1.7; EXPRESSED IN ADULT LIVER, SIGNAL = 0.8; EXPRESSED IN BRAIN, SIGNAL =   2; EXPRESSED IN HEART, SIGNAL = 1.9; EXPRESSED IN HBL100, SIGNAL = 2.8; EST_HUMAN HIT: AW603269.1, EVALUE 3.00e-14
ENSNQSSVSDVYQLKVDSSTNSSPSPQQSESLSPAHTSDFRTDDSQPPTLGQEILE

SEQ ID NO: 34546 - protein, 572 aa, Homo sapiens
  MAP TO AC005089.2; EXPRESSED IN PLACENTA, SIGNAL =   3; EXPRESSED IN BT474, SIGNAL = 5.4; EXPRESSED IN BONE MARROW, SIGNAL =   4; EXPRESSED IN HBL100, SIGNAL = 5.6; EXPRESSED IN FETAL LIVER, SIGNAL = 3.3; EXPRESSED IN LUNG, SIGNAL = 3.1; EXPRESSED IN HELA, SIGNAL =   4; EXPRESSED IN ADULT LIVER, SIGNAL = 2.7; EXPRESSED IN BRAIN, SIGNAL = 3.1; EXPRESSED IN HEART, SIGNAL = 3.7; SWISSPROT HIT: P53935, EVALUE 2.00e-03; EST_HUMAN HIT: AW976211.1, EVALUE 2.00e-91
YMTLNPSTKRKNTGSPDRKPSKKSKTDNSSLSSPLNPKLWCHVHLKKSLSGSPLKVKNSKNSKSPEEHLEEMMKMMSPNKLHTNFHIPKKGPPAKKPGKHSDKPLKAKGRSKGILNGQKSTGNSKSPKKGLKTPKTKMKQMTLLDMAKGTQKMTRAPRNSGGTPRTSSKPHKHLPPAALHLIAYYKENKDREDKRSALSCVISKTARLLSSEDRARLPEELRSLVQKRYELLEHKKRWASMSEEQRKEYLKKKREELKKKLKEKAKERREKEMLERLEKQKRYEDQELTGKNLPAFRLVDTPEGLPNTLFGDVAMVVEFLSCYSGLLLPDAQYPITAVSLMEALSADKGGFLYLNRVLVILLQTLLQDEIAEDYGELGMKLSEIPLTLHSVSELVRLCLRRSDVQEESEGSDTDDNKDSAAFEDNEVQDEFLEKLETSEFFELTSEEKLQILTALCHRILMTYSVQDHMETRQQMSAELWKERLAVLKEENDKKRAEKQKRKEMEAKNKENGKVENGLGKTDRKKEIVKFEPQVDTEAEDMISAVKSRRLLAIQAKKEREIQEREMKGKISC

SEQ ID NO: 34547 - protein, 55 aa, Homo sapiens
  MAP TO AC005075.2; EXPRESSED IN HEART, SIGNAL =   1; EXPRESSED IN FETAL LIVER, SIGNAL = 1.4; EXPRESSED IN LUNG, SIGNAL = 1.7; EXPRESSED IN ADULT LIVER, SIGNAL = 2.2; EXPRESSED IN BRAIN, SIGNAL = 1.4; EXPRESSED IN PLACENTA, SIGNAL = 1.5; EXPRESSED IN BT474, SIGNAL = 1.6; EXPRESSED IN BONE MARROW, SIGNAL = 1.8; EXPRESSED IN HBL100, SIGNAL = 2.2; EXPRESSED IN HELA, SIGNAL = 1.7; SWISSPROT HIT: P78588, EVALUE 4.50e+00
ATAIIAQTGNYKPSVSITYITWAVITEVCGHVFSLKKLVFTLRETKYNTHKTESS

SEQ ID NO: 34548 - protein, 94 aa, Homo sapiens
  MAP TO AC004985.2; EXPRESSED IN BONE MARROW, SIGNAL = 2.1; EXPRESSED IN LUNG, SIGNAL =   2; EXPRESSED IN HEART, SIGNAL = 1.9; EXPRESSED IN PLACENTA, SIGNAL = 1.4; EXPRESSED IN BT474, SIGNAL = 4.7; EXPRESSED IN HBL100, SIGNAL = 3.2; EXPRESSED IN FETAL LIVER, SIGNAL = 2.7; EXPRESSED IN HELA, SIGNAL = 1.5; EXPRESSED IN ADULT LIVER, SIGNAL = 3.4; EXPRESSED IN BRAIN, SIGNAL = 3.1; SWISSPROT HIT: P31978, EVALUE 6.50e+00; EST_HUMAN HIT: AI311783.1, EVALUE 2.00e-24
LVEAILMAMVITAIIATIKLLIVTGCPTFLRFSSTICDSFLICPLVGGCVQWVLLVTVGVLLSISLDMAATGGSSGSSWNLFLSIWLMIRFQLS

SEQ ID NO: 34549 - protein, 89 aa, Homo sapiens
  MAP TO AC004985.2; EXPRESSED IN PLACENTA, SIGNAL = 0.8; EXPRESSED IN BONE MARROW, SIGNAL = 1.1; EXPRESSED IN FETAL LIVER, SIGNAL = 0.84; EXPRESSED IN BRAIN, SIGNAL = 1.3; EXPRESSED IN HBL100, SIGNAL = 1.1; EXPRESSED IN HELA, SIGNAL = 1.3; EXPRESSED IN ADULT LIVER, SIGNAL = 0.83; EXPRESSED IN BT474, SIGNAL = 1.7; EXPRESSED IN LUNG, SIGNAL = 2.3; EXPRESSED IN HEART, SIGNAL = 0.83; EST_HUMAN HIT: AI768799.1, EVALUE 2.00e-22; SWISSPROT HIT: Q95235, EVALUE 9.10e+00
GPGQLIPLIEETTSTECRQDVATNLLKLFLGQGLAKDFLDLLFQLELSRTSEAWEGAGPRTLGGVWGWVGSSCRRQMGSDRREARNRAK

SEQ ID NO: 34550 - protein, 712 aa, Homo sapiens
  MAP TO AC004985.2; EXPRESSED IN HBL100, SIGNAL = 1.4; EXPRESSED IN LUNG, SIGNAL = 1.8; EXPRESSED IN ADULT LIVER, SIGNAL = 1.5; EXPRESSED IN BRAIN, SIGNAL = 2.1; EXPRESSED IN HEART, SIGNAL = 1.7; EXPRESSED IN BT474, SIGNAL = 2.8; EXPRESSED IN PLACENTA, SIGNAL = 1.6; EXPRESSED IN HELA, SIGNAL =   3; EXPRESSED IN FETAL LIVER, SIGNAL = 1.6; EXPRESSED IN BONE MARROW, SIGNAL = 1.1; SWISSPROT HIT: Q62209, EVALUE 1.10e+00; EST_HUMAN HIT: BE904203.1, EVALUE 1.00e-112
SENHYHTFLLWAMRGIVRTWWSQPPRGMGSFREDSVVLSRAPAFAFVRMDVSSNSKSQLLNAVLSPGHRQWDCFWHRDLNLGTNAREISDGLVEISWFFPSGREDLDIFPEPVAFLNLRGDIGSHWLQFKLLTEISSAVFILTDNISKKEYKLLYSMKESTTKYYFILSPYRGKRNTNLRFLNKLIPVLKIDHSHVLVKVSSTDSDSFVKRIRAIVGNVLRAPCRRVSVEDMAHAARKLGLKVDEDCEECQKAKDRMERITRKIKDSDAYRRDELRLQGDPWRKAAQVEKEFCQLQWAVDPPEKHRAELRRRLLELRMQQNGHDPSSGVQEFISGISSPSLSEKQYFLRWMEWGLARVAQPRLRQPPETLLTLRPKHGGTTDVGEPLWPEPLGVEHFLREMGQFYEAESCLVEAGRLPAGQRRFAHFPGLASELLLTGLPLELIDGSTLSMPVRWVTGLLKELHVRLERRSRLVVLSTVGVPGTGKSTLLNTMFGLRFATGKSCGPRGAFMQLITVAEGFSQDLGCDHILVIDSGGLIGGALTSAGDRFELEASLATLLMGLSNVTVISLAETKDIPAAILHAFLRLEKTGHMPNYQFVYQNLHDVSVPGPRPRDKRQLLDPPGDLSRAAAQMEKQGDGFRALAGLAFCDPEKQHIWHIPGLWHGAPPMAAVSLAYSEAIFELKRCLLENIRNGLSNQNKNIQQLIELVRRL

SEQ ID NO: 34551 - protein, 64 aa, Homo sapiens
  MAP TO AC004985.2; EXPRESSED IN HBL100, SIGNAL = 1.4; EXPRESSED IN LUNG, SIGNAL = 1.8; EXPRESSED IN ADULT LIVER, SIGNAL = 1.5; EXPRESSED IN BRAIN, SIGNAL = 2.1; EXPRESSED IN HEART, SIGNAL = 1.7; EXPRESSED IN BT474, SIGNAL = 2.8; EXPRESSED IN PLACENTA, SIGNAL = 1.6; EXPRESSED IN HELA, SIGNAL =   3; EXPRESSED IN FETAL LIVER, SIGNAL = 1.6; EXPRESSED IN BONE MARROW, SIGNAL = 1.1; EST_HUMAN HIT: BE904203.1, EVALUE 2.00e-07
GASGKTAWSCPGRPPSPSCAWTSVATPSPSFSTPSSARATGSGTASGIGTSTWAPMPGRFRMGW

SEQ ID NO: 34552 - protein, 32 aa, Homo sapiens
  MAP TO AC004909.2; EXPRESSED IN ADULT LIVER, SIGNAL = 7.9; EXPRESSED IN BRAIN, SIGNAL = 8.3; EXPRESSED IN HEART, SIGNAL = 5.3; EXPRESSED IN PLACENTA, SIGNAL = 6.9; EXPRESSED IN BONE MARROW, SIGNAL = 9.4; EXPRESSED IN HBL100, SIGNAL = 7.3; EXPRESSED IN BT474, SIGNAL = 5.9; EXPRESSED IN FETAL LIVER, SIGNAL =   7; EXPRESSED IN LUNG, SIGNAL = 8.2; EXPRESSED IN HELA, SIGNAL = 8.4
KNVYVTRLTTFESIKAGSIFRKAFRKQNTITS

SEQ ID NO: 34553 - protein, 47 aa, Homo sapiens
  MAP TO AC004885.2; EXPRESSED IN BONE MARROW, SIGNAL = 2.7; EXPRESSED IN HBL100, SIGNAL = 0.92; EXPRESSED IN FETAL LIVER, SIGNAL =   1; EXPRESSED IN PLACENTA, SIGNAL = 1.2; EXPRESSED IN BT474, SIGNAL = 0.84; EXPRESSED IN LUNG, SIGNAL = 1.4; EXPRESSED IN HELA, SIGNAL = 0.99; EXPRESSED IN ADULT LIVER, SIGNAL = 0.91; EXPRESSED IN BRAIN, SIGNAL = 1.3; EXPRESSED IN HEART, SIGNAL =   1; EST_HUMAN HIT: AW901967.1, EVALUE 3.50e-02; SWISSPROT HIT: P42218, EVALUE 1.20e+00
QNRDPDFHLPPKLPPASHPHLSECQPNPSSCSGQPLWSHPWFLSFSH

SEQ ID NO: 34554 - protein, 67 aa, Homo sapiens
  MAP TO AC004859.2; EXPRESSED IN LUNG, SIGNAL = 2.5; EXPRESSED IN PLACENTA, SIGNAL = 2.6; EXPRESSED IN BT474, SIGNAL = 5.1; EXPRESSED IN BONE MARROW, SIGNAL = 3.1; EXPRESSED IN HBL100, SIGNAL = 2.8; EXPRESSED IN FETAL LIVER, SIGNAL = 3.9; EXPRESSED IN HELA, SIGNAL = 2.6; EXPRESSED IN BRAIN, SIGNAL = 3.2; EXPRESSED IN ADULT LIVER, SIGNAL = 2.6; EXPRESSED IN HEART, SIGNAL = 1.9; SWISSPROT HIT: P06486, EVALUE 6.50e+00; EST_HUMAN HIT: AA984379.1, EVALUE 3.00e-03
VLGNPMGPAGSPSGSSMMPGVAGGSSALTSPQCLGQQAFAEGGANKGYVQQGVYSRGGYPGAPGFTT

SEQ ID NO: 34555 - protein, 53 aa, Homo sapiens
  MAP TO AC004859.2; EXPRESSED IN PLACENTA, SIGNAL = 1.9; EXPRESSED IN BT474, SIGNAL = 4.6; EXPRESSED IN FETAL LIVER, SIGNAL = 2.3; EXPRESSED IN HELA, SIGNAL = 3.1; EXPRESSED IN ADULT LIVER, SIGNAL =   2; EXPRESSED IN BONE MARROW, SIGNAL = 3.3; EXPRESSED IN HBL100, SIGNAL = 2.3; EXPRESSED IN LUNG, SIGNAL =   2; EXPRESSED IN BRAIN, SIGNAL = 2.9; EXPRESSED IN HEART, SIGNAL = 9.3; EST_HUMAN HIT: BE615691.1, EVALUE 1.00e-24; SWISSPROT HIT: Q02218, EVALUE 9.00e-26
HFQRVIPEDGPAAQNPENVKRLLFCTGKVYYDLTRERKARDMVGQVAITRIEQ

SEQ ID NO: 34556 - protein, 51 aa, Homo sapiens
  MAP TO AC004859.2; EXPRESSED IN BRAIN, SIGNAL = 3.5; EXPRESSED IN HEART, SIGNAL = 4.2; EXPRESSED IN PLACENTA, SIGNAL =   3; EXPRESSED IN BT474, SIGNAL = 4.1; EXPRESSED IN BONE MARROW, SIGNAL = 4.1; EXPRESSED IN ADULT LIVER, SIGNAL = 3.4; EXPRESSED IN HELA, SIGNAL = 3.9; EXPRESSED IN LUNG, SIGNAL = 3.6; EXPRESSED IN FETAL LIVER, SIGNAL = 3.5; EXPRESSED IN HBL100, SIGNAL = 2.9; EST_HUMAN HIT: BE838864.1, EVALUE 5.00e-24; SWISSPROT HIT: Q02218, EVALUE 4.00e-25
MAYCQHIGVEFMFINDLEQCQWIRQKFETPGIMQFTNEEKRTLLARLVRST

SEQ ID NO: 34557 - protein, 51 aa, Homo sapiens
  MAP TO AC004859.2; EXPRESSED IN BRAIN, SIGNAL = 3.5; EXPRESSED IN HEART, SIGNAL = 4.2; EXPRESSED IN PLACENTA, SIGNAL =   3; EXPRESSED IN BT474, SIGNAL = 4.1; EXPRESSED IN BONE MARROW, SIGNAL = 4.1; EXPRESSED IN ADULT LIVER, SIGNAL = 3.4; EXPRESSED IN HELA, SIGNAL = 3.9; EXPRESSED IN LUNG, SIGNAL = 3.6; EXPRESSED IN FETAL LIVER, SIGNAL = 3.5; EXPRESSED IN HBL100, SIGNAL = 2.9
PTASILGWSSCSSMTWSSASGSGRSLRPLGSCSSQMRRNGPCWPGLCGPPG

SEQ ID NO: 34558 - protein, 64 aa, Homo sapiens
  MAP TO AC004859.2; EXPRESSED IN HBL100, SIGNAL = 1.4; EXPRESSED IN ADULT LIVER, SIGNAL = 1.8; EXPRESSED IN BONE MARROW, SIGNAL = 2.1; EXPRESSED IN LUNG, SIGNAL = 1.7; EXPRESSED IN HELA, SIGNAL = 2.8; EXPRESSED IN BRAIN, SIGNAL = 1.5; EXPRESSED IN HEART, SIGNAL = 2.7; EXPRESSED IN PLACENTA, SIGNAL = 1.3; EXPRESSED IN BT474, SIGNAL = 2.9; EXPRESSED IN FETAL LIVER, SIGNAL = 1.9; SWISSPROT HIT: Q02218, EVALUE 1.00e-31; EST_HUMAN HIT: BE297369.1, EVALUE 9.00e-31
SWDIFFRNTNAGAPPGTAYQSPLPLSRGSLAAVAHAQSLVEAQPNVDKLVEDHLAVQSLIRAYQ

SEQ ID NO: 34559 - protein, 23 aa, Homo sapiens
  MAP TO AC004859.2; EXPRESSED IN HBL100, SIGNAL = 1.4; EXPRESSED IN ADULT LIVER, SIGNAL = 1.8; EXPRESSED IN BONE MARROW, SIGNAL = 2.1; EXPRESSED IN LUNG, SIGNAL = 1.7; EXPRESSED IN HELA, SIGNAL = 2.8; EXPRESSED IN BRAIN, SIGNAL = 1.5; EXPRESSED IN HEART, SIGNAL = 2.7; EXPRESSED IN PLACENTA, SIGNAL = 1.3; EXPRESSED IN BT474, SIGNAL = 2.9; EXPRESSED IN FETAL LIVER, SIGNAL = 1.9; EST_HUMAN HIT: AU140451.1, EVALUE 3.00e-07
GTFFFATRMPEPHRALPTRVPFP

SEQ ID NO: 34560 - protein, 32 aa, Homo sapiens
  MAP TO AC004814.2; EXPRESSED IN FETAL LIVER, SIGNAL = 4.3; EXPRESSED IN HEART, SIGNAL = 3.3; EXPRESSED IN PLACENTA, SIGNAL =   4; EXPRESSED IN BT474, SIGNAL = 4.1; EXPRESSED IN BRAIN, SIGNAL = 3.8; EXPRESSED IN ADULT LIVER, SIGNAL = 2.9; EXPRESSED IN HELA, SIGNAL = 3.5; EXPRESSED IN LUNG, SIGNAL = 4.8; EXPRESSED IN HBL100, SIGNAL = 4.1; EXPRESSED IN BONE MARROW, SIGNAL = 5.1; EST_HUMAN HIT: AU120419.1, EVALUE 2.00e-10; SWISSPROT HIT: P70501, EVALUE 2.90e-02
EALRVVKILQNLDPPFSIDGKMVAVNLATGKR

SEQ ID NO: 34561 - protein, 64 aa, Homo sapiens
  MAP TO AC004689.5; EXPRESSED IN BONE MARROW, SIGNAL =  19; EXPRESSED IN FETAL LIVER, SIGNAL =  14; EXPRESSED IN LUNG, SIGNAL =  16; EXPRESSED IN PLACENTA, SIGNAL =  14; EXPRESSED IN BT474, SIGNAL =  13; EXPRESSED IN HBL100, SIGNAL =  15; EXPRESSED IN HELA, SIGNAL =  12; EXPRESSED IN ADULT LIVER, SIGNAL =  12; EXPRESSED IN BRAIN, SIGNAL =  14; EXPRESSED IN HEART, SIGNAL =  11; SWISSPROT HIT: Q53176, EVALUE 1.90e+00
GIKAYGPPAGTDVLLEPPGSKQGVALEMFLSWLHAGHPSGTWVTGELTQEHYTQCVRTLAAALA

SEQ ID NO: 34562 - protein, 57 aa, Homo sapiens
  MAP TO AC004689.5; EXPRESSED IN BONE MARROW, SIGNAL =  19; EXPRESSED IN FETAL LIVER, SIGNAL =  14; EXPRESSED IN LUNG, SIGNAL =  16; EXPRESSED IN PLACENTA, SIGNAL =  14; EXPRESSED IN BT474, SIGNAL =  13; EXPRESSED IN HBL100, SIGNAL =  15; EXPRESSED IN HELA, SIGNAL =  12; EXPRESSED IN ADULT LIVER, SIGNAL =  12; EXPRESSED IN BRAIN, SIGNAL =  14; EXPRESSED IN HEART, SIGNAL =  11; EST_HUMAN HIT: BF130116.1, EVALUE 2.40e-01; SWISSPROT HIT: Q10156, EVALUE 2.60e+00
ALRLMGPLQAQMFCLSHQAANKEWLWRCSCPGYTPATPVGPGSPGNSHRSITHSVCE

SEQ ID NO: 34563 - protein, 40 aa, Homo sapiens
  MAP TO AC004689.5; EXPRESSED IN PLACENTA, SIGNAL = 0.91; EXPRESSED IN HBL100, SIGNAL = 0.77; EXPRESSED IN LUNG, SIGNAL = 0.83; EXPRESSED IN BRAIN, SIGNAL =   3; EXPRESSED IN HEART, SIGNAL = 1.2; EXPRESSED IN BT474, SIGNAL = 1.6; EXPRESSED IN BONE MARROW, SIGNAL =   1; EXPRESSED IN FETAL LIVER, SIGNAL = 0.86; EXPRESSED IN HELA, SIGNAL = 0.77; EXPRESSED IN ADULT LIVER, SIGNAL = 0.9; EST_HUMAN HIT: AI523680.1, EVALUE 2.00e-10
GSCPHVAEPQGALAAAVDEEVAVVRMELRCCDHLRKVLHV

SEQ ID NO: 34564 - protein, 52 aa, Homo sapiens
  MAP TO AC004689.5; EXPRESSED IN PLACENTA, SIGNAL = 3.3; EXPRESSED IN LUNG, SIGNAL = 4.2; EXPRESSED IN ADULT LIVER, SIGNAL = 2.8; EXPRESSED IN BRAIN, SIGNAL =   2; EXPRESSED IN HEART, SIGNAL = 6.4; EXPRESSED IN BT474, SIGNAL = 2.5; EXPRESSED IN HELA, SIGNAL = 2.5; EXPRESSED IN FETAL LIVER, SIGNAL = 2.4; EXPRESSED IN HBL100, SIGNAL = 2.4; EXPRESSED IN BONE MARROW, SIGNAL =   2; EST_HUMAN HIT: BE906698.1, EVALUE 3.00e-24; SWISSPROT HIT: P19338, EVALUE 6.80e-01
LCHAEEEIEQVDIEQARDADVEDDQVADRHGDEGLAKDLQVGPIQGHGGQQR

SEQ ID NO: 34565 - protein, 43 aa, Homo sapiens
  MAP TO AC004689.5; EXPRESSED IN PLACENTA, SIGNAL = 3.3; EXPRESSED IN LUNG, SIGNAL = 4.2; EXPRESSED IN ADULT LIVER, SIGNAL = 2.8; EXPRESSED IN BRAIN, SIGNAL =   2; EXPRESSED IN HEART, SIGNAL = 6.4; EXPRESSED IN BT474, SIGNAL = 2.5; EXPRESSED IN HELA, SIGNAL = 2.5; EXPRESSED IN FETAL LIVER, SIGNAL = 2.4; EXPRESSED IN HBL100, SIGNAL = 2.4; EXPRESSED IN BONE MARROW, SIGNAL =   2; EST_HUMAN HIT: AI458524.1, EVALUE 6.00e-07
LSSTLLNSLLARSTMSLVTSSSSRLREPSAPLLNGMPTVISNL

SEQ ID NO: 34566 - protein, 54 aa, Homo sapiens
  MAP TO AC004689.5; EXPRESSED IN PLACENTA, SIGNAL = 3.3; EXPRESSED IN LUNG, SIGNAL = 4.2; EXPRESSED IN ADULT LIVER, SIGNAL = 2.8; EXPRESSED IN BRAIN, SIGNAL =   2; EXPRESSED IN HEART, SIGNAL = 6.4; EXPRESSED IN BT474, SIGNAL = 2.5; EXPRESSED IN HELA, SIGNAL = 2.5; EXPRESSED IN FETAL LIVER, SIGNAL = 2.4; EXPRESSED IN HBL100, SIGNAL = 2.4; EXPRESSED IN BONE MARROW, SIGNAL =   2; EST_HUMAN HIT: AA323685.1, EVALUE 2.30e+00
LTWPPGQACTGCPPSSPRTTSTRSSSSSSSATSPSTSSPSSSRWSSSTCPSSPW

SEQ ID NO: 34567 - protein, 41 aa, Homo sapiens [sequence omitted]

SEQ ID NO: 34568 - protein, 430 aa, Homo sapiens
  MAP TO AC004624.6; EXPRESSED IN BT474, SIGNAL = 1.1; EXPRESSED IN BONE MARROW, SIGNAL = 1.5; EXPRESSED IN FETAL LIVER, SIGNAL = 1.4; EXPRESSED IN HELA, SIGNAL = 0.88; EXPRESSED IN PLACENTA, SIGNAL = 1.5; EXPRESSED IN HBL100, SIGNAL =   1; EXPRESSED IN LUNG, SIGNAL = 1.3; EXPRESSED IN ADULT LIVER, SIGNAL = 1.1; EXPRESSED IN BRAIN, SIGNAL = 1.6; EXPRESSED IN HEART, SIGNAL = 1.3; SWISSPROT HIT: P35748, EVALUE 3.00e-04; EST_HUMAN HIT: BE897872.1, EVALUE 2.60e-02
DSQLLAGKVRATGRTARGKEENQVWLGNALLLQGGSLEDKGLEEEDEMPHQEASGLGCRGAPEEPDSQEHESKEMLFFAGETGLPLFPRFALSVEGAEPTDHGHPQAVSKGHNRCALTIDELAQDVEACFQQLSTLQPGSRGWQCSASACRGENWSFAQKWHSGWERAHSQQVWGNWGICSNEEAKSKESGEGDKPGKTTALGTSEVPGNPGTLPHWDEASPNPPQGPAEPWGALERVRSRFHQLISGLKKQRSQILHDNTKLHGDQERFHERVCALEREREREVTKISRLERDNHRLVGDISQLKKELDQYLQAISDLEDCNGKSYCKILELEEENETLKGNLGQLQKATSESVRKSKDTMEQVTLENWKLQTLISELGVSYKELIKDIVLGIEDMIRALSGENEHLLRRVHVLEREVTLQRSTDQGRL

SEQ ID NO: 34569 - protein, 45 aa, Homo sapiens
  MAP TO AC004624.6; EXPRESSED IN PLACENTA, SIGNAL =  17; EXPRESSED IN BT474, SIGNAL =  14; EXPRESSED IN HEART, SIGNAL =  17; EXPRESSED IN BRAIN, SIGNAL =  34; EXPRESSED IN ADULT LIVER, SIGNAL =  12; EXPRESSED IN HELA, SIGNAL =  12; EXPRESSED IN LUNG, SIGNAL =  18; EXPRESSED IN FETAL LIVER, SIGNAL =  21; EXPRESSED IN HBL100, SIGNAL =  14; EXPRESSED IN BONE MARROW, SIGNAL =  15; EST_HUMAN HIT: BF340610.1, EVALUE 2.10e-01
LRARPCQHTDLPPGFHKHLVRTNKGLSSSAPRTPLVTWNPAAAVR

SEQ ID NO: 34570 - protein, 35 aa, Homo sapiens
  MAP TO AC004624.6; EXPRESSED IN PLACENTA, SIGNAL =  17; EXPRESSED IN BT474, SIGNAL =  14; EXPRESSED IN HEART, SIGNAL =  17; EXPRESSED IN BRAIN, SIGNAL =  34; EXPRESSED IN ADULT LIVER, SIGNAL =  12; EXPRESSED IN HELA, SIGNAL =  12; EXPRESSED IN LUNG, SIGNAL =  18; EXPRESSED IN FETAL LIVER, SIGNAL =  21; EXPRESSED IN HBL100, SIGNAL =  14; EXPRESSED IN BONE MARROW, SIGNAL =  15; EST_HUMAN HIT: AA401942.1, EVALUE 3.00e+00; SWISSPROT HIT: P03193, EVALUE 8.20e+00
SVPVPVSTQICLLVSISTWSEQTKVFHHLLHELPW

SEQ ID NO: 34571 - protein, 707 aa, Homo sapiens
  MAP TO AC004624.6; EXPRESSED IN BT474, SIGNAL = 1.4; EXPRESSED IN BONE MARROW, SIGNAL = 1.7; EXPRESSED IN HBL100, SIGNAL = 1.4; EXPRESSED IN FETAL LIVER, SIGNAL = 1.3; EXPRESSED IN LUNG, SIGNAL =   2; EXPRESSED IN BRAIN, SIGNAL = 1.7; EXPRESSED IN PLACENTA, SIGNAL = 1.5; EXPRESSED IN ADULT LIVER, SIGNAL = 1.1; EXPRESSED IN HEART, SIGNAL = 1.3; EXPRESSED IN HELA, SIGNAL = 2.1; EST_HUMAN HIT: BE897872.1, EVALUE 4.50e-02; SWISSPROT HIT: P35748, EVALUE 5.00e-04
LTLAEPSLDEQILLLVCGCPPEECLDESLLRMDLAWISENLAADPAAEAFLLVQTSALPLWGPAGDSASWRPLLLQEVPSDGQKIQEELATRSPPPPKATGHPGWDCHQTRGRGASLFHEAPYISNHPFLKKHPKDLKDTWNNGGGSLAGRTEEGKARGTLGRKGKNLGDKYQLSQESHQNLSLENGAGAAEDVQDQNGASETKAATCRPGSWQEFLMPLLQGEASVSKEGPESLSRRERVEGYVWGLRGGLSSENEEVAPPATFSRAHETKEPWPTDSQLLAGKVRATGRTARGKEENQVWLGNALLLQGGSLEDKGLEEEDEMPHQEASGLGCRGAPEEPDSQEHESKEMLFFAGETGLPLFPRFALSVEGAEPTDHGHPQAVSKGHNRCALTIDELAQDVEACFQQLSTLQPGSRGWQCSASACRGENWSFAQKWHSGWERAHSQQVWGNWGICSNEEAKSKESGEGDKPGKTTALGTSEVPGNPGTLPHWDEASPNPPQGPAEPWGALERVRSRFHQLISGLKKQRSQILHDNTKLHGDQERFHERVCALEREREREVTKISRLERDNHRLVGDISQLKKELDQYLQAISDLEDCNGKSYCKILELEEENETLKGNLGQLQKATSESVRKSKDTMEQVTLENWKLQTLISELGVSYKELIKDIVLGIEDMIRALSGENEHLLRRVHVLEREVTLQRSTDQGRL

SEQ ID NO: 34572 - protein, 55 aa, Homo sapiens
  MAP TO AC004599.4; EXPRESSED IN HEART, SIGNAL = 3.5; EXPRESSED IN PLACENTA, SIGNAL = 3.5; EXPRESSED IN BT474, SIGNAL = 2.9; EXPRESSED IN BONE MARROW, SIGNAL =   3; EXPRESSED IN HBL100, SIGNAL = 2.3; EXPRESSED IN FETAL LIVER, SIGNAL = 2.5; EXPRESSED IN LUNG, SIGNAL = 3.4; EXPRESSED IN HELA, SIGNAL = 3.4; EXPRESSED IN ADULT LIVER, SIGNAL = 3.1; EXPRESSED IN BRAIN, SIGNAL = 5.6; SWISSPROT HIT: Q9Y2T4, EVALUE 2.00e-27; EST_HUMAN HIT: AA101298.1, EVALUE 1.00e-25; EST_HUMAN HIT: AA101298.1, EVALUE 1.00e-25
SKNAPHSQGEYDVYSTFQSHEPEFDYLKSLEIEEKINKIKWLPQQNAAHSLLSTN

SEQ ID NO: 34573 - protein, 24 aa, Homo sapiens
  MAP TO AC004599.4; EXPRESSED IN HEART, SIGNAL = 3.5; EXPRESSED IN PLACENTA, SIGNAL = 3.5; EXPRESSED IN BT474, SIGNAL = 2.9; EXPRESSED IN BONE MARROW, SIGNAL =   3; EXPRESSED IN HBL100, SIGNAL = 2.3; EXPRESSED IN FETAL LIVER, SIGNAL = 2.5; EXPRESSED IN LUNG, SIGNAL = 3.4; EXPRESSED IN HELA, SIGNAL = 3.4; EXPRESSED IN ADULT LIVER, SIGNAL = 3.1; EXPRESSED IN BRAIN, SIGNAL = 5.6; EST_HUMAN HIT: M78063.1, EVALUE 3.00e-06
RANTTCTALSRATSRSLTISRAWR

SEQ ID NO: 34574 - protein, 34 aa, Homo sapiens
  MAP TO AC004599.4; EXPRESSED IN HBL100, SIGNAL = 3.1; EXPRESSED IN FETAL LIVER, SIGNAL = 3.6; EXPRESSED IN BRAIN, SIGNAL = 3.8; EXPRESSED IN HEART, SIGNAL = 4.8; EXPRESSED IN PLACENTA, SIGNAL = 3.4; EXPRESSED IN BT474, SIGNAL =   3; EXPRESSED IN BONE MARROW, SIGNAL = 2.4; EXPRESSED IN ADULT LIVER, SIGNAL =   4; EXPRESSED IN HELA, SIGNAL = 3.1; EXPRESSED IN LUNG, SIGNAL = 3.6
GCACAAVTPAVAEAREKTETPRSSEACAGHAVPT

SEQ ID NO: 34575 - protein, 31 aa, Homo sapiens
  MAP TO AC004599.4; EXPRESSED IN PLACENTA, SIGNAL =   2; EXPRESSED IN FETAL LIVER, SIGNAL = 1.2; EXPRESSED IN HEART, SIGNAL = 1.3; EXPRESSED IN BONE MARROW, SIGNAL =   2; EXPRESSED IN ADULT LIVER, SIGNAL = 1.4; EXPRESSED IN BRAIN, SIGNAL = 1.6; EXPRESSED IN BT474, SIGNAL = 1.6; EXPRESSED IN HBL100, SIGNAL = 1.1; EXPRESSED IN LUNG, SIGNAL = 1.4; EXPRESSED IN HELA, SIGNAL = 1.4; EST_HUMAN HIT: AI565624.1, EVALUE 1.00e+00; SWISSPROT HIT: P14032, EVALUE 8.30e+00
RGAVICGFGRSWKHNGSGLQLGPHCLCQVEQ

SEQ ID NO: 34576 - protein, 108 aa, Homo sapiens
  MAP TO AC000105.17; EXPRESSED IN HEART, SIGNAL = 1.8; EXPRESSED IN BT474, SIGNAL = 1.3; EXPRESSED IN BONE MARROW, SIGNAL = 2.5; EXPRESSED IN HELA, SIGNAL = 2.2; EXPRESSED IN ADULT LIVER, SIGNAL = 1.6; EXPRESSED IN BRAIN, SIGNAL = 3.7; EXPRESSED IN PLACENTA, SIGNAL = 1.5; EXPRESSED IN HBL100, SIGNAL = 1.9; EXPRESSED IN FETAL LIVER, SIGNAL = 1.5; EXPRESSED IN LUNG, SIGNAL = 2.2; EST_HUMAN HIT: AI889529.1, EVALUE 8.00e-06; SWISSPROT HIT: P06687, EVALUE 2.30e-01
MAGERQRCLALKMEGESQELRNAVTSRIWKRQEDRSSSRVSGKEHSPSTSILAQSDPWLPSDLRNCQFINWFCFKPYKFVVICYSSIRKLIQWKTVPGRGNSMCKGLE

SEQ ID NO: 34577 - protein, 27 aa, Homo sapiens
  MAP TO AC000054.10; EXPRESSED IN HEART, SIGNAL = 2.2; EXPRESSED IN BRAIN, SIGNAL = 2.7; EXPRESSED IN PLACENTA, SIGNAL = 2.9; EXPRESSED IN BT474, SIGNAL =   2; EXPRESSED IN BONE MARROW, SIGNAL = 2.2; EXPRESSED IN FETAL LIVER, SIGNAL = 2.8; EXPRESSED IN LUNG, SIGNAL =   2; EXPRESSED IN HELA, SIGNAL = 2.4; EXPRESSED IN ADULT LIVER, SIGNAL = 2.3; EXPRESSED IN HBL100, SIGNAL = 1.7
AVQMPTCFHGTGRQTQWLCNQRKSIIH

SEQ ID NO: 34578 - protein, 83 aa, Homo sapiens
  MAP TO AC000029.14; EXPRESSED IN HELA, SIGNAL = 1.3; EXPRESSED IN BT474, SIGNAL = 1.2; EXPRESSED IN FETAL LIVER, SIGNAL = 2.1; EXPRESSED IN LUNG, SIGNAL = 1.3; EXPRESSED IN ADULT LIVER, SIGNAL = 1.3; EXPRESSED IN HEART, SIGNAL = 1.1; EXPRESSED IN PLACENTA, SIGNAL = 1.2; EXPRESSED IN BRAIN, SIGNAL = 1.6; EXPRESSED IN BONE MARROW, SIGNAL = 1.3; EXPRESSED IN HBL100, SIGNAL = 1.2; EST_HUMAN HIT: H55588.1, EVALUE 2.00e-26; SWISSPROT HIT: P38133, EVALUE 2.10e+00
EWFLQSFIWKGLCSWGKMAHSQNSLELPININATQITTAYGHRALPKLKEELQSEDLQTRQKALMALCDLMHDPECIYKAMNI

SEQ ID NO: 34579 - protein, 33 aa, Homo sapiens
  MAP TO AC000029.14; EXPRESSED IN HELA, SIGNAL = 1.3; EXPRESSED IN BT474, SIGNAL = 1.2; EXPRESSED IN FETAL LIVER, SIGNAL = 2.1; EXPRESSED IN LUNG, SIGNAL = 1.3; EXPRESSED IN ADULT LIVER, SIGNAL = 1.3; EXPRESSED IN HEART, SIGNAL = 1.1; EXPRESSED IN PLACENTA, SIGNAL = 1.2; EXPRESSED IN BRAIN, SIGNAL = 1.6; EXPRESSED IN BONE MARROW, SIGNAL = 1.3; EXPRESSED IN HBL100, SIGNAL = 1.2; EST_HUMAN HIT: H55588.1, EVALUE 1.00e-04; SWISSPROT HIT: P27596, EVALUE 4.20e-01
DYHCLWPSGPAQAEGGAAVRGPPDEAESPHGLV

SEQ ID NO: 34580 - protein, 121 aa, Homo sapiens
  MAP TO AC000029.14; EXPRESSED IN LUNG, SIGNAL = 5.2; EXPRESSED IN HEART, SIGNAL = 2.8; EXPRESSED IN BT474, SIGNAL = 4.1; EXPRESSED IN BONE MARROW, SIGNAL = 5.5; EXPRESSED IN FETAL LIVER, SIGNAL = 4.4; EXPRESSED IN HELA, SIGNAL = 2.9; EXPRESSED IN ADULT LIVER, SIGNAL = 2.5; EXPRESSED IN PLACENTA, SIGNAL = 6.8; EXPRESSED IN BRAIN, SIGNAL = 4.1; EXPRESSED IN HBL100, SIGNAL = 4.1; EST_HUMAN HIT: W32152.1, EVALUE 5.00e-05; SWISSPROT HIT: O95755, EVALUE 5.00e-11
HSRQWLEDALRENEAGSCFIFLVGTKKDLLVSRVALVVWVALGKMPPLTALIGGAMGREGGSTVGSRQLPIPLGLPAGEPGRWVNKGHFSQSGAACEQAEADAVHLAREMQAEYWSVSAKT

SEQ ID NO: 34581 - protein, 81 aa, Homo sapiens
  MAP TO AC000029.14; EXPRESSED IN PLACENTA, SIGNAL = 4.6; EXPRESSED IN FETAL LIVER, SIGNAL = 3.6; EXPRESSED IN LUNG, SIGNAL = 4.7; EXPRESSED IN HELA, SIGNAL = 4.2; EXPRESSED IN BT474, SIGNAL = 7.2; EXPRESSED IN BONE MARROW, SIGNAL =   5; EXPRESSED IN HBL100, SIGNAL = 3.8; EXPRESSED IN ADULT LIVER, SIGNAL = 3.1; EXPRESSED IN BRAIN, SIGNAL = 5.1; EXPRESSED IN HEART, SIGNAL = 3.5; EST_HUMAN HIT: AW665217.1, EVALUE 7.00e-31; SWISSPROT HIT: O35344, EVALUE 3.20e+00
WAVWNALCWWPAGKYAALEAQAIGLLLELLHSPMTIARLNATKALTMLAEAPEGRKALQTHVPTFRAMEVETYEKPQVAEA

SEQ ID NO: 34582 - protein, 162 aa, Homo sapiens
  MAP TO AC000029.14; EXPRESSED IN HELA, SIGNAL = 2.7; EXPRESSED IN BRAIN, SIGNAL = 3.8; EXPRESSED IN HEART, SIGNAL = 2.6; EXPRESSED IN PLACENTA, SIGNAL =   4; EXPRESSED IN ADULT LIVER, SIGNAL = 4.1; EXPRESSED IN LUNG, SIGNAL = 4.7; EXPRESSED IN FETAL LIVER, SIGNAL = 4.3; EXPRESSED IN HBL100, SIGNAL = 2.4; EXPRESSED IN BONE MARROW, SIGNAL = 2.7; EXPRESSED IN BT474, SIGNAL = 2.5; SWISSPROT HIT: P09053, EVALUE 4.90e+00; EST_HUMAN HIT: BF104006.1, EVALUE 4.00e-01
DCFPPSLSLIPSLESNRSLQTISFSRSEEPSGSKSLHRLCNPIPPPSPTPHHQIAPVGHNVVSMCRNPTTSHQASSFFSHQHFPQWILTTSPSLKHFQETKYFCFSAPALSLPLPMGWPSYPLCFPYMHLWEPTSAFSVLSHARPTSPDGSTWLSHRCLHLP

SEQ ID NO: 34583 - protein, 32 aa, Homo sapiens
  MAP TO AC000029.14; EXPRESSED IN HELA, SIGNAL = 2.7; EXPRESSED IN BRAIN, SIGNAL = 3.8; EXPRESSED IN HEART, SIGNAL = 2.6; EXPRESSED IN PLACENTA, SIGNAL =   4; EXPRESSED IN ADULT LIVER, SIGNAL = 4.1; EXPRESSED IN LUNG, SIGNAL = 4.7; EXPRESSED IN FETAL LIVER, SIGNAL = 4.3; EXPRESSED IN HBL100, SIGNAL = 2.4; EXPRESSED IN BONE MARROW, SIGNAL = 2.7; EXPRESSED IN BT474, SIGNAL = 2.5; EST_HUMAN HIT: BE967610.1, EVALUE 2.60e+00
VWCRGGWRNWVTEPVQGFGTRGLLRTGEGDGL

SEQ ID NO: 34584 - protein, 90 aa, Homo sapiens
  MAP TO AB023055.1; EXPRESSED IN BT474, SIGNAL = 0.74; EXPRESSED IN FETAL LIVER, SIGNAL = 0.62; EXPRESSED IN PLACENTA, SIGNAL = 0.66; EXPRESSED IN ADULT LIVER, SIGNAL = 0.65; EXPRESSED IN HEART, SIGNAL = 2.6; SWISSPROT HIT: O15553, EVALUE 5.30e-01; EST_HUMAN HIT: AW206410.1, EVALUE 7.00e-39
DQVEHEKQRILTEFELLHQVLEEEKNFLLSRIYWLGHEGTEAGKHYVASTEPQLNDLKKLIDSLKTKQNMPPRQLLEVSPLGAELQRGSS

SEQ ID NO: 34585 - protein, 143 aa, Homo sapiens
  MAP TO AB023055.1; EXPRESSED IN LUNG, SIGNAL = 1.1; EXPRESSED IN BRAIN, SIGNAL =   2; EXPRESSED IN HEART, SIGNAL = 1.7; EXPRESSED IN PLACENTA, SIGNAL = 1.9; EXPRESSED IN BT474, SIGNAL = 1.2; EXPRESSED IN HBL100, SIGNAL = 1.4; EXPRESSED IN FETAL LIVER, SIGNAL = 4.8; EXPRESSED IN HELA, SIGNAL = 1.5; EXPRESSED IN BONE MARROW, SIGNAL = 6.2; EXPRESSED IN ADULT LIVER, SIGNAL = 1.8; EST_HUMAN HIT: AI248753.1, EVALUE 1.00e-83; SWISSPROT HIT: P19474, EVALUE 3.00e-26
MASAASVTSLADEVNCPICQGTLREPVTIDCGHNFCRACLTRYCEIPGPDLEESPTCPLCKEPFRPGSFRPNWQLANVVENIERLQLVSTLGLGEEDVCQEHGEKIYFFCEDDEMQLCVVCREAGEHATHTMRFLEDAAAPYR

SEQ ID NO: 34586 - protein, 172 aa, Homo sapiens [sequence omitted]

SEQ ID NO: 34587 - protein, 143 aa, Homo sapiens; identical to SEQ ID NO: 34585
  MAP TO AB023054.1; EXPRESSED IN HEART, SIGNAL = 1.1; EXPRESSED IN FETAL LIVER, SIGNAL = 4.9; EXPRESSED IN LUNG, SIGNAL = 0.8; EXPRESSED IN BRAIN, SIGNAL = 1.1; EXPRESSED IN PLACENTA, SIGNAL = 1.6; EXPRESSED IN BT474, SIGNAL =   1; EXPRESSED IN BONE MARROW, SIGNAL = 6.6; EXPRESSED IN HBL100, SIGNAL = 0.67; EXPRESSED IN HELA, SIGNAL = 0.68; EXPRESSED IN ADULT LIVER, SIGNAL = 0.9; EST_HUMAN HIT: AI248753.1, EVALUE 1.00e-83; SWISSPROT HIT: P19474, EVALUE 3.00e-26

SEQ ID NO: 34588 - protein, 50 aa, Homo sapiens
  MAP TO AB023049.1; EXPRESSED IN FETAL LIVER, SIGNAL =  14; EXPRESSED IN LUNG, SIGNAL =  15; EXPRESSED IN PLACENTA, SIGNAL =  13; EXPRESSED IN BT474, SIGNAL =  12; EXPRESSED IN BONE MARROW, SIGNAL =  14; EXPRESSED IN HBL100, SIGNAL =  13; EXPRESSED IN ADULT LIVER, SIGNAL =  11; EXPRESSED IN BRAIN, SIGNAL =  15; EXPRESSED IN HEART, SIGNAL =  10; EXPRESSED IN HELA, SIGNAL =  13; EST_HUMAN HIT: W24140.1, EVALUE 3.00e-06; SWISSPROT HIT: O60231, EVALUE 2.00e-09
IHDLMHFDFLDPPPYETLLLALEQLYALGALNHLGELTTVSRGAAWVEAG

SEQ ID NO: 34589 - protein, 87 aa, Homo sapiens
  MAP TO AB023049.1; EXPRESSED IN PLACENTA, SIGNAL = 4.4; EXPRESSED IN BT474, SIGNAL = 4.1; EXPRESSED IN HBL100, SIGNAL = 4.2; EXPRESSED IN LUNG, SIGNAL = 4.8; EXPRESSED IN HELA, SIGNAL = 4.2; EXPRESSED IN ADULT LIVER, SIGNAL = 3.9; EXPRESSED IN BRAIN, SIGNAL = 4.7; EXPRESSED IN BONE MARROW, SIGNAL = 4.7; EXPRESSED IN FETAL LIVER, SIGNAL = 3.5; EXPRESSED IN HEART, SIGNAL = 4.1; EST_HUMAN HIT: AL134956.1, EVALUE 1.00e-25; SWISSPROT HIT: O60231, EVALUE 4.00e-28
VPELRKKSRREYLAKREREKLEDLEAELADEEFLFGDVELSRHERQELKYKRRVRDLAREYRAAGEQEKLEATNRYHMPKETRGQVR

SEQ ID NO: 34590 - protein, 511 aa, Homo sapiens
  MAP TO AB023049.1; EXPRESSED IN BONE MARROW, SIGNAL = 5.7; EXPRESSED IN HBL100, SIGNAL = 9.3; EXPRESSED IN ADULT LIVER, SIGNAL = 2.9; EXPRESSED IN BRAIN, SIGNAL =   2; EXPRESSED IN PLACENTA, SIGNAL = 1.3; EXPRESSED IN BT474, SIGNAL = 7.2; EXPRESSED IN LUNG, SIGNAL = 1.5; EXPRESSED IN HELA, SIGNAL = 5.8; EXPRESSED IN FETAL LIVER, SIGNAL = 2.8; EXPRESSED IN HEART, SIGNAL = 1.1; SWISSPROT HIT: Q02817, EVALUE 3.00e-24; EST_HUMAN HIT: AA487852.1, EVALUE 2.00e-73
GDQESPDACLPPTVPEAPAPPQKPLNSQSQKHLAPPPLLSPLLPSIKPTVRKTRQDGSQEAPEAPLSSELEPFHPKPKIRTRKSSRMTPFPATSAAPEPHPSTSTAQPVTPKPTSQATRSRTNRSSVKTPEPVVPTAPELQPSTSTDQPVTSEPTSQVTRGRKSRSSVKTPETVVPTALELQPSTSTDRPVTSEPTSQATRGRKNRSSVKTPEPVVPTAPELQPSTSTDQPVTSEPTYQATRGRKNRSSVKTPEPVVPTAPELRPSTSTDRPVTPKPTSRTTRSRTNMSSVKTPETVVPTAPELQISTSTDQPVTPKPTSRTTRSRTNMSSVKNPESTVPIAPELPPSTSTEQPVTPEPTSRATRGRKNRSSGKTPETLVPTAPKLEPSTSTDQPVTPEPTSQATRGRTNRSSVKTPETVVPTAPELQPSTSTDQPVTPEPTSQATRGRTDRSSVKTPETVVPTAPELQASASTDQPVTSDPTSRTTRGRKNRSSVKTPETVVPAAPELQP

SEQ ID NO: 34591 - protein, 238 aa, Homo sapiens
  MAP TO AB023049.1; EXPRESSED IN BRAIN, SIGNAL = 5.9; EXPRESSED IN HEART, SIGNAL = 4.6; EXPRESSED IN BT474, SIGNAL = 4.3; EXPRESSED IN HBL100, SIGNAL =  10; EXPRESSED IN FETAL LIVER, SIGNAL = 4.7; EXPRESSED IN LUNG, SIGNAL = 6.5; EXPRESSED IN HELA, SIGNAL = 5.2; EXPRESSED IN PLACENTA, SIGNAL =   5; EXPRESSED IN BONE MARROW, SIGNAL = 9.5; EXPRESSED IN ADULT LIVER, SIGNAL = 5.1; EST_HUMAN HIT: BE177118.1, EVALUE 3.00e-67; SWISSPROT HIT: P08553, EVALUE 3.00e-07
TLDEPWEVLATQPFCLRESEDSETQPFDTHLEAYGPCLSPPRAIPGDQHPESPVHTEPMGIQGRGRQTVDKVMGIPKETAERVGPERGPLERETEKLLPERQTDVTGEEELTKGKQDREQKQLLARDTQRQESDKNGESASPERDRESLKVEIETSEEIQEKQVQKQTLPSKAFEREVERPVANRECDPAELEEKVPKVILERDTQRGEPEGGSQDQKGQASSPTPEPGVGAGDLPGP

SEQ ID NO: 34592 - protein, 109 aa, Homo sapiens
  MAP TO Z98884.11; EXPRESSED IN LUNG, SIGNAL = 5.6; EXPRESSED IN HELA, SIGNAL = 4.9; EXPRESSED IN BRAIN, SIGNAL =   3; EXPRESSED IN HEART, SIGNAL = 4.1; EXPRESSED IN PLACENTA, SIGNAL = 3.8; EXPRESSED IN BT474, SIGNAL = 4.1; EXPRESSED IN BONE MARROW, SIGNAL = 5.1; EXPRESSED IN HBL100, SIGNAL = 3.7; EXPRESSED IN FETAL LIVER, SIGNAL = 4.1; EXPRESSED IN ADULT LIVER, SIGNAL = 3.9; EST_HUMAN HIT: AV697060.1, EVALUE 2.00e-38; SWISSPROT HIT: Q02817, EVALUE 2.00e-10
QCVTGNNGSESSPATTGALSTGSPPRENPSHPTASALSTGSPPMKNPSHPTASALSTGSPPMKNPSHPTASTLSMGLPPSRTPSHPTATVLSTGSPPSESPSRTGSAAS

SEQ ID NO: 34593 - protein, 71 aa, Homo sapiens
  MAP TO Z98884.11; EXPRESSED IN LUNG, SIGNAL = 5.6; EXPRESSED IN HELA, SIGNAL = 4.9; EXPRESSED IN BRAIN, SIGNAL =   3; EXPRESSED IN HEART, SIGNAL = 4.1; EXPRESSED IN PLACENTA, SIGNAL = 3.8; EXPRESSED IN BT474, SIGNAL = 4.1; EXPRESSED IN BONE MARROW, SIGNAL = 5.1; EXPRESSED IN HBL100, SIGNAL = 3.7; EXPRESSED IN FETAL LIVER, SIGNAL = 4.1; EXPRESSED IN ADULT LIVER, SIGNAL = 3.9; EST_HUMAN HIT: AV697060.1, EVALUE 5.00e-34; SWISSPROT HIT: P90682, EVALUE 4.40e+00
RIASHEESIPSYCQRSVHRIASHEESIPSYCQHTVHGIASQQDSIPSYCHCSVHGVTSQRIPIQNWFSSIR

SEQ ID NO: 34594 - protein, 70 aa, Homo sapiens
  MAP TO AC007374.3; EXPRESSED IN BONE MARROW, SIGNAL = 2.8; EXPRESSED IN HBL100, SIGNAL = 1.8; EXPRESSED IN FETAL LIVER, SIGNAL = 1.9; EXPRESSED IN LUNG, SIGNAL = 2.1; EXPRESSED IN ADULT LIVER, SIGNAL = 1.3; EXPRESSED IN BRAIN, SIGNAL = 1.7; EXPRESSED IN PLACENTA, SIGNAL = 2.4; EXPRESSED IN HEART, SIGNAL = 1.7; EXPRESSED IN HELA, SIGNAL = 1.6; EXPRESSED IN BT474, SIGNAL = 2.1
LSADVESADVEAIDRKGHCVCNSVLSVPIGTCLGPGGGGKGQVLKATGKDLGNSTGMVILGSGLKDEWAW

SEQ ID NO: 34595 - protein, 50 aa, Homo sapiens
  MAP TO AC007374.3; EXPRESSED IN BT474, SIGNAL = 3.6; EXPRESSED IN BONE MARROW, SIGNAL =   2; EXPRESSED IN HBL100, SIGNAL =   1; EXPRESSED IN HELA, SIGNAL = 0.84; EXPRESSED IN ADULT LIVER, SIGNAL = 1.2; EXPRESSED IN BRAIN, SIGNAL = 1.6; EXPRESSED IN PLACENTA, SIGNAL = 1.1; EXPRESSED IN FETAL LIVER, SIGNAL = 1.2; EXPRESSED IN LUNG, SIGNAL = 1.4; EXPRESSED IN HEART, SIGNAL = 2.2; EST_HUMAN HIT: AW407262.1, EVALUE 7.00e-23; SWISSPROT HIT: P42966, EVALUE 5.30e-01
LRPASLVVLPRSLAPAFERFCQVNTGPLPLLGQSEPEKWMLPPQGAISET

SEQ ID NO: 34596 - protein, 38 aa, Homo sapiens
  MAP TO AC007374.3; EXPRESSED IN BT474, SIGNAL = 3.6; EXPRESSED IN BONE MARROW, SIGNAL =   2; EXPRESSED IN HBL100, SIGNAL =   1; EXPRESSED IN HELA, SIGNAL = 0.84; EXPRESSED IN ADULT LIVER, SIGNAL = 1.2; EXPRESSED IN BRAIN, SIGNAL = 1.6; EXPRESSED IN PLACENTA, SIGNAL = 1.1; EXPRESSED IN FETAL LIVER, SIGNAL = 1.2; EXPRESSED IN LUNG, SIGNAL = 1.4; EXPRESSED IN HEART, SIGNAL = 2.2; EST_HUMAN HIT: AU124115.1, EVALUE 6.00e-17
SSDQPAWWSCPGPLLQLLKDSARSTLVLYPCWARVSQK

SEQ ID NO: 34597 - protein, 86 aa, Homo sapiens
  MAP TO AC007374.3; EXPRESSED IN LUNG, SIGNAL = 1.2; EXPRESSED IN BRAIN, SIGNAL = 0.93; EXPRESSED IN HEART, SIGNAL = 1.8; EXPRESSED IN PLACENTA, SIGNAL = 1.1; EXPRESSED IN BT474, SIGNAL =   4; EXPRESSED IN BONE MARROW, SIGNAL = 2.3; EXPRESSED IN HBL100, SIGNAL = 1.2; EXPRESSED IN FETAL LIVER, SIGNAL = 1.2; EXPRESSED IN HELA, SIGNAL = 0.74; EXPRESSED IN ADULT LIVER, SIGNAL = 1.3; EST_HUMAN HIT: R90819.1, EVALUE 2.00e-17; SWISSPROT HIT: Q09013, EVALUE 4.70e+00
NRGIGHLLCKDELLKASLSLSHARSVLITTGFPTHFNHEPPEETDGPPGAVALVAFLQALEKEVAIIVDQRAWNLHQKIVEDAVEQ

SEQ ID NO: 34598 - protein, 56 aa, Homo sapiens
  MAP TO AC007374.3; EXPRESSED IN BRAIN, SIGNAL = 1.4; EXPRESSED IN HELA, SIGNAL = 1.2; EXPRESSED IN ADULT LIVER, SIGNAL = 1.3; EXPRESSED IN BT474, SIGNAL = 1.8; EXPRESSED IN HBL100, SIGNAL = 1.1; EXPRESSED IN FETAL LIVER, SIGNAL = 1.9; EXPRESSED IN HEART, SIGNAL = 1.6; EXPRESSED IN PLACENTA, SIGNAL = 0.96; EXPRESSED IN BONE MARROW, SIGNAL = 1.5; EXPRESSED IN LUNG, SIGNAL = 1.6; EST_HUMAN HIT: BF091229.1, EVALUE 1.00e-25; SWISSPROT HIT: P45793, EVALUE 1.50e+00
VGDGGNELGMGKVKEAVRRHIRHGDVIACDVEADFAVIAGEHSDGRPVRPATQGER

SEQ ID NO: 34599 - protein, 56 aa, Homo sapiens
  MAP TO AC007374.3; EXPRESSED IN BRAIN, SIGNAL = 1.4; EXPRESSED IN HELA, SIGNAL = 1.2; EXPRESSED IN ADULT LIVER, SIGNAL = 1.3; EXPRESSED IN BT474, SIGNAL = 1.8; EXPRESSED IN HBL100, SIGNAL = 1.1; EXPRESSED IN FETAL LIVER, SIGNAL = 1.9; EXPRESSED IN HEART, SIGNAL = 1.6; EXPRESSED IN PLACENTA, SIGNAL = 0.96; EXPRESSED IN BONE MARROW, SIGNAL = 1.5; EXPRESSED IN LUNG, SIGNAL = 1.6; EST_HUMAN HIT: BF091229.1, EVALUE 1.00e-14; SWISSPROT HIT: P54643, EVALUE 1.50e+00
RSPWVAGRTGRPSECSPAMTAKSASTSQAMTSPCRMCLLTASLTLPIPSSLPPSPT

SEQ ID NO: 34600 - protein, 49 aa, Homo sapiens
  MAP TO AC007374.3; EXPRESSED IN BONE MARROW, SIGNAL = 4.8; EXPRESSED IN LUNG, SIGNAL = 4.6; EXPRESSED IN HELA, SIGNAL = 3.4; EXPRESSED IN ADULT LIVER, SIGNAL = 3.8; EXPRESSED IN BRAIN, SIGNAL = 3.8; EXPRESSED IN PLACENTA, SIGNAL = 3.3; EXPRESSED IN BT474, SIGNAL =   7; EXPRESSED IN HBL100, SIGNAL = 3.7; EXPRESSED IN FETAL LIVER, SIGNAL = 4.6; EXPRESSED IN HEART, SIGNAL = 5.3; EST_HUMAN HIT: BF091286.1, EVALUE 5.00e-21; SWISSPROT HIT: Q57695, EVALUE 1.20e+00
EEKMLGILVQHKVRSGVSGIVGMEVDGLPFHNTHAEMIQKLVDVTTAQV

SEQ ID NO: 34601 - protein, 47 aa, Homo sapiens
  MAP TO AC007374.3; EXPRESSED IN BONE MARROW, SIGNAL = 4.8; EXPRESSED IN LUNG, SIGNAL = 4.6; EXPRESSED IN HELA, SIGNAL = 3.4; EXPRESSED IN ADULT LIVER, SIGNAL = 3.8; EXPRESSED IN BRAIN, SIGNAL = 3.8; EXPRESSED IN PLACENTA, SIGNAL = 3.3; EXPRESSED IN BT474, SIGNAL =   7; EXPRESSED IN HBL100, SIGNAL = 3.7; EXPRESSED IN FETAL LIVER, SIGNAL = 4.6; EXPRESSED IN HEART, SIGNAL = 5.3; SWISSPROT HIT: Q80923, EVALUE 7.90e+00; EST_HUMAN HIT: BE670561.1, EVALUE 6.00e-24
PSTPSISALFFSRKKKCWASWCSTKSGVASRASWAWRWMGCPSTTPT

SEQ ID NO: 34602 - protein, 33 aa, Homo sapiens
  MAP TO AC007359.2; EXPRESSED IN ADULT LIVER, SIGNAL = 5.1; EXPRESSED IN BRAIN, SIGNAL = 4.6; EXPRESSED IN BONE MARROW, SIGNAL = 4.2; EXPRESSED IN HELA, SIGNAL = 4.4; EXPRESSED IN PLACENTA, SIGNAL = 3.2; EXPRESSED IN BT474, SIGNAL = 2.8; EXPRESSED IN HBL100, SIGNAL = 3.3; EXPRESSED IN FETAL LIVER, SIGNAL = 3.9; EXPRESSED IN LUNG, SIGNAL = 5.7; EXPRESSED IN HEART, SIGNAL = 5.2; EST_HUMAN HIT: AW103851.1, EVALUE 1.00e-04
DVIWMPAHVGMPPSPLQAHDSQKNKEHRAMQPK

SEQ ID NO: 34603 - protein, 32 aa, Homo sapiens
  MAP TO AC007359.2; EXPRESSED IN ADULT LIVER, SIGNAL = 5.1; EXPRESSED IN BRAIN, SIGNAL = 4.6; EXPRESSED IN BONE MARROW, SIGNAL = 4.2; EXPRESSED IN HELA, SIGNAL = 4.4; EXPRESSED IN PLACENTA, SIGNAL = 3.2; EXPRESSED IN BT474, SIGNAL = 2.8; EXPRESSED IN HBL100, SIGNAL = 3.3; EXPRESSED IN FETAL LIVER, SIGNAL = 3.9; EXPRESSED IN LUNG, SIGNAL = 5.7; EXPRESSED IN HEART, SIGNAL = 5.2; EST_HUMAN HIT: AA936316.1, EVALUE 6.00e-03
MLFGCQHMLACLPVHCRLMIHRKIKNTERCSP

SEQ ID NO: 34604 - protein, 24 aa, Homo sapiens
  MAP TO AC007359.2; EXPRESSED IN BT474, SIGNAL = 0.96; EXPRESSED IN BONE MARROW, SIGNAL = 1.2; EXPRESSED IN LUNG, SIGNAL = 0.93; EXPRESSED IN HELA, SIGNAL = 0.84; EXPRESSED IN ADULT LIVER, SIGNAL = 1.1; EXPRESSED IN PLACENTA, SIGNAL = 1.4; EXPRESSED IN FETAL LIVER, SIGNAL = 0.92; EXPRESSED IN HEART, SIGNAL = 1.4; EXPRESSED IN HBL100, SIGNAL = 1.1; EXPRESSED IN BRAIN, SIGNAL = 0.97
DWLQKHLKYQNVCLLKLLLYNDAV

SEQ ID NO: 34605 - protein, 34 aa, Homo sapiens
  MAP TO AC007344.2; EXPRESSED IN BT474, SIGNAL = 1.2; EXPRESSED IN HBL100, SIGNAL = 1.5; EXPRESSED IN FETAL LIVER, SIGNAL =   1; EXPRESSED IN HELA, SIGNAL = 1.4; EXPRESSED IN PLACENTA, SIGNAL = 1.4; EXPRESSED IN BONE MARROW, SIGNAL = 1.4; EXPRESSED IN LUNG, SIGNAL = 1.2; EXPRESSED IN ADULT LIVER, SIGNAL = 1.8; EXPRESSED IN BRAIN, SIGNAL = 1.1; EXPRESSED IN HEART, SIGNAL = 1.3; EST_HUMAN HIT: BF184891.1, EVALUE 8.70e-01
TARPTLHFLLLLLLLNLLNVKMMKIKTFMMIYFH

SEQ ID NO: 34606 - protein, 312 aa, Homo sapiens
  MAP TO AC007325.11; EXPRESSED IN PLACENTA, SIGNAL = 1.4; EXPRESSED IN BT474, SIGNAL = 2.1; EXPRESSED IN LUNG, SIGNAL = 1.2; EXPRESSED IN HELA, SIGNAL = 2.1; EXPRESSED IN HEART, SIGNAL = 1.4; EXPRESSED IN FETAL LIVER, SIGNAL =   1; EXPRESSED IN BONE MARROW, SIGNAL = 2.2; EXPRESSED IN HBL100, SIGNAL = 1.2; EXPRESSED IN ADULT LIVER, SIGNAL = 1.3; EXPRESSED IN BRAIN, SIGNAL = 1.8; SWISSPROT HIT: P10267, EVALUE 0.00e+00; EST_HUMAN HIT: AU124350.1, EVALUE 0.00e+00
MLVVGNIVIKPDSQTITCENCRLLTCIDSTFNWQHRILLVRAREGVWILVSMDRPWEASPSVHILTEVLKGVLNRSKRFIFTLIAVIMGLIAVTATGAVAGVALHSSVQSVNFVNDWQKNSTRLWNSQSSIDQKLANQINDLRQTVIWMGDRLMSLEHRFQLQCDWNTSDFCITPQIYNESEHHWDMVRRHLQGREDNLTLDISKLKEQIFEASKAHLNLVPGTEAIAGVADGLANLNPVTWVKTIGSTTIINLILILVCLFCLLLVCRCTQQLRRDSDHRERAMMTMAVLSKRKGGNVGKSKRDQIVTVSV

SEQ ID NO: 34607 - protein, 20 aa, Homo sapiens
  MAP TO AC007250.2; EXPRESSED IN BONE MARROW, SIGNAL = 1.2; EXPRESSED IN LUNG, SIGNAL = 1.2; EXPRESSED IN BRAIN, SIGNAL = 0.95; EXPRESSED IN ADULT LIVER, SIGNAL = 1.5; EXPRESSED IN BT474, SIGNAL =   1; EXPRESSED IN FETAL LIVER, SIGNAL = 1.5; EXPRESSED IN PLACENTA, SIGNAL = 1.2; EXPRESSED IN HELA, SIGNAL =   1; EXPRESSED IN HBL100, SIGNAL = 1.2; EXPRESSED IN HEART, SIGNAL = 0.96
NRGVLTTRLMILYMQVIGTH

SEQ ID NO: 34608 - protein, 45 aa, Homo sapiens
  MAP TO AC007308.13; EXPRESSED IN FETAL LIVER, SIGNAL =  10; EXPRESSED IN HELA, SIGNAL =  10; EXPRESSED IN PLACENTA, SIGNAL =  11; EXPRESSED IN HBL100, SIGNAL = 8.4; EXPRESSED IN HEART, SIGNAL =  11; EXPRESSED IN BONE MARROW, SIGNAL = 9.9; EXPRESSED IN LUNG, SIGNAL =  19; EXPRESSED IN BRAIN, SIGNAL =  12; EXPRESSED IN BT474, SIGNAL = 8.1; EXPRESSED IN ADULT LIVER, SIGNAL = 9.5; EST_HUMAN HIT: AW363993.1, EVALUE 5.00e-21
LWPEEWYEGVCEIATKSPLLTFPSKEPLRSVLQYNSAMKNDTVTP

SEQ ID NO: 34609 - protein, 45 aa, Homo sapiens
  MAP TO AC007383.2; EXPRESSED IN PLACENTA, SIGNAL = 2.7; EXPRESSED IN HBL100, SIGNAL = 3.8; EXPRESSED IN HELA, SIGNAL = 4.6; EXPRESSED IN HEART, SIGNAL = 9.8; EXPRESSED IN LUNG, SIGNAL = 1.3; EXPRESSED IN BONE MARROW, SIGNAL = 1.7; EXPRESSED IN BRAIN, SIGNAL = 4.2; EXPRESSED IN ADULT LIVER, SIGNAL = 2.4; EXPRESSED IN BT474, SIGNAL = 4.1; EXPRESSED IN FETAL LIVER, SIGNAL = 2.1; SWISSPROT HIT: P28331, EVALUE 9.00e-20; EST_HUMAN HIT: AW614813.1, EVALUE 3.00e-19
IAGMTLPYDTLDQVRNRLEEVSPNLVRYDDIEGANYFQQANELSK

SEQ ID NO: 34610 - protein, 29 aa, Homo sapiens
  MAP TO AC007638.1; EXPRESSED IN BONE MARROW, SIGNAL = 1.9; EXPRESSED IN BRAIN, SIGNAL = 2.4; EXPRESSED IN BT474, SIGNAL = 2.1; EXPRESSED IN FETAL LIVER, SIGNAL = 2.1; EXPRESSED IN ADULT LIVER, SIGNAL = 1.7; EXPRESSED IN HELA, SIGNAL =  95; EXPRESSED IN PLACENTA, SIGNAL = 1.5; EXPRESSED IN HBL100, SIGNAL = 1.7; EXPRESSED IN HEART, SIGNAL = 1.9; EXPRESSED IN LUNG, SIGNAL = 2.1; EST_HUMAN HIT: AW937180.1, EVALUE 1.60e-01; SWISSPROT HIT: P36417, EVALUE 3.70e+00
SPSPQHHKSLENQQPHNHGSGENQHPSSH

SEQ ID NO: 34611 - protein, 57 aa, Homo sapiens
  MAP TO AC007279.3; EXPRESSED IN FETAL LIVER, SIGNAL = 1.1; EXPRESSED IN BT474, SIGNAL = 1.2; EXPRESSED IN HBL100, SIGNAL = 1.1; EXPRESSED IN HEART, SIGNAL = 1.6; EXPRESSED IN BRAIN, SIGNAL = 1.5
VVTSSGLLLPVLLPRLYPPLFMLYALDNDREEDIYWECVLRLNKQPDIALLGFLGVQ

SEQ ID NO: 34612 - protein, 57 aa, Homo sapiens
  MAP TO AC007375.4; EXPRESSED IN LUNG, SIGNAL = 2.7; EXPRESSED IN BONE MARROW, SIGNAL = 1.9; EXPRESSED IN BRAIN, SIGNAL = 2.4; EXPRESSED IN FETAL LIVER, SIGNAL = 1.9; EXPRESSED IN BT474, SIGNAL = 2.9; EXPRESSED IN ADULT LIVER, SIGNAL = 1.9; EXPRESSED IN HELA, SIGNAL = 1.9; EXPRESSED IN PLACENTA, SIGNAL = 2.1; EXPRESSED IN HBL100, SIGNAL = 1.9; EXPRESSED IN HEART, SIGNAL = 3.5; EST_HUMAN HIT: BF130808.1, EVALUE 1.20e+00; SWISSPROT HIT: O78485, EVALUE 1.70e-01
EGLLPKHPRGHAERQGRREMRGNLMSNEASWRTLGTDKSHSIWRTKCMDSNKDSHLP

SEQ ID NO: 34613 - protein, 57 aa, Homo sapiens
  MAP TO AC007378.2; EXPRESSED IN BT474, SIGNAL = 1.2; EXPRESSED IN PLACENTA, SIGNAL = 9.7; EXPRESSED IN HELA, SIGNAL = 2.3; EXPRESSED IN HBL100, SIGNAL =   3; EXPRESSED IN HEART, SIGNAL = 1.7; EXPRESSED IN LUNG, SIGNAL = 1.3; EXPRESSED IN BRAIN, SIGNAL = 0.99; EXPRESSED IN ADULT LIVER, SIGNAL = 1.5; SWISSPROT HIT: P25391, EVALUE 2.70e+00; EST_HUMAN HIT: AA057257.1, EVALUE 5.40e+00
ENWTDDQLLGFKPCNENLIAGCNIINGKCECNTIRTCSNPFEFPSQDMCLSALKRIE

SEQ ID NO: 34614 - protein, 68 aa, Homo sapiens
  MAP TO AC007536.9; EXPRESSED IN BONE MARROW, SIGNAL =  13; EXPRESSED IN BRAIN, SIGNAL =   5; EXPRESSED IN HBL100, SIGNAL = 4.5; EXPRESSED IN HELA, SIGNAL = 7.3; EXPRESSED IN HEART, SIGNAL = 5.5; EXPRESSED IN LUNG, SIGNAL = 9.4; EXPRESSED IN ADULT LIVER, SIGNAL = 4.1; EXPRESSED IN FETAL LIVER, SIGNAL = 6.1; EXPRESSED IN BT474, SIGNAL = 4.2; EXPRESSED IN PLACENTA, SIGNAL = 6.4; EST_HUMAN HIT: AL045510.1, EVALUE 9.00e-31; SWISSPROT HIT: P11169, EVALUE 8.00e-36
DNYNGMSFVCIGAILVFVAFFEIGPGPIPWFIVAELFSQGPRPAAMAVAGCSNWTSNFLVGLLFPSAA

SEQ ID NO: 34615 - protein, 38 aa, Homo sapiens
  MAP TO AC007536.9; EXPRESSED IN BONE MARROW, SIGNAL =  13; EXPRESSED IN BRAIN, SIGNAL =   5; EXPRESSED IN HBL100, SIGNAL = 4.5; EXPRESSED IN HELA, SIGNAL = 7.3; EXPRESSED IN HEART, SIGNAL = 5.5; EXPRESSED IN LUNG, SIGNAL = 9.4; EXPRESSED IN ADULT LIVER, SIGNAL = 4.1; EXPRESSED IN FETAL LIVER, SIGNAL = 6.1; EXPRESSED IN BT474, SIGNAL = 4.2; EXPRESSED IN PLACENTA, SIGNAL = 6.4; EST_HUMAN HIT: AL045510.1, EVALUE 2.00e-17; SWISSPROT HIT: P18832, EVALUE 3.60e+00
LKLDQAPFPGLLWPNSSARAPAQLRWQWPAAPTGPPTS

SEQ ID NO: 34616 - protein, 35 aa, Homo sapiens
  MAP TO AC007678.1; EXPRESSED IN PLACENTA, SIGNAL = 4.9; EXPRESSED IN BRAIN, SIGNAL = 2.9; EXPRESSED IN FETAL LIVER, SIGNAL = 9.8; EXPRESSED IN ADULT LIVER, SIGNAL = 2.4; EXPRESSED IN HEART, SIGNAL = 3.4; EXPRESSED IN HELA, SIGNAL = 3.7; EXPRESSED IN HBL100, SIGNAL = 3.5; EXPRESSED IN LUNG, SIGNAL = 4.7; EXPRESSED IN BONE MARROW, SIGNAL = 2.6; EXPRESSED IN BT474, SIGNAL = 3.1; EST_HUMAN HIT: AU131374.1, EVALUE 1.00e-03; SWISSPROT HIT: O46313, EVALUE 6.20e+00
MAKVATMTPDALSQQNPPKNGEATVNGEEKGAHAI

SEQ ID NO: 34617 - protein, 38 aa, Homo sapiens
  MAP TO AC007718.1; EXPRESSED IN ADULT LIVER, SIGNAL = 0.91; EXPRESSED IN BT474, SIGNAL =   2; EXPRESSED IN HBL100, SIGNAL = 1.1; EXPRESSED IN PLACENTA, SIGNAL = 0.98; EXPRESSED IN HELA, SIGNAL = 1.1; EXPRESSED IN HEART, SIGNAL = 1.1; EXPRESSED IN LUNG, SIGNAL = 1.4
LSADNNHQFSVSNSCSLEKKRPLKKNENALKQNSSEIQ

SEQ ID NO: 34618 - protein, 20 aa, Homo sapiens
  MAP TO AC008123.9; EXPRESSED IN BT474, SIGNAL = 2.8; EXPRESSED IN HBL100, SIGNAL = 2.5; EXPRESSED IN BRAIN, SIGNAL = 2.8; EXPRESSED IN LUNG, SIGNAL = 3.7; EXPRESSED IN BONE MARROW, SIGNAL = 2.6; EXPRESSED IN ADULT LIVER, SIGNAL = 2.5; EXPRESSED IN FETAL LIVER, SIGNAL = 2.7; EXPRESSED IN PLACENTA, SIGNAL = 2.9; EXPRESSED IN HEART, SIGNAL =   2; EXPRESSED IN HELA, SIGNAL = 2.4; EST_HUMAN HIT: AW954545.1, EVALUE 4.00e-04
MAAPRPSLPDLLRDVWLHGR

SEQ ID NO: 34619 - protein, 40 aa, Homo sapiens
  MAP TO AC008123.9; EXPRESSED IN BT474, SIGNAL = 2.8; EXPRESSED IN HBL100, SIGNAL = 2.5; EXPRESSED IN BRAIN, SIGNAL = 2.8; EXPRESSED IN LUNG, SIGNAL = 3.7; EXPRESSED IN BONE MARROW, SIGNAL = 2.6; EXPRESSED IN ADULT LIVER, SIGNAL = 2.5; EXPRESSED IN FETAL LIVER, SIGNAL = 2.7; EXPRESSED IN PLACENTA, SIGNAL = 2.9; EXPRESSED IN HEART, SIGNAL =   2; EXPRESSED IN HELA, SIGNAL = 2.4; EST_HUMAN HIT: BE791724.1, EVALUE 4.00e-13
VIEKVQVAAAILGSLFLIASISWLIWSTFSPSARWQRQDL

SEQ ID NO: 34620 - protein, 24 aa, Homo sapiens
  MAP TO AC009491.2; EXPRESSED IN BT474, SIGNAL = 1.1; EXPRESSED IN PLACENTA, SIGNAL = 1.9; EXPRESSED IN BONE MARROW, SIGNAL = 1.7; EXPRESSED IN ADULT LIVER, SIGNAL = 1.3; EXPRESSED IN FETAL LIVER, SIGNAL = 1.2; EXPRESSED IN HEART, SIGNAL = 1.2; EXPRESSED IN HELA, SIGNAL = 1.3; EXPRESSED IN HBL100, SIGNAL = 1.4; EXPRESSED IN BRAIN, SIGNAL = 1.3
IPLNDDDDDDDDNDDDDDDDDSDN

SEQ ID NO: 34621 - protein, 56 aa, Homo sapiens
  MAP TO AC009506.2; EXPRESSED IN HBL100, SIGNAL = 2.1; EXPRESSED IN HELA, SIGNAL = 1.5; EXPRESSED IN PLACENTA, SIGNAL = 1.7; EXPRESSED IN HEART, SIGNAL = 1.7; EXPRESSED IN BONE MARROW, SIGNAL = 1.7; EXPRESSED IN LUNG, SIGNAL = 1.5; EXPRESSED IN BRAIN, SIGNAL = 1.4; EXPRESSED IN BT474, SIGNAL = 2.6; EXPRESSED IN ADULT LIVER, SIGNAL = 1.2; EXPRESSED IN FETAL LIVER, SIGNAL = 1.8; EST_HUMAN HIT: AV764617.1, EVALUE 7.00e-06
LTFSLLIDMESGERLPSSAASSTTPTSSSTPSVASVVSKGGLSTGVASLSSTINPC

SEQ ID NO: 34622 - protein, 41 aa, Homo sapiens
  MAP TO AC008119.6; EXPRESSED IN BRAIN, SIGNAL = 1.6; EXPRESSED IN ADULT LIVER, SIGNAL = 1.2; EXPRESSED IN PLACENTA, SIGNAL = 1.9; EXPRESSED IN LUNG, SIGNAL = 1.4; EXPRESSED IN BONE MARROW, SIGNAL = 1.2; EXPRESSED IN FETAL LIVER, SIGNAL = 1.8; EXPRESSED IN BT474, SIGNAL = 1.5; EXPRESSED IN HEART, SIGNAL = 1.6; EXPRESSED IN HELA, SIGNAL = 1.7; EXPRESSED IN HBL100, SIGNAL = 1.9; SWISSPROT HIT: O32866, EVALUE 6.10e+00; EST_HUMAN HIT: AU143744.1, EVALUE 1.00e-17
MEATFAEYEEWSEDPIPESVIQNYNKALQQLEKYKPYEEAL

SEQ ID NO: 34623 - protein, 19 aa, Homo sapiens
  MAP TO AC008119.6; EXPRESSED IN BRAIN, SIGNAL = 1.6; EXPRESSED IN ADULT LIVER, SIGNAL = 1.2; EXPRESSED IN PLACENTA, SIGNAL = 1.9; EXPRESSED IN LUNG, SIGNAL = 1.4; EXPRESSED IN BONE MARROW, SIGNAL = 1.2; EXPRESSED IN FETAL LIVER, SIGNAL = 1.8; EXPRESSED IN BT474, SIGNAL = 1.5; EXPRESSED IN HEART, SIGNAL = 1.6; EXPRESSED IN HELA, SIGNAL = 1.7; EXPRESSED IN HBL100, SIGNAL = 1.9
VFGLIKPNGKTHGAESIFQ

SEQ ID NO: 34624 - protein, 42 aa, Homo sapiens
  MAP TO AC009487.1; EXPRESSED IN BT474, SIGNAL = 2.9; EXPRESSED IN FETAL LIVER, SIGNAL = 1.5; EXPRESSED IN HELA, SIGNAL = 2.6; EXPRESSED IN PLACENTA, SIGNAL = 1.5; EXPRESSED IN HBL100, SIGNAL = 2.5; EXPRESSED IN HEART, SIGNAL = 2.5; EXPRESSED IN BONE MARROW, SIGNAL = 0.93; EXPRESSED IN BRAIN, SIGNAL = 1.9; SWISSPROT HIT: P41883, EVALUE 5.00e-17; EST_HUMAN HIT: BE708993.1, EVALUE 5.00e-18
HSHPGFGCWLSGVDINTQQSFEALSERAVAVVVDPIQSVKGK

SEQ ID NO: 34625 - protein, 38 aa, Homo sapiens
  MAP TO AC009487.1; EXPRESSED IN BT474, SIGNAL = 2.9; EXPRESSED IN FETAL LIVER, SIGNAL = 1.5; EXPRESSED IN HELA, SIGNAL = 2.6; EXPRESSED IN PLACENTA, SIGNAL = 1.5; EXPRESSED IN HBL100, SIGNAL = 2.5; EXPRESSED IN HEART, SIGNAL = 2.5; EXPRESSED IN BONE MARROW, SIGNAL = 0.93; EXPRESSED IN BRAIN, SIGNAL = 1.9; EST_HUMAN HIT: BE312675.1, EVALUE 1.00e-16
TVTLALVVGFLVWISTLSRALKPCRRELWQWLWIPFRV

SEQ ID NO: 34626 - protein, 46 aa, Homo sapiens
  MAP TO AC009492.1; EXPRESSED IN HBL100, SIGNAL = 0.96; EXPRESSED IN HEART, SIGNAL = 5.5; EXPRESSED IN BONE MARROW, SIGNAL =   1; EXPRESSED IN LUNG, SIGNAL = 1.4; EXPRESSED IN BRAIN, SIGNAL = 1.2; EXPRESSED IN ADULT LIVER, SIGNAL = 1.1; EXPRESSED IN BT474, SIGNAL = 1.1; EXPRESSED IN FETAL LIVER, SIGNAL = 1.1; EXPRESSED IN PLACENTA, SIGNAL = 1.2; EXPRESSED IN HELA, SIGNAL = 0.98; EST_HUMAN HIT: AW875060.1, EVALUE 3.00e-18
TKGTTLGIEVHLVGSICGSFISNVHSTIEADPEIIQILELEDQDSK

SEQ ID NO: 34627 - protein, 81 aa, Homo sapiens
  MAP TO AC009808.2; EXPRESSED IN ADULT LIVER, SIGNAL = 1.4; EXPRESSED IN BT474, SIGNAL = 1.1; EXPRESSED IN FETAL LIVER, SIGNAL = 1.4; EXPRESSED IN PLACENTA, SIGNAL = 1.2; EXPRESSED IN HBL100, SIGNAL = 1.2; EXPRESSED IN HELA, SIGNAL = 1.6; EXPRESSED IN HEART, SIGNAL =   1; EXPRESSED IN LUNG, SIGNAL = 1.3; EXPRESSED IN BONE MARROW, SIGNAL = 1.8; EXPRESSED IN BRAIN, SIGNAL = 1.5; SWISSPROT HIT: Q39102, EVALUE 6.80e-01; EST_HUMAN HIT: AA023002.1, EVALUE 1.20e+00
  unsure 1
  unsure 6
XTPVMXQGHSYTIVTIQSPKTLRKEPFPLTRGPYVPKSEENNPHYFSCSPFSSLSTPKVDPVWQTPKAWRSQNLRFLAEGQ

SEQ ID NO: 34628 - protein, 21 aa, Homo sapiens
  MAP TO AC009890.1; EXPRESSED IN BT474, SIGNAL = 2.4; EXPRESSED IN HBL100, SIGNAL = 2.4; EXPRESSED IN HEART, SIGNAL = 2.7; EXPRESSED IN LUNG, SIGNAL = 3.4; EXPRESSED IN BRAIN, SIGNAL = 3.5; EXPRESSED IN FETAL LIVER, SIGNAL =   9; EXPRESSED IN ADULT LIVER, SIGNAL = 3.8; EXPRESSED IN PLACENTA, SIGNAL = 5.4; EXPRESSED IN HELA, SIGNAL = 2.8; EXPRESSED IN BONE MARROW, SIGNAL = 3.6
  unsure 17
DTELRCSQACCNVKFRXLKNH

SEQ ID NO: 34629 - protein, 61 aa, Homo sapiens
  MAP TO AC009944.2; EXPRESSED IN PLACENTA, SIGNAL = 3.5; EXPRESSED IN HBL100, SIGNAL = 2.8; EXPRESSED IN HEART, SIGNAL = 1.2; EXPRESSED IN BRAIN, SIGNAL = 1.8; EXPRESSED IN FETAL LIVER, SIGNAL = 1.5; EXPRESSED IN ADULT LIVER, SIGNAL = 1.2; EXPRESSED IN HELA, SIGNAL = 2.1; EXPRESSED IN LUNG, SIGNAL = 1.5; EXPRESSED IN BONE MARROW, SIGNAL = 1.4; EXPRESSED IN BT474, SIGNAL = 2.5; SWISSPROT HIT: P50760, EVALUE 2.00e+00; EST_HUMAN HIT: AU132448.1, EVALUE 1.00e-30
HDSGTECTPGESKNLGQKENGNYIMYARATSGDKLNNNKFSLCSIRNISQVLEKKRNNCFV

SEQ ID NO: 34630 - protein, 46 aa, Homo sapiens
  MAP TO AC010703.1; EXPRESSED IN BT474, SIGNAL =  30; EXPRESSED IN HBL100, SIGNAL =  43; EXPRESSED IN HEART, SIGNAL =  13; EXPRESSED IN LUNG, SIGNAL = 7.4; EXPRESSED IN BRAIN, SIGNAL =  14; EXPRESSED IN ADULT LIVER, SIGNAL = 6.5; EXPRESSED IN FETAL LIVER, SIGNAL =  11; EXPRESSED IN PLACENTA, SIGNAL =  20; EXPRESSED IN HELA, SIGNAL =  37; EXPRESSED IN BONE MARROW, SIGNAL =  17; EST_HUMAN HIT: BE676540.1, EVALUE 1.00e-04; SWISSPROT HIT: P12947, EVALUE 3.60e-02
KAMLFVFLLSWVVKMEVTFQLWPGRMAPAEKGGKKKGSPAVNEVVT

SEQ ID NO: 34631 - protein, 37 aa, Homo sapiens
  MAP TO AC010726.2; EXPRESSED IN BONE MARROW, SIGNAL = 1.9; EXPRESSED IN BRAIN, SIGNAL = 1.9; EXPRESSED IN HBL100, SIGNAL = 1.4; EXPRESSED IN HELA, SIGNAL = 1.7; EXPRESSED IN HEART, SIGNAL = 1.8; EXPRESSED IN LUNG, SIGNAL = 2.8; EXPRESSED IN ADULT LIVER, SIGNAL = 1.7; EXPRESSED IN FETAL LIVER, SIGNAL = 1.9; EXPRESSED IN BT474, SIGNAL = 1.8; EXPRESSED IN PLACENTA, SIGNAL = 1.8; SWISSPROT HIT: P44538, EVALUE 6.20e+00
MTQEPSAIMREVPEMVNILKGTGDIHNTEIQNDNGKV

SEQ ID NO: 34632 - protein, 27 aa, Homo sapiens
  MAP TO AC009959.2; EXPRESSED IN PLACENTA, SIGNAL = 2.1; EXPRESSED IN BONE MARROW, SIGNAL = 1.9; EXPRESSED IN BRAIN, SIGNAL = 2.1; EXPRESSED IN FETAL LIVER, SIGNAL = 2.2; EXPRESSED IN HEART, SIGNAL = 1.9; EXPRESSED IN HELA, SIGNAL = 2.1; EXPRESSED IN HBL100, SIGNAL = 1.9; EXPRESSED IN LUNG, SIGNAL = 2.8; EXPRESSED IN ADULT LIVER, SIGNAL = 1.7; EXPRESSED IN BT474, SIGNAL = 2.1; SWISSPROT HIT: P04105, EVALUE 3.70e+00
QSIAGTSLHVGQAAARVGTAPWAGERV

SEQ ID NO: 34633 - protein, 27 aa, Homo sapiens
  MAP TO AC010149.1; EXPRESSED IN BT474, SIGNAL = 1.2; EXPRESSED IN BONE MARROW, SIGNAL = 1.5; EXPRESSED IN LUNG, SIGNAL = 1.6; EXPRESSED IN BRAIN, SIGNAL = 0.96; EXPRESSED IN ADULT LIVER, SIGNAL = 1.2; EXPRESSED IN FETAL LIVER, SIGNAL = 1.6; EXPRESSED IN PLACENTA, SIGNAL = 1.5; EXPRESSED IN HEART, SIGNAL = 1.9; EXPRESSED IN HELA, SIGNAL = 1.1; EXPRESSED IN HBL100, SIGNAL = 2.1; SWISSPROT HIT: P23497, EVALUE 6.00e-09; EST_HUMAN HIT: AI379485.1, EVALUE 8.00e-08
FSSSDFSDLSNGEELQETCSSSLRRGS

SEQ ID NO: 34634 - protein, 61 aa, Homo sapiens
  MAP TO AC010170.3; EXPRESSED IN HBL100, SIGNAL =   2; EXPRESSED IN HELA, SIGNAL = 1.4; EXPRESSED IN PLACENTA, SIGNAL = 1.4; EXPRESSED IN HEART, SIGNAL = 1.6; EXPRESSED IN BONE MARROW, SIGNAL = 1.3; EXPRESSED IN LUNG, SIGNAL = 1.3; EXPRESSED IN BRAIN, SIGNAL = 1.4; EXPRESSED IN BT474, SIGNAL = 1.9; EXPRESSED IN FETAL LIVER, SIGNAL = 1.4; EXPRESSED IN ADULT LIVER, SIGNAL = 1.1
YCSLDLLHGSFLLRDPLKLALGLPISTWFQAVFTSVSYAAFESEEADQALYFLLRERYKKP

SEQ ID NO: 34635 - protein, 82 aa, Homo sapiens
  MAP TO AC009925.2; EXPRESSED IN BT474, SIGNAL = 1.6; EXPRESSED IN ADULT LIVER, SIGNAL = 1.8; EXPRESSED IN PLACENTA, SIGNAL = 2.5; EXPRESSED IN FETAL LIVER, SIGNAL = 1.3; EXPRESSED IN HEART, SIGNAL = 2.3; EXPRESSED IN HELA, SIGNAL =   2; EXPRESSED IN HBL100, SIGNAL = 1.9; EXPRESSED IN BRAIN, SIGNAL = 1.5; EXPRESSED IN LUNG, SIGNAL = 1.4; EXPRESSED IN BONE MARROW, SIGNAL = 1.9; EST_HUMAN HIT: BE064410.1, EVALUE 8.00e-28; SWISSPROT HIT: P50531, EVALUE 4.50e+00
  unsure 74
GNMVRTVNSISMSPLLHFFSCKVNALVRGNAVLNTMTMEKAFHESTDSSIGRSIACRIEKPVSEVSVYSSEDKXTILSMMED

SEQ ID NO: 34636 - protein, 29 aa, Homo sapiens
  MAP TO AC009948.2; EXPRESSED IN BRAIN, SIGNAL = 1.3; EXPRESSED IN BT474, SIGNAL = 1.4; EXPRESSED IN LUNG, SIGNAL = 1.4; EXPRESSED IN BONE MARROW, SIGNAL = 1.1; EXPRESSED IN ADULT LIVER, SIGNAL = 1.3; EXPRESSED IN FETAL LIVER, SIGNAL = 1.4; EXPRESSED IN PLACENTA, SIGNAL = 1.5; EXPRESSED IN HEART, SIGNAL = 1.4; EXPRESSED IN HELA, SIGNAL = 1.3; EXPRESSED IN HBL100, SIGNAL = 1.6; EST_HUMAN HIT: BF063046.1, EVALUE 1.00e-09; SWISSPROT HIT: P16258, EVALUE 1.60e+00
ELIIPGEQHFYMKAVNAAERQRWLVALGS

SEQ ID NO: 34637 - protein, 111 aa, Homo sapiens
  MAP TO AC010731.1; EXPRESSED IN ADULT LIVER, SIGNAL = 0.96; EXPRESSED IN HBL100, SIGNAL = 0.98; EXPRESSED IN HELA, SIGNAL =   1; EXPRESSED IN HEART, SIGNAL = 1.5; EXPRESSED IN BONE MARROW, SIGNAL = 0.9; EXPRESSED IN LUNG, SIGNAL = 1.8; EXPRESSED IN BRAIN, SIGNAL = 1.1; EST_HUMAN HIT: AU125260.1, EVALUE 2.60e+00; SWISSPROT HIT: P50234, EVALUE 2.80e+00
FCFPRQGCSHPVLHLLPFKMWGTRLTILQLKRFQREGIICRSRMPLKMLQQGNLFLSLMRLTEVTEVTQMQSMLCEIQNHQRPLCTAPGHKAKHKRCHRKSLVPYPVIRRD

SEQ ID NO: 34638 - protein, 35 aa, Homo sapiens
  MAP TO AC011403.1; EXPRESSED IN PLACENTA, SIGNAL = 2.4; EXPRESSED IN HBL100, SIGNAL = 3.2; EXPRESSED IN HELA, SIGNAL = 2.3; EXPRESSED IN HEART, SIGNAL = 2.3; EXPRESSED IN BONE MARROW, SIGNAL = 2.9; EXPRESSED IN LUNG, SIGNAL = 4.5; EXPRESSED IN BRAIN, SIGNAL = 1.8; EXPRESSED IN ADULT LIVER, SIGNAL = 1.7; EXPRESSED IN BT474, SIGNAL = 1.8; EXPRESSED IN FETAL LIVER, SIGNAL = 2.4
ANGGVRCAGANLCDRSAKQSIITIVLASALPTLIL

SEQ ID NO: 34639 - protein, 17 aa, Homo sapiens
  MAP TO AC011092.1; EXPRESSED IN BT474, SIGNAL =  12; EXPRESSED IN FETAL LIVER, SIGNAL =  12; EXPRESSED IN PLACENTA, SIGNAL =  19; EXPRESSED IN HBL100, SIGNAL = 9.6; EXPRESSED IN HELA, SIGNAL = 3.3; EXPRESSED IN HEART, SIGNAL = 8.3; EXPRESSED IN BONE MARROW, SIGNAL = 9.6; EXPRESSED IN LUNG, SIGNAL =  13; EXPRESSED IN BRAIN, SIGNAL =  38; EXPRESSED IN ADULT LIVER, SIGNAL = 6.3
CHVLGPLPQGPPQAGVL

SEQ ID NO: 34640 - protein, 60 aa, Homo sapiens
  MAP TO AF188031.1; EXPRESSED IN PLACENTA, SIGNAL = 0.93; EXPRESSED IN HEART, SIGNAL = 0.89; EXPRESSED IN LUNG, SIGNAL = 1.5; EXPRESSED IN BRAIN, SIGNAL = 0.92; EXPRESSED IN BT474, SIGNAL = 1.1; EST_HUMAN HIT: BE089909.1, EVALUE 5.20e+00; SWISSPROT HIT: Q9Z185, EVALUE 4.00e-15
DVPKGANSFRVSGSSGVEVFMVYNRTRVKEPIGKARWPLDTDADMVVSVGTASKELKDFK

SEQ ID NO: 34641 - protein, 75 aa, Homo sapiens
  MAP TO AC011199.1; EXPRESSED IN HBL100, SIGNAL = 1.5; EXPRESSED IN HEART, SIGNAL = 1.3; EXPRESSED IN LUNG, SIGNAL = 1.4; EXPRESSED IN BRAIN, SIGNAL = 1.6; EXPRESSED IN ADULT LIVER, SIGNAL = 0.99; EXPRESSED IN PLACENTA, SIGNAL = 0.96; EXPRESSED IN HELA, SIGNAL = 1.4; EXPRESSED IN BONE MARROW, SIGNAL = 1.3; EXPRESSED IN BT474, SIGNAL = 1.6; EXPRESSED IN FETAL LIVER, SIGNAL = 1.4; EST_HUMAN HIT: BE893539.1, EVALUE 6.00e-01; SWISSPROT HIT: P12021, EVALUE 1.30e+00
TDSPLRAASEAIPGPATDSAIGTTGQDSGMDFVTGEEQTDVLVAKSEALIGRWGKRFGISSTRPVGSEAPTHTSP

SEQ ID NO: 34642 - protein, 59 aa, Homo sapiens
  MAP TO AC011412.1; EXPRESSED IN LUNG, SIGNAL = 1.4; EXPRESSED IN BONE MARROW, SIGNAL = 2.8; EXPRESSED IN BRAIN, SIGNAL = 2.7; EXPRESSED IN BT474, SIGNAL = 1.5; EXPRESSED IN ADULT LIVER, SIGNAL =   2; EXPRESSED IN FETAL LIVER, SIGNAL = 1.6; EXPRESSED IN HELA, SIGNAL = 2.2; EXPRESSED IN PLACENTA, SIGNAL = 1.4; EXPRESSED IN HBL100, SIGNAL = 1.3; EXPRESSED IN HEART, SIGNAL = 2.2; SWISSPROT HIT: P34056, EVALUE 1.70e-01; EST_HUMAN HIT: AV746822.1, EVALUE 2.00e-06
FLSTHYSIVNSMDFFVQQICRTCSSYMNETADPLNNNSPFRLPQPHSTLCFYEFNYLSH

SEQ ID NO: 34643 - protein, 17 aa, Homo sapiens
  MAP TO AC011416.1; EXPRESSED IN PLACENTA, SIGNAL =  21; EXPRESSED IN HBL100, SIGNAL = 8.7; EXPRESSED IN HEART, SIGNAL =  13; EXPRESSED IN BRAIN, SIGNAL =  16; EXPRESSED IN FETAL LIVER, SIGNAL =  21; EXPRESSED IN ADULT LIVER, SIGNAL =  14; EXPRESSED IN HELA, SIGNAL =  14; EXPRESSED IN LUNG, SIGNAL = 9.9; EXPRESSED IN BONE MARROW, SIGNAL =  12; EXPRESSED IN BT474, SIGNAL = 5.4
RTNITYAIVLPKCFTSI

SEQ ID NO: 34644 - protein, 66 aa, Homo sapiens
  MAP TO AC011085.1; EXPRESSED IN BT474, SIGNAL = 0.97; EXPRESSED IN PLACENTA, SIGNAL = 1.3; EXPRESSED IN HEART, SIGNAL = 1.1; SWISSPROT HIT: P35688, EVALUE 3.80e-01; EST_HUMAN HIT: AU123468.1, EVALUE 5.00e-22
ALMTFFNKVIANESKNRMSLWNISTVMAPNLFFSRSKHSDYEELLLANTAAHIIRLMLKYQKILWK

SEQ ID NO: 34645 - protein, 116 aa, Homo sapiens
  MAP TO AC011484.1; EXPRESSED IN HELA, SIGNAL = 2.4; EXPRESSED IN PLACENTA, SIGNAL = 2.3; EXPRESSED IN HBL100, SIGNAL = 2.5; EXPRESSED IN HEART, SIGNAL = 2.8; EXPRESSED IN LUNG, SIGNAL = 3.9; EXPRESSED IN BONE MARROW, SIGNAL = 2.2; EXPRESSED IN BRAIN, SIGNAL = 3.2; EXPRESSED IN FETAL LIVER, SIGNAL = 2.3; EXPRESSED IN BT474, SIGNAL = 2.4; EXPRESSED IN ADULT LIVER, SIGNAL = 2.2; SWISSPROT HIT: Q58110, EVALUE 2.80e+00; EST_HUMAN HIT: AU135557.1, EVALUE 2.00e-19
MLFGVKDIALLEHGCKALEVDSYKSLMILGIPEDCNHEEFEEIIRLPLKPLGKFEVAGKAYLEEDKSKAAIIQLTEDINYAVVPREIKGKGGVWRVVYMPRKQDIEFLTKLNLFLQ

SEQ ID NO: 34646 - protein, 50 aa, Homo sapiens
  MAP TO AC011484.1; EXPRESSED IN HELA, SIGNAL = 2.4; EXPRESSED IN PLACENTA, SIGNAL = 2.3; EXPRESSED IN HBL100, SIGNAL = 2.5; EXPRESSED IN HEART, SIGNAL = 2.8; EXPRESSED IN LUNG, SIGNAL = 3.9; EXPRESSED IN BONE MARROW, SIGNAL = 2.2; EXPRESSED IN BRAIN, SIGNAL = 3.2; EXPRESSED IN FETAL LIVER, SIGNAL = 2.3; EXPRESSED IN BT474, SIGNAL = 2.4; EXPRESSED IN ADULT LIVER, SIGNAL = 2.2; EST_HUMAN HIT: BF370196.1, EVALUE 1.30e+00; SWISSPROT HIT: P05895, EVALUE 1.50e+00
RPPAPEASLSRSLWEGIAASWIISWIPEAAQVSTSGHTAASKSWARCCSG

SEQ ID NO: 34647 - protein, 53 aa, Homo sapiens
  MAP TO AL031658.10; EXPRESSED IN BT474, SIGNAL = 1.5; EXPRESSED IN HBL100, SIGNAL = 1.6; EXPRESSED IN HEART, SIGNAL = 2.1; EXPRESSED IN LUNG, SIGNAL = 3.1; EXPRESSED IN BRAIN, SIGNAL = 1.9; EXPRESSED IN ADULT LIVER, SIGNAL = 1.9; EXPRESSED IN FETAL LIVER, SIGNAL =   2; EXPRESSED IN PLACENTA, SIGNAL = 1.8; EXPRESSED IN HELA, SIGNAL = 1.5; EXPRESSED IN BONE MARROW, SIGNAL = 1.6; SWISSPROT HIT: P38584, EVALUE 8.90e-01; EST_HUMAN HIT: AW612454.1, EVALUE 9.00e-09
ASKHGPEAVETLFRDIDNIFVKSLQSVQKVIISDKHCFELYGYDILIDQDLKP

SEQ ID NO: 34648 - protein, 102 aa, Homo sapiens
  MAP TO AL121603.1; EXPRESSED IN HBL100, SIGNAL =   8; EXPRESSED IN HELA, SIGNAL = 4.7; EXPRESSED IN PLACENTA, SIGNAL = 3.7; EXPRESSED IN HEART, SIGNAL = 2.6; EXPRESSED IN BONE MARROW, SIGNAL = 2.3; EXPRESSED IN LUNG, SIGNAL =   2; EXPRESSED IN BRAIN, SIGNAL =   3; EXPRESSED IN BT474, SIGNAL = 6.2; EXPRESSED IN FETAL LIVER, SIGNAL = 2.2; EXPRESSED IN ADULT LIVER, SIGNAL = 1.4; SWISSPROT HIT: P55855, EVALUE 6.00e-14; EST_HUMAN HIT: BE905199.1, EVALUE 2.00e-20
LRTVLGRARTLSLNHRCRLLLLSLLVLHCVRSVRSWYLFCEAAAEKTLAFAMAEEKPKALSMGQIRFRFDSQPINETDTPVQVEMEDIDIIDVFHQQIGGVY

SEQ ID NO: 34649 - protein, 57 aa, Homo sapiens
  MAP TO AL035684.25; EXPRESSED IN LUNG, SIGNAL = 1.1; EXPRESSED IN BRAIN, SIGNAL = 3.5; EXPRESSED IN BT474, SIGNAL = 4.4; EXPRESSED IN PLACENTA, SIGNAL = 0.99; EXPRESSED IN BONE MARROW, SIGNAL = 3.8; EXPRESSED IN ADULT LIVER, SIGNAL = 1.3; EXPRESSED IN FETAL LIVER, SIGNAL = 1.9; EXPRESSED IN HEART, SIGNAL = 1.3; EXPRESSED IN HELA, SIGNAL = 1.5; EXPRESSED IN HBL100, SIGNAL = 2.1; EST_HUMAN HIT: AW374292.1, EVALUE 2.00e-16; SWISSPROT HIT: O75110, EVALUE 2.00e-17
ARYVQAKLSVHDRSLKVATVIESLEMEMELLCLTGVEDQLQADVRPTLETLRNAGIK

SEQ ID NO: 34650 - protein, 55 aa, Homo sapiens
  MAP TO AL121749.2; EXPRESSED IN LUNG, SIGNAL = 1.5; EXPRESSED IN BRAIN, SIGNAL = 2.9; EXPRESSED IN ADULT LIVER, SIGNAL = 1.2; EXPRESSED IN PLACENTA, SIGNAL = 2.7; EXPRESSED IN BONE MARROW, SIGNAL = 1.2; EXPRESSED IN BT474, SIGNAL = 2.3; EXPRESSED IN FETAL LIVER, SIGNAL = 1.8; EXPRESSED IN HEART, SIGNAL = 2.6; EXPRESSED IN HELA, SIGNAL = 1.8; EXPRESSED IN HBL100, SIGNAL = 2.2; EST_HUMAN HIT: AA383416.1, EVALUE 1.00e-26; SWISSPROT HIT: P34624, EVALUE 6.00e-23
VYLERLLTYAEIDICPANWKRIVLGAILLASKVWDDQAVWNVDYCQILKDITVED

SEQ ID NO: 34651 - protein, 42 aa, Homo sapiens
  MAP TO AL033380.10; EXPRESSED IN BONE MARROW, SIGNAL =   1; EXPRESSED IN LUNG, SIGNAL = 1.4; EXPRESSED IN BRAIN, SIGNAL =   1; EXPRESSED IN BT474, SIGNAL =   1; EXPRESSED IN FETAL LIVER, SIGNAL = 0.93; EXPRESSED IN ADULT LIVER, SIGNAL =   1; EXPRESSED IN PLACENTA, SIGNAL = 0.97; EXPRESSED IN HEART, SIGNAL =   1
RANWLVGSMRAKEQKHDPLRQSCRIWEKGQKLRRVKMNRQAK

SEQ ID NO: 34652 - protein, 46 aa, Homo sapiens
  MAP TO AL096677.18; EXPRESSED IN PLACENTA, SIGNAL = 1.9; EXPRESSED IN HEART, SIGNAL = 0.92; EXPRESSED IN BONE MARROW, SIGNAL = 1.3; EXPRESSED IN LUNG, SIGNAL = 1.1; EXPRESSED IN BRAIN, SIGNAL = 1.3; EXPRESSED IN ADULT LIVER, SIGNAL = 1.3; EXPRESSED IN FETAL LIVER, SIGNAL = 1.7; EXPRESSED IN HELA, SIGNAL = 1.1; EST_HUMAN HIT: AV690964.1, EVALUE 5.00e-12; SWISSPROT HIT: Q12766, EVALUE 4.60e+00
TVRLSIVKMAILSVMTDFMCHLEWATGCPDIWCYSECVCGVFLNEI

SEQ ID NO: 34653 - protein, 69 aa, Homo sapiens
  MAP TO AL035250.17; EXPRESSED IN ADULT LIVER, SIGNAL = 1.1; EXPRESSED IN FETAL LIVER, SIGNAL = 1.5; EXPRESSED IN PLACENTA, SIGNAL = 1.3; EXPRESSED IN HEART, SIGNAL = 1.9; EXPRESSED IN BONE MARROW, SIGNAL = 0.99; EXPRESSED IN LUNG, SIGNAL = 3.4; EXPRESSED IN BRAIN, SIGNAL = 1.2; EST_HUMAN HIT: BF305443.1, EVALUE 2.50e+00; SWISSPROT HIT: P49466, EVALUE 9.70e+00
AKKQENSVPERKKAVQKTVAYLSSLCTLGQVWFLPLKNRVNLDKLLNFWNLVFVIVKGREHLTMRIQGQ

SEQ ID NO: 34654 - protein, 18 aa, Homo sapiens
  MAP TO AL035250.17; EXPRESSED IN ADULT LIVER, SIGNAL = 1.1; EXPRESSED IN FETAL LIVER, SIGNAL = 1.5; EXPRESSED IN PLACENTA, SIGNAL = 1.3; EXPRESSED IN HEART, SIGNAL = 1.9; EXPRESSED IN BONE MARROW, SIGNAL = 0.99; EXPRESSED IN LUNG, SIGNAL = 3.4; EXPRESSED IN BRAIN, SIGNAL = 1.2
QRSKRTVFLKEKRLCRKL

SEQ ID NO: 34655 - protein, 132 aa, Homo sapiens
  MAP TO AL050336.7; EXPRESSED IN PLACENTA, SIGNAL = 1.5; EXPRESSED IN HBL100, SIGNAL =   2; EXPRESSED IN HEART, SIGNAL = 0.88; EXPRESSED IN BONE MARROW, SIGNAL = 2.3; EXPRESSED IN BRAIN, SIGNAL = 3.4; EXPRESSED IN BT474, SIGNAL = 2.2; EXPRESSED IN FETAL LIVER, SIGNAL = 1.4; EXPRESSED IN ADULT LIVER, SIGNAL = 2.2; EXPRESSED IN HELA, SIGNAL =   2
PLLSPSPSSTQETPTPLLLSATVDINITTNNIVIHHHHHQLHEHHHHPTISIIITFINATSTTSPSSFTTIIIIKPTTNNASAITFTTTTITVFRYHYHHLYYYLYHHQASSTIIPITSTNAITMISYYHHY

SEQ ID NO: 34656 - protein, 94 aa, Homo sapiens
  MAP TO AL035706.10; EXPRESSED IN HEART, SIGNAL = 0.9; EXPRESSED IN LUNG, SIGNAL = 1.1; EXPRESSED IN BONE MARROW, SIGNAL = 0.96; EXPRESSED IN BRAIN, SIGNAL = 0.91; EXPRESSED IN ADULT LIVER, SIGNAL = 1.1; EXPRESSED IN FETAL LIVER, SIGNAL = 1.2; EST_HUMAN HIT: AA584212.1, EVALUE 8.40e+00
MQSVSTLCSNQEGRGFSFKCQCCKHVKSGKYFLSKQPCVKFTELVMKGLQLQTCKLLTSMKTPDAETGKRGFSLAPQLLHLRALHAAIFSAFHQ

SEQ ID NO: 34657 - protein, 36 aa, Homo sapiens
  MAP TO AJ239323.2; EXPRESSED IN BT474, SIGNAL = 1.8; EXPRESSED IN PLACENTA, SIGNAL = 2.6; EXPRESSED IN HBL100, SIGNAL =   2; EXPRESSED IN HEART, SIGNAL = 2.3; EXPRESSED IN BRAIN, SIGNAL = 2.4; EXPRESSED IN FETAL LIVER, SIGNAL = 2.2; EXPRESSED IN ADULT LIVER, SIGNAL = 1.7; EXPRESSED IN HELA, SIGNAL = 1.8; EXPRESSED IN LUNG, SIGNAL = 2.9; EXPRESSED IN BONE MARROW, SIGNAL = 2.3; EST_HUMAN HIT: AI183955.1, EVALUE 9.00e-08
MATAGHGLHTDTIGIASEADEQEVEGEGTPKGWTAT

SEQ ID NO: 34658 - protein, 45 aa, Homo sapiens
  MAP TO AL121694.1; EXPRESSED IN BT474, SIGNAL =   5; EXPRESSED IN HBL100, SIGNAL = 5.1; EXPRESSED IN HEART, SIGNAL = 6.2; EXPRESSED IN LUNG, SIGNAL =  11; EXPRESSED IN BRAIN, SIGNAL = 5.4; EXPRESSED IN ADULT LIVER, SIGNAL = 5.6; EXPRESSED IN FETAL LIVER, SIGNAL = 7.4; EXPRESSED IN PLACENTA, SIGNAL = 6.7; EXPRESSED IN HELA, SIGNAL = 6.8; EXPRESSED IN BONE MARROW, SIGNAL =   6; SWISSPROT HIT: P14272, EVALUE 5.30e-01
VITQWKMACLRKKHARWTAKIKAEIQAITEKIQNAEVRRIELLNE

SEQ ID NO: 34659 - protein, 49 aa, Homo sapiens
  MAP TO AL035684.25; EXPRESSED IN HELA, SIGNAL = 3.1; EXPRESSED IN PLACENTA, SIGNAL = 3.4; EXPRESSED IN HBL100, SIGNAL = 2.5; EXPRESSED IN HEART, SIGNAL = 4.2; EXPRESSED IN LUNG, SIGNAL = 5.5; EXPRESSED IN BONE MARROW, SIGNAL = 3.5; EXPRESSED IN BRAIN, SIGNAL = 3.1; EXPRESSED IN FETAL LIVER, SIGNAL = 3.4; EXPRESSED IN BT474, SIGNAL = 3.1; EXPRESSED IN ADULT LIVER, SIGNAL = 3.6
PCQDPHQHLSPGDSSASSPPLLSCSFPEVYSFLHNQCDIFSALDSKGDM

SEQ ID NO: 34660 - protein, 67 aa, Homo sapiens
  MAP TO AP000553.1; EXPRESSED IN BONE MARROW, SIGNAL = 2.3; EXPRESSED IN BT474, SIGNAL = 1.8; EXPRESSED IN HBL100, SIGNAL = 1.7; EXPRESSED IN HEART, SIGNAL = 2.9; EXPRESSED IN LUNG, SIGNAL = 2.6; EXPRESSED IN BRAIN, SIGNAL = 1.9; EXPRESSED IN ADULT LIVER, SIGNAL = 2.1; EXPRESSED IN FETAL LIVER, SIGNAL = 2.2; EXPRESSED IN PLACENTA, SIGNAL = 2.3; EXPRESSED IN HELA, SIGNAL = 1.8; EST_HUMAN HIT: BE673724.1, EVALUE 1.50e+00; SWISSPROT HIT: P79987, EVALUE 6.50e-01
CVWSMVVLHRAETAGIPVLGTQPSTSQVTVPEHGTGVMFPVDSRESICRPDVWMWDIIIRKTQTLNF

SEQ ID NO: 34661 - protein, 47 aa, Homo sapiens
  MAP TO AF170801.1; EXPRESSED IN BONE MARROW, SIGNAL = 1.7; EXPRESSED IN BRAIN, SIGNAL = 1.6; EXPRESSED IN BT474, SIGNAL = 1.5; EXPRESSED IN HBL100, SIGNAL = 1.4; EXPRESSED IN HEART, SIGNAL = 2.2; EXPRESSED IN LUNG, SIGNAL = 2.1; EXPRESSED IN ADULT LIVER, SIGNAL = 1.4; EXPRESSED IN FETAL LIVER, SIGNAL = 2.2; EXPRESSED IN PLACENTA, SIGNAL = 1.8; EXPRESSED IN HELA, SIGNAL = 1.4; SWISSPROT HIT: Q61555, EVALUE 4.60e+00; EST_HUMAN HIT: BF208705.1, EVALUE 4.00e+00
FVLTWRGLQYTYCLAHCAVNTGFTIRPQGHYCVDDLMLPGPGRTQVT

SEQ ID NO: 34662 - protein, 36 aa, Homo sapiens
  MAP TO AP000427.1; EXPRESSED IN BONE MARROW, SIGNAL = 0.94; EXPRESSED IN BT474, SIGNAL = 1.7; EXPRESSED IN LUNG, SIGNAL = 1.2; EXPRESSED IN BRAIN, SIGNAL = 1.4; EXPRESSED IN ADULT LIVER, SIGNAL = 1.7; EXPRESSED IN FETAL LIVER, SIGNAL = 1.5; EXPRESSED IN PLACENTA, SIGNAL = 1.3; EXPRESSED IN HEART, SIGNAL = 1.5; EXPRESSED IN HELA, SIGNAL = 1.3; EXPRESSED IN HBL100, SIGNAL = 1.1
DLDTWQENTNAWEEEEDAAWQAEEVLRYLSGIYIAT

SEQ ID NO: 34663 - protein, 24 aa, Homo sapiens
  MAP TO AL035661.16; EXPRESSED IN HBL100, SIGNAL = 2.1; EXPRESSED IN HELA, SIGNAL = 3.4; EXPRESSED IN PLACENTA, SIGNAL = 3.4; EXPRESSED IN HEART, SIGNAL =  14; EXPRESSED IN LUNG, SIGNAL = 3.4; EXPRESSED IN BONE MARROW, SIGNAL =   3; EXPRESSED IN BRAIN, SIGNAL = 5.7; EXPRESSED IN BT474, SIGNAL = 3.2; EXPRESSED IN FETAL LIVER, SIGNAL = 4.1; EXPRESSED IN ADULT LIVER, SIGNAL = 5.8
IVRAIMMRKTMWKPLVPSLTTPHQ

SEQ ID NO: 34664 - protein, 37 aa, Homo sapiens [sequence omitted]

SEQ ID NO: 34665 - protein, 59 aa, Homo sapiens
  MAP TO AL078634.17; EXPRESSED IN LUNG, SIGNAL =   1; EXPRESSED IN BRAIN, SIGNAL = 1.5; EXPRESSED IN BT474, SIGNAL = 1.9; EXPRESSED IN PLACENTA, SIGNAL = 3.2; EXPRESSED IN BONE MARROW, SIGNAL = 1.2; EXPRESSED IN ADULT LIVER, SIGNAL =   2; EXPRESSED IN FETAL LIVER, SIGNAL = 8.3; EXPRESSED IN HEART, SIGNAL = 1.3; EXPRESSED IN HELA, SIGNAL = 3.3; EXPRESSED IN HBL100, SIGNAL = 5.4; EST_HUMAN HIT: BE531055.1, EVALUE 3.00e-19
MTLGTMLRMKKTAHRKMERRKKQNKTRIRAAARGKLLSLDQQSIPYSTTTLSGIPGEPL

SEQ ID NO: 34666 - protein, 40 aa, Homo sapiens
  MAP TO AL049911.1; EXPRESSED IN BT474, SIGNAL = 1.1; EXPRESSED IN FETAL LIVER, SIGNAL = 0.98; EXPRESSED IN PLACENTA, SIGNAL = 1.1; EXPRESSED IN HEART, SIGNAL = 1.1; EXPRESSED IN LUNG, SIGNAL =   1; EST_HUMAN HIT: AI922499.1, EVALUE 8.30e-01
EAATKTVTGQRERDIGIIERAPQDQTSNDNFIFYTKIIEV

SEQ ID NO: 34667 - protein, 44 aa, Homo sapiens
  MAP TO AL035404.19; EXPRESSED IN BONE MARROW, SIGNAL = 0.93; EXPRESSED IN LUNG, SIGNAL = 1.2; EXPRESSED IN BRAIN, SIGNAL = 1.2; EXPRESSED IN FETAL LIVER, SIGNAL = 0.91; EXPRESSED IN HELA, SIGNAL = 1.3; EXPRESSED IN HEART, SIGNAL =   1; EXPRESSED IN BT474, SIGNAL =   1; EXPRESSED IN PLACENTA, SIGNAL = 1.2; EST_HUMAN HIT: AW814224.1, EVALUE 5.40e-01
NASSMHLGFRFLHCCIQHLQENLAQTRCPMNITGWRQTELISVS

SEQ ID NO: 34668 - protein, 55 aa, Homo sapiens [sequence omitted]

SEQ ID NO: 34669 - protein, 30 aa, Homo sapiens
  MAP TO AC011499.1; EXPRESSED IN BT474, SIGNAL =  36; EXPRESSED IN PLACENTA, SIGNAL =  21; EXPRESSED IN HBL100, SIGNAL =  65; EXPRESSED IN HEART, SIGNAL =  14; EXPRESSED IN BRAIN, SIGNAL =  10; EXPRESSED IN ADULT LIVER, SIGNAL = 9.5; EXPRESSED IN FETAL LIVER, SIGNAL =  18; EXPRESSED IN HELA, SIGNAL =  60; EXPRESSED IN LUNG, SIGNAL = 8.4; EXPRESSED IN BONE MARROW, SIGNAL =  16; EST_HUMAN HIT: AI289421.1, EVALUE 1.10e-02; SWISSPROT HIT: Q29375, EVALUE 1.70e-02
MFTHSKKAQLMVTACDMDPSKLSVFLPALD

SEQ ID NO: 34670 - protein, 53 aa, Homo sapiens
  MAP TO AC009756.1; EXPRESSED IN PLACENTA, SIGNAL = 5.4; EXPRESSED IN BONE MARROW, SIGNAL = 6.9; EXPRESSED IN BRAIN, SIGNAL = 7.4; EXPRESSED IN HELA, SIGNAL = 6.7; EXPRESSED IN HBL100, SIGNAL = 4.1; EXPRESSED IN HEART, SIGNAL = 4.5; EXPRESSED IN LUNG, SIGNAL = 3.9; EXPRESSED IN ADULT LIVER, SIGNAL = 3.1; EXPRESSED IN FETAL LIVER, SIGNAL =   6; EXPRESSED IN BT474, SIGNAL = 4.3; EST_HUMAN HIT: AA046794.1, EVALUE 1.50e-02; SWISSPROT HIT: Q05620, EVALUE 5.00e-03
  unsure 8
  unsure 11
  unsure 15
  unsure 18
  unsure 26
  unsure 28
  unsure 44
LQISFTAXPNXQRIXYWXRNPTKCMXLXRRFLELVHSSLNIREXHTGEKPYAC

SEQ ID NO: 34671 - protein, 86 aa, Homo sapiens
  MAP TO Z97055.1; EXPRESSED IN BONE MARROW, SIGNAL = 8.2; EXPRESSED IN BT474, SIGNAL = 5.8; EXPRESSED IN LUNG, SIGNAL = 9.1; EXPRESSED IN BRAIN, SIGNAL = 6.4; EXPRESSED IN ADULT LIVER, SIGNAL = 7.5; EXPRESSED IN FETAL LIVER, SIGNAL = 6.9; EXPRESSED IN PLACENTA, SIGNAL =   7; EXPRESSED IN HEART, SIGNAL = 7.7; EXPRESSED IN HELA, SIGNAL = 5.9; EXPRESSED IN HBL100, SIGNAL = 4.6
PSEEEERRKKEKEEERRRRKKKKEEEEGRRRKKKEEEEEEEEEEEEEEEEEEEEEGRRRKKKKRKRKKKKKKKKKKKKKKKKKKKK

SEQ ID NO: 34672 - protein, 42 aa, Homo sapiens
  MAP TO Z97055.1; EXPRESSED IN BONE MARROW, SIGNAL = 8.2; EXPRESSED IN BT474, SIGNAL = 5.8; EXPRESSED IN LUNG, SIGNAL = 9.1; EXPRESSED IN BRAIN, SIGNAL = 6.4; EXPRESSED IN ADULT LIVER, SIGNAL = 7.5; EXPRESSED IN FETAL LIVER, SIGNAL = 6.9; EXPRESSED IN PLACENTA, SIGNAL =   7; EXPRESSED IN HEART, SIGNAL = 7.7; EXPRESSED IN HELA, SIGNAL = 5.9; EXPRESSED IN HBL100, SIGNAL = 4.6; SWISSPROT HIT: P39195, EVALUE 2.80e-02; EST_HUMAN HIT: AW270771.1, EVALUE 9.40e-02
RHCTPAWATEQDSIRRRRKKKEGERRRKKKKKEEERRRRRKK

SEQ ID NO: 34673 - protein, 56 aa, Homo sapiens
  MAP TO AC006001.2; EXPRESSED IN PLACENTA, SIGNAL = 4.6; EXPRESSED IN HELA, SIGNAL =  12; EXPRESSED IN HEART, SIGNAL = 5.4; EXPRESSED IN BONE MARROW, SIGNAL = 4.8; EXPRESSED IN BRAIN, SIGNAL = 7.3; EXPRESSED IN BT474, SIGNAL =  14; EXPRESSED IN HBL100, SIGNAL = 8.5; EXPRESSED IN LUNG, SIGNAL = 5.5; EXPRESSED IN ADULT LIVER, SIGNAL = 2.4; EXPRESSED IN FETAL LIVER, SIGNAL = 6.4; EST_HUMAN HIT: AI674184.1, EVALUE 4.00e-28; SWISSPROT HIT: Q13829, EVALUE 9.00e-07
FPEVVPLNIGGAHFTTRLSTLRCYEDTMLAAMFSGRHYIPTDSEGRYFIDRDGTHF

SEQ ID NO: 34674 - protein, 56 aa, Homo sapiens
  MAP TO AC006001.2; EXPRESSED IN PLACENTA, SIGNAL = 4.6; EXPRESSED IN HELA, SIGNAL =  12; EXPRESSED IN HEART, SIGNAL = 5.4; EXPRESSED IN BONE MARROW, SIGNAL = 4.8; EXPRESSED IN BRAIN, SIGNAL = 7.3; EXPRESSED IN BT474, SIGNAL =  14; EXPRESSED IN HBL100, SIGNAL = 8.5; EXPRESSED IN LUNG, SIGNAL = 5.5; EXPRESSED IN ADULT LIVER, SIGNAL = 2.4; EXPRESSED IN FETAL LIVER, SIGNAL = 6.4; EST_HUMAN HIT: AI674184.1, EVALUE 5.00e-29; SWISSPROT HIT: Q92259, EVALUE 1.50e+00
SFLRLFPLTSEGLTSLHACPHCGATKTPCWQPCSVGGTTSPRTPRAGTSSTEMAHT

SEQ ID NO: 34675 - protein, 113 aa, Homo sapiens
  MAP TO AC007728.1; EXPRESSED IN BT474, SIGNAL = 0.98; EXPRESSED IN FETAL LIVER, SIGNAL = 0.92; EXPRESSED IN HBL100, SIGNAL = 1.5; EXPRESSED IN HELA, SIGNAL = 1.3; EXPRESSED IN PLACENTA, SIGNAL =   1; EXPRESSED IN HEART, SIGNAL = 0.89; EXPRESSED IN LUNG, SIGNAL =   1; EXPRESSED IN BONE MARROW, SIGNAL = 1.3; EXPRESSED IN BRAIN, SIGNAL = 1.4; EST_HUMAN HIT: AI130924.1, EVALUE 5.00e-62; SWISSPROT HIT: Q03164, EVALUE 8.90e-01
DFDRSSPPLQPPPVNSLTTENRFHSLPFSLTKMPNTNGSIGHSPLSLSAQSVMEELNTAPVQESPPLAMPPGNSHGLEVGSLAEVKENPPFYGVIRWIGQPPGLNEVLAGLEL

SEQ ID NO: 34676 - protein, 45 aa, Homo sapiens
  MAP TO AC006042.2; EXPRESSED IN HELA, SIGNAL = 1.4; EXPRESSED IN HEART, SIGNAL = 0.97; EXPRESSED IN PLACENTA, SIGNAL = 1.2; EST_HUMAN HIT: AW977924.1, EVALUE 2.00e-11
QQVRTSSTIRRTSSLDTITGPYLTGQWPRDPHVHYPSCMKDKATQ

SEQ ID NO: 34677 - protein, 38 aa, Homo sapiens [sequence omitted]

SEQ ID NO: 34678 - protein, 33 aa, Homo sapiens
  MAP TO AF165423.1; EXPRESSED IN ADULT LIVER, SIGNAL =  16; EXPRESSED IN BT474, SIGNAL = 8.1; EXPRESSED IN FETAL LIVER, SIGNAL = 9.2; EXPRESSED IN HBL100, SIGNAL =  10; EXPRESSED IN PLACENTA, SIGNAL =  15; EXPRESSED IN HELA, SIGNAL =  16; EXPRESSED IN HEART, SIGNAL = 9.4; EXPRESSED IN BONE MARROW, SIGNAL = 9.2; EXPRESSED IN LUNG, SIGNAL = 7.1; EXPRESSED IN BRAIN, SIGNAL =  16
FPQFLLIIIFIILAKRNVVGVRVIIRRRSATNM

SEQ ID NO: 34679 - protein, 51 aa, Homo sapiens
  MAP TO AL050343.14; EXPRESSED IN BONE MARROW, SIGNAL = 1.7; EXPRESSED IN LUNG, SIGNAL = 1.9; EXPRESSED IN BRAIN, SIGNAL = 2.2; EXPRESSED IN BT474, SIGNAL =   3; EXPRESSED IN ADULT LIVER, SIGNAL = 1.7; EXPRESSED IN FETAL LIVER, SIGNAL = 2.3; EXPRESSED IN HBL100, SIGNAL = 2.7; EXPRESSED IN HELA, SIGNAL = 3.3; EXPRESSED IN PLACENTA, SIGNAL = 4.5; EXPRESSED IN HEART, SIGNAL =   4; SWISSPROT HIT: O43847, EVALUE 8.00e-17; EST_HUMAN HIT: AI685321.1, EVALUE 4.00e-21
MIDKYQALMDGLSLESLLSFVKEFKSQLFVEGLVQGNVTSTVSVRCSVGQV

SEQ ID NO: 34680 - protein, 52 aa, Homo sapiens
  MAP TO AC010896.1; EXPRESSED IN HBL100, SIGNAL = 2.3; EXPRESSED IN HELA, SIGNAL = 2.2; EXPRESSED IN HEART, SIGNAL =  17; EXPRESSED IN LUNG, SIGNAL = 1.4; EXPRESSED IN BRAIN, SIGNAL = 2.2; EXPRESSED IN ADULT LIVER, SIGNAL =   2; EXPRESSED IN PLACENTA, SIGNAL = 2.3; EXPRESSED IN BONE MARROW, SIGNAL = 1.6; EXPRESSED IN BT474, SIGNAL = 3.7; EXPRESSED IN FETAL LIVER, SIGNAL = 2.8; SWISSPROT HIT: P55084, EVALUE 3.00e-23; EST_HUMAN HIT: AV705128.1, EVALUE 3.00e-22
TSETMGHSADRLAAAFAVSRLEQDEYALRSHSLAKKAQDEGLLSDVVPFKVP

SEQ ID NO: 34681 - protein, 32 aa, Homo sapiens
  MAP TO AC010896.1; EXPRESSED IN HBL100, SIGNAL = 2.3; EXPRESSED IN HELA, SIGNAL = 2.2; EXPRESSED IN HEART, SIGNAL =  17; EXPRESSED IN LUNG, SIGNAL = 1.4; EXPRESSED IN BRAIN, SIGNAL = 2.2; EXPRESSED IN ADULT LIVER, SIGNAL =   2; EXPRESSED IN PLACENTA, SIGNAL = 2.3; EXPRESSED IN BONE MARROW, SIGNAL = 1.6; EXPRESSED IN BT474, SIGNAL = 3.7; EXPRESSED IN FETAL LIVER, SIGNAL = 2.8; EST_HUMAN HIT: AA349046.1, EVALUE 4.00e-14
PVRPWATLQTDWPLPLLFLGWNRMNMHCALTV

SEQ ID NO: 34682 - protein, 26 aa, Homo sapiens
  MAP TO AL078623.21; EXPRESSED IN BT474, SIGNAL = 0.98; EXPRESSED IN FETAL LIVER, SIGNAL = 1.1; EXPRESSED IN PLACENTA, SIGNAL = 1.1; EXPRESSED IN HBL100, SIGNAL = 1.5; EXPRESSED IN HELA, SIGNAL =   1; EXPRESSED IN HEART, SIGNAL = 1.3; EXPRESSED IN BONE MARROW, SIGNAL = 0.93; EXPRESSED IN LUNG, SIGNAL = 1.3; EXPRESSED IN BRAIN, SIGNAL = 1.8; EST_HUMAN HIT: AA757115.1, EVALUE 2.00e-09
MPIPCCFLTWQKEGERALWSPYYKNT

SEQ ID NO: 34683 - protein, 34 aa, Homo sapiens
  MAP TO AF165423.1; EXPRESSED IN PLACENTA, SIGNAL =   3; EXPRESSED IN HBL100, SIGNAL = 4.6; EXPRESSED IN HEART, SIGNAL = 1.9; EXPRESSED IN BONE MARROW, SIGNAL = 1.5; EXPRESSED IN LUNG, SIGNAL = 2.2; EXPRESSED IN BRAIN, SIGNAL = 3.3; EXPRESSED IN BT474, SIGNAL = 3.2; EXPRESSED IN FETAL LIVER, SIGNAL = 4.5; EXPRESSED IN ADULT LIVER, SIGNAL = 3.5; EXPRESSED IN HELA, SIGNAL = 8.9
PSARCATPGHTSSATVTAGSSSSSEGMSFSMASH

SEQ ID NO: 34684 - protein, 134 aa, Homo sapiens
  MAP TO AC010680.2; EXPRESSED IN HEART, SIGNAL = 9.1; EXPRESSED IN BRAIN, SIGNAL = 3.4; EXPRESSED IN BT474, SIGNAL = 5.3; EXPRESSED IN ADULT LIVER, SIGNAL = 1.4; EST_HUMAN HIT: AA196127.1, EVALUE 2.00e-25; SWISSPROT HIT: Q28820, EVALUE 5.60e-01
PEIIDVSSKAEEVKIMTITRKKEVQKEKEAVYEKKQAVHKEKRVFIESFEEPYDELEVEPYTEPFEQPYYEEPDEDYEEIKVEAKKEVHEEWEEDFEEGQEYYEREEGYDEGEEEWEEAYQEREVIQVQKEVYE

SEQ ID NO: 34685 - protein, 46 aa, Homo sapiens
  MAP TO AF188032.1; EXPRESSED IN BT474, SIGNAL = 2.7; EXPRESSED IN FETAL LIVER, SIGNAL =   4; EXPRESSED IN PLACENTA, SIGNAL = 3.5; EXPRESSED IN HBL100, SIGNAL = 2.9; EXPRESSED IN HEART, SIGNAL = 3.1; EXPRESSED IN LUNG, SIGNAL = 3.2; EXPRESSED IN BRAIN, SIGNAL = 3.3; EXPRESSED IN ADULT LIVER, SIGNAL = 4.6; EXPRESSED IN HELA, SIGNAL = 3.3; EXPRESSED IN BONE MARROW, SIGNAL = 4.4; SWISSPROT HIT: P06420, EVALUE 6.00e+00; EST_HUMAN HIT: BE149264.1, EVALUE 5.00e-04
WLELEWLKCKEQRPEVEQGSRALDLAHKETTQSSYNSGTVMGGAAM

SEQ ID NO: 34686 - protein, 40 aa, Homo sapiens
  MAP TO AP000459.2; EXPRESSED IN BT474, SIGNAL =  73; EXPRESSED IN FETAL LIVER, SIGNAL =  28; EXPRESSED IN HBL100, SIGNAL =  83; EXPRESSED IN HEART, SIGNAL =  19; EXPRESSED IN LUNG, SIGNAL =  14; EXPRESSED IN BRAIN, SIGNAL =  59; EXPRESSED IN ADULT LIVER, SIGNAL = 7.3; EXPRESSED IN PLACENTA, SIGNAL =  24; EXPRESSED IN HELA, SIGNAL =  56; EXPRESSED IN BONE MARROW, SIGNAL =  30; EST_HUMAN HIT: BE300193.1, EVALUE 4.00e-08; SWISSPROT HIT: Q49412, EVALUE 4.70e+00
IHTNHFIILLKDNHVLVGLGKLSFLHPFTHGILNKGTWHT

SEQ ID NO: 34687 - protein, 39 aa, Homo sapiens
  MAP TO AP000459.2; EXPRESSED IN BT474, SIGNAL =  73; EXPRESSED IN FETAL LIVER, SIGNAL =  28; EXPRESSED IN HBL100, SIGNAL =  83; EXPRESSED IN HEART, SIGNAL =  19; EXPRESSED IN LUNG, SIGNAL =  14; EXPRESSED IN BRAIN, SIGNAL =  59; EXPRESSED IN ADULT LIVER, SIGNAL = 7.3; EXPRESSED IN PLACENTA, SIGNAL =  24; EXPRESSED IN HELA, SIGNAL =  56; EXPRESSED IN BONE MARROW, SIGNAL =  30; SWISSPROT HIT: Q40831, EVALUE 2.70e+00
VEEGEFSEAHQDMVVLKKDYEVVSVDSVEEEGEKEGEEF

SEQ ID NO: 34688 - protein, 88 aa, Homo sapiens
  MAP TO AC011342.1; EXPRESSED IN HBL100, SIGNAL = 1.2; EXPRESSED IN BONE MARROW, SIGNAL = 1.8; EXPRESSED IN BRAIN, SIGNAL = 1.6; EXPRESSED IN FETAL LIVER, SIGNAL = 1.2; EXPRESSED IN HELA, SIGNAL = 0.91; EXPRESSED IN HEART, SIGNAL = 0.96; EXPRESSED IN LUNG, SIGNAL =   1; EXPRESSED IN BT474, SIGNAL = 1.4; EST_HUMAN HIT: AI208756.1, EVALUE 1.00e-25; SWISSPROT HIT: P40908, EVALUE 1.70e+00
VSAILIPRLDLVISLVGSVSSSALALIIPALLEIVIFYSEDMSCVTIAKDIMISIVGLLGCIFGTYQALYELPQPISHSMANSTGVHA

SEQ ID NO: 34689 - protein, 95 aa, Homo sapiens
  MAP TO AP000514.1; EXPRESSED IN HELA, SIGNAL =  45; EXPRESSED IN PLACENTA, SIGNAL =  14; EXPRESSED IN HBL100, SIGNAL =  28; EXPRESSED IN HEART, SIGNAL = 8.2; EXPRESSED IN LUNG, SIGNAL = 6.2; EXPRESSED IN BONE MARROW, SIGNAL =  33; EXPRESSED IN BRAIN, SIGNAL =  13; EXPRESSED IN BT474, SIGNAL =  23; EXPRESSED IN FETAL LIVER, SIGNAL =  11; EXPRESSED IN ADULT LIVER, SIGNAL = 4.2; EST_HUMAN HIT: AW270626.1, EVALUE 7.00e-50; SWISSPROT HIT: P28746, EVALUE 7.00e-51
NKVDIKDRKVKAKSIVFHRKKNLQYYDISAKSNYNFEKPFLWLARKLIGDPNLEFVAMPALAPPEVVMDPALAAQYEHDLEVAQTTALPDEDDDL

SEQ ID NO: 34690 - protein, 70 aa, Homo sapiens
  MAP TO AL109752.4; EXPRESSED IN ADULT LIVER, SIGNAL =  75; EXPRESSED IN BT474, SIGNAL = 4.9e+02; EXPRESSED IN FETAL LIVER, SIGNAL = 1.6e+02; EXPRESSED IN HELA, SIGNAL = 3.9e+02; EXPRESSED IN PLACENTA, SIGNAL = 3.6e+02; EXPRESSED IN HBL100, SIGNAL = 3.7e+02; EXPRESSED IN HEART, SIGNAL =  90; EXPRESSED IN BONE MARROW, SIGNAL = 2e+02; EXPRESSED IN LUNG, SIGNAL = 1.3e+02; EXPRESSED IN BRAIN, SIGNAL = 1.2e+02; SWISSPROT HIT: Q90835, EVALUE 4.00e-31; EST_HUMAN HIT: BF309538.1, EVALUE 4.00e-30
SQVDCAVLIVAAGVGEFEAGISKNGQTSEHALLAYTLDVKQLIVGVNKMDSTEPPCSQKRYEEIVKEVST

SEQ ID NO: 34691 - protein, 46 aa, Homo sapiens
  MAP TO AL050402.16; EXPRESSED IN HEART, SIGNAL = 3.1; EXPRESSED IN BT474, SIGNAL = 2.4; EST_HUMAN HIT: AI024877.1, EVALUE 7.00e-20
MNTRNNCQIMHVELVFLSLEPLKDKEETQRRECLKQTNNLLALVAQ

SEQ ID NO: 34692 - protein, 52 aa, Homo sapiens
  MAP TO AC011481.1; EXPRESSED IN BT474, SIGNAL = 5.7; EXPRESSED IN PLACENTA, SIGNAL =  13; EXPRESSED IN HBL100, SIGNAL = 7.5; EXPRESSED IN HEART, SIGNAL = 7.1; EXPRESSED IN BRAIN, SIGNAL = 8.3; EXPRESSED IN ADULT LIVER, SIGNAL =  32; EXPRESSED IN FETAL LIVER, SIGNAL =  33; EXPRESSED IN HELA, SIGNAL =  11; EXPRESSED IN LUNG, SIGNAL = 6.1; EXPRESSED IN BONE MARROW, SIGNAL = 8.5; EST_HUMAN HIT: BF056156.1, EVALUE 1.00e-23; SWISSPROT HIT: P02655, EVALUE 1.00e-24
VQGTQQPQQDEMPSPTFLTQVKESLSSYWESAKTAAQNLYEKTYLPAVDEKL

SEQ ID NO: 34693 - protein, 21 aa, Homo sapiens
  MAP TO AC011481.1; EXPRESSED IN BT474, SIGNAL = 5.7; EXPRESSED IN PLACENTA, SIGNAL =  13; EXPRESSED IN HBL100, SIGNAL = 7.5; EXPRESSED IN HEART, SIGNAL = 7.1; EXPRESSED IN BRAIN, SIGNAL = 8.3; EXPRESSED IN ADULT LIVER, SIGNAL =  32; EXPRESSED IN FETAL LIVER, SIGNAL =  33; EXPRESSED IN HELA, SIGNAL =  11; EXPRESSED IN LUNG, SIGNAL = 6.1; EXPRESSED IN BONE MARROW, SIGNAL = 8.5; EST_HUMAN HIT: AV694617.1, EVALUE 3.00e-05
RSRGPNSPSKMRCLARPSSPR

SEQ ID NO: 34694 - protein, 55 aa, Homo sapiens
  MAP TO AC010686.1; EXPRESSED IN BONE MARROW, SIGNAL =   2; EXPRESSED IN BT474, SIGNAL = 5.4; EXPRESSED IN HBL100, SIGNAL = 8.9; EXPRESSED IN HEART, SIGNAL = 2.1; EXPRESSED IN LUNG, SIGNAL = 1.5; EXPRESSED IN BRAIN, SIGNAL = 2.1; EXPRESSED IN ADULT LIVER, SIGNAL = 1.5; EXPRESSED IN FETAL LIVER, SIGNAL = 2.5; EXPRESSED IN PLACENTA, SIGNAL = 3.6; EXPRESSED IN HELA, SIGNAL =   5; EST_HUMAN HIT: AA306870.1, EVALUE 6.00e-26; SWISSPROT HIT: P13010, EVALUE 5.00e-27
VFAENKDEIALVLFGTDGTDNPLSGGDQYQNITVHRHLMLPDFDLLEDIESKIQP

SEQ ID NO: 34695 - protein, 41 aa, Homo sapiens
  MAP TO AL078621.19; EXPRESSED IN PLACENTA, SIGNAL = 1.1; EXPRESSED IN HBL100, SIGNAL = 1.4; EXPRESSED IN HELA, SIGNAL = 1.3; EXPRESSED IN HEART, SIGNAL = 2.4; EXPRESSED IN LUNG, SIGNAL = 1.6; EXPRESSED IN BRAIN, SIGNAL = 1.3; EXPRESSED IN FETAL LIVER, SIGNAL = 2.6; EXPRESSED IN ADULT LIVER, SIGNAL = 1.7; SWISSPROT HIT: P38651, EVALUE 5.00e-08; EST_HUMAN HIT: BF059228.1, EVALUE 4.00e-10
TPAVSCIIRKIKAAGGIILTASHCPGGPGGEFGVKFNVANG

SEQ ID NO: 34696 - protein, 18 aa, Homo sapiens
  MAP TO AL078621.19; EXPRESSED IN PLACENTA, SIGNAL = 1.1; EXPRESSED IN HBL100, SIGNAL = 1.4; EXPRESSED IN HELA, SIGNAL = 1.3; EXPRESSED IN HEART, SIGNAL = 2.4; EXPRESSED IN LUNG, SIGNAL = 1.6; EXPRESSED IN BRAIN, SIGNAL = 1.3; EXPRESSED IN FETAL LIVER, SIGNAL = 2.6; EXPRESSED IN ADULT LIVER, SIGNAL = 1.7; EST_HUMAN HIT: BF059228.1, EVALUE 2.20e-02
HLRSPALSGRSRQLVESF

SEQ ID NO: 34697 - protein, 57 aa, Homo sapiens
  MAP TO AL121577.1; EXPRESSED IN FETAL LIVER, SIGNAL = 0.92; EXPRESSED IN BT474, SIGNAL = 1.2; EXPRESSED IN HEART, SIGNAL = 3.3; EXPRESSED IN BRAIN, SIGNAL = 1.1; EST_HUMAN HIT: W26539.1, EVALUE 1.00e-25; SWISSPROT HIT: P27961, EVALUE 4.50e+00
TMSISSPQIGNWYGRAWTFSWNRNKTATGHLSSARPSRERMSWCTGAMALQVSHTLL

SEQ ID NO: 34698 - protein, 64 aa, Homo sapiens
  MAP TO AC006371.2; EXPRESSED IN BONE MARROW, SIGNAL = 2.8; EXPRESSED IN LUNG, SIGNAL = 1.6; EXPRESSED IN BT474, SIGNAL = 1.5; EXPRESSED IN PLACENTA, SIGNAL = 3.3; EXPRESSED IN HBL100, SIGNAL = 3.7; EXPRESSED IN HEART, SIGNAL = 2.1; EXPRESSED IN BRAIN, SIGNAL = 1.9; EXPRESSED IN ADULT LIVER, SIGNAL = 5.9; EXPRESSED IN FETAL LIVER, SIGNAL = 1.7; EXPRESSED IN HELA, SIGNAL = 2.7; EST_HUMAN HIT: AA663213.1, EVALUE 5.00e-17; SWISSPROT HIT: P32074, EVALUE 1.30e-01
PFFLSDLKQIKVDLRKFSDDPDSYIDVLHGLGQIFDLNWIDVMLLLDQTLAFNENNVALAAAQE

SEQ ID NO: 34699 - protein, 38 aa, Homo sapiens
  MAP TO AP000555.1; EXPRESSED IN BONE MARROW, SIGNAL = 2.8; EXPRESSED IN BT474, SIGNAL =   6; EXPRESSED IN HEART, SIGNAL = 2.9; EXPRESSED IN HBL100, SIGNAL = 6.8; EXPRESSED IN LUNG, SIGNAL = 2.2; EXPRESSED IN BRAIN, SIGNAL = 7.3; EXPRESSED IN ADULT LIVER, SIGNAL = 2.2; EXPRESSED IN FETAL LIVER, SIGNAL = 2.9; EXPRESSED IN PLACENTA, SIGNAL =   4; EXPRESSED IN HELA, SIGNAL = 5.1; EST_HUMAN HIT: AV651449.1, EVALUE 1.00e-15
TWTSAPQGFRRRKHLLQAATSAKVFPQAPALGKQLWSK

SEQ ID NO: 34700 - protein, 73 aa, Homo sapiens
  MAP TO AL096869.1; EXPRESSED IN PLACENTA, SIGNAL = 3.3; EXPRESSED IN HELA, SIGNAL =   3; EXPRESSED IN BONE MARROW, SIGNAL = 2.6; EXPRESSED IN BRAIN, SIGNAL = 2.3; EXPRESSED IN BT474, SIGNAL =   5; EXPRESSED IN HBL100, SIGNAL = 6.1; EXPRESSED IN HEART, SIGNAL = 4.5; EXPRESSED IN LUNG, SIGNAL = 2.4; EXPRESSED IN ADULT LIVER, SIGNAL = 1.5; EXPRESSED IN FETAL LIVER, SIGNAL = 3.2; EST_HUMAN HIT: N44873.1, EVALUE 2.00e-33; SWISSPROT HIT: Q58741, EVALUE 1.00e-03
ALILHQLGRYSLAEKILRDAVQVNSTAHEVWNGLGEVLQAQGNDAAATECFLTALELEASSPAVPFTIIPRVL

SEQ ID NO: 34701 - protein, 115 aa, Homo sapiens
  MAP TO AC010083.1; EXPRESSED IN BT474, SIGNAL = 2.3; EXPRESSED IN FETAL LIVER, SIGNAL =   1; EXPRESSED IN PLACENTA, SIGNAL = 0.97; EXPRESSED IN BONE MARROW, SIGNAL = 1.3; EXPRESSED IN BRAIN, SIGNAL =   5; EXPRESSED IN HBL100, SIGNAL = 1.6; EXPRESSED IN HEART, SIGNAL = 1.4; EXPRESSED IN LUNG, SIGNAL = 1.1; EST_HUMAN HIT: D53040.1, EVALUE 5.00e-36; SWISSPROT HIT: O35245, EVALUE 8.40e+00
LLFLGHGQLGLVIPHHLVDVRGTLSAMQHQGPLLQHPLLRGAADKSQLQGPGASGVFPPRVSGHERPLVKAHLGVVIPWTPAQQNGLGAHRGSHVDVQVSSSGCVDRDDSLDMLQ

SEQ ID NO: 34702 - protein, 17 aa, Homo sapiens
  MAP TO AC010083.1; EXPRESSED IN BT474, SIGNAL = 2.3; EXPRESSED IN FETAL LIVER, SIGNAL =   1; EXPRESSED IN PLACENTA, SIGNAL = 0.97; EXPRESSED IN BONE MARROW, SIGNAL = 1.3; EXPRESSED IN BRAIN, SIGNAL =   5; EXPRESSED IN HBL100, SIGNAL = 1.6; EXPRESSED IN HEART, SIGNAL = 1.4; EXPRESSED IN LUNG, SIGNAL = 1.1; EST_HUMAN HIT: AW247231.1, EVALUE 2.00e-02
WSMSRLSSRSTQPEEET

SEQ ID NO: 34703 - protein, 48 aa, Homo sapiens
  MAP TO Z99716.4; EXPRESSED IN BT474, SIGNAL =  26; EXPRESSED IN ADULT LIVER, SIGNAL =   7; EXPRESSED IN PLACENTA, SIGNAL =  15; EXPRESSED IN BRAIN, SIGNAL =  11; EXPRESSED IN BONE MARROW, SIGNAL = 5.9; EXPRESSED IN FETAL LIVER, SIGNAL =  12; EXPRESSED IN HEART, SIGNAL =  25; EXPRESSED IN HELA, SIGNAL =  38; EXPRESSED IN HBL100, SIGNAL =  35; EXPRESSED IN LUNG, SIGNAL = 4.8; SWISSPROT HIT: P51881, EVALUE 1.00e-16; EST_HUMAN HIT: AA355731.1, EVALUE 3.00e-15
MAVAPIERVKLLLQVQHASKQITADKQYKGIRDCMVCIPKEHGVLSWC

SEQ ID NO: 34704 - protein, 22 aa, Homo sapiens
  MAP TO Z99716.4; EXPRESSED IN BT474, SIGNAL =  26; EXPRESSED IN ADULT LIVER, SIGNAL =   7; EXPRESSED IN PLACENTA, SIGNAL =  15; EXPRESSED IN BRAIN, SIGNAL =  11; EXPRESSED IN BONE MARROW, SIGNAL = 5.9; EXPRESSED IN FETAL LIVER, SIGNAL =  12; EXPRESSED IN HEART, SIGNAL =  25; EXPRESSED IN HELA, SIGNAL =  38; EXPRESSED IN HBL100, SIGNAL =  35; EXPRESSED IN LUNG, SIGNAL = 4.8
STHRAGQAAATGAACQQADHCR

SEQ ID NO: 34705 - protein, 557 aa, Homo sapiens
  MAP TO AL049732.9; EXPRESSED IN BONE MARROW, SIGNAL = 2.3; EXPRESSED IN LUNG, SIGNAL = 1.6; EXPRESSED IN BT474, SIGNAL = 4.2; EXPRESSED IN PLACENTA, SIGNAL =   2; EXPRESSED IN BRAIN, SIGNAL = 4.1; EXPRESSED IN ADULT LIVER, SIGNAL = 2.8; EXPRESSED IN FETAL LIVER, SIGNAL = 3.3; EXPRESSED IN HEART, SIGNAL = 2.5; EXPRESSED IN HELA, SIGNAL = 2.7; EXPRESSED IN HBL100, SIGNAL = 3.9; SWISSPROT HIT: Q12816, EVALUE 0.00e+00; EST_HUMAN HIT: BE894856.1, EVALUE 1.00e-106
VQKKDPKDWAVQYREAVEMEVQAAAVAVAEAEARAEARAQMGIGEEAVAGPWNWDDMDIDCLTREELGDDAQAWSRFSFEIEARAQENADASTNVNFSRGASTRAGFSDGASISFNGAPSSSGGFSGGPGITFGVAPSTSASFSNTASISFGGTLSTSSSFSSAASISFGCAHSTSTSFSSEASISFGGMPCTSASFSGGVSSSFSGPLSTSATFSGGASSGFGGTLSTTAGFSGVLSTSTSFGSAPTTSTVFSSALSTSTGFGGILSTSVCFGGSPSSSGSFGGTLSTSICFGGSPCTSTGFGGTLSTSVSFGGSSSTSANFGGTLSTSICFDGSPSTGAGFGGALNTSASFGSVLNTSTGFGGAMSTSADFGGTLSTSVCFGGSPGTSVSFGSALNTNAGYGGAVSTNTDFGGTLSTSVCFGGSPSTSAGFGGALNTNASFGCAVSTSASFSGAVSTSACFSGAPITNPGFGGAFSTSAGFGGALSTAADFGGTPSNSIGFGAAPSTSVSFGGAHGTSLCFGGAPSTSLCFGSASNTNLCFGGPPSTSACFSGAT

SEQ ID NO: 34706 - protein, 32 aa, Homo sapiens
  MAP TO AL049732.9; EXPRESSED IN BONE MARROW, SIGNAL = 2.3; EXPRESSED IN LUNG, SIGNAL = 1.6; EXPRESSED IN BT474, SIGNAL = 4.2; EXPRESSED IN PLACENTA, SIGNAL =   2; EXPRESSED IN BRAIN, SIGNAL = 4.1; EXPRESSED IN ADULT LIVER, SIGNAL = 2.8; EXPRESSED IN FETAL LIVER, SIGNAL = 3.3; EXPRESSED IN HEART, SIGNAL = 2.5; EXPRESSED IN HELA, SIGNAL = 2.7; EXPRESSED IN HBL100, SIGNAL = 3.9; EST_HUMAN HIT: H39550.1, EVALUE 6.00e-03
PISGAEERPQGLGCAVPRGSGDGSPSCSCGCG

SEQ ID NO: 34707 - protein, 53 aa, Homo sapiens
  MAP TO AP000548.1; EXPRESSED IN BT474, SIGNAL = 0.99; EXPRESSED IN FETAL LIVER, SIGNAL = 3.1; EXPRESSED IN PLACENTA, SIGNAL = 1.3; EXPRESSED IN HEART, SIGNAL = 0.86; EST_HUMAN HIT: AU126316.1, EVALUE 7.00e-12; SWISSPROT HIT: P56180, EVALUE 3.00e-12
LFGVFLVLLDVTLVLADLIFTDSKLYIPSEYRSISLAIALFFLMDVLLRVFVE

SEQ ID NO: 34708 - protein, 161 aa, Homo sapiens
  MAP TO AJ238093.1; EXPRESSED IN LUNG, SIGNAL = 7.5; EXPRESSED IN BT474, SIGNAL = 4.9; EXPRESSED IN PLACENTA, SIGNAL =  29; EXPRESSED IN BONE MARROW, SIGNAL = 6.8; EXPRESSED IN BRAIN, SIGNAL = 4.6; EXPRESSED IN ADULT LIVER, SIGNAL = 7.5; EXPRESSED IN FETAL LIVER, SIGNAL = 7.2; EXPRESSED IN HEART, SIGNAL = 5.2; EXPRESSED IN HELA, SIGNAL = 7.4; EXPRESSED IN HBL100, SIGNAL = 4.3; SWISSPROT HIT: P51825, EVALUE 1.00e-48; EST_HUMAN HIT: BF575588.1, EVALUE 2.00e-45
QTLPRTQGSSKVHGSSNNSKGYCPAKSPKDLAVKVHDKETPQDSLVAPAQPPSQTFPPPSLPSKSVAMQQKPTAYVRPMDGQDQAPSESPELKPLPEDYRQQTFEKTDLKVPAKAKLTKLKMPSQSVEVCGISYLGEFQFEDGFEMKMSGDVGQGGEVSPW

SEQ ID NO: 34709 - protein, 54 aa, Homo sapiens
  MAP TO AC004955.2; EXPRESSED IN PLACENTA, SIGNAL = 1.6; EXPRESSED IN HBL100, SIGNAL = 1.7; EXPRESSED IN HELA, SIGNAL =   2; EXPRESSED IN HEART, SIGNAL = 0.94; EXPRESSED IN BRAIN, SIGNAL = 1.1; EXPRESSED IN FETAL LIVER, SIGNAL = 1.2; EXPRESSED IN BT474, SIGNAL = 1.9; EST_HUMAN HIT: R66568.1, EVALUE 8.00e-24
SKPDLHRPAIFTISRTRRIVSNIQTGMNMRNQFQGAFSSSFNTNMIKKSSVKSQ

SEQ ID NO: 34710 - protein, 27 aa, Homo sapiens
  MAP TO AC004955.2; EXPRESSED IN PLACENTA, SIGNAL = 1.6; EXPRESSED IN HBL100, SIGNAL = 1.7; EXPRESSED IN HELA, SIGNAL =   2; EXPRESSED IN HEART, SIGNAL = 0.94; EXPRESSED IN BRAIN, SIGNAL = 1.1; EXPRESSED IN FETAL LIVER, SIGNAL = 1.2; EXPRESSED IN BT474, SIGNAL = 1.9; EST_HUMAN HIT: AV711889.1, EVALUE 3.00e-11
YPDWNEYEEPVPRCFLIQFQHQHDQEE

SEQ ID NO: 34711 - protein, 64 aa, Homo sapiens
  MAP TO Z84718.2; EXPRESSED IN FETAL LIVER, SIGNAL = 1.5; EXPRESSED IN ADULT LIVER, SIGNAL = 3.4; EXPRESSED IN PLACENTA, SIGNAL = 1.8; EXPRESSED IN HELA, SIGNAL = 2.4; EXPRESSED IN HEART, SIGNAL =   3; EXPRESSED IN BT474, SIGNAL = 2.6; EXPRESSED IN HBL100, SIGNAL = 7.2; EXPRESSED IN BRAIN, SIGNAL = 1.9; EXPRESSED IN LUNG, SIGNAL = 2.1; EXPRESSED IN BONE MARROW, SIGNAL = 1.1; EST_HUMAN HIT: BF343733.1, EVALUE 6.00e-32; SWISSPROT HIT: P30711, EVALUE 5.00e-33
PVGAGCQVFEGRPKLATWRQRVEAAVGEDLFQEAHEVILKAKDFPPADPTIKQKLMPWVLAMIR

SEQ ID NO: 34712 - protein, 20 aa, Homo sapiens
  MAP TO Z84718.2; EXPRESSED IN FETAL LIVER, SIGNAL = 1.5; EXPRESSED IN ADULT LIVER, SIGNAL = 3.4; EXPRESSED IN PLACENTA, SIGNAL = 1.8; EXPRESSED IN HELA, SIGNAL = 2.4; EXPRESSED IN HEART, SIGNAL =   3; EXPRESSED IN BT474, SIGNAL = 2.6; EXPRESSED IN HBL100, SIGNAL = 7.2; EXPRESSED IN BRAIN, SIGNAL = 1.9; EXPRESSED IN LUNG, SIGNAL = 2.1; EXPRESSED IN BONE MARROW, SIGNAL = 1.1
GHMAAARGGSSGGGPLPGGP

SEQ ID NO: 34713 - protein, 78 aa, Homo sapiens
  MAP TO AL121757.2; EXPRESSED IN BT474, SIGNAL = 9.9; EXPRESSED IN FETAL LIVER, SIGNAL = 3.4; EXPRESSED IN ADULT LIVER, SIGNAL =   5; EXPRESSED IN HBL100, SIGNAL = 7.2; EXPRESSED IN HELA, SIGNAL = 8.1; EXPRESSED IN PLACENTA, SIGNAL = 9.7; EXPRESSED IN HEART, SIGNAL = 1.7; EXPRESSED IN BONE MARROW, SIGNAL = 2.3; EXPRESSED IN LUNG, SIGNAL =   3; EXPRESSED IN BRAIN, SIGNAL = 1.9; EST_HUMAN HIT: AW997711.1, EVALUE 7.00e-28; SWISSPROT HIT: P08547, EVALUE 2.00e-22
GIKLKINSKRNLQNHANIWKLNNLLLNDHWVKNKIKMEIKKFFRLNDNSDTTYQNPWDRATVVLRGKFIALKYLHQKD

SEQ ID NO: 34714 - protein, 21 aa, Homo sapiens
  MAP TO AC006445.10; EXPRESSED IN BONE MARROW, SIGNAL =  20; EXPRESSED IN LUNG, SIGNAL =  12; EXPRESSED IN BRAIN, SIGNAL =  17; EXPRESSED IN FETAL LIVER, SIGNAL =  14; EXPRESSED IN ADULT LIVER, SIGNAL = 6.7; EXPRESSED IN PLACENTA, SIGNAL =  20; EXPRESSED IN HEART, SIGNAL =  15; EXPRESSED IN BT474, SIGNAL =  28; EXPRESSED IN HELA, SIGNAL =  34; EXPRESSED IN HBL100, SIGNAL =  66
VPGPQGQGAGSAADVQQILLC

SEQ ID NO: 34715 - protein, 47 aa, Homo sapiens
  MAP TO AB020875.1; EXPRESSED IN HEART, SIGNAL = 1.2; EXPRESSED IN PLACENTA, SIGNAL = 1.4; EXPRESSED IN BRAIN, SIGNAL = 1.7; EXPRESSED IN FETAL LIVER, SIGNAL = 2.3; SWISSPROT HIT: Q12473, EVALUE 7.90e+00
CIFFSFPSLFRPIVVTEWLIIALEIWGTDKRRRVILGLKVSITGNKD

SEQ ID NO: 34716 - protein, 43 aa, Homo sapiens
  MAP TO AC007298.17; EXPRESSED IN HBL100, SIGNAL = 0.92; EXPRESSED IN HELA, SIGNAL = 0.97; EXPRESSED IN HEART, SIGNAL = 0.97; EXPRESSED IN LUNG, SIGNAL = 1.1; EXPRESSED IN BRAIN, SIGNAL = 1.1; EXPRESSED IN ADULT LIVER, SIGNAL = 0.9; EXPRESSED IN PLACENTA, SIGNAL = 1.1; EXPRESSED IN BONE MARROW, SIGNAL = 1.4; EXPRESSED IN BT474, SIGNAL = 1.3; EXPRESSED IN FETAL LIVER, SIGNAL = 1.4; EST_HUMAN HIT: AW607701.1, EVALUE 4.70e+00
MPWAQTCSYIHDEDQGCPLTISTSKPKANNFWKSCVNFPKSKS

SEQ ID NO: 34717 - protein, 143 aa, Homo sapiens
  MAP TO AB023048.1; EXPRESSED IN BT474, SIGNAL = 2.1; EXPRESSED IN FETAL LIVER, SIGNAL = 1.5; EXPRESSED IN HBL100, SIGNAL = 1.4; EXPRESSED IN HELA, SIGNAL = 1.2; EXPRESSED IN HEART, SIGNAL = 2.2; EXPRESSED IN BRAIN, SIGNAL =   2; EXPRESSED IN ADULT LIVER, SIGNAL = 1.5; EXPRESSED IN PLACENTA, SIGNAL = 1.2; EXPRESSED IN LUNG, SIGNAL = 1.2; EXPRESSED IN BONE MARROW, SIGNAL =   2
TPIAIKATTTASAVLILTRTCLSPPSPVPVSSLLHLGQVLPHLPKHTHPTFADHHSVVDDVTSVPATATGMPMNESNSVISSSSSLLTPSDHSHKRSRACHFVYKPALFYLGGHFRSQIDLPLPYPSRSRFLNLLPPPSPTPP

SEQ ID NO: 34718 - protein, 33 aa, Homo sapiens
  MAP TO AB023048.1; EXPRESSED IN BT474, SIGNAL = 2.1; EXPRESSED IN FETAL LIVER, SIGNAL = 1.5; EXPRESSED IN HBL100, SIGNAL = 1.4; EXPRESSED IN HELA, SIGNAL = 1.2; EXPRESSED IN HEART, SIGNAL = 2.2; EXPRESSED IN BRAIN, SIGNAL =   2; EXPRESSED IN ADULT LIVER, SIGNAL = 1.5; EXPRESSED IN PLACENTA, SIGNAL = 1.2; EXPRESSED IN LUNG, SIGNAL = 1.2; EXPRESSED IN BONE MARROW, SIGNAL =   2; EST_HUMAN HIT: AA490219.1, EVALUE 2.00e+00; SWISSPROT HIT: P12980, EVALUE 6.30e+00
HLSEPTLSCPCEQPSPLGSGPPTSAQAHSPHLC

SEQ ID NO: 34719 - protein, 67 aa, Homo sapiens [sequence omitted]

SEQ ID NO: 34720 - protein, 82 aa, Homo sapiens
  MAP TO AL109847.1; EXPRESSED IN BT474, SIGNAL = 4.2; EXPRESSED IN FETAL LIVER, SIGNAL = 3.5; EXPRESSED IN PLACENTA, SIGNAL = 4.6; EXPRESSED IN HBL100, SIGNAL = 3.6; EXPRESSED IN HEART, SIGNAL = 3.5; EXPRESSED IN LUNG, SIGNAL = 5.1; EXPRESSED IN BRAIN, SIGNAL =   3; EXPRESSED IN ADULT LIVER, SIGNAL = 2.7; EXPRESSED IN HELA, SIGNAL = 3.3; EXPRESSED IN BONE MARROW, SIGNAL = 2.9; SWISSPROT HIT: Q9VLZ7, EVALUE 6.80e+00; EST_HUMAN HIT: AW002060.1, EVALUE 7.00e-44
EVKDKNVQVVELPIVDSLHPRPPYLPLAVPEDLADRLVRVHGDPAVWWVSQFVKYLIRPQPWLEKEIEEATKKLGFKHPVIG

SEQ ID NO: 34721 - protein, 36 aa, Homo sapiens
  MAP TO AC006364.3; EXPRESSED IN BRAIN, SIGNAL = 1.8; EXPRESSED IN BT474, SIGNAL = 1.5; EXPRESSED IN FETAL LIVER, SIGNAL = 1.1; EXPRESSED IN PLACENTA, SIGNAL = 2.1; EXPRESSED IN HELA, SIGNAL = 1.2; EXPRESSED IN HBL100, SIGNAL = 1.6; EXPRESSED IN HEART, SIGNAL = 1.9; EXPRESSED IN LUNG, SIGNAL =   1; SWISSPROT HIT: Q92520, EVALUE 7.00e-16; EST_HUMAN HIT: AU130701.1, EVALUE 1.00e-14
RLIADLGSTSITNLGFRDNWVFCGGKGIKTKSPFEQ

SEQ ID NO: 34722 - protein, 35 aa, Homo sapiens
  MAP TO AC006364.3; EXPRESSED IN BRAIN, SIGNAL = 1.8; EXPRESSED IN BT474, SIGNAL = 1.5; EXPRESSED IN FETAL LIVER, SIGNAL = 1.1; EXPRESSED IN PLACENTA, SIGNAL = 2.1; EXPRESSED IN HELA, SIGNAL = 1.2; EXPRESSED IN HBL100, SIGNAL = 1.6; EXPRESSED IN HEART, SIGNAL = 1.9; EXPRESSED IN LUNG, SIGNAL =   1; EST_HUMAN HIT: AW996786.1, EVALUE 1.00e-02
GSLLIWGAHLLLILVLETTGSSVVGRALRQKALLN

SEQ ID NO: 34723 - protein, 60 aa, Homo sapiens
  MAP TO AC009311.1; EXPRESSED IN BONE MARROW, SIGNAL = 1.7; EXPRESSED IN LUNG, SIGNAL = 1.7; EXPRESSED IN BRAIN, SIGNAL = 1.3; EXPRESSED IN ADULT LIVER, SIGNAL = 1.4; EXPRESSED IN BT474, SIGNAL = 1.5; EXPRESSED IN FETAL LIVER, SIGNAL = 2.2; EXPRESSED IN PLACENTA, SIGNAL = 1.9; EXPRESSED IN HBL100, SIGNAL = 1.6; EXPRESSED IN HELA, SIGNAL = 2.3; EXPRESSED IN HEART, SIGNAL = 1.8; SWISSPROT HIT: P80217, EVALUE 7.00e-03; EST_HUMAN HIT: AI862910.1, EVALUE 2.00e-28
IFSGTSKRTVLLTGMEGIQMDEEIVEDLINIHFQRAKNGGGEVDVVKCSLGQPHIAYFEE

SEQ ID NO: 34724 - protein, 159 aa, Homo sapiens
  MAP TO AB020866.1; EXPRESSED IN BONE MARROW, SIGNAL = 0.99; EXPRESSED IN BRAIN, SIGNAL =   1; EXPRESSED IN BT474, SIGNAL = 1.9; EXPRESSED IN FETAL LIVER, SIGNAL = 1.9; EXPRESSED IN HELA, SIGNAL = 1.5; EXPRESSED IN HBL100, SIGNAL = 1.4; EXPRESSED IN HEART, SIGNAL = 1.5; EXPRESSED IN LUNG, SIGNAL = 1.1; EST_HUMAN HIT: BE217830.1, EVALUE 1.00e-46; SWISSPROT HIT: P10266, EVALUE 3.00e-59
LHSLTEVIIQDVDLVEWSFLPHSTTRTFSIYLDQIAILIGQAQLRIVRFTGTDPDKIVVPLNKAQVQQAFIHLSEWQSNLAGFVGHIDNHYPKTKIFQFLKLATWILPKITSSILLEGAVTVFTDGSQNGKAAYTGPEEKVIQTQFHSPQRAKLQAVIF

SEQ ID NO: 34725 - protein, 33 aa, Homo sapiens
  MAP TO AC007115.1; EXPRESSED IN HEART, SIGNAL =  18; EXPRESSED IN LUNG, SIGNAL =  11; EXPRESSED IN BONE MARROW, SIGNAL = 0.95; EXPRESSED IN BRAIN, SIGNAL = 2.2; EXPRESSED IN ADULT LIVER, SIGNAL =   4; EXPRESSED IN BT474, SIGNAL = 1.4; EXPRESSED IN FETAL LIVER, SIGNAL = 3.6; EXPRESSED IN PLACENTA, SIGNAL =  34; EXPRESSED IN HBL100, SIGNAL = 1.3; SWISSPROT HIT: Q9XSD9, EVALUE 7.00e-06; EST_HUMAN HIT: AV753066.1, EVALUE 5.00e-05
PKDLPPDTTLLDLQNNKITEIKDGDFKNLKNLH

SEQ ID NO: 34726 - protein, 43 aa, Homo sapiens
  MAP TO AC007458.13; EXPRESSED IN FETAL LIVER, SIGNAL = 2.3; EXPRESSED IN HELA, SIGNAL = 2.8; EXPRESSED IN PLACENTA, SIGNAL = 2.5; EXPRESSED IN HBL100, SIGNAL = 2.3; EXPRESSED IN HEART, SIGNAL =   2; EXPRESSED IN LUNG, SIGNAL = 1.7; EXPRESSED IN BONE MARROW, SIGNAL = 2.9; EXPRESSED IN BRAIN, SIGNAL = 2.3; EXPRESSED IN BT474, SIGNAL = 1.6; EXPRESSED IN ADULT LIVER, SIGNAL = 3.7; EST_HUMAN HIT: AV731382.1, EVALUE 8.00e-05
WQKDGGGRSRLKISRYGSWRNSRASRHCTTGISRRRLDGDECF

SEQ ID NO: 34727 - protein, 551 aa, Homo sapiens
  MAP TO AC007568.1; EXPRESSED IN BRAIN, SIGNAL = 1.1; EXPRESSED IN ADULT LIVER, SIGNAL = 1.2; EXPRESSED IN BT474, SIGNAL =   1; EXPRESSED IN HEART, SIGNAL = 0.88; SWISSPROT HIT: P36747, EVALUE 3.00e-04; EST_HUMAN HIT: BE837018.1, EVALUE 4.00e-21
LEMEKLQLQALEQEHKKLAARLEEERGKNKQVVLMLVKECKQLSGKVIEEAQKLEDVMAKLEEEKKKTNELEEELSAEKRRSTEMEAQMEKQLSEFDTEREQLRAKLNREEAHTTDLKEEIDKMRKMIEQLKRGSDSKPSLSLPRKTKDRRLVSISVGTEGTVTRSVACQTDLVTENADHMKKLPLTMPVKPSTGSPLVSANAKGSVCTSATMARPGIDRQASYGDLIGASVPAFPPPSANKIEENGPSTGSTPDPTSSTPPLPSNAAPPTAQTPGIAPQNSQAPPMHSLHSPCANTSLHPGLNPRIQAARFRFQGNANDPDQNGNTTQSPPSRDVSPTSRDNLVAKQLARNTVTQALSRFTSPQAGAPSRPGVPPTGDVGTHPPVGRTSLKTHGVARVDRGNPPPIPPKKPGLSQTPSPPHPQLKVIIDSSRASNTGAKVDNKTVASTPSSLPQGNRVINEENLPKSSSPQLPPKPSIDLTVAPAGCAVSALATSQVGAWPAATPGLNQPACSDSSLVIPTTIAFCSSINPVSASSCRPGASDSLLVTAS

SEQ ID NO: 34728 - protein, 77 aa, Homo sapiens
  MAP TO AC009491.2; EXPRESSED IN BT474, SIGNAL = 2.6; EXPRESSED IN FETAL LIVER, SIGNAL = 1.9; EXPRESSED IN ADULT LIVER, SIGNAL = 1.4; EXPRESSED IN HELA, SIGNAL = 1.2; EXPRESSED IN PLACENTA, SIGNAL = 2.2; EXPRESSED IN HBL100, SIGNAL = 1.6; EXPRESSED IN HEART, SIGNAL = 0.9; EXPRESSED IN LUNG, SIGNAL = 1.2; EXPRESSED IN BONE MARROW, SIGNAL =   2; EXPRESSED IN BRAIN, SIGNAL = 1.5; EST_HUMAN HIT: BF678507.1, EVALUE 8.00e-09; SWISSPROT HIT: P36809, EVALUE 1.60e+00
ALAKAVARWCVTCQQPMRGKAPQFHHSYKLMEQLLLRIFRGISQKCCNVEVTSICGFFCVLTLGGWRLIQQELKRPT

SEQ ID NO: 34729 - protein, 40 aa, Homo sapiens
  MAP TO AF152363.1; EXPRESSED IN PLACENTA, SIGNAL = 2.7; EXPRESSED IN HELA, SIGNAL =   3; EXPRESSED IN BONE MARROW, SIGNAL = 2.3; EXPRESSED IN BT474, SIGNAL = 1.5; EXPRESSED IN HEART, SIGNAL = 2.1; EXPRESSED IN HBL100, SIGNAL = 1.5; EXPRESSED IN LUNG, SIGNAL = 2.3; EXPRESSED IN BRAIN, SIGNAL = 2.2; EXPRESSED IN ADULT LIVER, SIGNAL = 2.8; EXPRESSED IN FETAL LIVER, SIGNAL = 2.8; EST_HUMAN HIT: BE326240.1, EVALUE 1.00e-10; SWISSPROT HIT: Q40288, EVALUE 8.10e+00
LAPVNQAAISSCSSERTGGMGNVEIWINILALNNYPANPA

SEQ ID NO: 34730 - protein, 55 aa, Homo sapiens
  MAP TO AC009743.1; EXPRESSED IN PLACENTA, SIGNAL = 2.1; EXPRESSED IN HELA, SIGNAL = 1.7; EXPRESSED IN BONE MARROW, SIGNAL = 1.9; EXPRESSED IN BRAIN, SIGNAL = 1.7; EXPRESSED IN BT474, SIGNAL = 1.4; EXPRESSED IN HBL100, SIGNAL = 1.5; EXPRESSED IN HEART, SIGNAL = 2.1; EXPRESSED IN LUNG, SIGNAL =   2; EXPRESSED IN ADULT LIVER, SIGNAL = 1.6; EXPRESSED IN FETAL LIVER, SIGNAL = 2.9; SWISSPROT HIT: P09095, EVALUE 3.40e+00; EST_HUMAN HIT: R09371.1, EVALUE 1.30e-02
GQIILCFRQLLSALVPYRKFSSMPGLYSLDASSIPDEVVVVKTEEASNHYQLSPG

SEQ ID NO: 34731 - protein, 98 aa, Homo sapiens
  MAP TO AC009948.2; EXPRESSED IN BRAIN, SIGNAL = 5.4; EXPRESSED IN BT474, SIGNAL = 2.2; EXPRESSED IN ADULT LIVER, SIGNAL = 1.2; EXPRESSED IN HEART, SIGNAL = 9.7; EST_HUMAN HIT: BE247639.1, EVALUE 5.00e-29; SWISSPROT HIT: Q14324, EVALUE 1.00e-14
PPRNVRITDISKNSVSLSWQQPAFDGGSKITGYIVERRDLPDGRWTKASFTNVTETQFIISGLTQNSQYEFRVFARNAVGSISNPSEVVGPITCIDSY

SEQ ID NO: 34732 - protein, 55 aa, Homo sapiens
  MAP TO AC009948.2; EXPRESSED IN BRAIN, SIGNAL = 5.4; EXPRESSED IN BT474, SIGNAL = 2.2; EXPRESSED IN ADULT LIVER, SIGNAL = 1.2; EXPRESSED IN HEART, SIGNAL = 9.7; EST_HUMAN HIT: BE247639.1, EVALUE 1.40e+00; SWISSPROT HIT: P35207, EVALUE 7.70e+00
LIFQRTLSAFHGNNQLSMEVARLQATLLRDVTFQMADGPRPASPMLLKLNSSSLA

SEQ ID NO: 34733 - protein, 27 aa, Homo sapiens
  MAP TO AC009966.2; EXPRESSED IN PLACENTA, SIGNAL =  16; EXPRESSED IN HBL100, SIGNAL = 1.1; EXPRESSED IN HELA, SIGNAL = 1.3; EXPRESSED IN HEART, SIGNAL =   5; EXPRESSED IN BONE MARROW, SIGNAL = 0.99; EXPRESSED IN BT474, SIGNAL = 1.7; EXPRESSED IN LUNG, SIGNAL = 7.8; EXPRESSED IN BRAIN, SIGNAL = 6.5; EXPRESSED IN FETAL LIVER, SIGNAL = 1.5; EST_HUMAN HIT: BF204880.1, EVALUE 8.00e-08; SWISSPROT HIT: P48032, EVALUE 6.00e-09
IRAKVVGKKLVKEGPFGTLVYTIKQMK

SEQ ID NO: 34734 - protein, 117 aa, Homo sapiens
  MAP TO AF188030.1; EXPRESSED IN PLACENTA, SIGNAL = 1.8; EXPRESSED IN HBL100, SIGNAL = 1.5; EXPRESSED IN HELA, SIGNAL = 1.5; EXPRESSED IN HEART, SIGNAL = 2.2; EXPRESSED IN BT474, SIGNAL = 1.4; EXPRESSED IN LUNG, SIGNAL = 1.8; EXPRESSED IN BONE MARROW, SIGNAL = 1.6; EXPRESSED IN BRAIN, SIGNAL = 1.6; EXPRESSED IN ADULT LIVER, SIGNAL =   2; EXPRESSED IN FETAL LIVER, SIGNAL = 2.1; EST_HUMAN HIT: BE065688.1, EVALUE 1.00e-12; SWISSPROT HIT: Q12889, EVALUE 4.00e-04
PSSYECSIRRTLLQGHCALVPGHHTLVSGHHTLVPGHGTLGPRHRTLVPGHHTLVSGHHALVPGHHALVSGHDALVSGHHALVPGHRALVSGHCALVSGHDALVSGHQALVPSHHTL

SEQ ID NO: 34735 - protein, 47 aa, Homo sapiens
  MAP TO AC009488.1; EXPRESSED IN FETAL LIVER, SIGNAL = 1.8; EXPRESSED IN ADULT LIVER, SIGNAL = 1.2; EXPRESSED IN PLACENTA, SIGNAL = 2.7; EXPRESSED IN HELA, SIGNAL =   2; EXPRESSED IN HEART, SIGNAL =   2; EXPRESSED IN BT474, SIGNAL = 1.9; EXPRESSED IN HBL100, SIGNAL = 3.8; EXPRESSED IN BRAIN, SIGNAL = 1.4; EXPRESSED IN LUNG, SIGNAL = 1.7; EXPRESSED IN BONE MARROW, SIGNAL = 1.5; EST_HUMAN HIT: AW501855.1, EVALUE 4.00e-03; SWISSPROT HIT: Q28983, EVALUE 4.00e-22
VGERWYKPGCKELCVCESNNRIRCQPWRCRAQEFCGQQDGIYGCHAQ

SEQ ID NO: 34736 - protein, 114 aa, Homo sapiens
  MAP TO AC009497.2; EXPRESSED IN BONE MARROW, SIGNAL =   1; EXPRESSED IN LUNG, SIGNAL = 0.91; EXPRESSED IN BRAIN, SIGNAL =  18; EXPRESSED IN BT474, SIGNAL = 4.9; EXPRESSED IN ADULT LIVER, SIGNAL = 5.9; EXPRESSED IN HEART, SIGNAL =   1; EST_HUMAN HIT: BF576570.1, EVALUE 3.00e-32; SWISSPROT HIT: gi127998, EVALUE 1.00e-20
YLYKTAYEKQKGHYIGCRSAKEDPKLVWAANVLKMQNDRLYKKAYNDHKAKISIPVDMVSISAAKEGQALASDVDYRHYLHHWSCFPDQNDVIQARKAYDLQSDVSVSPRKQVP

SEQ ID NO: 34737 - protein, 24 aa, Homo sapiens
  MAP TO AC009497.2; EXPRESSED IN BONE MARROW, SIGNAL =   1; EXPRESSED IN LUNG, SIGNAL = 0.91; EXPRESSED IN BRAIN, SIGNAL =  18; EXPRESSED IN BT474, SIGNAL = 4.9; EXPRESSED IN ADULT LIVER, SIGNAL = 5.9; EXPRESSED IN HEART, SIGNAL =   1
NRKAITLAVAAPRKTLNWFGQQMC

SEQ ID NO: 34738 - protein, 36 aa, Homo sapiens
  MAP TO AC009571.2; EXPRESSED IN FETAL LIVER, SIGNAL = 8.1; EXPRESSED IN ADULT LIVER, SIGNAL =  11; EXPRESSED IN PLACENTA, SIGNAL =  16; EXPRESSED IN HBL100, SIGNAL =  57; EXPRESSED IN HELA, SIGNAL =  11; EXPRESSED IN HEART, SIGNAL = 7.7; EXPRESSED IN BRAIN, SIGNAL = 8.1; EXPRESSED IN BT474, SIGNAL =  17; EXPRESSED IN LUNG, SIGNAL = 8.6; EXPRESSED IN BONE MARROW, SIGNAL = 9.8; EST_HUMAN HIT: AV731500.1, EVALUE 8.00e-08
  unsure 9
TDSHGECYXFLKMVCPEFVPSDVQTCLEFLPSVGFV

SEQ ID NO: 34739 - protein, 90 aa, Homo sapiens
  MAP TO AC009958.1; EXPRESSED IN HBL100, SIGNAL = 2.6; EXPRESSED IN HEART, SIGNAL = 1.8; EXPRESSED IN BONE MARROW, SIGNAL =  84; EXPRESSED IN LUNG, SIGNAL =  15; EXPRESSED IN BRAIN, SIGNAL = 0.91; EXPRESSED IN ADULT LIVER, SIGNAL = 5.9; EST_HUMAN HIT: AW404507.1, EVALUE 4.00e-46; SWISSPROT HIT: P01608, EVALUE 3.00e-43
SSLSASVGDRVTITCQASQDISNYLNWYQQKPGKAPKLLIYDASNLETGVPSRFSGSGSGTDFTFTISSLQPEDIATYYCQQYDNLPPTV

SEQ ID NO: 34740 - protein, 32 aa, Homo sapiens
  MAP TO AL078592.4; EXPRESSED IN BONE MARROW, SIGNAL = 4.2; EXPRESSED IN LUNG, SIGNAL = 6.4; EXPRESSED IN BRAIN, SIGNAL = 4.4; EXPRESSED IN ADULT LIVER, SIGNAL = 3.8; EXPRESSED IN BT474, SIGNAL = 7.2; EXPRESSED IN FETAL LIVER, SIGNAL = 4.9; EXPRESSED IN PLACENTA, SIGNAL = 4.8; EXPRESSED IN HELA, SIGNAL = 4.2; EXPRESSED IN HBL100, SIGNAL = 4.9; EXPRESSED IN HEART, SIGNAL = 5.8
YPEIHDSDILLYAKNIEVYEQTECICLNILVN

SEQ ID NO: 34741 - protein, 39 aa, Homo sapiens
  MAP TO AL034548.24; EXPRESSED IN FETAL LIVER, SIGNAL = 1.3; EXPRESSED IN HELA, SIGNAL = 1.1; EXPRESSED IN PLACENTA, SIGNAL = 1.2; EXPRESSED IN HBL100, SIGNAL = 1.3; EXPRESSED IN HEART, SIGNAL = 1.2; EXPRESSED IN LUNG, SIGNAL = 1.3; EXPRESSED IN BONE MARROW, SIGNAL = 1.5; EXPRESSED IN BRAIN, SIGNAL = 1.3; EXPRESSED IN BT474, SIGNAL = 1.6; EXPRESSED IN ADULT LIVER, SIGNAL = 0.91; EST_HUMAN HIT: AW374968.1, EVALUE 2.00e-14; SWISSPROT HIT: O60664, EVALUE 2.10e+00
IIDQFEENMPVLRAEVEELQAQTREPREVIFEDVLLRRP

SEQ ID NO: 34742 - protein, 93 aa, Homo sapiens
  MAP TO AL035462.12; EXPRESSED IN PLACENTA, SIGNAL = 4.2; EXPRESSED IN HBL100, SIGNAL = 2.1; EXPRESSED IN HELA, SIGNAL = 3.2; EXPRESSED IN HEART, SIGNAL = 3.1; EXPRESSED IN LUNG, SIGNAL = 4.7; EXPRESSED IN BONE MARROW, SIGNAL = 3.1; EXPRESSED IN BRAIN, SIGNAL = 2.6; EXPRESSED IN ADULT LIVER, SIGNAL = 2.7; EXPRESSED IN BT474, SIGNAL = 2.6; EXPRESSED IN FETAL LIVER, SIGNAL = 3.3; EST_HUMAN HIT: AL449552.1, EVALUE 1.00e-46; SWISSPROT HIT: O78756, EVALUE 2.20e+00
CPEAAKTAAQLTVTLMPGCELGHEISKMRLNYADSTFEMESCLAWIPSTLAGLKAELSESKSCLIYCSKVKNSFLSSNILPKTVTAMVQAILN

SEQ ID NO: 34743 - protein, 132 aa, Homo sapiens [sequence omitted]

SEQ ID NO: 34744 - protein, 87 aa, Homo sapiens; identical to SEQ ID NO: 33727
  MAP TO AL080246.13; EXPRESSED IN LUNG, SIGNAL = 1.5; EXPRESSED IN BONE MARROW, SIGNAL = 3.7; EXPRESSED IN BRAIN, SIGNAL = 3.7; EXPRESSED IN FETAL LIVER, SIGNAL = 2.3; EXPRESSED IN BT474, SIGNAL = 1.8; EXPRESSED IN ADULT LIVER, SIGNAL = 2.6; EXPRESSED IN HELA, SIGNAL = 2.9; EXPRESSED IN PLACENTA, SIGNAL =   3; EXPRESSED IN HBL100, SIGNAL =   2; EXPRESSED IN HEART, SIGNAL = 2.1

SEQ ID NO: 34745 - protein, 78 aa, Homo sapiens
  MAP TO AL080246.13; EXPRESSED IN LUNG, SIGNAL = 1.5; EXPRESSED IN BONE MARROW, SIGNAL = 3.7; EXPRESSED IN BRAIN, SIGNAL = 3.7; EXPRESSED IN FETAL LIVER, SIGNAL = 2.3; EXPRESSED IN BT474, SIGNAL = 1.8; EXPRESSED IN ADULT LIVER, SIGNAL = 2.6; EXPRESSED IN HELA, SIGNAL = 2.9; EXPRESSED IN PLACENTA, SIGNAL =   3; EXPRESSED IN HBL100, SIGNAL =   2; EXPRESSED IN HEART, SIGNAL = 2.1
DGDDDDGDDDSDDDDGDDDSDDDADNDGDGDGDDGDGDDDVTMMVMIMMAMVMVMMVMVMIIVMVMMMVMVLVRRRGE

SEQ ID NO: 34746 - protein, 55 aa, Homo sapiens
  MAP TO AL034431.13; EXPRESSED IN FETAL LIVER, SIGNAL = 9.8; EXPRESSED IN ADULT LIVER, SIGNAL = 3.4; EXPRESSED IN PLACENTA, SIGNAL = 5.6; EXPRESSED IN HELA, SIGNAL = 2.5; EXPRESSED IN BONE MARROW, SIGNAL = 2.8; EXPRESSED IN BRAIN, SIGNAL = 3.2; EXPRESSED IN BT474, SIGNAL = 2.4; EXPRESSED IN HBL100, SIGNAL = 2.2; EXPRESSED IN HEART, SIGNAL = 3.9; EXPRESSED IN LUNG, SIGNAL = 3.5; EST_HUMAN HIT: AW978317.1, EVALUE 1.10e-02
TLLVSSQRRRDRRARQLSAASFLRALIPFMRAEPSQFHHFPKGLISEYHRLGIYV

SEQ ID NO: 34747 - protein, 20 aa, Homo sapiens
  MAP TO AL035078.32; EXPRESSED IN LUNG, SIGNAL = 2.7; EXPRESSED IN BT474, SIGNAL = 2.3; EXPRESSED IN ADULT LIVER, SIGNAL = 5.3; EXPRESSED IN HEART, SIGNAL =   2; EXPRESSED IN PLACENTA, SIGNAL = 5.6; EXPRESSED IN BRAIN, SIGNAL = 3.4; EXPRESSED IN BONE MARROW, SIGNAL = 2.5; EXPRESSED IN FETAL LIVER, SIGNAL = 2.2; EXPRESSED IN HELA, SIGNAL = 2.9; EXPRESSED IN HBL100, SIGNAL =   2; EST_HUMAN HIT: AI688946.1, EVALUE 3.00e-05
CNGKRPCPTGKYHNPKYICT

SEQ ID NO: 34748 - protein, 261 aa, Homo sapiens
  MAP TO AL035587.5; EXPRESSED IN LUNG, SIGNAL = 1.5; EXPRESSED IN BT474, SIGNAL = 1.8; EXPRESSED IN FETAL LIVER, SIGNAL = 1.5; EXPRESSED IN ADULT LIVER, SIGNAL = 2.4; EXPRESSED IN PLACENTA, SIGNAL = 1.7; EXPRESSED IN BRAIN, SIGNAL = 1.7; EXPRESSED IN BONE MARROW, SIGNAL = 1.6; EXPRESSED IN HEART, SIGNAL = 1.2; EXPRESSED IN HELA, SIGNAL = 2.1; EXPRESSED IN HBL100, SIGNAL = 1.7; SWISSPROT HIT: P36938, EVALUE 1.20e+00; EST_HUMAN HIT: BE244455.1, EVALUE 4.00e-28
GFQADFCCSFKLDKAAHETQFGRSDQHGSKASSSLQPPAKAQGRDRAKTGVTEPMNHDQFHLVPNHIVVSAEGNISKKTECLGRALKFDKVGLVQYQSTSEEKASRREPLKASQCSPGPEGHRKTSSRSDHGTESKLSSILADSHLEMTCNNSFQDKSLRNSPKNEVLHTDIMKGSGEPQPDLQLTKSLETTFKNILELKKAGRQPQSDPTVSGSVELDFPNFSPMASQENCLEKFIPDHSEGVVETDSILEAAVNSILEC

SEQ ID NO: 34749 - protein, 37 aa, Homo sapiens
  MAP TO AL096887.5; EXPRESSED IN LUNG, SIGNAL = 1.3; EXPRESSED IN BT474, SIGNAL = 0.99; EXPRESSED IN ADULT LIVER, SIGNAL = 3.6; EXPRESSED IN HEART, SIGNAL = 1.2; EXPRESSED IN PLACENTA, SIGNAL = 1.2; EXPRESSED IN BRAIN, SIGNAL = 1.1; EXPRESSED IN BONE MARROW, SIGNAL = 1.1; EXPRESSED IN FETAL LIVER, SIGNAL = 1.9; EXPRESSED IN HELA, SIGNAL =   1; EXPRESSED IN HBL100, SIGNAL = 1.1; SWISSPROT HIT: P00740, EVALUE 4.00e-20; EST_HUMAN HIT: AV695911.1, EVALUE 6.00e-19
GDQCESNPCLNGGSCKDDINSYECWCPFGFEGKNCEL

SEQ ID NO: 34750 - protein, 107 aa, Homo sapiens
  MAP TO AP000347.1; EXPRESSED IN FETAL LIVER, SIGNAL = 1.8; EXPRESSED IN ADULT LIVER, SIGNAL = 1.6; EXPRESSED IN PLACENTA, SIGNAL = 1.9; EXPRESSED IN HELA, SIGNAL = 1.8; EXPRESSED IN BRAIN, SIGNAL = 2.5; EXPRESSED IN BT474, SIGNAL =   3; EXPRESSED IN HEART, SIGNAL = 0.95; EXPRESSED IN HBL100, SIGNAL =   2; EXPRESSED IN LUNG, SIGNAL = 1.2; EXPRESSED IN BONE MARROW, SIGNAL = 2.8; SWISSPROT HIT: Q03386, EVALUE 3.70e-01; EST_HUMAN HIT: BF347174.1, EVALUE 7.00e-03
PAPRPGQHALTMPALEPAPPLLADLGPALEPESPAALGPPGYLHSAPGPAPAPGEGPPPGTVLEPQSAPESSCPCRGSVKNQPSEELPDMTTFPPRLLAEQLTLMDA

SEQ ID NO: 34751 - protein, 81 aa, Homo sapiens
  MAP TO AP000352.2; EXPRESSED IN HBL100, SIGNAL = 6.3; EXPRESSED IN HELA, SIGNAL = 9.3; EXPRESSED IN BONE MARROW, SIGNAL = 5.4; EXPRESSED IN LUNG, SIGNAL = 4.9; EXPRESSED IN BT474, SIGNAL = 6.7; EXPRESSED IN ADULT LIVER, SIGNAL = 4.3; EXPRESSED IN HEART, SIGNAL =   5; EXPRESSED IN PLACENTA, SIGNAL = 8.2; EXPRESSED IN BRAIN, SIGNAL = 4.5; EXPRESSED IN FETAL LIVER, SIGNAL = 9.9; SWISSPROT HIT: Q9Y6J0, EVALUE 2.00e-39; EST_HUMAN HIT: AU120832.1, EVALUE 4.80e+00
DSLLRLKDYRQCFECSDVALNEAVQQMVNSGEAAAKEEWVATVTQLLMGIEQALSADSSGSILKVSSSTTGLVRLTNNLIQ

SEQ ID NO: 34752 - protein, 44 aa, Homo sapiens
  MAP TO AP000356.1; EXPRESSED IN FETAL LIVER, SIGNAL = 3.2; EXPRESSED IN ADULT LIVER, SIGNAL = 1.6; EXPRESSED IN PLACENTA, SIGNAL = 3.2; EXPRESSED IN HBL100, SIGNAL = 8.3; EXPRESSED IN HELA, SIGNAL = 5.9; EXPRESSED IN BT474, SIGNAL = 3.2; EXPRESSED IN HEART, SIGNAL = 2.7; EXPRESSED IN BRAIN, SIGNAL = 2.6; EXPRESSED IN LUNG, SIGNAL = 2.1; EXPRESSED IN BONE MARROW, SIGNAL = 2.8; EST_HUMAN HIT: AI815532.1, EVALUE 9.00e-18; SWISSPROT HIT: P43331, EVALUE 5.00e-18
GVPIKVLHEAEGHIVTCETNTGEVYRGKLIEAEDNMNCQVFCFA

SEQ ID NO: 34753 - protein, 126 aa, Homo sapiens
  MAP TO AP000512.1; EXPRESSED IN BRAIN, SIGNAL = 1.6; EXPRESSED IN BONE MARROW, SIGNAL = 1.7; EXPRESSED IN LUNG, SIGNAL = 1.2; EXPRESSED IN ADULT LIVER, SIGNAL = 1.2; EXPRESSED IN BT474, SIGNAL = 1.3; EXPRESSED IN FETAL LIVER, SIGNAL = 2.7; EXPRESSED IN HBL100, SIGNAL = 2.1; EXPRESSED IN HEART, SIGNAL = 1.5; EXPRESSED IN PLACENTA, SIGNAL = 2.3; EXPRESSED IN HELA, SIGNAL = 2.3; EST_HUMAN HIT: AA262877.1, EVALUE 1.10e-02; SWISSPROT HIT: P46013, EVALUE 2.00e-03
FPLHLGKNVVGRMPDCSVALPFPSISKQHAEIEILAWDKAPILRDCGSLNGTQILRPPKVLSPGVSHRLRDQELILFADLLCQYHRLDVSLPFVSRGPLTVEETPRVQGETQPQRLLLAEDSEEEV

SEQ ID NO: 34754 - protein, 38 aa, Homo sapiens
  MAP TO AP000512.1; EXPRESSED IN BRAIN, SIGNAL = 1.6; EXPRESSED IN BONE MARROW, SIGNAL = 1.7; EXPRESSED IN LUNG, SIGNAL = 1.2; EXPRESSED IN ADULT LIVER, SIGNAL = 1.2; EXPRESSED IN BT474, SIGNAL = 1.3; EXPRESSED IN FETAL LIVER, SIGNAL = 2.7; EXPRESSED IN HBL100, SIGNAL = 2.1; EXPRESSED IN HEART, SIGNAL = 1.5; EXPRESSED IN PLACENTA, SIGNAL = 2.3; EXPRESSED IN HELA, SIGNAL = 2.3; EST_HUMAN HIT: BE410073.1, EVALUE 2.90e+00
LPVPSPGCLSALCLPGPSDSRRDTQSTGRNSTPEASVG

SEQ ID NO: 34755 - protein, 63 aa, Homo sapiens
  MAP TO AP000350.1; EXPRESSED IN PLACENTA, SIGNAL = 1.4; EXPRESSED IN HBL100, SIGNAL = 1.9; EXPRESSED IN HEART, SIGNAL = 2.2; EXPRESSED IN BONE MARROW, SIGNAL = 2.6; EXPRESSED IN LUNG, SIGNAL = 1.7; EXPRESSED IN ADULT LIVER, SIGNAL = 3.4; EXPRESSED IN FETAL LIVER, SIGNAL = 3.2; EXPRESSED IN BRAIN, SIGNAL = 1.8; EXPRESSED IN BT474, SIGNAL = 1.7; EXPRESSED IN HELA, SIGNAL = 5.7; EST_HUMAN HIT: AI133024.1, EVALUE 7.00e-03; SWISSPROT HIT: P18493, EVALUE 1.90e+00
EISRTCFPSTGQDLGHDPADQNRIWSEQDAVKKSAETSWNQDGNKSDLTFVPHCSLYASDNAC

SEQ ID NO: 34756 - protein, 48 aa, Homo sapiens
  MAP TO AP000509.1; EXPRESSED IN HBL100, SIGNAL = 1.7; EXPRESSED IN LUNG, SIGNAL = 3.2; EXPRESSED IN BONE MARROW, SIGNAL = 2.8; EXPRESSED IN BRAIN, SIGNAL = 2.7; EXPRESSED IN ADULT LIVER, SIGNAL = 2.3; EXPRESSED IN BT474, SIGNAL =   2; EXPRESSED IN FETAL LIVER, SIGNAL = 2.1; EXPRESSED IN HELA, SIGNAL = 2.3; EXPRESSED IN PLACENTA, SIGNAL = 2.6; EXPRESSED IN HEART, SIGNAL = 2.2
RGLSSARDKQNIMVSIIHKVKRPQSPLRAVYWPLRYCILPSRLVGLHD

SEQ ID NO: 34757 - protein, 18 aa, Homo sapiens
  MAP TO AP000509.1; EXPRESSED IN HBL100, SIGNAL = 1.7; EXPRESSED IN LUNG, SIGNAL = 3.2; EXPRESSED IN BONE MARROW, SIGNAL = 2.8; EXPRESSED IN BRAIN, SIGNAL = 2.7; EXPRESSED IN ADULT LIVER, SIGNAL = 2.3; EXPRESSED IN BT474, SIGNAL =   2; EXPRESSED IN FETAL LIVER, SIGNAL = 2.1; EXPRESSED IN HELA, SIGNAL = 2.3; EXPRESSED IN PLACENTA, SIGNAL = 2.6; EXPRESSED IN HEART, SIGNAL = 2.2
SRTLWSASSTRSRGHRAP

SEQ ID NO: 34758 - protein, 72 aa, Homo sapiens
  MAP TO AP000513.1; EXPRESSED IN BT474, SIGNAL = 2.8; EXPRESSED IN HELA, SIGNAL = 6.5; EXPRESSED IN PLACENTA, SIGNAL = 6.1; EXPRESSED IN HBL100, SIGNAL = 5.9; EXPRESSED IN HEART, SIGNAL = 1.5; EXPRESSED IN LUNG, SIGNAL = 1.4; EXPRESSED IN BONE MARROW, SIGNAL = 1.3; EXPRESSED IN ADULT LIVER, SIGNAL =   2; EXPRESSED IN FETAL LIVER, SIGNAL = 2.1; EXPRESSED IN BRAIN, SIGNAL = 1.9; EST_HUMAN HIT: BE797082.1, EVALUE 2.00e-20; SWISSPROT HIT: P07548, EVALUE 4.90e-01
LFFPLPLQEKQTKEALTRKQQKCRRKNQDEESQEAPELLKRPKEYTVRFTFPDPPPLSPPVLGLHGECRGPL

SEQ ID NO: 34759 - protein, 38 aa, Homo sapiens
  MAP TO AP000548.1; EXPRESSED IN LUNG, SIGNAL = 4.2; EXPRESSED IN BRAIN, SIGNAL = 0.97; EXPRESSED IN ADULT LIVER, SIGNAL = 1.6; EXPRESSED IN HEART, SIGNAL = 3.7; EXPRESSED IN PLACENTA, SIGNAL = 6.6; EST_HUMAN HIT: AU140168.1, EVALUE 6.00e-14; SWISSPROT HIT: Q14129, EVALUE 4.70e+00
ALDVADKVPGHPLGLLAGHQEQGDAEGFRAVDLADDLE

SEQ ID NO: 34760 - protein, 133 aa, Homo sapiens
  MAP TO AP000548.1; EXPRESSED IN LUNG, SIGNAL = 4.2; EXPRESSED IN BRAIN, SIGNAL = 0.97; EXPRESSED IN ADULT LIVER, SIGNAL = 1.6; EXPRESSED IN HEART, SIGNAL = 3.7; EXPRESSED IN PLACENTA, SIGNAL = 6.6; EST_HUMAN HIT: AU140989.1, EVALUE 1.00e-10; SWISSPROT HIT: P04275, EVALUE 7.00e-39
MSRNFVRYVQGLKKKKVIVIPVGIGPHANLKQIRLIEKQAPENKAFVLSGVDELEQQREEIVSYLCDLAPEAPPPTLPPHMAQVTVGPGLLGLSTLGPKRNSMVLDVAFVPEGLDKIGEADFNRSKEFMEEVI

SEQ ID NO: 34761 - protein, 34 aa, Homo sapiens
  MAP TO AC004852.2; EXPRESSED IN BRAIN, SIGNAL = 2.8; EXPRESSED IN FETAL LIVER, SIGNAL = 3.5; EXPRESSED IN BT474, SIGNAL = 2.1; EXPRESSED IN HELA, SIGNAL = 2.4; EXPRESSED IN PLACENTA, SIGNAL = 2.8; EXPRESSED IN HBL100, SIGNAL = 1.7; EXPRESSED IN LUNG, SIGNAL =   3; EXPRESSED IN BONE MARROW, SIGNAL = 3.2; EXPRESSED IN ADULT LIVER, SIGNAL = 2.4; EXPRESSED IN HEART, SIGNAL = 2.4; EST_HUMAN HIT: H87208.1, EVALUE 4.00e-08
QVLQEVFQKKILLSQEMTAPCMLLPLNTFQWDKI

SEQ ID NO: 34762 - protein, 51 aa, Homo sapiens
  MAP TO AC007833.1; EXPRESSED IN PLACENTA, SIGNAL = 5.5; EXPRESSED IN HBL100, SIGNAL = 8.5; EXPRESSED IN HEART, SIGNAL = 5.9; EXPRESSED IN LUNG, SIGNAL = 6.2; EXPRESSED IN BONE MARROW, SIGNAL = 5.4; EXPRESSED IN FETAL LIVER, SIGNAL = 7.2; EXPRESSED IN ADULT LIVER, SIGNAL = 4.8; EXPRESSED IN BT474, SIGNAL = 3.7; EXPRESSED IN HELA, SIGNAL = 4.8; EXPRESSED IN BRAIN, SIGNAL = 5.3; EST_HUMAN HIT: BE175877.1, EVALUE 3.00e-10; SWISSPROT HIT: P45627, EVALUE 6.90e-01
LKEQLFSMNSSEEKPLPIRPLKTTLRSIEDQPSAFNPFHVYKAFSENMLDQ

SEQ ID NO: 34763 - protein, 41 aa, Homo sapiens
  MAP TO AC005488.2; EXPRESSED IN BT474, SIGNAL = 5.4; EXPRESSED IN HELA, SIGNAL = 5.4; EXPRESSED IN PLACENTA, SIGNAL = 4.4; EXPRESSED IN HBL100, SIGNAL = 4.2; EXPRESSED IN HEART, SIGNAL = 2.7; EXPRESSED IN LUNG, SIGNAL = 1.9; EXPRESSED IN BONE MARROW, SIGNAL = 3.5; EXPRESSED IN ADULT LIVER, SIGNAL = 3.7; EXPRESSED IN FETAL LIVER, SIGNAL = 3.5; EXPRESSED IN BRAIN, SIGNAL = 4.8; EST_HUMAN HIT: AW517461.1, EVALUE 2.00e-18; SWISSPROT HIT: Q06730, EVALUE 2.00e-10
PVSFKDVAVDFTQEEWWQLDPDEKITYGDVMLENYSHLVSL

SEQ ID NO: 34764 - protein, 24 aa, Homo sapiens
  MAP TO AC005488.2; EXPRESSED IN BT474, SIGNAL = 5.4; EXPRESSED IN HELA, SIGNAL = 5.4; EXPRESSED IN PLACENTA, SIGNAL = 4.4; EXPRESSED IN HBL100, SIGNAL = 4.2; EXPRESSED IN HEART, SIGNAL = 2.7; EXPRESSED IN LUNG, SIGNAL = 1.9; EXPRESSED IN BONE MARROW, SIGNAL = 3.5; EXPRESSED IN ADULT LIVER, SIGNAL = 3.7; EXPRESSED IN FETAL LIVER, SIGNAL = 3.5; EXPRESSED IN BRAIN, SIGNAL = 4.8; EST_HUMAN HIT: AW390296.1, EVALUE 6.00e-09
QCHSKMWLWISPRRSGGNWTLMRR

SEQ ID NO: 34765 - protein, 167 aa, Homo sapiens
  MAP TO AC006371.2; EXPRESSED IN BRAIN, SIGNAL = 3.6; EXPRESSED IN FETAL LIVER, SIGNAL = 4.5; EXPRESSED IN BT474, SIGNAL = 3.4; EXPRESSED IN HBL100, SIGNAL = 2.3; EXPRESSED IN HELA, SIGNAL = 2.5; EXPRESSED IN HEART, SIGNAL =   3; EXPRESSED IN PLACENTA, SIGNAL = 3.3; EXPRESSED IN LUNG, SIGNAL = 3.4; EXPRESSED IN BONE MARROW, SIGNAL = 3.9; EXPRESSED IN ADULT LIVER, SIGNAL = 2.9; EST_HUMAN HIT: BE958003.1, EVALUE 4.60e+00
EEEGGEGEEEEEEKGGGGEEEGGGGEGEEGRGRRRRRRRKRRRKRRRKRRKRRRGGGRRRKKEEEKKKEEEEERRRGEGEEEEEKEGGEGGEEEEEQPFYMELPTTRHMLGHMHTHTSHGPFHQDGRGQERKAALKICPSLVGMHLYFCLSIELERRGNQRRVSISL

SEQ ID NO: 34766 - protein, 109 aa, Homo sapiens
  MAP TO AC008015.4; EXPRESSED IN BONE MARROW, SIGNAL = 2.5; EXPRESSED IN BRAIN, SIGNAL = 1.9; EXPRESSED IN FETAL LIVER, SIGNAL = 1.8; EXPRESSED IN ADULT LIVER, SIGNAL = 1.5; EXPRESSED IN BT474, SIGNAL =   2; EXPRESSED IN HEART, SIGNAL = 1.5; EXPRESSED IN HELA, SIGNAL = 1.3; EXPRESSED IN HBL100, SIGNAL = 1.5; EXPRESSED IN PLACENTA, SIGNAL = 1.4; EXPRESSED IN LUNG, SIGNAL = 1.6; SWISSPROT HIT: P24665, EVALUE 3.00e+00
SCDVWSGEVAGQHHCHPSFPDESPNNWAHWTLGQREQCLLLEMSNRRFGHWAICDGPHFGPLQHLCSSGFKGNLERHSFEGGYGLWSRKRQSHLHCIDDLDNNNKGTAC

SEQ ID NO: 34767 - protein, 36 aa, Homo sapiens
  MAP TO AC004019.11; EXPRESSED IN BRAIN, SIGNAL = 2.8; EXPRESSED IN BT474, SIGNAL = 1.9; EXPRESSED IN HBL100, SIGNAL = 2.6; EXPRESSED IN HELA, SIGNAL = 2.5; EXPRESSED IN PLACENTA, SIGNAL = 3.8; EXPRESSED IN LUNG, SIGNAL = 3.6; EXPRESSED IN BONE MARROW, SIGNAL = 4.1; EXPRESSED IN ADULT LIVER, SIGNAL = 2.9; EXPRESSED IN FETAL LIVER, SIGNAL = 4.5; EXPRESSED IN HEART, SIGNAL = 3.6
CRCTRSSRRPRSQRPPQQQHHRRRCRLISLQHFPWI

SEQ ID NO: 34768 - protein, 53 aa, Homo sapiens
  MAP TO AC005948.6; EXPRESSED IN FETAL LIVER, SIGNAL =  17; EXPRESSED IN BT474, SIGNAL =  22; EXPRESSED IN HEART, SIGNAL = 8.3; EXPRESSED IN HELA, SIGNAL =  28; EXPRESSED IN HBL100, SIGNAL =  19; EXPRESSED IN PLACENTA, SIGNAL =  25; EXPRESSED IN BRAIN, SIGNAL =  11; EXPRESSED IN LUNG, SIGNAL = 9.1; EXPRESSED IN BONE MARROW, SIGNAL =  16; EXPRESSED IN ADULT LIVER, SIGNAL =  12; EST_HUMAN HIT: AV716040.1, EVALUE 1.00e-23
LTLCLCLQHFHNDFLFVDKESMLDPVMNTFSIHGTTIGPADIFLCFGQSHRNF

SEQ ID NO: 34769 - protein, 24 aa, Homo sapiens
  MAP TO AC007919.18; EXPRESSED IN BONE MARROW, SIGNAL =  15; EXPRESSED IN FETAL LIVER, SIGNAL =  23; EXPRESSED IN ADULT LIVER, SIGNAL = 9.3; EXPRESSED IN BT474, SIGNAL =   3; EXPRESSED IN HEART, SIGNAL =  14; EXPRESSED IN HELA, SIGNAL =  12; EXPRESSED IN HBL100, SIGNAL = 7.2; EXPRESSED IN PLACENTA, SIGNAL =  22; EXPRESSED IN BRAIN, SIGNAL =  15; EXPRESSED IN LUNG, SIGNAL = 2.3
GSISTLPKSKHQFWRTSLTSLQQT

SEQ ID NO: 34770 - protein, 24 aa, Homo sapiens
  MAP TO AC006369.3; EXPRESSED IN HEART, SIGNAL = 1.3; EXPRESSED IN BT474, SIGNAL = 1.1; EXPRESSED IN HBL100, SIGNAL = 1.1; EXPRESSED IN PLACENTA, SIGNAL = 0.96; EXPRESSED IN BRAIN, SIGNAL = 1.2; EXPRESSED IN LUNG, SIGNAL = 1.1; EXPRESSED IN BONE MARROW, SIGNAL = 1.1; EXPRESSED IN ADULT LIVER, SIGNAL = 1.4
RQMAMTFSATSSCCQLPVALPSSL

SEQ ID NO: 34771 - protein, 60 aa, Homo sapiens
  MAP TO AC008013.8; EXPRESSED IN BT474, SIGNAL = 1.6; EXPRESSED IN FETAL LIVER, SIGNAL =   1; EXPRESSED IN HEART, SIGNAL = 1.1; EXPRESSED IN HELA, SIGNAL = 0.96; EXPRESSED IN HBL100, SIGNAL = 4.4; EXPRESSED IN PLACENTA, SIGNAL = 1.1; EXPRESSED IN BRAIN, SIGNAL = 1.7; EXPRESSED IN LUNG, SIGNAL = 1.2; EXPRESSED IN BONE MARROW, SIGNAL = 1.6; EXPRESSED IN ADULT LIVER, SIGNAL = 1.7; EST_HUMAN HIT: AW583572.1, EVALUE 5.00e-03; SWISSPROT HIT: P48509, EVALUE 2.00e-03
LSDELKQHLNRTLAENYGQPGATQITASVDRLQQDVSHAPYGLEGQAHKDSNPDCSFLSG

SEQ ID NO: 34772 - protein, 50 aa, Homo sapiens
  MAP TO AC006445.10; EXPRESSED IN BONE MARROW, SIGNAL = 1.4; EXPRESSED IN BT474, SIGNAL = 1.3; EXPRESSED IN FETAL LIVER, SIGNAL = 1.1; EXPRESSED IN HEART, SIGNAL = 1.1; EXPRESSED IN HELA, SIGNAL = 1.6; EXPRESSED IN HBL100, SIGNAL = 1.4; EXPRESSED IN PLACENTA, SIGNAL = 2.2; EXPRESSED IN BRAIN, SIGNAL = 1.4; EXPRESSED IN LUNG, SIGNAL = 1.2; EXPRESSED IN ADULT LIVER, SIGNAL = 1.4; EST_HUMAN HIT: R17437.1, EVALUE 5.00e-08
SSEPERKRQKSVSDPVEDKKEQESDEEEEEEEEDEPSGATTRSTTRSEAQ

SEQ ID NO: 34773 - protein, 59 aa, Homo sapiens
  MAP TO AC006509.15; EXPRESSED IN ADULT LIVER, SIGNAL = 3.1; EXPRESSED IN HBL100, SIGNAL =  19; EXPRESSED IN PLACENTA, SIGNAL =   4; EXPRESSED IN BRAIN, SIGNAL = 2.8; EXPRESSED IN LUNG, SIGNAL = 2.2; EXPRESSED IN BONE MARROW, SIGNAL = 2.6; EXPRESSED IN FETAL LIVER, SIGNAL = 3.8; EXPRESSED IN BT474, SIGNAL = 9.9; EXPRESSED IN HEART, SIGNAL = 2.2; EXPRESSED IN HELA, SIGNAL =  15; EST_HUMAN HIT: AA127544.1, EVALUE 7.00e-10; SWISSPROT HIT: Q01768, EVALUE 4.00e-09
LPHHLTLSDPQAMANTESIIINPSAVQHSLVGEIIKYSEQKGFYLVTMKFLRASEKPLK

SEQ ID NO: 34774 - protein, 103 aa, Homo sapiens
  MAP TO AC009594.2; EXPRESSED IN BT474, SIGNAL = 1.4; EXPRESSED IN FETAL LIVER, SIGNAL = 1.2; EXPRESSED IN HELA, SIGNAL = 0.96; EXPRESSED IN PLACENTA, SIGNAL = 0.96; EXPRESSED IN HBL100, SIGNAL = 2.3; EXPRESSED IN HEART, SIGNAL = 1.1; EXPRESSED IN BONE MARROW, SIGNAL = 1.3; EXPRESSED IN LUNG, SIGNAL = 0.92; EXPRESSED IN BRAIN, SIGNAL = 1.1; SWISSPROT HIT: Q15062, EVALUE 3.00e-23; EST_HUMAN HIT: BF116115.1, EVALUE 6.00e-18
IFIMYVVILLGEWYSHFNQHLGPSTFTPLMYFFLGNLSFLDICYTTTSIPSTLVSFLSERKTISFSGCAVQMFLGLAMGTTECVLLGMMAFDRYVAICNPLRY

SEQ ID NO: 34775 - protein, 17 aa, Homo sapiens
  MAP TO AC009414.2; EXPRESSED IN PLACENTA, SIGNAL = 0.96; EXPRESSED IN HBL100, SIGNAL = 1.1; EXPRESSED IN HEART, SIGNAL = 1.7; EXPRESSED IN LUNG, SIGNAL =   1; EXPRESSED IN BONE MARROW, SIGNAL = 1.1; EXPRESSED IN ADULT LIVER, SIGNAL = 1.2; EXPRESSED IN BT474, SIGNAL = 1.1
AAVTCGLRNALSQSSGS

SEQ ID NO: 34776 - protein, 54 aa, Homo sapiens
  MAP TO AC009752.1; EXPRESSED IN PLACENTA, SIGNAL =   2; EXPRESSED IN BRAIN, SIGNAL =   2; EXPRESSED IN FETAL LIVER, SIGNAL = 1.8; EXPRESSED IN ADULT LIVER, SIGNAL = 1.5; EXPRESSED IN HEART, SIGNAL = 1.2; EXPRESSED IN HELA, SIGNAL = 1.7; EXPRESSED IN HBL100, SIGNAL = 2.5; EXPRESSED IN LUNG, SIGNAL =   3; EXPRESSED IN BONE MARROW, SIGNAL = 1.8; EXPRESSED IN BT474, SIGNAL = 2.1; SWISSPROT HIT: Q92540, EVALUE 5.90e+00; EST_HUMAN HIT: BF351691.1, EVALUE 6.40e+00
RMARQDAKPRLSERSKAAWSVSTPHPGPPLFAAATADTPAAPSLHNAKPPSTSP

SEQ ID NO: 34777 - protein, 68 aa, Homo sapiens
  MAP TO AC010754.1; EXPRESSED IN PLACENTA, SIGNAL = 2.4; EXPRESSED IN BONE MARROW, SIGNAL = 1.8; EXPRESSED IN BRAIN, SIGNAL = 1.7; EXPRESSED IN FETAL LIVER, SIGNAL = 1.3; EXPRESSED IN HEART, SIGNAL = 1.3; EXPRESSED IN HELA, SIGNAL = 1.2; EXPRESSED IN HBL100, SIGNAL = 1.3; EXPRESSED IN LUNG, SIGNAL = 2.1; EXPRESSED IN ADULT LIVER, SIGNAL = 1.3; EXPRESSED IN BT474, SIGNAL = 1.7; SWISSPROT HIT: Q16787, EVALUE 7.50e-01
AVDAATAYENILNAIKAAEDAANRAASASESALQVGTCTSSFSTFAVEMADFYIFFPWAPRNRNKALF

SEQ ID NO: 34778 - protein, 40 aa, Homo sapiens
  MAP TO AC010092.1; EXPRESSED IN BRAIN, SIGNAL = 0.98; EXPRESSED IN BT474, SIGNAL = 1.4; EXPRESSED IN BONE MARROW, SIGNAL =   1; EXPRESSED IN LUNG, SIGNAL = 0.94; EXPRESSED IN FETAL LIVER, SIGNAL = 1.1; EXPRESSED IN PLACENTA, SIGNAL =   2; EXPRESSED IN HEART, SIGNAL = 1.1; EXPRESSED IN HELA, SIGNAL = 1.1; EXPRESSED IN HBL100, SIGNAL =   1; EST_HUMAN HIT: BE939264.1, EVALUE 7.00e-04
MLPFSFTQYQGGNGSSPVRGIPPAIRSPQNSHSHSTPSSS

SEQ ID NO: 34779 - protein, 32 aa, Homo sapiens
  MAP TO AC010131.1; EXPRESSED IN HBL100, SIGNAL = 4.6; EXPRESSED IN HEART, SIGNAL = 4.6; EXPRESSED IN LUNG, SIGNAL = 2.9; EXPRESSED IN BRAIN, SIGNAL = 3.4; EXPRESSED IN ADULT LIVER, SIGNAL = 3.4; EXPRESSED IN PLACENTA, SIGNAL = 3.3; EXPRESSED IN HELA, SIGNAL = 2.5; EXPRESSED IN BONE MARROW, SIGNAL =   3; EXPRESSED IN BT474, SIGNAL = 2.5; EXPRESSED IN FETAL LIVER, SIGNAL = 3.1
IQNSFNGIALSCSAIMSLKCCSCRLNCFFVGP

SEQ ID NO: 34780 - protein, 33 aa, Homo sapiens
  MAP TO AC011331.1; EXPRESSED IN LUNG, SIGNAL = 1.8; EXPRESSED IN BONE MARROW, SIGNAL = 1.2; EXPRESSED IN BRAIN, SIGNAL =   2; EXPRESSED IN BT474, SIGNAL = 1.8; EXPRESSED IN FETAL LIVER, SIGNAL = 1.3; EXPRESSED IN PLACENTA, SIGNAL = 1.5; EXPRESSED IN HEART, SIGNAL = 1.3
MSALVLASQEHTVTVEVKRKPSPGNQCLPELIK

SEQ ID NO: 34781 - protein, 31 aa, Homo sapiens
  MAP TO AC011331.1; EXPRESSED IN LUNG, SIGNAL = 1.8; EXPRESSED IN BONE MARROW, SIGNAL = 1.2; EXPRESSED IN BRAIN, SIGNAL =   2; EXPRESSED IN BT474, SIGNAL = 1.8; EXPRESSED IN FETAL LIVER, SIGNAL = 1.3; EXPRESSED IN PLACENTA, SIGNAL = 1.5; EXPRESSED IN HEART, SIGNAL = 1.3; SWISSPROT HIT: Q10813, EVALUE 4.80e+00
VSSSPGIPGAYGDSGSEAQAESWEPMSARIN

SEQ ID NO: 34782 - protein, 135 aa, Homo sapiens
  MAP TO AL050343.14; EXPRESSED IN BONE MARROW, SIGNAL = 8.5; EXPRESSED IN BRAIN, SIGNAL = 6.5; EXPRESSED IN HBL100, SIGNAL =  15; EXPRESSED IN HELA, SIGNAL =  12; EXPRESSED IN HEART, SIGNAL = 8.6; EXPRESSED IN LUNG, SIGNAL = 4.6; EXPRESSED IN ADULT LIVER, SIGNAL = 5.3; EXPRESSED IN FETAL LIVER, SIGNAL = 7.4; EXPRESSED IN BT474, SIGNAL =  18; EXPRESSED IN PLACENTA, SIGNAL =  10; EST_HUMAN HIT: BE799086.1, EVALUE 4.00e-21; SWISSPROT HIT: P94029, EVALUE 1.00e+00
FPNVGCQAGSGKFQGIEEAQGDGPSRPSGSQVACKISPELCMLMHASQKDLLVLIPKGKVEGLHGEAVDGAGQVPLQKDKCPAPWGCGPCSPPHHAFVRCRHNLLTGMLHLQQCLDWLNSGRCPLGNSEGNASGQ

SEQ ID NO: 34783 - protein, 32 aa, Homo sapiens
  MAP TO AL109830.7; EXPRESSED IN BT474, SIGNAL = 3.4; EXPRESSED IN PLACENTA, SIGNAL =  21; EXPRESSED IN BRAIN, SIGNAL =  15; EXPRESSED IN FETAL LIVER, SIGNAL =  22; EXPRESSED IN ADULT LIVER, SIGNAL =  11; EXPRESSED IN HEART, SIGNAL =  18; EXPRESSED IN HELA, SIGNAL =  12; EXPRESSED IN HBL100, SIGNAL = 7.2; EXPRESSED IN LUNG, SIGNAL = 1.6; EXPRESSED IN BONE MARROW, SIGNAL =  17; EST_HUMAN HIT: BE083760.1, EVALUE 6.00e-01
AVECPTLGEIMRVSTRSLPWENTFLILVSLLP

SEQ ID NO: 34784 - protein, 50 aa, Homo sapiens
  MAP TO AL121749.2; EXPRESSED IN PLACENTA, SIGNAL = 5.8; EXPRESSED IN BONE MARROW, SIGNAL =   6; EXPRESSED IN BRAIN, SIGNAL = 5.6; EXPRESSED IN FETAL LIVER, SIGNAL = 6.6; EXPRESSED IN HEART, SIGNAL = 6.3; EXPRESSED IN HELA, SIGNAL = 5.3; EXPRESSED IN HBL100, SIGNAL = 3.5; EXPRESSED IN LUNG, SIGNAL = 4.7; EXPRESSED IN ADULT LIVER, SIGNAL = 5.5; EXPRESSED IN BT474, SIGNAL =   3; SWISSPROT HIT: Q99186, EVALUE 1.50e+00
FLGSNHISFKVTEHEINDCRTHECLQEEMMFKNHFIYISIPPAFLLLLKM

SEQ ID NO: 34785 - protein, 18 aa, Homo sapiens
  MAP TO AL109946.5; EXPRESSED IN PLACENTA, SIGNAL =   1; EXPRESSED IN HEART, SIGNAL = 1.1; EXPRESSED IN BONE MARROW, SIGNAL = 1.4; EXPRESSED IN LUNG, SIGNAL = 1.1; EXPRESSED IN BRAIN, SIGNAL = 1.2; EXPRESSED IN ADULT LIVER, SIGNAL = 1.3
NLSLPKSSHLPPRGSWEA

SEQ ID NO: 34786 - protein, 40 aa, Homo sapiens
  MAP TO AL118496.4; EXPRESSED IN ADULT LIVER, SIGNAL = 1.1; EXPRESSED IN BT474, SIGNAL =   1; EXPRESSED IN HELA, SIGNAL = 0.92; EXPRESSED IN HEART, SIGNAL = 1.5; EXPRESSED IN BONE MARROW, SIGNAL = 1.3; EXPRESSED IN LUNG, SIGNAL = 0.91
GNSCLALSMDIDSTLIIDYGVARIAYLQTTVGVRVTTIIY

SEQ ID NO: 34787 - protein, 145 aa, Homo sapiens
  MAP TO AL031772.4; EXPRESSED IN ADULT LIVER, SIGNAL =   2; EXPRESSED IN PLACENTA, SIGNAL = 2.6; EXPRESSED IN FETAL LIVER, SIGNAL = 1.6; EXPRESSED IN BT474, SIGNAL = 1.4; EXPRESSED IN HEART, SIGNAL = 1.3; EXPRESSED IN HELA, SIGNAL = 1.2; EXPRESSED IN HBL100, SIGNAL = 3.1; EXPRESSED IN BRAIN, SIGNAL = 1.4; EXPRESSED IN LUNG, SIGNAL = 2.2; EXPRESSED IN BONE MARROW, SIGNAL = 2.1; EST_HUMAN HIT: AA283110.1, EVALUE 2.00e-13; SWISSPROT HIT: Q54468, EVALUE 4.10e+00
SPAHFSGPRSSRYLGEFLKNAIHLEPHKKAMAGGHVFRNAHFDYSPAGLAVHRGGHFDTPVQFLRRLDLSELLTHIPRHKLNTFHVRMEDDAQVGQGEDLRKFILAALSASHRNVVNCALCHRALPVFEQFPLVDGTLFLSPSRH

SEQ ID NO: 34788 - protein, 38 aa, Homo sapiens
  MAP TO AP000493.1; EXPRESSED IN PLACENTA, SIGNAL = 3.8; EXPRESSED IN ADULT LIVER, SIGNAL = 3.2; EXPRESSED IN FETAL LIVER, SIGNAL = 4.5; EXPRESSED IN BT474, SIGNAL = 3.3; EXPRESSED IN HEART, SIGNAL = 3.6; EXPRESSED IN HELA, SIGNAL = 2.6; EXPRESSED IN HBL100, SIGNAL = 2.3; EXPRESSED IN BRAIN, SIGNAL = 2.9; EXPRESSED IN LUNG, SIGNAL = 3.2; EXPRESSED IN BONE MARROW, SIGNAL = 5.3
DGTFLIQEVQYLCEELRHTNVDAQFSVTKAVCTINIVE

SEQ ID NO: 34789 - protein, 96 aa, Homo sapiens
  MAP TO AL109628.2; EXPRESSED IN PLACENTA, SIGNAL = 2.8; EXPRESSED IN HELA, SIGNAL =   3; EXPRESSED IN HBL100, SIGNAL =  11; EXPRESSED IN HEART, SIGNAL = 1.8; EXPRESSED IN BONE MARROW, SIGNAL = 3.5; EXPRESSED IN LUNG, SIGNAL = 2.2; EXPRESSED IN BRAIN, SIGNAL = 3.7; EXPRESSED IN ADULT LIVER, SIGNAL = 3.1; EXPRESSED IN BT474, SIGNAL = 2.7; EXPRESSED IN FETAL LIVER, SIGNAL = 2.3; EST_HUMAN HIT: AW880046.1, EVALUE 3.00e-21; SWISSPROT HIT: P04196, EVALUE 9.70e-01
GGRTQKQQDVERGMPAKSTPGDSSRHRQANQWNDTEFGWGGRRRARAAELPDSRGKPPPHSISLLAPHPSAENFHPIKPCTHSPSPRGIRFFPYTK

SEQ ID NO: 34790 - protein, 24 aa, Homo sapiens
  MAP TO AL109628.2; EXPRESSED IN PLACENTA, SIGNAL = 2.8; EXPRESSED IN HELA, SIGNAL =   3; EXPRESSED IN HBL100, SIGNAL =  11; EXPRESSED IN HEART, SIGNAL = 1.8; EXPRESSED IN BONE MARROW, SIGNAL = 3.5; EXPRESSED IN LUNG, SIGNAL = 2.2; EXPRESSED IN BRAIN, SIGNAL = 3.7; EXPRESSED IN ADULT LIVER, SIGNAL = 3.1; EXPRESSED IN BT474, SIGNAL = 2.7; EXPRESSED IN FETAL LIVER, SIGNAL = 2.3
WRKNTKAAGRREGHAGKEHTGRLQ

SEQ ID NO: 34791 - protein, 42 aa, Homo sapiens
  MAP TO AF172273.1; EXPRESSED IN LUNG, SIGNAL = 1.9; EXPRESSED IN BONE MARROW, SIGNAL =   3; EXPRESSED IN BRAIN, SIGNAL = 1.8; EXPRESSED IN BT474, SIGNAL = 1.8; EXPRESSED IN ADULT LIVER, SIGNAL = 1.8; EXPRESSED IN FETAL LIVER, SIGNAL = 2.1; EXPRESSED IN HELA, SIGNAL = 1.6; EXPRESSED IN PLACENTA, SIGNAL = 2.3; EXPRESSED IN HBL100, SIGNAL = 1.7; EXPRESSED IN HEART, SIGNAL = 1.9; EST_HUMAN HIT: BF310653.1, EVALUE 1.40e+00; SWISSPROT HIT: O95644, EVALUE 4.70e+00
CQNHWPDVDSCSSTGCFVCPSRSTLHPSLLCLCCGRLTPSVY

SEQ ID NO: 34792 - protein, 30 aa, Homo sapiens
  MAP TO AF172273.1; EXPRESSED IN LUNG, SIGNAL = 1.9; EXPRESSED IN BONE MARROW, SIGNAL =   3; EXPRESSED IN BRAIN, SIGNAL = 1.8; EXPRESSED IN BT474, SIGNAL = 1.8; EXPRESSED IN ADULT LIVER, SIGNAL = 1.8; EXPRESSED IN FETAL LIVER, SIGNAL = 2.1; EXPRESSED IN HELA, SIGNAL = 1.6; EXPRESSED IN PLACENTA, SIGNAL = 2.3; EXPRESSED IN HBL100, SIGNAL = 1.7; EXPRESSED IN HEART, SIGNAL = 1.9
HPLLALEMTDMLMVKVEALMSLLQMSEPLA

SEQ ID NO: 34793 - protein, 48 aa, Homo sapiens
  MAP TO AL118498.6; EXPRESSED IN BONE MARROW, SIGNAL = 2.7; EXPRESSED IN BRAIN, SIGNAL = 1.8; EXPRESSED IN BT474, SIGNAL = 1.4; EXPRESSED IN HEART, SIGNAL = 1.6; EXPRESSED IN LUNG, SIGNAL = 1.5; EXPRESSED IN ADULT LIVER, SIGNAL =   2; EXPRESSED IN FETAL LIVER, SIGNAL =   2; EXPRESSED IN PLACENTA, SIGNAL = 1.8; EXPRESSED IN HELA, SIGNAL = 1.4; EXPRESSED IN HBL100, SIGNAL = 1.3; SWISSPROT HIT: P12815, EVALUE 3.10e-01; EST_HUMAN HIT: AA725842.1, EVALUE 9.00e-20
LVEKFNLDISKEECQQLIIKYDLKSNGKFAYCDFIQSCVLLLKAKESS

SEQ ID NO: 34794 - protein, 44 aa, Homo sapiens
  MAP TO AL050343.14; EXPRESSED IN HEART, SIGNAL = 0.85; EXPRESSED IN BONE MARROW, SIGNAL = 1.5; EXPRESSED IN BRAIN, SIGNAL = 0.9; EXPRESSED IN FETAL LIVER, SIGNAL = 0.87; EXPRESSED IN ADULT LIVER, SIGNAL = 1.5; SWISSPROT HIT: P42338, EVALUE 2.10e+00
TNSMAIIFLYRDLTKFIVEISCRTVVTFKIPGKSDLYMDEPLKT

SEQ ID NO: 34795 - protein, 43 aa, Homo sapiens
  MAP TO AL079339.11; EXPRESSED IN BT474, SIGNAL = 2.1; EXPRESSED IN ADULT LIVER, SIGNAL = 2.3; EXPRESSED IN PLACENTA, SIGNAL = 2.8; EXPRESSED IN BONE MARROW, SIGNAL = 2.5; EXPRESSED IN BRAIN, SIGNAL = 2.5; EXPRESSED IN FETAL LIVER, SIGNAL = 2.9; EXPRESSED IN HEART, SIGNAL = 2.5; EXPRESSED IN HELA, SIGNAL = 2.2; EXPRESSED IN HBL100, SIGNAL = 1.8; EXPRESSED IN LUNG, SIGNAL = 2.3
TLPDSGDAEMNELNLASNPMEGLLGKKTTGHMETMQAMKGTCK

SEQ ID NO: 34796 - protein, 26 aa, Homo sapiens
  MAP TO AL121758.4; EXPRESSED IN LUNG, SIGNAL = 3.5; EXPRESSED IN BRAIN, SIGNAL = 3.9; EXPRESSED IN ADULT LIVER, SIGNAL =   4; EXPRESSED IN PLACENTA, SIGNAL = 4.3; EXPRESSED IN BONE MARROW, SIGNAL = 4.5; EXPRESSED IN BT474, SIGNAL = 3.1; EXPRESSED IN FETAL LIVER, SIGNAL = 4.4; EXPRESSED IN HEART, SIGNAL = 4.1; EXPRESSED IN HELA, SIGNAL = 3.2; EXPRESSED IN HBL100, SIGNAL = 2.7
MSHSSATETLFIPHSGSMSTGGRDLK

SEQ ID NO: 34797 - protein, 87 aa, Homo sapiens
  MAP TO AL117186.1; EXPRESSED IN BT474, SIGNAL = 2.7; EXPRESSED IN FETAL LIVER, SIGNAL = 2.9; EXPRESSED IN PLACENTA, SIGNAL = 2.1; EXPRESSED IN HBL100, SIGNAL = 2.1; EXPRESSED IN HELA, SIGNAL = 1.7; EXPRESSED IN HEART, SIGNAL = 1.8; EXPRESSED IN BONE MARROW, SIGNAL = 2.9; EXPRESSED IN LUNG, SIGNAL = 2.8; EXPRESSED IN BRAIN, SIGNAL = 2.5; EXPRESSED IN ADULT LIVER, SIGNAL = 2.4; EST_HUMAN HIT: BE565838.1, EVALUE 2.00e-04; SWISSPROT HIT: P10241, EVALUE 8.00e-08
LHAVTPPKITPALAPATVIPRKLIPALVPATVTPHKLTPALAPATVTPRKLTPALVPATVIPPKLTLALAPATVTPRKLTLALAPAT

SEQ ID NO: 34798 - protein, 23 aa, Homo sapiens
  MAP TO AL117356.1; EXPRESSED IN ADULT LIVER, SIGNAL = 1.3; EXPRESSED IN FETAL LIVER, SIGNAL = 2.3; EXPRESSED IN PLACENTA, SIGNAL = 0.97; EXPRESSED IN HEART, SIGNAL = 0.91; EXPRESSED IN BONE MARROW, SIGNAL = 1.1; EXPRESSED IN LUNG, SIGNAL =   1; EXPRESSED IN BRAIN, SIGNAL = 1.6; SWISSPROT HIT: P12223, EVALUE 4.90e+00
AYPRTQNPEEFNCLQIIWTTHLW

SEQ ID NO: 34799 - protein, 59 aa, Homo sapiens
  MAP TO AP000463.1; EXPRESSED IN BONE MARROW, SIGNAL = 1.7; EXPRESSED IN LUNG, SIGNAL = 1.1; EXPRESSED IN BRAIN, SIGNAL = 1.7; EXPRESSED IN ADULT LIVER, SIGNAL = 1.2; EXPRESSED IN FETAL LIVER, SIGNAL = 1.1; EXPRESSED IN HELA, SIGNAL = 1.1; EXPRESSED IN PLACENTA, SIGNAL =   1; EXPRESSED IN HBL100, SIGNAL = 0.92; EXPRESSED IN HEART, SIGNAL = 1.1; EST_HUMAN HIT: BF194929.1, EVALUE 3.00e-05
LPTSLSMRRIITGITIMKAEKYHNLLSVSWRARKVRGIIPSVSKGSRSRSIVVQGQERV

SEQ ID NO: 34800 - protein, 65 aa, Homo sapiens
  MAP TO AL121748.1; EXPRESSED IN LUNG, SIGNAL = 2.7; EXPRESSED IN BRAIN, SIGNAL = 1.3; EXPRESSED IN BT474, SIGNAL = 1.6; EXPRESSED IN ADULT LIVER, SIGNAL = 3.1; EXPRESSED IN FETAL LIVER, SIGNAL = 1.6; EXPRESSED IN HELA, SIGNAL =   1; EXPRESSED IN PLACENTA, SIGNAL = 8.8; EXPRESSED IN HBL100, SIGNAL = 1.8; EXPRESSED IN HEART, SIGNAL = 2.7; EST_HUMAN HIT: AA987327.1, EVALUE 1.00e-33; SWISSPROT HIT: O14786, EVALUE 2.00e-34
PPAPHSYINEWLQIDLGEEKIVRGIIIQGGKHRENKVFMRKFKIGYSNNGSDWKMIMDDSKRKAK

SEQ ID NO: 34801 - protein, 138 aa, Homo sapiens
  MAP TO AC011399.1; EXPRESSED IN BT474, SIGNAL = 2.5; EXPRESSED IN PLACENTA, SIGNAL = 2.7; EXPRESSED IN HBL100, SIGNAL =   3; EXPRESSED IN HEART, SIGNAL = 0.95; EXPRESSED IN BRAIN, SIGNAL = 1.8; EXPRESSED IN FETAL LIVER, SIGNAL = 1.5; EXPRESSED IN ADULT LIVER, SIGNAL = 1.9; EXPRESSED IN HELA, SIGNAL = 3.1; EXPRESSED IN LUNG, SIGNAL = 1.1; EXPRESSED IN BONE MARROW, SIGNAL = 1.9; EST_HUMAN HIT: AU122533.1, EVALUE 2.00e-30
EQEVPIEPPSATTTTTIGISATSATFTNVFGKKRANVVTTPSTNRKNKKNKTKETPPTAHLILPEQHMSLAQQKADKNKINGEPRGGGAGGNSDSDNLDSTDCNSESSSGGKSQELNFVMDVNSSKYPSLLLHSQEEK

SEQ ID NO: 34802 - protein, 39 aa, Homo sapiens
  MAP TO AL118508.6; EXPRESSED IN BT474, SIGNAL = 1.9; EXPRESSED IN PLACENTA, SIGNAL = 1.1; EXPRESSED IN BRAIN, SIGNAL = 1.6; EXPRESSED IN ADULT LIVER, SIGNAL = 1.3; EXPRESSED IN FETAL LIVER, SIGNAL = 1.2; EXPRESSED IN HEART, SIGNAL = 0.86; EXPRESSED IN HBL100, SIGNAL = 1.7; EXPRESSED IN BONE MARROW, SIGNAL = 1.9; EST_HUMAN HIT: BE300236.1, EVALUE 2.20e+00; SWISSPROT HIT: O97883, EVALUE 1.20e+00
LLYFSNVILCFLDKTACKHLCSCCPQSPLPGYCQLPGPT

SEQ ID NO: 34803 - protein, 32 aa, Homo sapiens
  MAP TO AC008132.19; EXPRESSED IN PLACENTA, SIGNAL =   6; EXPRESSED IN HBL100, SIGNAL = 4.4; EXPRESSED IN HELA, SIGNAL = 6.1; EXPRESSED IN HEART, SIGNAL =   5; EXPRESSED IN BONE MARROW, SIGNAL =   7; EXPRESSED IN LUNG, SIGNAL = 4.1; EXPRESSED IN BRAIN, SIGNAL = 4.2; EXPRESSED IN ADULT LIVER, SIGNAL = 6.2; EXPRESSED IN BT474, SIGNAL = 3.4; EXPRESSED IN FETAL LIVER, SIGNAL = 9.8; EST_HUMAN HIT: AL045185.1, EVALUE 8.00e-09; SWISSPROT HIT: P52591, EVALUE 1.90e-01
LGYRVTAEDLDQEKEAAFQRIKSALQVEDKAI

SEQ ID NO: 34804 - protein, 81 aa, Homo sapiens
  MAP TO AL021395.8; EXPRESSED IN BT474, SIGNAL = 1.3e+02; EXPRESSED IN FETAL LIVER, SIGNAL =  24; EXPRESSED IN HBL100, SIGNAL =  42; EXPRESSED IN PLACENTA, SIGNAL =  28; EXPRESSED IN HELA, SIGNAL = 1.1e+02; EXPRESSED IN HEART, SIGNAL =  12; EXPRESSED IN BONE MARROW, SIGNAL =  30; EXPRESSED IN LUNG, SIGNAL =  16; EXPRESSED IN BRAIN, SIGNAL =  50; EXPRESSED IN ADULT LIVER, SIGNAL =  17; SWISSPROT HIT: P77770, EVALUE 2.00e+00; EST_HUMAN HIT: AA314411.1, EVALUE 5.00e-32
KWKSNLSKLSAVSNDYLLAGLAIPGPRVLHGLHNLHAFFHLAEDHMLAIQPLSLGSADEKLGIVCVGSSICHGQDARTCML

SEQ ID NO: 34805 - protein, 22 aa, Homo sapiens
  MAP TO AL021395.8; EXPRESSED IN BT474, SIGNAL = 1.3e+02; EXPRESSED IN FETAL LIVER, SIGNAL =  24; EXPRESSED IN HBL100, SIGNAL =  42; EXPRESSED IN PLACENTA, SIGNAL =  28; EXPRESSED IN HELA, SIGNAL = 1.1e+02; EXPRESSED IN HEART, SIGNAL =  12; EXPRESSED IN BONE MARROW, SIGNAL =  30; EXPRESSED IN LUNG, SIGNAL =  16; EXPRESSED IN BRAIN, SIGNAL =  50; EXPRESSED IN ADULT LIVER, SIGNAL =  17; EST_HUMAN HIT: AW970432.1, EVALUE 5.70e-02
HGQPHCVLRHCYQHRVLGLCLL

SEQ ID NO: 34806 - protein, 32 aa, Homo sapiens
  MAP TO AL080317.11; EXPRESSED IN BONE MARROW, SIGNAL = 7.2; EXPRESSED IN LUNG, SIGNAL = 7.2; EXPRESSED IN BRAIN, SIGNAL = 6.6; EXPRESSED IN PLACENTA, SIGNAL = 7.8; EXPRESSED IN ADULT LIVER, SIGNAL = 6.8; EXPRESSED IN FETAL LIVER, SIGNAL = 7.3; EXPRESSED IN BT474, SIGNAL = 5.6; EXPRESSED IN HEART, SIGNAL = 6.1; EXPRESSED IN HELA, SIGNAL = 6.8; EXPRESSED IN HBL100, SIGNAL = 4.7; EST_HUMAN HIT: AI590154.1, EVALUE 1.00e-07; SWISSPROT HIT: P08235, EVALUE 8.30e+00
GSPYCSSPNFKEIGSRDEFPHVSAVRGPVSFQ

SEQ ID NO: 34807 - protein, 31 aa, Homo sapiens
  MAP TO AL080317.11; EXPRESSED IN BONE MARROW, SIGNAL = 7.2; EXPRESSED IN LUNG, SIGNAL = 7.2; EXPRESSED IN BRAIN, SIGNAL = 6.6; EXPRESSED IN PLACENTA, SIGNAL = 7.8; EXPRESSED IN ADULT LIVER, SIGNAL = 6.8; EXPRESSED IN FETAL LIVER, SIGNAL = 7.3; EXPRESSED IN BT474, SIGNAL = 5.6; EXPRESSED IN HEART, SIGNAL = 6.1; EXPRESSED IN HELA, SIGNAL = 6.8; EXPRESSED IN HBL100, SIGNAL = 4.7; EST_HUMAN HIT: AI963604.1, EVALUE 2.00e-07
EVLTVQVQILRKLGPAMNFLMFRPCVDQSAS

SEQ ID NO: 34808 - protein, 139 aa, Homo sapiens
  MAP TO AP000426.1; EXPRESSED IN HBL100, SIGNAL = 1.1; EXPRESSED IN HELA, SIGNAL = 1.1; EXPRESSED IN HEART, SIGNAL = 0.97; EXPRESSED IN BRAIN, SIGNAL = 5.5; EXPRESSED IN ADULT LIVER, SIGNAL = 0.95; EXPRESSED IN PLACENTA, SIGNAL =   1; EXPRESSED IN LUNG, SIGNAL = 1.1; EXPRESSED IN FETAL LIVER, SIGNAL =   1; EXPRESSED IN BT474, SIGNAL = 2.4; SWISSPROT HIT: P29554, EVALUE 4.00e-71; EST_HUMAN HIT: AV651868.1, EVALUE 2.00e-69
MGKQNSKLRPEVMQDLLESTDFTEHEIQEWYKGFLRDCPSGHLSMEEFKKIYGNFFPYGDASKFAEHVFRTFDANGDGTIDFREFIIALSVTSRGKLEQKLKWAFSMYDLDGNGYISKAEMLEIVQVRRLSPLKKEGHV

SEQ ID NO: 34809 - protein, 61 aa, Homo sapiens
  MAP TO AC011342.1; EXPRESSED IN PLACENTA, SIGNAL =  11; EXPRESSED IN HBL100, SIGNAL = 2.3; EXPRESSED IN HEART, SIGNAL = 1.5; EXPRESSED IN LUNG, SIGNAL = 1.9; EXPRESSED IN BRAIN, SIGNAL = 1.9; EXPRESSED IN ADULT LIVER, SIGNAL = 1.5; EXPRESSED IN HELA, SIGNAL = 2.2; EXPRESSED IN BONE MARROW, SIGNAL = 1.7; EXPRESSED IN BT474, SIGNAL = 1.9; EXPRESSED IN FETAL LIVER, SIGNAL = 0.99; EST_HUMAN HIT: BE182886.1, EVALUE 9.00e-34; SWISSPROT HIT: P17900, EVALUE 1.00e-34
VDLVLEKEVAGLWIKIPCTDYIGSCTFEHFCDVLDMLIPTGEPCPEPLRTYGLPCHCPFKE

SEQ ID NO: 34810 - protein, 26 aa, Homo sapiens
  MAP TO AC011342.1; EXPRESSED IN PLACENTA, SIGNAL =  11; EXPRESSED IN HBL100, SIGNAL = 2.3; EXPRESSED IN HEART, SIGNAL = 1.5; EXPRESSED IN LUNG, SIGNAL = 1.9; EXPRESSED IN BRAIN, SIGNAL = 1.9; EXPRESSED IN ADULT LIVER, SIGNAL = 1.5; EXPRESSED IN HELA, SIGNAL = 2.2; EXPRESSED IN BONE MARROW, SIGNAL = 1.7; EXPRESSED IN BT474, SIGNAL = 1.9; EXPRESSED IN FETAL LIVER, SIGNAL = 0.99; EST_HUMAN HIT: BF528447.1, EVALUE 1.00e-10
GFSFGEGGGWPLDQDPMHRLHWQLYL

SEQ ID NO: 34811 - protein, 105 aa, Homo sapiens
  MAP TO AC005082.2; EXPRESSED IN HEART, SIGNAL = 3.9; EXPRESSED IN LUNG, SIGNAL = 4.6; EXPRESSED IN BONE MARROW, SIGNAL =   2; EXPRESSED IN BRAIN, SIGNAL = 2.1; EXPRESSED IN BT474, SIGNAL = 5.7; EXPRESSED IN ADULT LIVER, SIGNAL =   2; EXPRESSED IN FETAL LIVER, SIGNAL = 1.9; EXPRESSED IN HELA, SIGNAL = 5.1; EXPRESSED IN PLACENTA, SIGNAL =  27; EXPRESSED IN HBL100, SIGNAL =   2; SWISSPROT HIT: Q14956, EVALUE 8.00e-46; EST_HUMAN HIT: AU136367.1, EVALUE 7.00e-45
QIPVFVTMFQKNDRNSSDETFLKDLPIMFDVLIHDPSHFLNYSTINYKWSFGDNTGLFVSTNHTVNHTYVLNGTFSLNLTVKAAAPGPCPPPPPPPRPSKPTPSL

SEQ ID NO: 34812 - protein, 19 aa, Homo sapiens
  MAP TO AC005082.2; EXPRESSED IN HEART, SIGNAL = 3.9; EXPRESSED IN LUNG, SIGNAL = 4.6; EXPRESSED IN BONE MARROW, SIGNAL =   2; EXPRESSED IN BRAIN, SIGNAL = 2.1; EXPRESSED IN BT474, SIGNAL = 5.7; EXPRESSED IN ADULT LIVER, SIGNAL =   2; EXPRESSED IN FETAL LIVER, SIGNAL = 1.9; EXPRESSED IN HELA, SIGNAL = 5.1; EXPRESSED IN PLACENTA, SIGNAL =  27; EXPRESSED IN HBL100, SIGNAL =   2; EST_HUMAN HIT: AV688182.1, EVALUE 7.00e-04
EERSKFIRRNLPQRSPHYV

SEQ ID NO: 34813 - protein, 189 aa, Homo sapiens
  MAP TO AL096678.8; EXPRESSED IN BT474, SIGNAL = 2.7; EXPRESSED IN PLACENTA, SIGNAL = 3.9; EXPRESSED IN HBL100, SIGNAL = 2.6; EXPRESSED IN HEART, SIGNAL = 3.1; EXPRESSED IN BRAIN, SIGNAL = 3.3; EXPRESSED IN ADULT LIVER, SIGNAL =   3; EXPRESSED IN FETAL LIVER, SIGNAL = 3.3; EXPRESSED IN HELA, SIGNAL = 2.9; EXPRESSED IN LUNG, SIGNAL = 3.4; EXPRESSED IN BONE MARROW, SIGNAL = 3.3; EST_HUMAN HIT: AA476676.1, EVALUE 5.00e-42; SWISSPROT HIT: P05659, EVALUE 8.80e-02
VDQLVVTAGPAAASDSSPPVVRPKEKALNSTATQRLQQELSSSDCTGSRLRNVKVQTALLPMNEAARSDQQAGPCVNRGTQTKKSGKSGPTRHRAQQPAASSTCGQPPPATGSEQTGPHIRDTSQALELTQYFFEAVSTQMEKWYERKIEEARSQANQKAQQDKATLKEHIKSLEEELAKLRTRVQKEN

SEQ ID NO: 34814 - protein, 101 aa, Homo sapiens
  MAP TO AC006946.18; EXPRESSED IN BONE MARROW, SIGNAL =   3; EXPRESSED IN BRAIN, SIGNAL = 2.7; EXPRESSED IN BT474, SIGNAL = 3.5; EXPRESSED IN HEART, SIGNAL = 2.9; EXPRESSED IN LUNG, SIGNAL =   4; EXPRESSED IN ADULT LIVER, SIGNAL = 3.7; EXPRESSED IN FETAL LIVER, SIGNAL = 2.5; EXPRESSED IN PLACENTA, SIGNAL = 3.2; EXPRESSED IN HELA, SIGNAL = 3.5; EXPRESSED IN HBL100, SIGNAL = 3.9; EST_HUMAN HIT: BE280799.1, EVALUE 1.00e-32; SWISSPROT HIT: P36151, EVALUE 6.00e-03
SPPTFGFLLDIDGVLVRGHRVIPAALKAFRRLVNSQGQLRVPVVFVTNAGNILQHSKAQELSALLGCEVRRQPEAWKPKDLVPNGAAAPAPSPFPLGWDME

SEQ ID NO: 34815 - protein, 55 aa, Homo sapiens
  MAP TO AC008013.8; EXPRESSED IN PLACENTA, SIGNAL = 3.3; EXPRESSED IN BONE MARROW, SIGNAL =   4; EXPRESSED IN BRAIN, SIGNAL = 3.2; EXPRESSED IN HELA, SIGNAL = 2.4; EXPRESSED IN HBL100, SIGNAL = 2.1; EXPRESSED IN HEART, SIGNAL =  18; EXPRESSED IN LUNG, SIGNAL = 1.2; EXPRESSED IN ADULT LIVER, SIGNAL = 1.4; EXPRESSED IN FETAL LIVER, SIGNAL =   3; EXPRESSED IN BT474, SIGNAL = 2.8; EST_HUMAN HIT: AI204066.1, EVALUE 2.00e-18; SWISSPROT HIT: P75079, EVALUE 5.90e+00
ISLMLTSSMETWGDPPSASSMSSLGSSLALTHTGKDFSFSWEGWVAEGWWISELD

SEQ ID NO: 34816 - protein, 43 aa, Homo sapiens
  MAP TO AL117352.3; EXPRESSED IN BONE MARROW, SIGNAL =  13; EXPRESSED IN LUNG, SIGNAL =  12; EXPRESSED IN BT474, SIGNAL =  11; EXPRESSED IN PLACENTA, SIGNAL =  18; EXPRESSED IN BRAIN, SIGNAL =  11; EXPRESSED IN ADULT LIVER, SIGNAL =  16; EXPRESSED IN FETAL LIVER, SIGNAL = 9.2; EXPRESSED IN HEART, SIGNAL = 6.8; EXPRESSED IN HELA, SIGNAL =  18; EXPRESSED IN HBL100, SIGNAL =  15; EST_HUMAN HIT: AI961087.1, EVALUE 7.00e-12
MEQRVALVGEARAAQEPMEVVRGSGMAGCRCRALPRGKAAKAR

SEQ ID NO: 34817 - protein, 86 aa, Homo sapiens
  MAP TO AL109823.6; EXPRESSED IN BONE MARROW, SIGNAL = 2.5; EXPRESSED IN BT474, SIGNAL = 3.4; EXPRESSED IN LUNG, SIGNAL =   8; EXPRESSED IN BRAIN, SIGNAL = 1.8; EXPRESSED IN ADULT LIVER, SIGNAL = 3.6; EXPRESSED IN FETAL LIVER, SIGNAL =   9; EXPRESSED IN PLACENTA, SIGNAL =  65; EXPRESSED IN HEART, SIGNAL =   5; EXPRESSED IN HELA, SIGNAL = 3.7; EXPRESSED IN HBL100, SIGNAL =   3; SWISSPROT HIT: P21980, EVALUE 1.00e-44; EST_HUMAN HIT: AA534623.1, EVALUE 2.00e-44
SSEEREAFTRANHLNKLAEKEETGMAMRIRVGQSMNMGSDFDVFAHITNNTAEEYVCRLLLCARTVSYNGILGPECGTKYLLNLNL

SEQ ID NO: 34818 - protein, 23 aa, Homo sapiens
  MAP TO AC009696.2; EXPRESSED IN BT474, SIGNAL = 1.1; EXPRESSED IN FETAL LIVER, SIGNAL =   1; EXPRESSED IN ADULT LIVER, SIGNAL = 1.1; EXPRESSED IN HBL100, SIGNAL = 1.2; EXPRESSED IN HEART, SIGNAL = 1.6; EXPRESSED IN BONE MARROW, SIGNAL = 1.3; EXPRESSED IN LUNG, SIGNAL =   1; EXPRESSED IN BRAIN, SIGNAL = 1.4; EST_HUMAN HIT: AA655008.1, EVALUE 3.00e-06
QEMTACLEVRSWGITNNAALVGM

SEQ ID NO: 34819 - protein, 319 aa, Homo sapiens
  MAP TO AC010680.2; EXPRESSED IN BONE MARROW, SIGNAL = 1.2; EXPRESSED IN LUNG, SIGNAL = 1.1; EXPRESSED IN BRAIN, SIGNAL = 3.7; EXPRESSED IN BT474, SIGNAL = 2.4; EXPRESSED IN ADULT LIVER, SIGNAL =   2; EXPRESSED IN PLACENTA, SIGNAL = 0.97; EXPRESSED IN HEART, SIGNAL = 5.8; EXPRESSED IN HELA, SIGNAL = 0.95; EXPRESSED IN HBL100, SIGNAL = 1.1; EST_HUMAN HIT: BF575343.1, EVALUE 1.00e-102; SWISSPROT HIT: P16419, EVALUE 4.00e-37
APEIDLDVALRTSVIAKAGEDVQVLIPFKGRPPPTVTWRKDEKNLGSDARYSIENTDSSSLLTIPQVTRNDTGKYILTIENGVGEPKSSTVSVKVLDTPAACQKLQVKHVSRGTVTLLWDPPLIDGGSPIINYVIEKRDATKRTWSVVSHKCSSTSFKLIDLSEKTPFFFRVLAENEIGIGEPCETTEPVKAAEVPAPIRDLSMKDSTKTSVILSWTKPDFDGGSVITEYVVERKGKGEQTWSHAGISKTCEIEVSQLKEQSVLEFRVFAKNEKGLSDPVTIGPITVKELIITPEVDLSDIPGAQVTVRIGHNVHLELP

SEQ ID NO: 34820 - protein, 36 aa, Homo sapiens
  MAP TO AC010680.2; EXPRESSED IN BONE MARROW, SIGNAL = 1.2; EXPRESSED IN LUNG, SIGNAL = 1.1; EXPRESSED IN BRAIN, SIGNAL = 3.7; EXPRESSED IN BT474, SIGNAL = 2.4; EXPRESSED IN ADULT LIVER, SIGNAL =   2; EXPRESSED IN PLACENTA, SIGNAL = 0.97; EXPRESSED IN HEART, SIGNAL = 5.8; EXPRESSED IN HELA, SIGNAL = 0.95; EXPRESSED IN HBL100, SIGNAL = 1.1
NSLYVSILCLQRHQRLTWMWLSELLLLPKLVKMYKC

SEQ ID NO: 34821 - protein, 131 aa, Homo sapiens
  MAP TO AC007376.7; EXPRESSED IN HBL100, SIGNAL =  62; EXPRESSED IN HELA, SIGNAL =  75; EXPRESSED IN HEART, SIGNAL =  11; EXPRESSED IN LUNG, SIGNAL =  13; EXPRESSED IN BRAIN, SIGNAL =  12; EXPRESSED IN ADULT LIVER, SIGNAL =  11; EXPRESSED IN PLACENTA, SIGNAL =  28; EXPRESSED IN BONE MARROW, SIGNAL =  26; EXPRESSED IN BT474, SIGNAL =  43; EXPRESSED IN FETAL LIVER, SIGNAL =  29; SWISSPROT HIT: P42003, EVALUE 3.30e-01; EST_HUMAN HIT: AW967530.1, EVALUE 2.00e-54
LCKNSLRPFSGCSYPFSGLSSGSCRPVFYGRLSAPVFSRELLNRHRGHLHTFRPVCNLRPSSSELRSWSSPFTLKFLLGHCLFSSSLLFFFNLSRISVEVEIRHDLPWVFTGNGAMHAQNFPSQHPPHQTH

SEQ ID NO: 34822 - protein, 50 aa, Homo sapiens
  MAP TO AL109954.10; EXPRESSED IN BONE MARROW, SIGNAL = 1.5; EXPRESSED IN LUNG, SIGNAL = 1.5; EXPRESSED IN BRAIN, SIGNAL = 1.8; EXPRESSED IN PLACENTA, SIGNAL = 1.7; EXPRESSED IN ADULT LIVER, SIGNAL = 1.6; EXPRESSED IN FETAL LIVER, SIGNAL = 1.3; EXPRESSED IN BT474, SIGNAL = 1.1; EXPRESSED IN HEART, SIGNAL = 1.5; EXPRESSED IN HELA, SIGNAL = 1.3; EXPRESSED IN HBL100, SIGNAL = 1.2; EST_HUMAN HIT: AI200857.1, EVALUE 5.00e-23; SWISSPROT HIT: O60676, EVALUE 1.00e-01
RKKTFLSVHEVMAVENYAKDSLQWITDQYNKESDDKYHFRIFRVLKVQRQ

SEQ ID NO: 34823 - protein, 36 aa, Homo sapiens
  MAP TO AL035457.11; EXPRESSED IN HBL100, SIGNAL = 3.8; EXPRESSED IN HELA, SIGNAL = 4.3; EXPRESSED IN HEART, SIGNAL = 2.5; EXPRESSED IN LUNG, SIGNAL = 2.3; EXPRESSED IN BRAIN, SIGNAL =   2; EXPRESSED IN ADULT LIVER, SIGNAL =   2; EXPRESSED IN PLACENTA, SIGNAL = 2.7; EXPRESSED IN BONE MARROW, SIGNAL = 2.1; EXPRESSED IN BT474, SIGNAL = 4.7; EXPRESSED IN FETAL LIVER, SIGNAL =   3
SLSIFCGSHMCQTLCRLAKGREGNGGEKKRRNSGLP

SEQ ID NO: 34824 - protein, 50 aa, Homo sapiens
  MAP TO AC009475.2; EXPRESSED IN PLACENTA, SIGNAL = 1.4; EXPRESSED IN HBL100, SIGNAL =   2; EXPRESSED IN HEART, SIGNAL =   1; EXPRESSED IN BONE MARROW, SIGNAL = 1.2; EXPRESSED IN LUNG, SIGNAL = 1.3; EXPRESSED IN BRAIN, SIGNAL = 1.4; EXPRESSED IN BT474, SIGNAL = 4.2; EXPRESSED IN FETAL LIVER, SIGNAL = 1.2; EXPRESSED IN ADULT LIVER, SIGNAL = 1.5; EXPRESSED IN HELA, SIGNAL = 1.2; EST_HUMAN HIT: W85947.1, EVALUE 2.00e+00
VSKDDRSDIESSSDEEDSEPPGKNPHTATTTNGTSGTNGYLLTGSCSMDD

SEQ ID NO: 34825 - protein, 41 aa, Homo sapiens
  MAP TO AC009475.2; EXPRESSED IN PLACENTA, SIGNAL = 1.4; EXPRESSED IN HBL100, SIGNAL =   2; EXPRESSED IN HEART, SIGNAL =   1; EXPRESSED IN BONE MARROW, SIGNAL = 1.2; EXPRESSED IN LUNG, SIGNAL = 1.3; EXPRESSED IN BRAIN, SIGNAL = 1.4; EXPRESSED IN BT474, SIGNAL = 4.2; EXPRESSED IN FETAL LIVER, SIGNAL = 1.2; EXPRESSED IN ADULT LIVER, SIGNAL = 1.5; EXPRESSED IN HELA, SIGNAL = 1.2; EST_HUMAN HIT: R25481.1, EVALUE 9.00e-17
CPRMIEVILSLAQMRRTQNLRERIPTLRQPPMGPVVPTGIS

SEQ ID NO: 34826 - protein, 61 aa, Homo sapiens
  MAP TO AC004938.2; EXPRESSED IN HELA, SIGNAL = 1.5; EXPRESSED IN PLACENTA, SIGNAL = 1.2; EXPRESSED IN HBL100, SIGNAL = 3.3; EXPRESSED IN HEART, SIGNAL = 1.5; EXPRESSED IN BONE MARROW, SIGNAL = 1.5; EXPRESSED IN LUNG, SIGNAL = 0.99; EXPRESSED IN BRAIN, SIGNAL = 2.6; EXPRESSED IN BT474, SIGNAL =   2; EXPRESSED IN FETAL LIVER, SIGNAL = 2.1; EXPRESSED IN ADULT LIVER, SIGNAL = 1.5; SWISSPROT HIT: P56941, EVALUE 5.00e-08; EST_HUMAN HIT: AU121807.1, EVALUE 3.00e-06
VDSKATLGLGGVAVVLGAVMAAMGFFSYLGIRSSLVILQVVPFLVLSVGADNIFIFVLEYQ

SEQ ID NO: 34827 - protein, 60 aa, Homo sapiens
  MAP TO AC004938.2; EXPRESSED IN HELA, SIGNAL = 1.5; EXPRESSED IN PLACENTA, SIGNAL = 1.2; EXPRESSED IN HBL100, SIGNAL = 3.3; EXPRESSED IN HEART, SIGNAL = 1.5; EXPRESSED IN BONE MARROW, SIGNAL = 1.5; EXPRESSED IN LUNG, SIGNAL = 0.99; EXPRESSED IN BRAIN, SIGNAL = 2.6; EXPRESSED IN BT474, SIGNAL =   2; EXPRESSED IN FETAL LIVER, SIGNAL = 2.1; EXPRESSED IN ADULT LIVER, SIGNAL = 1.5; SWISSPROT HIT: P27757, EVALUE 4.60e+00; EST_HUMAN HIT: AW954866.1, EVALUE 9.00e-04
TPRPRWASAGWPWSWEQSWLPWASSPTWVSAPPWSSCKWFLSWCCPWGLITSSSLFSSTR

SEQ ID NO: 34828 - protein, 20 aa, Homo sapiens
  MAP TO AC008122.15; EXPRESSED IN HELA, SIGNAL = 1.3; EXPRESSED IN PLACENTA, SIGNAL = 3.5; EXPRESSED IN HBL100, SIGNAL = 1.5; EXPRESSED IN HEART, SIGNAL = 1.6; EXPRESSED IN LUNG, SIGNAL = 1.1; EXPRESSED IN BONE MARROW, SIGNAL = 1.5; EXPRESSED IN BRAIN, SIGNAL =   1; EXPRESSED IN BT474, SIGNAL = 1.6; EXPRESSED IN ADULT LIVER, SIGNAL = 1.1; EXPRESSED IN FETAL LIVER, SIGNAL = 1.2
DSCLTQVMQGNLHPMNPVTG

SEQ ID NO: 34829 - protein, 71 aa, Homo sapiens
  MAP TO AC006020.2; EXPRESSED IN BT474, SIGNAL = 1.5; EXPRESSED IN FETAL LIVER, SIGNAL = 1.2; EXPRESSED IN ADULT LIVER, SIGNAL = 3.2; EXPRESSED IN HBL100, SIGNAL = 1.4; EXPRESSED IN PLACENTA, SIGNAL = 1.1; EXPRESSED IN HEART, SIGNAL = 0.92; EXPRESSED IN LUNG, SIGNAL = 0.95; EXPRESSED IN BONE MARROW, SIGNAL = 1.5; EXPRESSED IN BRAIN, SIGNAL = 1.3; EST_HUMAN HIT: AA918783.1, EVALUE 3.50e+00; SWISSPROT HIT: O26719, EVALUE 9.20e+00
KMLQVHRTGLGRLGVSLSKGLHHKAVLAVRREDVNAWERRAPLAPKHIKGITNLGYKVLIQPSNRRAIHDK

SEQ ID NO: 34830 - protein, 33 aa, Homo sapiens
  MAP TO AC006020.2; EXPRESSED IN BT474, SIGNAL = 1.5; EXPRESSED IN FETAL LIVER, SIGNAL = 1.2; EXPRESSED IN ADULT LIVER, SIGNAL = 3.2; EXPRESSED IN HBL100, SIGNAL = 1.4; EXPRESSED IN PLACENTA, SIGNAL = 1.1; EXPRESSED IN HEART, SIGNAL = 0.92; EXPRESSED IN LUNG, SIGNAL = 0.95; EXPRESSED IN BONE MARROW, SIGNAL = 1.5; EXPRESSED IN BRAIN, SIGNAL = 1.3; SWISSPROT HIT: P18389, EVALUE 8.20e+00; EST_HUMAN HIT: AW466890.1, EVALUE 2.30e+00
RCCKYIGLDWAGWGSASPRVFTTKLCWPSGGRM

SEQ ID NO: 34831 - protein, 72 aa, Homo sapiens
  MAP TO AC009185.2; EXPRESSED IN LUNG, SIGNAL = 0.94; EXPRESSED IN BT474, SIGNAL = 1.3; EXPRESSED IN ADULT LIVER, SIGNAL = 1.5; EXPRESSED IN PLACENTA, SIGNAL = 1.1; EXPRESSED IN BONE MARROW, SIGNAL = 1.5; EXPRESSED IN FETAL LIVER, SIGNAL =   1; EXPRESSED IN HEART, SIGNAL =   1; EXPRESSED IN HBL100, SIGNAL = 1.1; SWISSPROT HIT: Q08881, EVALUE 2.00e-38; EST_HUMAN HIT: AU140073.1, EVALUE 3.00e-19
KLSHPKLVQLYGVCLEQAPICLVFEFMEHGCLSDYLRTQRGLFAAETLLGMCLDVCEGMAYLEEACVIHRDL

SEQ ID NO: 34832 - protein, 59 aa, Homo sapiens
  MAP TO AC009185.2; EXPRESSED IN LUNG, SIGNAL = 0.94; EXPRESSED IN BT474, SIGNAL = 1.3; EXPRESSED IN ADULT LIVER, SIGNAL = 1.5; EXPRESSED IN PLACENTA, SIGNAL = 1.1; EXPRESSED IN BONE MARROW, SIGNAL = 1.5; EXPRESSED IN FETAL LIVER, SIGNAL =   1; EXPRESSED IN HEART, SIGNAL =   1; EXPRESSED IN HBL100, SIGNAL = 1.1; SWISSPROT HIT: P41163, EVALUE 2.10e+00; EST_HUMAN HIT: H86247.1, EVALUE 2.60e-02
NSLIPNWCSCMGCAWSRPPSAWCLSSWSTAACQIIYAPSGDFLLQRPCWACVWMCVRAW

SEQ ID NO: 34833 - protein, 18 aa, Homo sapiens
  MAP TO AC009473.2; EXPRESSED IN HEART, SIGNAL = 7.3; EXPRESSED IN LUNG, SIGNAL =  19; EXPRESSED IN BRAIN, SIGNAL = 5.2; EXPRESSED IN BT474, SIGNAL =  30; EXPRESSED IN ADULT LIVER, SIGNAL =  12; EXPRESSED IN PLACENTA, SIGNAL =  31; EXPRESSED IN HBL100, SIGNAL =  49; EXPRESSED IN BONE MARROW, SIGNAL =  15; EXPRESSED IN FETAL LIVER, SIGNAL =  15; EXPRESSED IN HELA, SIGNAL =  29
WRRKRRRKLLPLLQLKPK

SEQ ID NO: 34834 - protein, 96 aa, Homo sapiens
  MAP TO AC010680.2; EXPRESSED IN BONE MARROW, SIGNAL = 0.94; EXPRESSED IN BRAIN, SIGNAL = 2.9; EXPRESSED IN BT474, SIGNAL = 2.2; EXPRESSED IN HEART, SIGNAL = 5.8; EXPRESSED IN PLACENTA, SIGNAL = 1.4; EST_HUMAN HIT: AA180780.1, EVALUE 4.00e-27; SWISSPROT HIT: P52179, EVALUE 2.00e-14
TPGPPVNVTVKEISKDSAYVTWEPPIIDGGSPIINYVVQKRDAERKSWSTVTTECSKTSFRVANLEEGKSYFFRVFAENEYGIGDPGETRDAVKAS

SEQ ID NO: 34835 - protein, 95 aa, Homo sapiens
  MAP TO AC010680.2; EXPRESSED IN BONE MARROW, SIGNAL = 0.94; EXPRESSED IN BRAIN, SIGNAL = 2.9; EXPRESSED IN BT474, SIGNAL = 2.2; EXPRESSED IN HEART, SIGNAL = 5.8; EXPRESSED IN PLACENTA, SIGNAL = 1.4; EST_HUMAN HIT: F01270.1, EVALUE 7.00e-12; SWISSPROT HIT: P52179, EVALUE 3.00e-10
TPGPVVDLKVRSVSKSSCSIGWKKPHSDGGSRIIGYVVDFLTEENKWQRVMKSLSLQYSAKDLTEGKEYTFRVSAENENGEGTPSEITVVARDDV

SEQ ID NO: 34836 - protein, 66 aa, Homo sapiens
  MAP TO AC010724.1; EXPRESSED IN PLACENTA, SIGNAL =  14; EXPRESSED IN HBL100, SIGNAL = 8.5; EXPRESSED IN HELA, SIGNAL =  13; EXPRESSED IN HEART, SIGNAL =  13; EXPRESSED IN BRAIN, SIGNAL =  12; EXPRESSED IN BT474, SIGNAL =   7; EXPRESSED IN LUNG, SIGNAL =  15; EXPRESSED IN BONE MARROW, SIGNAL =  10; EXPRESSED IN ADULT LIVER, SIGNAL =  10; EXPRESSED IN FETAL LIVER, SIGNAL =  12; SWISSPROT HIT: P13083, EVALUE 9.60e-01; EST_HUMAN HIT: BF530254.1, EVALUE 2.00e-08
PCCSVSPEACRSGSCRSRGLVGWRMLSGGSHRRSPAGCGAGHVRYLSTDHSTTPRTPWRTWICRCR

SEQ ID NO: 34837 - protein, 37 aa, Homo sapiens
  MAP TO AC011004.1; EXPRESSED IN HBL100, SIGNAL =   1; EXPRESSED IN HELA, SIGNAL = 0.91; EXPRESSED IN HEART, SIGNAL = 1.5; EXPRESSED IN LUNG, SIGNAL = 1.1; EXPRESSED IN BRAIN, SIGNAL = 1.5; EXPRESSED IN ADULT LIVER, SIGNAL = 2.7; EXPRESSED IN PLACENTA, SIGNAL = 1.4; EXPRESSED IN BONE MARROW, SIGNAL = 1.3; EXPRESSED IN BT474, SIGNAL = 1.4; EXPRESSED IN FETAL LIVER, SIGNAL = 1.5; EST_HUMAN HIT: BE564839.1, EVALUE 6.50e-01; SWISSPROT HIT: Q36424, EVALUE 2.10e+00
KHSLLDPAPLCEVGLCWWLCHWFGNQRWFFHAHDEDK

SEQ ID NO: 34838 - protein, 42 aa, Homo sapiens
  MAP TO AC011004.1; EXPRESSED IN HBL100, SIGNAL =   1; EXPRESSED IN HELA, SIGNAL = 0.91; EXPRESSED IN HEART, SIGNAL = 1.5; EXPRESSED IN LUNG, SIGNAL = 1.1; EXPRESSED IN BRAIN, SIGNAL = 1.5; EXPRESSED IN ADULT LIVER, SIGNAL = 2.7; EXPRESSED IN PLACENTA, SIGNAL = 1.4; EXPRESSED IN BONE MARROW, SIGNAL = 1.3; EXPRESSED IN BT474, SIGNAL = 1.4; EXPRESSED IN FETAL LIVER, SIGNAL = 1.5; EST_HUMAN HIT: BE000555.1, EVALUE 6.20e+00
GMGVFLFPMWRQGTLTFVLIMGMEKPSLISKPVAEPPAKANF

SEQ ID NO: 34839 - protein, 38 aa, Homo sapiens
  MAP TO AC011193.1; EXPRESSED IN ADULT LIVER, SIGNAL =   2; EXPRESSED IN BT474, SIGNAL = 2.9; EXPRESSED IN FETAL LIVER, SIGNAL = 2.9; EXPRESSED IN HBL100, SIGNAL = 2.4; EXPRESSED IN PLACENTA, SIGNAL = 2.7; EXPRESSED IN HELA, SIGNAL = 2.6; EXPRESSED IN HEART, SIGNAL = 3.1; EXPRESSED IN BONE MARROW, SIGNAL = 2.3; EXPRESSED IN LUNG, SIGNAL = 2.2; EXPRESSED IN BRAIN, SIGNAL = 1.6
  unsure 7
WLARPKXYNSIMFLMVTAKKDSVRVKADGHSLNCLPSE

SEQ ID NO: 34840 - protein, 54 aa, Homo sapiens
  MAP TO AL031284.9; EXPRESSED IN BONE MARROW, SIGNAL = 4.2; EXPRESSED IN LUNG, SIGNAL = 1.4; EXPRESSED IN BRAIN, SIGNAL = 1.4; EXPRESSED IN ADULT LIVER, SIGNAL = 1.5; EXPRESSED IN BT474, SIGNAL = 1.5; EXPRESSED IN FETAL LIVER, SIGNAL = 3.4; EXPRESSED IN PLACENTA, SIGNAL = 1.5; EXPRESSED IN HBL100, SIGNAL = 1.5; EXPRESSED IN HELA, SIGNAL = 1.7; EXPRESSED IN HEART, SIGNAL = 2.5; SWISSPROT HIT: P18577, EVALUE 2.00e-25; EST_HUMAN HIT: T84327.1, EVALUE 4.00e-09
TDYHMNLRHFYVFAAYFGLTVAWCLPKPLPKGTEDNDQRATIPSLSAMLGKDKV

SEQ ID NO: 34841 - protein, 34 aa, Homo sapiens
  MAP TO AL031284.9; EXPRESSED IN BONE MARROW, SIGNAL = 4.2; EXPRESSED IN LUNG, SIGNAL = 1.4; EXPRESSED IN BRAIN, SIGNAL = 1.4; EXPRESSED IN ADULT LIVER, SIGNAL = 1.5; EXPRESSED IN BT474, SIGNAL = 1.5; EXPRESSED IN FETAL LIVER, SIGNAL = 3.4; EXPRESSED IN PLACENTA, SIGNAL = 1.5; EXPRESSED IN HBL100, SIGNAL = 1.5; EXPRESSED IN HELA, SIGNAL = 1.7; EXPRESSED IN HEART, SIGNAL = 2.5; EST_HUMAN HIT: T93600.1, EVALUE 2.00e-08; SWISSPROT HIT: Q92429, EVALUE 8.20e+00
RLPHEPEALLRVRSLFWADCGLVPAKASTQGNGG

SEQ ID NO: 34842 - protein, 122 aa, Homo sapiens
  MAP TO AC010799.1; EXPRESSED IN BONE MARROW, SIGNAL = 3.9; EXPRESSED IN LUNG, SIGNAL =   3; EXPRESSED IN BRAIN, SIGNAL = 3.8; EXPRESSED IN ADULT LIVER, SIGNAL = 3.1; EXPRESSED IN BT474, SIGNAL = 3.6; EXPRESSED IN FETAL LIVER, SIGNAL = 2.6; EXPRESSED IN PLACENTA, SIGNAL = 3.8; EXPRESSED IN HBL100, SIGNAL = 8.9; EXPRESSED IN HELA, SIGNAL = 4.8; EXPRESSED IN HEART, SIGNAL = 2.1; EST_HUMAN HIT: W96083.1, EVALUE 5.00e-08; SWISSPROT HIT: Q08379, EVALUE 2.30e-02
  unsure 122
EPLPPEPPAVPSEVELQHLRKELERVAGELQSQVKNNQHISLLNRRQEERIREQEERLRKQEERLQEQHEKLRQLAKPQSVLRGAGALPQLGSLPSSLALRAFVSPPLKWGQCSPRVKGYFX

SEQ ID NO: 34843 - protein, 43 aa, Homo sapiens
  MAP TO AC011191.1; EXPRESSED IN BONE MARROW, SIGNAL = 3.2; EXPRESSED IN FETAL LIVER, SIGNAL = 0.97; EXPRESSED IN HEART, SIGNAL = 0.84; EXPRESSED IN LUNG, SIGNAL = 1.2
DRGHLPGFQGVVIRSKQCGFCQQEESGQCLLDGQTWHLWGHLE

SEQ ID NO: 34844 - protein, 43 aa, Homo sapiens
  MAP TO AC011191.1; EXPRESSED IN BONE MARROW, SIGNAL = 3.2; EXPRESSED IN FETAL LIVER, SIGNAL = 0.97; EXPRESSED IN HEART, SIGNAL = 0.84; EXPRESSED IN LUNG, SIGNAL = 1.2
TGAIFPDFRESSSDLNNVDSVSRKRVGNVCWMGKRGIYGAIWK

SEQ ID NO: 34845 - protein, 28 aa, Homo sapiens
  MAP TO AC011288.1; EXPRESSED IN HELA, SIGNAL = 0.95; EXPRESSED IN PLACENTA, SIGNAL = 1.2; EXPRESSED IN HEART, SIGNAL = 0.93; EXPRESSED IN BONE MARROW, SIGNAL = 1.2; EXPRESSED IN BRAIN, SIGNAL = 1.3; EXPRESSED IN BT474, SIGNAL = 1.2; EXPRESSED IN ADULT LIVER, SIGNAL = 1.2; EST_HUMAN HIT: AV724846.1, EVALUE 6.90e-01
EADKSKHMVPASGEAFLLCNLMAEEWKD

SEQ ID NO: 34846 - protein, 30 aa, Homo sapiens
  MAP TO AC011288.1; EXPRESSED IN HELA, SIGNAL = 0.95; EXPRESSED IN PLACENTA, SIGNAL = 1.2; EXPRESSED IN HEART, SIGNAL = 0.93; EXPRESSED IN BONE MARROW, SIGNAL = 1.2; EXPRESSED IN BRAIN, SIGNAL = 1.3; EXPRESSED IN BT474, SIGNAL = 1.2; EXPRESSED IN ADULT LIVER, SIGNAL = 1.2; EST_HUMAN HIT: AW628931.1, EVALUE 1.20e-01
IWCQHLVRPSCCVISWQKSGRTSEHMQKGL

SEQ ID NO: 34847 - protein, 73 aa, Homo sapiens [sequence omitted]

SEQ ID NO: 34848 - protein, 25 aa, Homo sapiens
  MAP TO AL049812.3; EXPRESSED IN PLACENTA, SIGNAL = 1.8; EXPRESSED IN HBL100, SIGNAL = 1.4; EXPRESSED IN HELA, SIGNAL = 1.5; EXPRESSED IN HEART, SIGNAL = 2.8; EXPRESSED IN BONE MARROW, SIGNAL = 1.8; EXPRESSED IN BT474, SIGNAL = 1.5; EXPRESSED IN LUNG, SIGNAL = 1.5; EXPRESSED IN BRAIN, SIGNAL = 2.1; EXPRESSED IN ADULT LIVER, SIGNAL = 1.1; EXPRESSED IN FETAL LIVER, SIGNAL = 1.2
TLNIVTPVCGPRTAALLARTMIRIE

SEQ ID NO: 34849 - protein, 67 aa, Homo sapiens
  MAP TO AL109757.1; EXPRESSED IN PLACENTA, SIGNAL = 5.6; EXPRESSED IN HBL100, SIGNAL = 1.7; EXPRESSED IN HELA, SIGNAL = 2.5; EXPRESSED IN HEART, SIGNAL = 1.4; EXPRESSED IN BT474, SIGNAL = 1.3; EXPRESSED IN LUNG, SIGNAL = 1.6; EXPRESSED IN BONE MARROW, SIGNAL = 2.9; EXPRESSED IN BRAIN, SIGNAL = 1.7; EXPRESSED IN ADULT LIVER, SIGNAL =   4; EXPRESSED IN FETAL LIVER, SIGNAL = 0.92; SWISSPROT HIT: P70213, EVALUE 3.00e-05; EST_HUMAN HIT: BE222256.1, EVALUE 1.00e-18
LKSRQAPRCEVESVTHEEVYYTRKELFEFSNLYRKKSGEQIREWILRVWDNSGRNIGLDQDLLIWAH

SEQ ID NO: 34850 - protein, 42 aa, Homo sapiens
  MAP TO AL109933.5; EXPRESSED IN HBL100, SIGNAL = 1.1; EXPRESSED IN HELA, SIGNAL = 8.7; EXPRESSED IN HEART, SIGNAL = 1.1; EXPRESSED IN LUNG, SIGNAL = 1.2; EXPRESSED IN BRAIN, SIGNAL = 1.2; EXPRESSED IN BT474, SIGNAL = 0.96; EXPRESSED IN PLACENTA, SIGNAL = 1.1; EXPRESSED IN BONE MARROW, SIGNAL = 1.3; EXPRESSED IN ADULT LIVER, SIGNAL =  15; EXPRESSED IN FETAL LIVER, SIGNAL = 9.4; EST_HUMAN HIT: AV694621.1, EVALUE 2.00e-20; SWISSPROT HIT: P00747, EVALUE 1.00e-21
FPNKNLKKNYCRNPDRELRPWCFTTDPNKRWELCDIPRCSEY

SEQ ID NO: 34851 - protein, 23 aa, Homo sapiens
  MAP TO AL109933.5; EXPRESSED IN HBL100, SIGNAL = 1.1; EXPRESSED IN HELA, SIGNAL = 8.7; EXPRESSED IN HEART, SIGNAL = 1.1; EXPRESSED IN LUNG, SIGNAL = 1.2; EXPRESSED IN BRAIN, SIGNAL = 1.2; EXPRESSED IN BT474, SIGNAL = 0.96; EXPRESSED IN PLACENTA, SIGNAL = 1.1; EXPRESSED IN BONE MARROW, SIGNAL = 1.3; EXPRESSED IN ADULT LIVER, SIGNAL =  15; EXPRESSED IN FETAL LIVER, SIGNAL = 9.4; EST_HUMAN HIT: AV694621.1, EVALUE 8.20e+00
SVLLKSFLSIQISKQEPEEELLS

SEQ ID NO: 34852 - protein, 60 aa, Homo sapiens
  MAP TO AL049756.16; EXPRESSED IN HBL100, SIGNAL =  53; EXPRESSED IN HELA, SIGNAL =  49; EXPRESSED IN HEART, SIGNAL = 9.6; EXPRESSED IN LUNG, SIGNAL =  18; EXPRESSED IN BRAIN, SIGNAL = 7.8; EXPRESSED IN ADULT LIVER, SIGNAL =  17; EXPRESSED IN PLACENTA, SIGNAL =  34; EXPRESSED IN BONE MARROW, SIGNAL =  22; EXPRESSED IN BT474, SIGNAL =  41; EXPRESSED IN FETAL LIVER, SIGNAL =  31; EST_HUMAN HIT: AV744952.1, EVALUE 3.00e-18; SWISSPROT HIT: Q29195, EVALUE 1.00e-17
VRRSHTHSYFCQGFPNAKIRLFDLGWKKAKVDEFLLCGHMVSDEYEQLSSGALEAALFVP

SEQ ID NO: 34853 - protein, 116 aa, Homo sapiens
  MAP TO AL049822.17; EXPRESSED IN BONE MARROW, SIGNAL = 9.8; EXPRESSED IN LUNG, SIGNAL = 3.1; EXPRESSED IN BRAIN, SIGNAL = 1.7; EXPRESSED IN ADULT LIVER, SIGNAL = 2.7; EXPRESSED IN BT474, SIGNAL =  12; EXPRESSED IN FETAL LIVER, SIGNAL =  10; EXPRESSED IN HBL100, SIGNAL =  26; EXPRESSED IN PLACENTA, SIGNAL =  11; EXPRESSED IN HELA, SIGNAL =   9; EXPRESSED IN HEART, SIGNAL = 1.7; EST_HUMAN HIT: BE740617.1, EVALUE 2.00e-48; SWISSPROT HIT: Q99879, EVALUE 3.00e-50
PKKGSKKAINKAQKKDGKKRKRSRKESYSVYVYKVLKQVHPDTGISSKAMGIMNSFVNDIFERIAGEASRLAHYNKRSTITSREIQTAVRLLLPGELAKHAVSEGTKAVTKYTSSK

SEQ ID NO: 34854 - protein, 25 aa, Homo sapiens
  MAP TO AL050330.9; EXPRESSED IN HBL100, SIGNAL = 2.8; EXPRESSED IN HELA, SIGNAL = 2.1; EXPRESSED IN HEART, SIGNAL = 1.4; EXPRESSED IN BONE MARROW, SIGNAL = 1.8; EXPRESSED IN LUNG, SIGNAL = 1.9; EXPRESSED IN BRAIN, SIGNAL = 1.6; EXPRESSED IN PLACENTA, SIGNAL = 2.5; EXPRESSED IN ADULT LIVER, SIGNAL = 1.9; EXPRESSED IN FETAL LIVER, SIGNAL = 2.2; EXPRESSED IN BT474, SIGNAL = 1.3; EST_HUMAN HIT: BE840049.1, EVALUE 7.00e-05
MKRRTCHYEVQDGLIVGPAFLEVTA

SEQ ID NO: 34855 - protein, 60 aa, Homo sapiens
  MAP TO AL050330.9; EXPRESSED IN HBL100, SIGNAL = 2.8; EXPRESSED IN HELA, SIGNAL = 2.1; EXPRESSED IN HEART, SIGNAL = 1.4; EXPRESSED IN BONE MARROW, SIGNAL = 1.8; EXPRESSED IN LUNG, SIGNAL = 1.9; EXPRESSED IN BRAIN, SIGNAL = 1.6; EXPRESSED IN PLACENTA, SIGNAL = 2.5; EXPRESSED IN ADULT LIVER, SIGNAL = 1.9; EXPRESSED IN FETAL LIVER, SIGNAL = 2.2; EXPRESSED IN BT474, SIGNAL = 1.3; SWISSPROT HIT: P20146, EVALUE 1.10e+00; EST_HUMAN HIT: AW601788.1, EVALUE 1.00e-31
SWPRLEKTLRYAAICHPRKMLRTWRCGGSGLSSPPQCLCIKVAEREQRSRWRSTEEEPPL

SEQ ID NO: 34856 - protein, 17 aa, Homo sapiens
  MAP TO Z95114.19; EXPRESSED IN BONE MARROW, SIGNAL =  13; EXPRESSED IN LUNG, SIGNAL = 8.5; EXPRESSED IN BRAIN, SIGNAL =  11; EXPRESSED IN ADULT LIVER, SIGNAL =  14; EXPRESSED IN BT474, SIGNAL = 7.4; EXPRESSED IN FETAL LIVER, SIGNAL = 7.6; EXPRESSED IN PLACENTA, SIGNAL =  11; EXPRESSED IN HBL100, SIGNAL = 6.1; EXPRESSED IN HELA, SIGNAL = 9.8; EXPRESSED IN HEART, SIGNAL = 5.5; EST_HUMAN HIT: BE799424.1, EVALUE 1.00e-03
NQMEDSGVHRKASCHCK

SEQ ID NO: 34857 - protein, 193 aa, Homo sapiens
  MAP TO Z95114.19; EXPRESSED IN BONE MARROW, SIGNAL =  13; EXPRESSED IN LUNG, SIGNAL = 8.5; EXPRESSED IN BRAIN, SIGNAL =  11; EXPRESSED IN ADULT LIVER, SIGNAL =  14; EXPRESSED IN BT474, SIGNAL = 7.4; EXPRESSED IN FETAL LIVER, SIGNAL = 7.6; EXPRESSED IN PLACENTA, SIGNAL =  11; EXPRESSED IN HBL100, SIGNAL = 6.1; EXPRESSED IN HELA, SIGNAL = 9.8; EXPRESSED IN HEART, SIGNAL = 5.5; SWISSPROT HIT: O95236, EVALUE 6.00e-44; EST_HUMAN HIT: AV690831.1, EVALUE 9.00e-67
IRWKIQESIERLRVIANEIEKVHRGCVIANVVSGSTGILSVIGVMLAPFTAGLSLSITAAGVGLGIASATAGIASSIVENTYTRSAELTASRLTATSTDQLEALRDILRDITPNVLSFALDFDEATKMIANDVHTLRRSKATVGRPLIAWRYVPINVVETLRTRGAPTRIVRKVARNLGKATSGVLVVLDVVN

SEQ ID NO: 34858 - protein, 267 aa, Homo sapiens
  MAP TO AP000427.1; EXPRESSED IN BONE MARROW, SIGNAL = 2.5; EXPRESSED IN LUNG, SIGNAL = 1.8; EXPRESSED IN BRAIN, SIGNAL = 9.8; EXPRESSED IN ADULT LIVER, SIGNAL = 2.3; EXPRESSED IN BT474, SIGNAL = 6.4; EXPRESSED IN FETAL LIVER, SIGNAL = 2.8; EXPRESSED IN PLACENTA, SIGNAL = 2.1; EXPRESSED IN HELA, SIGNAL = 3.2; EXPRESSED IN HBL100, SIGNAL = 1.7; EXPRESSED IN HEART, SIGNAL = 1.5; EST_HUMAN HIT: N48374.1, EVALUE 1.00e-77; SWISSPROT HIT: P37617, EVALUE 1.30e+00
PEKSLTLNPPLDTMADGLSLEEQVTGEGADRELLVGDSIANSTDLFDEIVTATTTESGDLELVHSTPGANVLELLPIVMGQEEGSVVVERAVQTDVVPYSPAISELIQSVLQKLQDPCPSSLASPDESEPDSMESFPESLSALVVDLTPRNPNSAILLSPVETPYANVDAEVHANRLMRELDFAACVEERLDGVIPLARGGVVRQYWSSSFLVDLLAVAAPVVPTVLWAFSTQRGGTDPVYNIGALLRGCCVVALHSLRRTAFRIKT

SEQ ID NO: 34859 - protein, 147 aa, Homo sapiens
  MAP TO AL109912.4; EXPRESSED IN BT474, SIGNAL = 1.6; EXPRESSED IN FETAL LIVER, SIGNAL =   1; EXPRESSED IN ADULT LIVER, SIGNAL = 1.3; EXPRESSED IN HELA, SIGNAL = 1.4; EXPRESSED IN PLACENTA, SIGNAL = 1.9; EXPRESSED IN HBL100, SIGNAL = 2.8; EXPRESSED IN HEART, SIGNAL = 0.98; EXPRESSED IN LUNG, SIGNAL =   1; EXPRESSED IN BONE MARROW, SIGNAL = 1.2; EXPRESSED IN BRAIN, SIGNAL = 1.6; EST_HUMAN HIT: BE277813.1, EVALUE 2.10e+00; SWISSPROT HIT: O60673, EVALUE 4.00e-63
HTKEDVDNSQIALQAPTTGCSQTASESQMLPPVASASDPEKDEDDDDNYYISYSSPDSPVIPPWQQPISPDSKALNGDDRPSSPVEELPSLAFENFLKPIKDGIQKSPCSEPQEPLVISPINTRARTGKCESLCFHSTPIIQRKLLE

SEQ ID NO: 34860 - protein, 282 aa, Homo sapiens
  MAP TO AC009487.1; EXPRESSED IN BONE MARROW, SIGNAL = 1.6; EXPRESSED IN LUNG, SIGNAL = 1.2; EXPRESSED IN BRAIN, SIGNAL = 1.2; EXPRESSED IN ADULT LIVER, SIGNAL = 1.6; EXPRESSED IN BT474, SIGNAL = 5.3; EXPRESSED IN FETAL LIVER, SIGNAL = 1.2; EXPRESSED IN HELA, SIGNAL = 2.5; EXPRESSED IN PLACENTA, SIGNAL = 1.7; EXPRESSED IN HBL100, SIGNAL = 3.2; EXPRESSED IN HEART, SIGNAL = 0.89; EST_HUMAN HIT: BE071796.1, EVALUE 1.00e-21; SWISSPROT HIT: P49177, EVALUE 1.10e+00
VLCLYDLGISKVVKAVVLPGRVTAIEPIINHGGASASTQHLHPSLRWLFGVAAVVTDVGQILLIDLCLDDLSCNQNEVEASDLEVLTGIPAEVPHIRESVMREGRHLCFQLVSPTGTAVSTLSYISRTNQLAAGFSDGYLALWNMKSMKREYYIQLESGQVPVYAVTFQEPENDRRNCCYLWAVQSTQDSEGDVLSLHLLQLAFGNRKCLASGQILYEWLEYCEERYTLDLTGGMFPLRGQTSNTKLLGCQSIEKFRSHGDREEGVNEALSPDTSVSVFTWQ

SEQ ID NO: 34861 - protein, 42 aa, Homo sapiens
  MAP TO AC009487.1; EXPRESSED IN BONE MARROW, SIGNAL = 1.6; EXPRESSED IN LUNG, SIGNAL = 1.2; EXPRESSED IN BRAIN, SIGNAL = 1.2; EXPRESSED IN ADULT LIVER, SIGNAL = 1.6; EXPRESSED IN BT474, SIGNAL = 5.3; EXPRESSED IN FETAL LIVER, SIGNAL = 1.2; EXPRESSED IN HELA, SIGNAL = 2.5; EXPRESSED IN PLACENTA, SIGNAL = 1.7; EXPRESSED IN HBL100, SIGNAL = 3.2; EXPRESSED IN HEART, SIGNAL = 0.89; SWISSPROT HIT: P32944, EVALUE 4.10e-01; EST_HUMAN HIT: BF215579.1, EVALUE 4.10e+00
VCDGFLEWQLWSLMLDRSFLLTYVWMTCHAIKMKLKHQILKF

SEQ ID NO: 34862 - protein, 190 aa, Homo sapiens
  MAP TO AC010130.2; EXPRESSED IN BONE MARROW, SIGNAL = 4.8; EXPRESSED IN LUNG, SIGNAL = 4.1; EXPRESSED IN BT474, SIGNAL = 6.1; EXPRESSED IN PLACENTA, SIGNAL = 6.8; EXPRESSED IN HBL100, SIGNAL = 6.4; EXPRESSED IN HEART, SIGNAL = 2.5; EXPRESSED IN BRAIN, SIGNAL = 9.8; EXPRESSED IN ADULT LIVER, SIGNAL = 3.2; EXPRESSED IN FETAL LIVER, SIGNAL = 3.2; EXPRESSED IN HELA, SIGNAL = 3.7; EST_HUMAN HIT: BF245591.1, EVALUE 1.00e-53; SWISSPROT HIT: P37275, EVALUE 2.00e-33
KRPHQCQICKKAFKHKHHLIEHSRLHSGEKPYQCDKCGKRFSHSGSYSQHMNHRYSYCKREAEEREAAEREAREKGHLEPTELLMNRAYLQSITPQGYSDSEERESMPRDGESEKEHEKEGEDGYGKLGRQDGDEEFEEEEEESENKSMDTDPETIRDEEETGDHSMDDSSEDGKMETKSDHEEDNMEDG

SEQ ID NO: 34863 - protein, 43 aa, Homo sapiens
  MAP TO AC010130.2; EXPRESSED IN BONE MARROW, SIGNAL = 4.8; EXPRESSED IN LUNG, SIGNAL = 4.1; EXPRESSED IN BT474, SIGNAL = 6.1; EXPRESSED IN PLACENTA, SIGNAL = 6.8; EXPRESSED IN HBL100, SIGNAL = 6.4; EXPRESSED IN HEART, SIGNAL = 2.5; EXPRESSED IN BRAIN, SIGNAL = 9.8; EXPRESSED IN ADULT LIVER, SIGNAL = 3.2; EXPRESSED IN FETAL LIVER, SIGNAL = 3.2; EXPRESSED IN HELA, SIGNAL = 3.7; EST_HUMAN HIT: BF379879.1, EVALUE 3.00e-16; SWISSPROT HIT: P38842, EVALUE 2.70e+00
FVRKRLNTSTTLSSTQGFTRARSPISVINVASASHTRARTRST

SEQ ID NO: 34864 - protein, 193 aa, Homo sapiens
  MAP TO AC009945.1; EXPRESSED IN LUNG, SIGNAL =  43; EXPRESSED IN BONE MARROW, SIGNAL =  26; EXPRESSED IN BRAIN, SIGNAL =  43; EXPRESSED IN FETAL LIVER, SIGNAL =  37; EXPRESSED IN BT474, SIGNAL = 1.1e+02; EXPRESSED IN ADULT LIVER, SIGNAL =  19; EXPRESSED IN HELA, SIGNAL =  44; EXPRESSED IN PLACENTA, SIGNAL =  57; EXPRESSED IN HBL100, SIGNAL =  85; EXPRESSED IN HEART, SIGNAL =  14; EST_HUMAN HIT: BE260667.1, EVALUE 2.00e-90; SWISSPROT HIT: P08109, EVALUE 4.00e-96
FDAKRLIGRRFDDAVVQSDMKHWPFMVVNDADRPQVQVEYKGETKSFYPEEVSSIVLTKMKEIAEAYLGKTVTSAVVTVPAYFNDSQFQVTKDAGTIAGLNVLRIINEPTVAAIVYKSSDKKVGAQRNVLIFDLGGGTFGVSILTIEDGIFEVKSTARDNHLGGEDFDNRMVNHFIAELKRKHKKDISESKRA

SEQ ID NO: 34865 - protein, 21 aa, Homo sapiens
  MAP TO AC009945.1; EXPRESSED IN LUNG, SIGNAL =  43; EXPRESSED IN BONE MARROW, SIGNAL =  26; EXPRESSED IN BRAIN, SIGNAL =  43; EXPRESSED IN FETAL LIVER, SIGNAL =  37; EXPRESSED IN BT474, SIGNAL = 1.1e+02; EXPRESSED IN ADULT LIVER, SIGNAL =  19; EXPRESSED IN HELA, SIGNAL =  44; EXPRESSED IN PLACENTA, SIGNAL =  57; EXPRESSED IN HBL100, SIGNAL =  85; EXPRESSED IN HEART, SIGNAL =  14; EST_HUMAN HIT: BE905903.1, EVALUE 1.40e-01
SRVPQNRSAFNSSNWAQVMEV

SEQ ID NO: 34866 - protein, 88 aa, Homo sapiens
  MAP TO Z98745.1; EXPRESSED IN BONE MARROW, SIGNAL = 2.2; EXPRESSED IN LUNG, SIGNAL = 1.4; EXPRESSED IN BT474, SIGNAL = 3.5; EXPRESSED IN PLACENTA, SIGNAL = 1.6; EXPRESSED IN HEART, SIGNAL = 1.2; EXPRESSED IN HBL100, SIGNAL =   2; EXPRESSED IN BRAIN, SIGNAL = 1.7; EXPRESSED IN ADULT LIVER, SIGNAL = 1.4; EXPRESSED IN FETAL LIVER, SIGNAL = 1.1; EXPRESSED IN HELA, SIGNAL = 1.8; EST_HUMAN HIT: AV689461.1, EVALUE 2.00e-38; SWISSPROT HIT: O43309, EVALUE 2.00e-39
RRFRQFCYQESPGPREALQRLQELCHQWLRPEMHTKEQILELLVLEQFLTILPEELQAWVRQHRPVSGEEAVTVLEDLERELDDPGEQ

SEQ ID NO: 34867 - protein, 405 aa, Homo sapiens
  MAP TO AC010127.2; EXPRESSED IN BT474, SIGNAL = 2.1; EXPRESSED IN FETAL LIVER, SIGNAL = 0.87; EXPRESSED IN ADULT LIVER, SIGNAL = 2.3; EXPRESSED IN PLACENTA, SIGNAL = 1.5; EXPRESSED IN BRAIN, SIGNAL = 7.9; EXPRESSED IN BONE MARROW, SIGNAL = 1.6; EXPRESSED IN HELA, SIGNAL = 1.3; EXPRESSED IN HBL100, SIGNAL = 2.3; EXPRESSED IN HEART, SIGNAL = 0.94; EXPRESSED IN LUNG, SIGNAL = 1.2; SWISSPROT HIT: P04774, EVALUE 0.00e+00; EST_HUMAN HIT: AI796228.1, EVALUE 3.00e-83
DFFTGWYSHCLFIGMFLAELIEKYFVSPTLFRVIRLARIGRILRLIKGAKGIRTLLFALMMSLPALFNIGLLLFLVMFIYAIFGMSNFAYVKREVGIDDMFNFETFGNSMICLFQITTSAGWDGLLAPILNSKPPDCDPNKVNPGSSVKGDCGNPSVGIFFFVSYIIISFLVVVNMYIAVILENFSVATEESAEPLSEDDFEMFYEVWEKFDPDATQFMEFEKLSQFAAALEPPLNLPQPNKLQLIAMDLPMVSGDRIHCLDILFAFTKRVLGESGEMDALRIQMEERFMASNPSKVSYQPITTTLKRKQEEVSAVIIQRAYRRHLLKRTVKQASFTYNKNKIKGGANLLIKEDMIIDRINENSITEKTDLTMSTAACPPSYDRVTKPIVEKHEQEGKDEKAKGK

SEQ ID NO: 34868 - protein, 47 aa, Homo sapiens
  MAP TO AC006977.3; EXPRESSED IN LUNG, SIGNAL = 3.3; EXPRESSED IN BT474, SIGNAL = 3.8; EXPRESSED IN ADULT LIVER, SIGNAL = 2.7; EXPRESSED IN PLACENTA, SIGNAL =  10; EXPRESSED IN BRAIN, SIGNAL = 3.8; EXPRESSED IN BONE MARROW, SIGNAL = 3.5; EXPRESSED IN FETAL LIVER, SIGNAL = 4.2; EXPRESSED IN HEART, SIGNAL = 2.9; EXPRESSED IN HELA, SIGNAL = 1.8; EXPRESSED IN HBL100, SIGNAL = 3.3; SWISSPROT HIT: P00533, EVALUE 9.00e-10; EST_HUMAN HIT: BE744284.1, EVALUE 1.00e-08
PKIPSIATGMVGALLLLLVVALGIGLFMRRRHIVRKRTLRRLLQERE

SEQ ID NO: 34869 - protein, 46 aa, Homo sapiens
  MAP TO AC006977.3; EXPRESSED IN LUNG, SIGNAL = 3.3; EXPRESSED IN BT474, SIGNAL = 3.8; EXPRESSED IN ADULT LIVER, SIGNAL = 2.7; EXPRESSED IN PLACENTA, SIGNAL =  10; EXPRESSED IN BRAIN, SIGNAL = 3.8; EXPRESSED IN BONE MARROW, SIGNAL = 3.5; EXPRESSED IN FETAL LIVER, SIGNAL = 4.2; EXPRESSED IN HEART, SIGNAL = 2.9; EXPRESSED IN HELA, SIGNAL = 1.8; EXPRESSED IN HBL100, SIGNAL = 3.3
RSRPSPLGWWGPSSCCWWWPWGSASSCEGATSFGSARCGGCCRRGR

SEQ ID NO: 34870 - protein, 63 aa, Homo sapiens
  MAP TO AC007308.13; EXPRESSED IN HBL100, SIGNAL = 3.1; EXPRESSED IN HELA, SIGNAL = 2.4; EXPRESSED IN HEART, SIGNAL = 2.3; EXPRESSED IN LUNG, SIGNAL = 1.7; EXPRESSED IN BRAIN, SIGNAL = 3.8; EXPRESSED IN BT474, SIGNAL = 3.3; EXPRESSED IN PLACENTA, SIGNAL = 3.5; EXPRESSED IN BONE MARROW, SIGNAL = 2.4; EXPRESSED IN ADULT LIVER, SIGNAL = 2.3; EXPRESSED IN FETAL LIVER, SIGNAL = 2.3; EST_HUMAN HIT: BE314516.1, EVALUE 3.00e-19; SWISSPROT HIT: P24733, EVALUE 2.60e+00
LPTSFVKEIHDFVLEQFNTSQGELQKILHDADRIHNELSPLKLRCQANAACVDLMVWAVKDEQ

SEQ ID NO: 34871 - protein, 61 aa, Homo sapiens
  MAP TO AC007383.2; EXPRESSED IN HBL100, SIGNAL = 2.1; EXPRESSED IN HELA, SIGNAL = 2.8; EXPRESSED IN HEART, SIGNAL = 3.1; EXPRESSED IN BONE MARROW, SIGNAL = 1.3; EXPRESSED IN LUNG, SIGNAL = 0.88; EXPRESSED IN BRAIN, SIGNAL = 2.3; EXPRESSED IN ADULT LIVER, SIGNAL = 1.8; EXPRESSED IN PLACENTA, SIGNAL = 2.1; EXPRESSED IN FETAL LIVER, SIGNAL = 1.3; EXPRESSED IN BT474, SIGNAL = 2.8; EST_HUMAN HIT: N89287.1, EVALUE 5.00e-28; SWISSPROT HIT: P28331, EVALUE 6.00e-31
FASEIAGVDDLGTTGRGNDMQVGTYIEKMFMSELSGNIIDICPVGALTSKPYAFTARPWET

SEQ ID NO: 34872 - protein, 52 aa, Homo sapiens
  MAP TO AC007649.12; EXPRESSED IN BRAIN, SIGNAL = 1.7; EXPRESSED IN ADULT LIVER, SIGNAL = 1.4; EXPRESSED IN BT474, SIGNAL = 1.9; EXPRESSED IN FETAL LIVER, SIGNAL = 2.1; EXPRESSED IN PLACENTA, SIGNAL = 1.9; EXPRESSED IN HBL100, SIGNAL = 1.9; EXPRESSED IN HELA, SIGNAL = 1.8; EXPRESSED IN HEART, SIGNAL = 1.9; EXPRESSED IN BONE MARROW, SIGNAL = 2.2; EXPRESSED IN LUNG, SIGNAL = 1.5; EST_HUMAN HIT: BE273011.1, EVALUE 4.40e-02; SWISSPROT HIT: O00507, EVALUE 4.00e-01
LPHRLCHHQHQVEEADKEPSTSECLVSPVPPEAQGRGSSPPCRHRPGPHPAV

SEQ ID NO: 34873 - protein, 63 aa, Homo sapiens
  MAP TO AC007695.12; EXPRESSED IN HBL100, SIGNAL =  21; EXPRESSED IN HELA, SIGNAL =  11; EXPRESSED IN PLACENTA, SIGNAL =   8; EXPRESSED IN HEART, SIGNAL = 2.8; EXPRESSED IN BONE MARROW, SIGNAL = 9.4; EXPRESSED IN LUNG, SIGNAL = 4.4; EXPRESSED IN BRAIN, SIGNAL = 3.3; EXPRESSED IN BT474, SIGNAL =  11; EXPRESSED IN ADULT LIVER, SIGNAL =   4; EXPRESSED IN FETAL LIVER, SIGNAL = 7.4; SWISSPROT HIT: P34826, EVALUE 9.00e-22; EST_HUMAN HIT: BE729465.1, EVALUE 4.00e-23
AQRLPGGQELHRGYVPSQARVAVYEAVSGPPPADLCHALCWYNQIKSYEKEKASLPGVKKAVG

SEQ ID NO: 34874 - protein, 61 aa, Homo sapiens
  MAP TO AC007695.12; EXPRESSED IN HBL100, SIGNAL =  21; EXPRESSED IN HELA, SIGNAL =  11; EXPRESSED IN PLACENTA, SIGNAL =   8; EXPRESSED IN HEART, SIGNAL = 2.8; EXPRESSED IN BONE MARROW, SIGNAL = 9.4; EXPRESSED IN LUNG, SIGNAL = 4.4; EXPRESSED IN BRAIN, SIGNAL = 3.3; EXPRESSED IN BT474, SIGNAL =  11; EXPRESSED IN ADULT LIVER, SIGNAL =   4; EXPRESSED IN FETAL LIVER, SIGNAL = 7.4; SWISSPROT HIT: P34826, EVALUE 2.60e-02; EST_HUMAN HIT: AW327504.1, EVALUE 2.00e-20
SLQVLNDYLVDKSYIEGMCHHKHVWQSMKQCPAHRLLTCVMPYVGIIRSSLMKRKRPACQE

SEQ ID NO: 34875 - protein, 142 aa, Homo sapiens
  MAP TO AC007375.4; EXPRESSED IN BONE MARROW, SIGNAL = 2.4; EXPRESSED IN LUNG, SIGNAL = 1.7; EXPRESSED IN BRAIN, SIGNAL =   3; EXPRESSED IN ADULT LIVER, SIGNAL = 2.2; EXPRESSED IN BT474, SIGNAL = 2.4; EXPRESSED IN FETAL LIVER, SIGNAL = 1.9; EXPRESSED IN PLACENTA, SIGNAL = 2.1; EXPRESSED IN HELA, SIGNAL = 1.8; EXPRESSED IN HBL100, SIGNAL = 2.1; EXPRESSED IN HEART, SIGNAL = 1.8; SWISSPROT HIT: Q09701, EVALUE 2.00e-07; EST_HUMAN HIT: BE272000.1, EVALUE 7.00e-08
MREDPAAARLFSPALLHGALFLFLSANALGNYVLVIQNSPDDLGACQGASARKTPCPSPSTHFCRVCARVTLRHDHHCFFTGNCIGSRNMRNFVLFCLYTSLACLYSMVAGVAYISAVLSISFAHPLAFLTLLPTSISQFFS

SEQ ID NO: 34876 - protein, 72 aa, Homo sapiens
  MAP TO AC007378.2; EXPRESSED IN FETAL LIVER, SIGNAL = 2.5; EXPRESSED IN HELA, SIGNAL = 4.3; EXPRESSED IN PLACENTA, SIGNAL =  11; EXPRESSED IN HBL100, SIGNAL = 4.7; EXPRESSED IN HEART, SIGNAL = 3.9; EXPRESSED IN BONE MARROW, SIGNAL = 2.5; EXPRESSED IN LUNG, SIGNAL = 3.6; EXPRESSED IN BRAIN, SIGNAL = 3.1; EXPRESSED IN BT474, SIGNAL = 2.6; EXPRESSED IN ADULT LIVER, SIGNAL = 3.6; SWISSPROT HIT: P98089, EVALUE 5.00e-04; EST_HUMAN HIT: BE740185.1, EVALUE 4.00e-41
RCEVQFSPRCPEDSVLIEGYAPPGECCPLPSRCVCNPAGCLRKVCQPGNLNILVSKASGKPGECCDLYECKP

SEQ ID NO: 34877 - protein, 31 aa, Homo sapiens
  MAP TO AC007599.1; EXPRESSED IN BONE MARROW, SIGNAL =   1; EXPRESSED IN BT474, SIGNAL = 1.3; EXPRESSED IN FETAL LIVER, SIGNAL =   1; EXPRESSED IN PLACENTA, SIGNAL =   2; EXPRESSED IN HBL100, SIGNAL = 1.2; EXPRESSED IN HEART, SIGNAL = 0.91; EXPRESSED IN BRAIN, SIGNAL = 1.4; EXPRESSED IN LUNG, SIGNAL = 0.97; EXPRESSED IN ADULT LIVER, SIGNAL = 1.2; EXPRESSED IN HELA, SIGNAL = 1.6; EST_HUMAN HIT: AW608043.1, EVALUE 4.00e-06
KKSIFILFFRNLSWHPALTTTSKMRIPHSHA

SEQ ID NO: 34878 - protein, 67 aa, Homo sapiens
  MAP TO AC007718.1; EXPRESSED IN BONE MARROW, SIGNAL = 0.96; EXPRESSED IN BT474, SIGNAL =   1; EXPRESSED IN ADULT LIVER, SIGNAL = 1.3; EXPRESSED IN HELA, SIGNAL = 0.92; EXPRESSED IN PLACENTA, SIGNAL = 1.1; EXPRESSED IN HEART, SIGNAL = 1.1; EXPRESSED IN LUNG, SIGNAL = 0.92; SWISSPROT HIT: P53276, EVALUE 1.90e+00
  unsure 66
SLVFPETTKELINNAVFESKDKTNSLDDKHATRKSFSLKIITCCSFHLRKLVDELKHTKGIQILLXK

SEQ ID NO: 34879 - protein, 39 aa, Homo sapiens
  MAP TO AC008644.1; EXPRESSED IN BONE MARROW, SIGNAL = 1.2; EXPRESSED IN BRAIN, SIGNAL = 1.2; EXPRESSED IN FETAL LIVER, SIGNAL = 1.2; EXPRESSED IN PLACENTA, SIGNAL = 1.1; EXPRESSED IN HEART, SIGNAL = 1.4
YGDCKNEGAEERVRMTVNVRRERDEYHEVAYVLLDYTLN

SEQ ID NO: 34880 - protein, 55 aa, Homo sapiens
  MAP TO AC008072.2; EXPRESSED IN FETAL LIVER, SIGNAL = 1.4; EXPRESSED IN ADULT LIVER, SIGNAL =   1; EXPRESSED IN HEART, SIGNAL = 1.1; EXPRESSED IN PLACENTA, SIGNAL = 1.3; EXPRESSED IN HBL100, SIGNAL = 1.2; EXPRESSED IN HELA, SIGNAL =   1; EXPRESSED IN BONE MARROW, SIGNAL = 1.6; EXPRESSED IN BT474, SIGNAL = 1.7; EXPRESSED IN LUNG, SIGNAL = 0.93; EXPRESSED IN BRAIN, SIGNAL = 1.5; EST_HUMAN HIT: BF574023.1, EVALUE 4.80e+00
VKNGILGAGMLPLGSRLTSVSAKRTSEPRSQRNQGKRSQGHSLELPEPSGSPTSD

SEQ ID NO: 34881 - protein, 43 aa, Homo sapiens
  MAP TO AC009478.1; EXPRESSED IN BONE MARROW, SIGNAL = 3.3; EXPRESSED IN BRAIN, SIGNAL = 3.2; EXPRESSED IN FETAL LIVER, SIGNAL = 2.4; EXPRESSED IN ADULT LIVER, SIGNAL = 3.2; EXPRESSED IN BT474, SIGNAL = 2.7; EXPRESSED IN HEART, SIGNAL = 3.1; EXPRESSED IN HBL100, SIGNAL = 2.2; EXPRESSED IN PLACENTA, SIGNAL = 3.4; EXPRESSED IN HELA, SIGNAL = 2.7; EXPRESSED IN LUNG, SIGNAL = 2.5; SWISSPROT HIT: O15255, EVALUE 7.00e-01; EST_HUMAN HIT: AU141556.1, EVALUE 4.00e-06
GSCSYAQEGRAPACSWLPLASWSLQPQPHLPCCSQHLCSGSTT

SEQ ID NO: 34882 - protein, 34 aa, Homo sapiens
  MAP TO AC009487.1; EXPRESSED IN BRAIN, SIGNAL = 0.99; EXPRESSED IN FETAL LIVER, SIGNAL = 0.99; EXPRESSED IN ADULT LIVER, SIGNAL = 1.1; EXPRESSED IN BT474, SIGNAL = 2.2; EXPRESSED IN HEART, SIGNAL = 0.84; EXPRESSED IN PLACENTA, SIGNAL = 1.1; EXPRESSED IN HBL100, SIGNAL = 1.4; EXPRESSED IN HELA, SIGNAL = 1.7; EXPRESSED IN BONE MARROW, SIGNAL =   1; EST_HUMAN HIT: BE879386.1, EVALUE 8.00e-14; SWISSPROT HIT: P43588, EVALUE 1.90e-01
SWMEGLTLQDYSEHCKHNESVVKEMLELAKNYNK

SEQ ID NO: 34883 - protein, 93 aa, Homo sapiens
  MAP TO AC008248.1; EXPRESSED IN BONE MARROW, SIGNAL =   7; EXPRESSED IN LUNG, SIGNAL = 3.7; EXPRESSED IN FETAL LIVER, SIGNAL = 7.4; EXPRESSED IN ADULT LIVER, SIGNAL = 3.8; EXPRESSED IN BT474, SIGNAL = 9.7; EXPRESSED IN HEART, SIGNAL = 4.7; EXPRESSED IN HBL100, SIGNAL = 9.9; EXPRESSED IN BRAIN, SIGNAL = 5.9; EXPRESSED IN PLACENTA, SIGNAL = 6.3; EXPRESSED IN HELA, SIGNAL = 8.9; EST_HUMAN HIT: H26973.1, EVALUE 3.00e-25; SWISSPROT HIT: P30620, EVALUE 6.70e+00
DSWDMKIAPKQMTYKSPGSSNLPLYSSPLTWTSLSCSKRNFSPLPYPLLYLLSENDPTALSAKPDNDLLASLFPSSLSSDCSSSSDNSRTPPL

SEQ ID NO: 34884 - protein, 66 aa, Homo sapiens
  MAP TO AC009492.1; EXPRESSED IN PLACENTA, SIGNAL = 1.8; EXPRESSED IN ADULT LIVER, SIGNAL =   1; EXPRESSED IN HEART, SIGNAL =   1; EXPRESSED IN HBL100, SIGNAL = 0.94; EST_HUMAN HIT: AA484631.1, EVALUE 5.60e-01; SWISSPROT HIT: P51758, EVALUE 4.30e+00
TGCPSKPLNQVQMHYRGLGIHEIVYTNNKGRHKWHSSRSVNLFVQKTEEMLYWQLSLERGSEDEIG

SEQ ID NO: 34885 - protein, 139 aa, Homo sapiens
  MAP TO AC009297.2; EXPRESSED IN HELA, SIGNAL = 0.95; EXPRESSED IN BRAIN, SIGNAL = 0.91; EXPRESSED IN PLACENTA, SIGNAL = 1.1; EXPRESSED IN BONE MARROW, SIGNAL =   1; EXPRESSED IN BT474, SIGNAL = 1.1; EXPRESSED IN ADULT LIVER, SIGNAL = 1.2; EXPRESSED IN HEART, SIGNAL =   1; EST_HUMAN HIT: BE180565.1, EVALUE 8.00e-11; SWISSPROT HIT: P27283, EVALUE 3.80e+00
ERKMSELCTWGYDVEEIFKFIHPNFCQSPVVLVDDMTSATRKSVWSCLPKNMTNMGASNNLQGASTLPNLGKGTIIVNNAIILYEMKQLKLRPNLRILHVSSKYLMQNLELVHYTYFWQRMRIWKILIYLNTCSIGIME

SEQ ID NO: 34886 - protein, 49 aa, Homo sapiens
  MAP TO AC009303.1; EXPRESSED IN BT474, SIGNAL = 2.4; EXPRESSED IN FETAL LIVER, SIGNAL = 2.4; EXPRESSED IN HEART, SIGNAL = 2.3; EXPRESSED IN HBL100, SIGNAL = 3.9; EXPRESSED IN HELA, SIGNAL = 4.1; EXPRESSED IN ADULT LIVER, SIGNAL = 4.4; EXPRESSED IN LUNG, SIGNAL = 2.9; EXPRESSED IN BRAIN, SIGNAL =   3; EXPRESSED IN PLACENTA, SIGNAL = 3.8; EXPRESSED IN BONE MARROW, SIGNAL = 3.8; EST_HUMAN HIT: AW085551.1, EVALUE 2.00e-13; SWISSPROT HIT: P32364, EVALUE 7.80e+00
PPILFLNRMATKIKTYIPPSQFVHKIIPCGQRTDRTQSHPSAPRRQMHS

SEQ ID NO: 34887 - protein, 47 aa, Homo sapiens
  MAP TO AC009758.1; EXPRESSED IN PLACENTA, SIGNAL = 4.4; EXPRESSED IN HELA, SIGNAL =  10; EXPRESSED IN BONE MARROW, SIGNAL = 5.9; EXPRESSED IN LUNG, SIGNAL = 5.4; EXPRESSED IN ADULT LIVER, SIGNAL =   3; EXPRESSED IN BT474, SIGNAL = 3.4; EXPRESSED IN FETAL LIVER, SIGNAL =   6; EXPRESSED IN HEART, SIGNAL = 3.9; EXPRESSED IN HBL100, SIGNAL =   4; EXPRESSED IN BRAIN, SIGNAL = 4.9; EST_HUMAN HIT: BF677705.1, EVALUE 5.00e-05; SWISSPROT HIT: P75077, EVALUE 6.20e+00
  unsure 3
  unsure 43
DRXDKLLCLVWPRCSSFTPSPSWSQQCCWPWPLTAMWLSASHXHYTK

SEQ ID NO: 34888 - protein, 32 aa, Homo sapiens
  MAP TO AC009758.1; EXPRESSED IN PLACENTA, SIGNAL = 4.4; EXPRESSED IN HELA, SIGNAL =  10; EXPRESSED IN BONE MARROW, SIGNAL = 5.9; EXPRESSED IN LUNG, SIGNAL = 5.4; EXPRESSED IN ADULT LIVER, SIGNAL =   3; EXPRESSED IN BT474, SIGNAL = 3.4; EXPRESSED IN FETAL LIVER, SIGNAL =   6; EXPRESSED IN HEART, SIGNAL = 3.9; EXPRESSED IN HBL100, SIGNAL =   4; EXPRESSED IN BRAIN, SIGNAL = 4.9
  unsure 9
IGEINFFAXSGPDVLPSLLLHHGVSSAAGHGL

SEQ ID NO: 34889 - protein, 83 aa, Homo sapiens
  MAP TO AC010133.1; EXPRESSED IN HBL100, SIGNAL = 3.1; EXPRESSED IN HELA, SIGNAL = 2.8; EXPRESSED IN BONE MARROW, SIGNAL = 4.2; EXPRESSED IN LUNG, SIGNAL = 1.4; EXPRESSED IN FETAL LIVER, SIGNAL = 2.6; EXPRESSED IN HEART, SIGNAL = 1.9; EXPRESSED IN BRAIN, SIGNAL = 3.2; EXPRESSED IN PLACENTA, SIGNAL = 1.9; EXPRESSED IN ADULT LIVER, SIGNAL = 1.6; EXPRESSED IN BT474, SIGNAL = 2.2
VFSQNNGSILKRRGRKKRRRWRRRKKKRRKRRRRKKKKKNKKNKKKKNKKKNKNNKKKKNKNNKKKNKKKKTRRKEGEEEEEE

SEQ ID NO: 34890 - protein, 24 aa, Homo sapiens
  MAP TO AC009808.2; EXPRESSED IN BT474, SIGNAL = 1.2; EXPRESSED IN FETAL LIVER, SIGNAL = 1.6; EXPRESSED IN HEART, SIGNAL = 1.6; EXPRESSED IN HELA, SIGNAL = 1.3; EXPRESSED IN BONE MARROW, SIGNAL = 1.5; EXPRESSED IN LUNG, SIGNAL = 1.1; EXPRESSED IN BRAIN, SIGNAL = 1.5; EXPRESSED IN PLACENTA, SIGNAL = 1.4; EXPRESSED IN ADULT LIVER, SIGNAL = 1.2
GPTKADPKTRWRYKVEGHSWRSGN

SEQ ID NO: 34891 - protein, 65 aa, Homo sapiens
  MAP TO AC010136.1; EXPRESSED IN LUNG, SIGNAL = 2.6; EXPRESSED IN FETAL LIVER, SIGNAL = 7.6; EXPRESSED IN HEART, SIGNAL = 1.5; EXPRESSED IN BRAIN, SIGNAL = 1.3; EXPRESSED IN PLACENTA, SIGNAL = 3.9; EXPRESSED IN ADULT LIVER, SIGNAL = 2.4; EST_HUMAN HIT: AV759988.1, EVALUE 2.30e-01; SWISSPROT HIT: Q04205, EVALUE 2.00e-05
NEENFRSNLREVAQMLKSKHGGNYLVRMDPRAHCPVPSMLPSAHHLYMTGIPATSPCASMPSSLC

SEQ ID NO: 34892 - protein, 29 aa, Homo sapiens
  MAP TO AC009813.2; EXPRESSED IN BONE MARROW, SIGNAL =   1; EXPRESSED IN ADULT LIVER, SIGNAL = 1.1; EXPRESSED IN BT474, SIGNAL = 0.95; EXPRESSED IN FETAL LIVER, SIGNAL = 0.96; EXPRESSED IN HEART, SIGNAL = 0.84; EXPRESSED IN BRAIN, SIGNAL = 1.2
  unsure 26
CCPIMSMWKAGEMFSWWCIEVGRRAXGHE

SEQ ID NO: 34893 - protein, 45 aa, Homo sapiens
  MAP TO AC009945.1; EXPRESSED IN HEART, SIGNAL =   1; EXPRESSED IN BRAIN, SIGNAL = 1.2; EXPRESSED IN BONE MARROW, SIGNAL = 1.2; EXPRESSED IN FETAL LIVER, SIGNAL = 1.1; EXPRESSED IN HELA, SIGNAL = 0.95; EST_HUMAN HIT: W04429.1, EVALUE 5.00e-05; SWISSPROT HIT: P19507, EVALUE 7.00e-01
IIILVSMSCYNKCHIEWVAYHNRHLFLTVLGAWKSNIKVPTDSVL

SEQ ID NO: 34894 - protein, 56 aa, Homo sapiens
  MAP TO AC009955.1; EXPRESSED IN BONE MARROW, SIGNAL =   6; EXPRESSED IN LUNG, SIGNAL = 1.1; EXPRESSED IN ADULT LIVER, SIGNAL = 1.9; EXPRESSED IN BT474, SIGNAL = 2.3; EXPRESSED IN FETAL LIVER, SIGNAL = 4.6; EXPRESSED IN HELA, SIGNAL = 1.4; EXPRESSED IN HEART, SIGNAL = 5.1; EXPRESSED IN PLACENTA, SIGNAL = 2.2; EXPRESSED IN HBL100, SIGNAL = 1.9; EXPRESSED IN BRAIN, SIGNAL = 3.1; EST_HUMAN HIT: BE868202.1, EVALUE 3.00e-16; SWISSPROT HIT: O18917, EVALUE 1.00e-25
LSIVMGAVLRRIPLAVLFGIFLYMGVTSLSGIQLSQRLLLILMPAKHHPEQPYVTK

SEQ ID NO: 34895 - protein, 48 aa, Homo sapiens
  MAP TO AC009955.1; EXPRESSED IN BONE MARROW, SIGNAL =   6; EXPRESSED IN LUNG, SIGNAL = 1.1; EXPRESSED IN ADULT LIVER, SIGNAL = 1.9; EXPRESSED IN BT474, SIGNAL = 2.3; EXPRESSED IN FETAL LIVER, SIGNAL = 4.6; EXPRESSED IN HELA, SIGNAL = 1.4; EXPRESSED IN HEART, SIGNAL = 5.1; EXPRESSED IN PLACENTA, SIGNAL = 2.2; EXPRESSED IN HBL100, SIGNAL = 1.9; EXPRESSED IN BRAIN, SIGNAL = 3.1; EST_HUMAN HIT: C16631.1, EVALUE 3.00e-09
ACPSSWGLCCVGSHWLCSLGSSCTWGSRPCLVSSCPSVCCSSSCRQNT

SEQ ID NO: 34896 - protein, 64 aa, Homo sapiens
  MAP TO AC010732.1; EXPRESSED IN BT474, SIGNAL = 2.1; EXPRESSED IN FETAL LIVER, SIGNAL = 1.5; EXPRESSED IN HELA, SIGNAL = 9.5; EXPRESSED IN HEART, SIGNAL = 1.4; EXPRESSED IN PLACENTA, SIGNAL = 1.9; EXPRESSED IN HBL100, SIGNAL =   2; EXPRESSED IN LUNG, SIGNAL = 1.5; EXPRESSED IN BRAIN, SIGNAL =   2; EXPRESSED IN BONE MARROW, SIGNAL = 2.3; EXPRESSED IN ADULT LIVER, SIGNAL = 1.6; EST_HUMAN HIT: BE541170.1, EVALUE 8.80e-01
MGEPYLAPPPSPFLQSSLPVLCHSSRFRSPSLTLKLRLHLPRARGKPTEHMLVMVLEDSHTGPP

SEQ ID NO: 34897 - protein, 61 aa, Homo sapiens
  MAP TO AC010732.1; EXPRESSED IN BT474, SIGNAL = 2.1; EXPRESSED IN FETAL LIVER, SIGNAL = 1.5; EXPRESSED IN HELA, SIGNAL = 9.5; EXPRESSED IN HEART, SIGNAL = 1.4; EXPRESSED IN PLACENTA, SIGNAL = 1.9; EXPRESSED IN HBL100, SIGNAL =   2; EXPRESSED IN LUNG, SIGNAL = 1.5; EXPRESSED IN BRAIN, SIGNAL =   2; EXPRESSED IN BONE MARROW, SIGNAL = 2.3; EXPRESSED IN ADULT LIVER, SIGNAL = 1.6
WTRAGVLRASWMSSLSCTSTPSCLGSSGTAGACSFRLSSMDTASPSSVATSLTGGPVWLSS

SEQ ID NO: 34898 - protein, 36 aa, Homo sapiens
  MAP TO AC009811.2; EXPRESSED IN HBL100, SIGNAL = 0.92; EXPRESSED IN BRAIN, SIGNAL = 1.1; EXPRESSED IN BONE MARROW, SIGNAL = 0.96; EXPRESSED IN ADULT LIVER, SIGNAL = 1.1; EXPRESSED IN BT474, SIGNAL = 1.1; EXPRESSED IN HEART, SIGNAL = 1.2
TCGSGPTSNISGDIHLQTPATSSYEGLVPGLQRHVQ

SEQ ID NO: 34899 - protein, 40 aa, Homo sapiens
  MAP TO AC010149.1; EXPRESSED IN BONE MARROW, SIGNAL = 2.5; EXPRESSED IN ADULT LIVER, SIGNAL = 2.3; EXPRESSED IN BT474, SIGNAL = 1.9; EXPRESSED IN HELA, SIGNAL = 3.1; EXPRESSED IN FETAL LIVER, SIGNAL = 2.1; EXPRESSED IN HEART, SIGNAL = 1.9; EXPRESSED IN PLACENTA, SIGNAL = 2.6; EXPRESSED IN HBL100, SIGNAL = 1.7; EXPRESSED IN LUNG, SIGNAL = 2.1; EXPRESSED IN BRAIN, SIGNAL = 2.2; EST_HUMAN HIT: AW955438.1, EVALUE 7.00e-10; SWISSPROT HIT: Q13342, EVALUE 7.00e-10
QKPMWLNKVKTSLNEQMYTRVEGFVQDMRLIFHNHKEFYR

SEQ ID NO: 34900 - protein, 62 aa, Homo sapiens
  MAP TO AC009953.2; EXPRESSED IN BONE MARROW, SIGNAL = 1.7; EXPRESSED IN FETAL LIVER, SIGNAL = 1.6; EXPRESSED IN ADULT LIVER, SIGNAL = 2.2; EXPRESSED IN BT474, SIGNAL = 1.9; EXPRESSED IN HELA, SIGNAL = 1.6; EXPRESSED IN HEART, SIGNAL = 0.93; EXPRESSED IN PLACENTA, SIGNAL = 4.2; EXPRESSED IN HBL100, SIGNAL = 1.9; EXPRESSED IN LUNG, SIGNAL =   1; EXPRESSED IN BRAIN, SIGNAL = 1.4; EST_HUMAN HIT: BE173600.1, EVALUE 1.00e-30; SWISSPROT HIT: P23093, EVALUE 7.70e-02
QQEWVNQQREDIERQRKLLAKRKPPTANNSQAPSTNSEPKQRKNKAVNGAENDPFVRPNLPQ

SEQ ID NO: 34901 - protein, 46 aa, Homo sapiens
  MAP TO AC010731.1; EXPRESSED IN HELA, SIGNAL = 1.1; EXPRESSED IN HEART, SIGNAL =   1; EXPRESSED IN PLACENTA, SIGNAL =   1; EXPRESSED IN HBL100, SIGNAL = 0.92; EXPRESSED IN BONE MARROW, SIGNAL =   1; EXPRESSED IN FETAL LIVER, SIGNAL = 0.9; EXPRESSED IN ADULT LIVER, SIGNAL = 0.98; EST_HUMAN HIT: AW263177.1, EVALUE 9.00e-20; SWISSPROT HIT: Q9SML8, EVALUE 1.00e-02
QFGIPKGIVFSMPVKFENGTWVVLTDLKDVEISEQIMTRMTSDLIQ

SEQ ID NO: 34902 - protein, 70 aa, Homo sapiens
  MAP TO AC009962.1; EXPRESSED IN BONE MARROW, SIGNAL = 3.2; EXPRESSED IN FETAL LIVER, SIGNAL = 2.6; EXPRESSED IN ADULT LIVER, SIGNAL = 2.6; EXPRESSED IN HBL100, SIGNAL =   4; EXPRESSED IN BT474, SIGNAL = 2.6; EXPRESSED IN HELA, SIGNAL = 3.5; EXPRESSED IN HEART, SIGNAL = 3.2; EXPRESSED IN PLACENTA, SIGNAL = 4.2; EXPRESSED IN LUNG, SIGNAL = 2.6; EXPRESSED IN BRAIN, SIGNAL = 3.3
MDRPLSSSAEAEEELEWQVASRRRKAWAKCRSSWQASETEDLSTEATTQDEEEDEGEDLPGAQLPAAGGR

SEQ ID NO: 34903 - protein, 62 aa, Homo sapiens
  MAP TO AC009962.1; EXPRESSED IN BONE MARROW, SIGNAL = 3.2; EXPRESSED IN FETAL LIVER, SIGNAL = 2.6; EXPRESSED IN ADULT LIVER, SIGNAL = 2.6; EXPRESSED IN HBL100, SIGNAL =   4; EXPRESSED IN BT474, SIGNAL = 2.6; EXPRESSED IN HELA, SIGNAL = 3.5; EXPRESSED IN HEART, SIGNAL = 3.2; EXPRESSED IN PLACENTA, SIGNAL = 4.2; EXPRESSED IN LUNG, SIGNAL = 2.6; EXPRESSED IN BRAIN, SIGNAL = 3.3
WTGPCRRRRRRRRNWSGKWRVAGGRPGPSAAAPGKRRRRRICPQKRRRRTRRRTRGRTFPAR

SEQ ID NO: 34904 - protein, 58 aa, Homo sapiens
  MAP TO AC011092.1; EXPRESSED IN BT474, SIGNAL = 1.2; EXPRESSED IN HELA, SIGNAL = 0.91; EXPRESSED IN HEART, SIGNAL = 0.95; EXPRESSED IN BRAIN, SIGNAL = 0.97; EXPRESSED IN PLACENTA, SIGNAL =   1; EXPRESSED IN BONE MARROW, SIGNAL = 0.9; EXPRESSED IN FETAL LIVER, SIGNAL = 0.91; EXPRESSED IN ADULT LIVER, SIGNAL = 1.1; EST_HUMAN HIT: BE256927.1, EVALUE 2.00e-22
FCQPGGWQLSRERKQPTFFVVVLTDIDSDRHYCSCLTFYEAEINLQVQKPLLAKVQSK

SEQ ID NO: 34905 - protein, 165 aa, Homo sapiens
  MAP TO AC011480.1; EXPRESSED IN BT474, SIGNAL = 1.4; EXPRESSED IN HBL100, SIGNAL = 1.2; EXPRESSED IN HELA, SIGNAL = 5.4; EXPRESSED IN HEART, SIGNAL = 1.2; EXPRESSED IN BONE MARROW, SIGNAL = 1.6; EXPRESSED IN BRAIN, SIGNAL = 1.3; EXPRESSED IN PLACENTA, SIGNAL = 1.1; EXPRESSED IN LUNG, SIGNAL = 0.95; EXPRESSED IN FETAL LIVER, SIGNAL = 1.5; EXPRESSED IN ADULT LIVER, SIGNAL = 1.2; EST_HUMAN HIT: BE392504.1, EVALUE 2.00e-02; SWISSPROT HIT: Q14934, EVALUE 1.20e-01
VLGKWPSAAEAALSSGIRVLFRPLVASLGPAWKNVPRKFCWKSAGDSPRDPPPRPQGHSQPSFPSSGPWETAVCKFYRQGRWREVRVFASWAPPCIPHSQWLWFPSSEPQFLWELELSLETGNRLPPCPFCPRLAMASCPLRMVPWGRPILCGFLHSAHPSINCP

SEQ ID NO: 34906 - protein, 40 aa, Homo sapiens
  MAP TO AL050325.20; EXPRESSED IN PLACENTA, SIGNAL = 1.7; EXPRESSED IN BONE MARROW, SIGNAL = 2.5; EXPRESSED IN LUNG, SIGNAL = 2.8; EXPRESSED IN FETAL LIVER, SIGNAL = 2.8; EXPRESSED IN ADULT LIVER, SIGNAL = 2.1; EXPRESSED IN HBL100, SIGNAL = 2.1; EXPRESSED IN BT474, SIGNAL = 2.2; EXPRESSED IN HELA, SIGNAL = 3.7; EXPRESSED IN HEART, SIGNAL = 2.8; EXPRESSED IN BRAIN, SIGNAL = 2.7
YTDEENEENQGQTQAPASLAHPHHLRAAHLPQSLSSQRQG

SEQ ID NO: 34907 - protein, 51 aa, Homo sapiens
  MAP TO AL109830.7; EXPRESSED IN FETAL LIVER, SIGNAL = 6.3; EXPRESSED IN HELA, SIGNAL = 6.8; EXPRESSED IN PLACENTA, SIGNAL = 7.3; EXPRESSED IN HBL100, SIGNAL = 5.3; EXPRESSED IN HEART, SIGNAL = 6.4; EXPRESSED IN BRAIN, SIGNAL = 5.3; EXPRESSED IN BONE MARROW, SIGNAL = 6.7; EXPRESSED IN LUNG, SIGNAL = 5.8; EXPRESSED IN BT474, SIGNAL = 4.3; EXPRESSED IN ADULT LIVER, SIGNAL = 5.4; EST_HUMAN HIT: AV760923.1, EVALUE 3.80e+00
KFSTKLTTNTIEKTAAPKQFGPKPTNLLPSSHPSIFPIIQKEITVIHCTDQ

SEQ ID NO: 34908 - protein, 59 aa, Homo sapiens
  MAP TO AL079337.3; EXPRESSED IN HBL100, SIGNAL = 4.4; EXPRESSED IN HEART, SIGNAL = 8.5; EXPRESSED IN LUNG, SIGNAL = 5.5; EXPRESSED IN BONE MARROW, SIGNAL = 6.9; EXPRESSED IN BRAIN, SIGNAL = 6.1; EXPRESSED IN ADULT LIVER, SIGNAL = 6.9; EXPRESSED IN BT474, SIGNAL = 4.2; EXPRESSED IN FETAL LIVER, SIGNAL = 8.4; EXPRESSED IN PLACENTA, SIGNAL = 7.7; EXPRESSED IN HELA, SIGNAL = 5.8; EST_HUMAN HIT: AA728871.1, EVALUE 9.00e-15; SWISSPROT HIT: P03599, EVALUE 8.40e-01
  unsure 31
WGASLSCAILMIVNSLMRSDWFIRDYWVCFXPHFLLTPPCKKCFLTPAMILRPPQPCGT

SEQ ID NO: 34909 - protein, 63 aa, Homo sapiens
  MAP TO AF187000.1; EXPRESSED IN PLACENTA, SIGNAL = 4.9; EXPRESSED IN HELA, SIGNAL =  12; EXPRESSED IN HBL100, SIGNAL = 4.7; EXPRESSED IN HEART, SIGNAL =   5; EXPRESSED IN LUNG, SIGNAL = 3.6; EXPRESSED IN BONE MARROW, SIGNAL =   6; EXPRESSED IN BRAIN, SIGNAL = 6.1; EXPRESSED IN ADULT LIVER, SIGNAL = 3.8; EXPRESSED IN BT474, SIGNAL = 4.2; EXPRESSED IN FETAL LIVER, SIGNAL =   5
MVILMLIMVVMLLMMLMILMTMMLMVLMLLMMLMLMLMIVILMLLMMMRVVMLMMLMPMMLIT

SEQ ID NO: 34910 - protein, 44 aa, Homo sapiens
  MAP TO AL050341.18; EXPRESSED IN LUNG, SIGNAL = 3.4; EXPRESSED IN BRAIN, SIGNAL = 3.9; EXPRESSED IN BT474, SIGNAL = 5.9; EXPRESSED IN ADULT LIVER, SIGNAL =   5; EXPRESSED IN PLACENTA, SIGNAL = 5.4; EXPRESSED IN HBL100, SIGNAL = 5.7; EXPRESSED IN HEART, SIGNAL = 3.5; EXPRESSED IN BONE MARROW, SIGNAL = 4.5; EXPRESSED IN FETAL LIVER, SIGNAL = 3.5; EXPRESSED IN HELA, SIGNAL = 4.7; EST_HUMAN HIT: AW248177.1, EVALUE 5.00e-05
SSATSCVVVRGSAPMIALHWSLSTSDGLPLRSSSSRLSSPLQTS

SEQ ID NO: 34911 - protein, 25 aa, Homo sapiens
  MAP TO AL033380.10; EXPRESSED IN PLACENTA, SIGNAL = 1.2; EXPRESSED IN HELA, SIGNAL =   1; EXPRESSED IN BONE MARROW, SIGNAL = 1.7; EXPRESSED IN BRAIN, SIGNAL = 1.5; EXPRESSED IN BT474, SIGNAL = 1.5; EXPRESSED IN HEART, SIGNAL = 1.1; EXPRESSED IN HBL100, SIGNAL = 1.3; EXPRESSED IN LUNG, SIGNAL = 0.88; EXPRESSED IN ADULT LIVER, SIGNAL = 1.1; EXPRESSED IN FETAL LIVER, SIGNAL = 1.3
MISPAQRNDPRSQADLALNLAAPSP

SEQ ID NO: 34912 - protein, 54 aa, Homo sapiens
  MAP TO AL049541.19; EXPRESSED IN FETAL LIVER, SIGNAL = 1.9; EXPRESSED IN ADULT LIVER, SIGNAL = 0.95; EXPRESSED IN PLACENTA, SIGNAL = 1.3; EXPRESSED IN HBL100, SIGNAL =   2; EXPRESSED IN HELA, SIGNAL = 1.8; EXPRESSED IN BONE MARROW, SIGNAL = 2.6; EXPRESSED IN BT474, SIGNAL = 2.3; EXPRESSED IN HEART, SIGNAL = 1.1; EXPRESSED IN BRAIN, SIGNAL =   2
SFVRKEEEEEEERRRKRRRSRGKEEEGDEEERRQDSRQHLHNLASLAHPNPALP

SEQ ID NO: 34913 - protein, 62 aa, Homo sapiens
  MAP TO AF165124.1; EXPRESSED IN BT474, SIGNAL =   3; EXPRESSED IN FETAL LIVER, SIGNAL = 2.2; EXPRESSED IN ADULT LIVER, SIGNAL = 6.3; EXPRESSED IN PLACENTA, SIGNAL = 5.6; EXPRESSED IN HBL100, SIGNAL = 2.5; EXPRESSED IN BONE MARROW, SIGNAL = 4.4; EXPRESSED IN HELA, SIGNAL = 4.3; EXPRESSED IN HEART, SIGNAL = 2.4; EXPRESSED IN BRAIN, SIGNAL = 3.4; EXPRESSED IN LUNG, SIGNAL = 2.9; EST_HUMAN HIT: AW847744.1, EVALUE 1.00e-08
QLQRNPPKESAQTRLALPPPNGPSLPTLVTEDKGHILSGVLGLCPPLVPPHTTDALWKAPPP

SEQ ID NO: 34914 - protein, 59 aa, Homo sapiens [sequence omitted]

SEQ ID NO: 34915 - protein, 58 aa, Homo sapiens
  MAP TO AL049539.16; EXPRESSED IN BT474, SIGNAL = 4.1; EXPRESSED IN FETAL LIVER, SIGNAL = 1.5; EXPRESSED IN HBL100, SIGNAL = 3.1; EXPRESSED IN HELA, SIGNAL = 3.3; EXPRESSED IN HEART, SIGNAL = 1.6; EXPRESSED IN LUNG, SIGNAL =   2; EXPRESSED IN ADULT LIVER, SIGNAL = 1.8; EXPRESSED IN PLACENTA, SIGNAL = 3.5; EXPRESSED IN BRAIN, SIGNAL = 2.3; EXPRESSED IN BONE MARROW, SIGNAL = 2.2; EST_HUMAN HIT: AW372226.1, EVALUE 1.00e-30; SWISSPROT HIT: P32802, EVALUE 2.00e-05
VPFPTMVALLCMWFGISLPLVYLGYYFGFRKQPYDNPVRTNQIPRQIPEQRWYMNRFV

SEQ ID NO: 34916 - protein, 58 aa, Homo sapiens
  MAP TO AL049539.16; EXPRESSED IN BT474, SIGNAL = 4.1; EXPRESSED IN FETAL LIVER, SIGNAL = 1.5; EXPRESSED IN HBL100, SIGNAL = 3.1; EXPRESSED IN HELA, SIGNAL = 3.3; EXPRESSED IN HEART, SIGNAL = 1.6; EXPRESSED IN LUNG, SIGNAL =   2; EXPRESSED IN ADULT LIVER, SIGNAL = 1.8; EXPRESSED IN PLACENTA, SIGNAL = 3.5; EXPRESSED IN BRAIN, SIGNAL = 2.3; EXPRESSED IN BONE MARROW, SIGNAL = 2.2; EST_HUMAN HIT: AW372227.1, EVALUE 1.00e-07
QGLVGASWCHVYRCPFPPWWLCCACGSGSPCPSSTWATTSASESSHMTTLCAPTRFPG

SEQ ID NO: 34917 - protein, 25 aa, Homo sapiens
  MAP TO AL078645.18; EXPRESSED IN BONE MARROW, SIGNAL = 1.6; EXPRESSED IN LUNG, SIGNAL = 1.2; EXPRESSED IN BRAIN, SIGNAL = 1.6; EXPRESSED IN BT474, SIGNAL = 1.7; EXPRESSED IN FETAL LIVER, SIGNAL = 1.3; EXPRESSED IN HBL100, SIGNAL = 1.8; EXPRESSED IN HELA, SIGNAL = 1.1; EXPRESSED IN HEART, SIGNAL = 1.6; EXPRESSED IN ADULT LIVER, SIGNAL = 1.6; EXPRESSED IN PLACENTA, SIGNAL = 1.4; EST_HUMAN HIT: N31006.1, EVALUE 1.00e-06
EKSASSNVRLKTNKEVPGLVHQPRA

SEQ ID NO: 34918 - protein, 38 aa, Homo sapiens
  MAP TO AL020996.3; EXPRESSED IN BONE MARROW, SIGNAL = 2.1; EXPRESSED IN BRAIN, SIGNAL = 2.2; EXPRESSED IN LUNG, SIGNAL = 1.6; EXPRESSED IN ADULT LIVER, SIGNAL = 2.3; EXPRESSED IN BT474, SIGNAL = 1.9; EXPRESSED IN FETAL LIVER, SIGNAL =   2; EXPRESSED IN HELA, SIGNAL = 1.6; EXPRESSED IN PLACENTA, SIGNAL =  14; EXPRESSED IN HBL100, SIGNAL = 1.7; EXPRESSED IN HEART, SIGNAL = 1.7; EST_HUMAN HIT: AA437353.1, EVALUE 3.00e-15; SWISSPROT HIT: P39098, EVALUE 9.00e-10
ALEKYCRTEAGFSGIQDVYSSTPNHDNKQQSFFLAETL

SEQ ID NO: 34919 - protein, 19 aa, Homo sapiens
  MAP TO AL020996.3; EXPRESSED IN BONE MARROW, SIGNAL = 2.1; EXPRESSED IN BRAIN, SIGNAL = 2.2; EXPRESSED IN LUNG, SIGNAL = 1.6; EXPRESSED IN ADULT LIVER, SIGNAL = 2.3; EXPRESSED IN BT474, SIGNAL = 1.9; EXPRESSED IN FETAL LIVER, SIGNAL =   2; EXPRESSED IN HELA, SIGNAL = 1.6; EXPRESSED IN PLACENTA, SIGNAL =  14; EXPRESSED IN HBL100, SIGNAL = 1.7; EXPRESSED IN HEART, SIGNAL = 1.7; EST_HUMAN HIT: AA437353.1, EVALUE 9.00e-04
LGEILSDRSRFLWDPRRVQ

SEQ ID NO: 34920 - protein, 39 aa, Homo sapiens
  MAP TO AL079303.2; EXPRESSED IN PLACENTA, SIGNAL = 2.9; EXPRESSED IN HBL100, SIGNAL = 2.8; EXPRESSED IN HELA, SIGNAL = 3.3; EXPRESSED IN HEART, SIGNAL = 2.1; EXPRESSED IN BRAIN, SIGNAL = 2.6; EXPRESSED IN BONE MARROW, SIGNAL = 2.3; EXPRESSED IN LUNG, SIGNAL = 2.6; EXPRESSED IN ADULT LIVER, SIGNAL = 2.4; EXPRESSED IN BT474, SIGNAL = 3.3; EXPRESSED IN FETAL LIVER, SIGNAL = 2.2; EST_HUMAN HIT: AA596033.1, EVALUE 4.00e-16
TLMLGVEPVSHRAMWLPGLSADAHIRRIMVCVLPSYLRA

SEQ ID NO: 34921 - protein, 49 aa, Homo sapiens
  MAP TO AL050348.19; EXPRESSED IN HEART, SIGNAL = 1.5; EXPRESSED IN BONE MARROW, SIGNAL = 1.1; EXPRESSED IN BRAIN, SIGNAL = 1.1; EXPRESSED IN ADULT LIVER, SIGNAL = 1.1; EXPRESSED IN BT474, SIGNAL = 1.5; EST_HUMAN HIT: BF197609.1, EVALUE 1.00e-25; SWISSPROT HIT: O46655, EVALUE 4.00e-05
CIVGCVMDENCQAGEKCCKSGCGRFCVPPVLPPKLTMNPNWTVRSDSEL

SEQ ID NO: 34922 - protein, 55 aa, Homo sapiens
  MAP TO AP000402.1; EXPRESSED IN PLACENTA, SIGNAL =   3; EXPRESSED IN HBL100, SIGNAL = 2.1; EXPRESSED IN HELA, SIGNAL = 4.6; EXPRESSED IN BONE MARROW, SIGNAL = 4.1; EXPRESSED IN BT474, SIGNAL = 2.8; EXPRESSED IN FETAL LIVER, SIGNAL = 2.5; EXPRESSED IN HEART, SIGNAL = 2.9; EXPRESSED IN BRAIN, SIGNAL = 2.9; EXPRESSED IN LUNG, SIGNAL = 5.5; EXPRESSED IN ADULT LIVER, SIGNAL = 3.4; EST_HUMAN HIT: AI962425.1, EVALUE 5.00e-11; SWISSPROT HIT: Q00014, EVALUE 7.70e+00
FFSADFRDFSAPITQAVYTVLNVWSSIPQPYSHPFPQVPNVHRIILMPLHPHSLA

SEQ ID NO: 34923 - protein, 53 aa, Homo sapiens
  MAP TO AP000402.1; EXPRESSED IN PLACENTA, SIGNAL =   3; EXPRESSED IN HBL100, SIGNAL = 2.1; EXPRESSED IN HELA, SIGNAL = 4.6; EXPRESSED IN BONE MARROW, SIGNAL = 4.1; EXPRESSED IN BT474, SIGNAL = 2.8; EXPRESSED IN FETAL LIVER, SIGNAL = 2.5; EXPRESSED IN HEART, SIGNAL = 2.9; EXPRESSED IN BRAIN, SIGNAL = 2.9; EXPRESSED IN LUNG, SIGNAL = 5.5; EXPRESSED IN ADULT LIVER, SIGNAL = 3.4; EST_HUMAN HIT: AW946936.1, EVALUE 5.00e-07
SLVLISEISVHPSPKQCTLYSMCGLLSLSPTPTLSPKSPTSIVSFLCLCILIA

SEQ ID NO: 34924 - protein, 37 aa, Homo sapiens
  MAP TO AP000494.1; EXPRESSED IN BT474, SIGNAL =   3; EXPRESSED IN ADULT LIVER, SIGNAL = 3.1; EXPRESSED IN PLACENTA, SIGNAL = 2.9; EXPRESSED IN HBL100, SIGNAL = 2.2; EXPRESSED IN BONE MARROW, SIGNAL =   3; EXPRESSED IN FETAL LIVER, SIGNAL = 2.8; EXPRESSED IN HELA, SIGNAL = 2.8; EXPRESSED IN HEART, SIGNAL = 2.6; EXPRESSED IN BRAIN, SIGNAL = 2.8; EXPRESSED IN LUNG, SIGNAL = 2.4
STSDLGLLLLAALCRPLQPPNQQTGQSRICYCQAGMP

SEQ ID NO: 34925 - protein, 34 aa, Homo sapiens
  MAP TO AL031662.24; EXPRESSED IN HELA, SIGNAL = 2.8; EXPRESSED IN BONE MARROW, SIGNAL =   3; EXPRESSED IN LUNG, SIGNAL = 1.9; EXPRESSED IN BRAIN, SIGNAL = 3.1; EXPRESSED IN BT474, SIGNAL = 1.9; EXPRESSED IN PLACENTA, SIGNAL = 2.9; EXPRESSED IN HEART, SIGNAL = 2.1; EXPRESSED IN HBL100, SIGNAL = 2.3; EXPRESSED IN ADULT LIVER, SIGNAL = 2.2; EXPRESSED IN FETAL LIVER, SIGNAL = 2.1; EST_HUMAN HIT: AU132685.1, EVALUE 2.00e-12; SWISSPROT HIT: Q9UGV2, EVALUE 1.00e-13
EELQANLDLIQTYRMHIAQDINQDNLQLFLNSYN

SEQ ID NO: 34926 - protein, 23 aa, Homo sapiens
  MAP TO AL031662.24; EXPRESSED IN HELA, SIGNAL = 2.8; EXPRESSED IN BONE MARROW, SIGNAL =   3; EXPRESSED IN LUNG, SIGNAL = 1.9; EXPRESSED IN BRAIN, SIGNAL = 3.1; EXPRESSED IN BT474, SIGNAL = 1.9; EXPRESSED IN PLACENTA, SIGNAL = 2.9; EXPRESSED IN HEART, SIGNAL = 2.1; EXPRESSED IN HBL100, SIGNAL = 2.3; EXPRESSED IN ADULT LIVER, SIGNAL = 2.2; EXPRESSED IN FETAL LIVER, SIGNAL = 2.1; EST_HUMAN HIT: BF203986.1, EVALUE 6.00e-07
QNAYCPRHQPRQPAALLEFLQWV

SEQ ID NO: 34927 - protein, 56 aa, Homo sapiens
  MAP TO AF165140.1; EXPRESSED IN PLACENTA, SIGNAL = 1.4; EXPRESSED IN HEART, SIGNAL = 1.1; EXPRESSED IN LUNG, SIGNAL = 1.2; EXPRESSED IN BRAIN, SIGNAL =   1; EXPRESSED IN BONE MARROW, SIGNAL = 0.91; EXPRESSED IN BT474, SIGNAL = 0.98; EXPRESSED IN FETAL LIVER, SIGNAL =   1; EXPRESSED IN ADULT LIVER, SIGNAL = 3.5; EXPRESSED IN HBL100, SIGNAL = 1.1; SWISSPROT HIT: P54015, EVALUE 1.50e+00; EST_HUMAN HIT: BF688186.1, EVALUE 2.80e+00
TFKNCHGKTGRERVCQGSSARLPFDLGTERRAGIPVVEEEWKGIPGKEQDVLKYVK

SEQ ID NO: 34928 - protein, 51 aa, Homo sapiens
  MAP TO AL049543.14; EXPRESSED IN FETAL LIVER, SIGNAL = 1.4; EXPRESSED IN ADULT LIVER, SIGNAL = 1.7; EXPRESSED IN HBL100, SIGNAL = 1.2; EXPRESSED IN HELA, SIGNAL = 1.6; EXPRESSED IN HEART, SIGNAL = 1.2; EXPRESSED IN LUNG, SIGNAL = 1.2; EXPRESSED IN BRAIN, SIGNAL = 1.4; EXPRESSED IN BT474, SIGNAL = 1.2; EXPRESSED IN PLACENTA, SIGNAL = 1.4; EXPRESSED IN BONE MARROW, SIGNAL = 1.7; SWISSPROT HIT: O75715, EVALUE 6.00e-26; EST_HUMAN HIT: AI878994.1, EVALUE 4.00e-12
MDCHKDEKGTIYDYEAIALNKNEYVSFKQYVGKHILFVNVATYCGLTAQYP

SEQ ID NO: 34929 - protein, 30 aa, Homo sapiens
  MAP TO AF165140.1; EXPRESSED IN FETAL LIVER, SIGNAL = 2.8; EXPRESSED IN ADULT LIVER, SIGNAL = 4.8; EXPRESSED IN HBL100, SIGNAL = 2.7; EXPRESSED IN HELA, SIGNAL = 3.1; EXPRESSED IN HEART, SIGNAL = 1.8; EXPRESSED IN LUNG, SIGNAL = 2.5; EXPRESSED IN BT474, SIGNAL = 3.3; EXPRESSED IN PLACENTA, SIGNAL = 3.7; EXPRESSED IN BRAIN, SIGNAL = 3.4; EXPRESSED IN BONE MARROW, SIGNAL = 5.5
QQQQQQTMWLGGGDHASDLNIWRRQGGQIA

SEQ ID NO: 34930 - protein, 47 aa, Homo sapiens
  MAP TO AL049597.17; EXPRESSED IN FETAL LIVER, SIGNAL = 1.3; EXPRESSED IN HBL100, SIGNAL = 1.3; EXPRESSED IN HELA, SIGNAL = 1.6; EXPRESSED IN PLACENTA, SIGNAL = 1.7; EXPRESSED IN HEART, SIGNAL = 0.93; EXPRESSED IN BONE MARROW, SIGNAL = 1.2; EXPRESSED IN LUNG, SIGNAL = 1.1; EXPRESSED IN BT474, SIGNAL = 1.2; EXPRESSED IN ADULT LIVER, SIGNAL = 1.1; EST_HUMAN HIT: BE220494.1, EVALUE 1.00e-20; SWISSPROT HIT: Q99962, EVALUE 4.80e-02
FTEEKLGQAEKTELDAHLENLLSKAECTKIWTEKIMKQTEVLLQPNP

SEQ ID NO: 34931 - protein, 154 aa, Homo sapiens
  MAP TO AL096770.14; EXPRESSED IN PLACENTA, SIGNAL = 2.7; EXPRESSED IN HBL100, SIGNAL =   9; EXPRESSED IN HELA, SIGNAL = 6.6; EXPRESSED IN HEART, SIGNAL =   2; EXPRESSED IN BRAIN, SIGNAL = 1.4; EXPRESSED IN BONE MARROW, SIGNAL = 3.3; EXPRESSED IN LUNG, SIGNAL =   2; EXPRESSED IN ADULT LIVER, SIGNAL = 1.3; EXPRESSED IN BT474, SIGNAL = 7.7; EXPRESSED IN FETAL LIVER, SIGNAL = 3.3; EST_HUMAN HIT: AI079550.1, EVALUE 3.00e-24; SWISSPROT HIT: O95371, EVALUE 1.00e-31
AMENVTTMNEFLLLGLTGVQELQPFFFGIFLIIYLINLIGNGSILVMVVLEPQLHSPMYFFLGNLSCLDISYSSVTLPKLLVNLVCSRRAISFLGCITQLHFFHFLGSTEAILLAIMAFDRFVAICNPLRYTVIMNPQVCILLAAAAWLISFFY

SEQ ID NO: 34932 - protein, 44 aa, Homo sapiens
  MAP TO AL096770.14; EXPRESSED IN PLACENTA, SIGNAL = 2.7; EXPRESSED IN HBL100, SIGNAL =   9; EXPRESSED IN HELA, SIGNAL = 6.6; EXPRESSED IN HEART, SIGNAL =   2; EXPRESSED IN BRAIN, SIGNAL = 1.4; EXPRESSED IN BONE MARROW, SIGNAL = 3.3; EXPRESSED IN LUNG, SIGNAL =   2; EXPRESSED IN ADULT LIVER, SIGNAL = 1.3; EXPRESSED IN BT474, SIGNAL = 7.7; EXPRESSED IN FETAL LIVER, SIGNAL = 3.3; EST_HUMAN HIT: BF106083.1, EVALUE 2.40e+00; SWISSPROT HIT: P72732, EVALUE 2.10e+00
WCSGAAAFLLWDFLNHLPDKLDWKWIYIGDGCFGTTTPLPYVFF

SEQ ID NO: 34933 - protein, 28 aa, Homo sapiens
  MAP TO AL096770.14; EXPRESSED IN PLACENTA, SIGNAL = 2.7; EXPRESSED IN HBL100, SIGNAL =   9; EXPRESSED IN HELA, SIGNAL = 6.6; EXPRESSED IN HEART, SIGNAL =   2; EXPRESSED IN BRAIN, SIGNAL = 1.4; EXPRESSED IN BONE MARROW, SIGNAL = 3.3; EXPRESSED IN LUNG, SIGNAL =   2; EXPRESSED IN ADULT LIVER, SIGNAL = 1.3; EXPRESSED IN BT474, SIGNAL = 7.7; EXPRESSED IN FETAL LIVER, SIGNAL = 3.3
IFSRLYHPATLLPLFGKHRGHFTGYHGL

SEQ ID NO: 34934 - protein, 38 aa, Homo sapiens
  MAP TO AL023583.13; EXPRESSED IN BONE MARROW, SIGNAL = 0.95; EXPRESSED IN BT474, SIGNAL = 1.3; EXPRESSED IN FETAL LIVER, SIGNAL = 0.9; EXPRESSED IN HELA, SIGNAL = 1.8; EXPRESSED IN PLACENTA, SIGNAL = 1.3; EXPRESSED IN HBL100, SIGNAL = 1.5; EXPRESSED IN HEART, SIGNAL =   2; EST_HUMAN HIT: AW514387.1, EVALUE 2.00e-14; SWISSPROT HIT: Q99323, EVALUE 6.20e+00
HAQQDRALTQTDRKIETEVAGLKTMLESHKLDNIKYLA

SEQ ID NO: 34935 - protein, 45 aa, Homo sapiens
  MAP TO Z98044.10; EXPRESSED IN PLACENTA, SIGNAL = 1.4; EXPRESSED IN HELA, SIGNAL = 1.6; EXPRESSED IN HBL100, SIGNAL = 1.8; EXPRESSED IN HEART, SIGNAL = 1.3; EXPRESSED IN BONE MARROW, SIGNAL = 1.3; EXPRESSED IN LUNG, SIGNAL = 0.96; EXPRESSED IN BRAIN, SIGNAL =   1; EXPRESSED IN ADULT LIVER, SIGNAL = 1.6; EXPRESSED IN BT474, SIGNAL = 1.5; EXPRESSED IN FETAL LIVER, SIGNAL = 1.2; EST_HUMAN HIT: N53039.1, EVALUE 2.00e-13; SWISSPROT HIT: P81265, EVALUE 7.90e+00
KMKLSATSKMNRMGLVVVKSVRQPLLPSKEVTKVGGNEVTVNCKE

SEQ ID NO: 34936 - protein, 81 aa, Homo sapiens
  MAP TO AL078621.19; EXPRESSED IN BT474, SIGNAL =  36; EXPRESSED IN ADULT LIVER, SIGNAL = 6.9; EXPRESSED IN FETAL LIVER, SIGNAL = 8.5; EXPRESSED IN HELA, SIGNAL =  37; EXPRESSED IN PLACENTA, SIGNAL =  23; EXPRESSED IN HBL100, SIGNAL =  32; EXPRESSED IN HEART, SIGNAL = 6.8; EXPRESSED IN BRAIN, SIGNAL =  11; EXPRESSED IN BONE MARROW, SIGNAL =  13; EXPRESSED IN LUNG, SIGNAL =  20; EST_HUMAN HIT: AA595083.1, EVALUE 1.00e-40; SWISSPROT HIT: Q57969, EVALUE 2.70e+00
GGDLGHITVIELLHSLSDLVLVGFNIHSEHKRVVFFYLLHGRLSGQRKLDDSIVAKLVSPGGALLRLSGLPPESQCLGPPE

SEQ ID NO: 34937 - protein, 42 aa, Homo sapiens
  MAP TO AL078621.19; EXPRESSED IN BT474, SIGNAL =  36; EXPRESSED IN ADULT LIVER, SIGNAL = 6.9; EXPRESSED IN FETAL LIVER, SIGNAL = 8.5; EXPRESSED IN HELA, SIGNAL =  37; EXPRESSED IN PLACENTA, SIGNAL =  23; EXPRESSED IN HBL100, SIGNAL =  32; EXPRESSED IN HEART, SIGNAL = 6.8; EXPRESSED IN BRAIN, SIGNAL =  11; EXPRESSED IN BONE MARROW, SIGNAL =  13; EXPRESSED IN LUNG, SIGNAL =  20; EST_HUMAN HIT: BE746978.1, EVALUE 1.00e-16
SFFTACLIWCLLALTSTVNTSVLFSSIFFTADSVVSGNLMIA

SEQ ID NO: 34938 - protein, 145 aa, Homo sapiens
  MAP TO AC011506.1; EXPRESSED IN HELA, SIGNAL =  13; EXPRESSED IN LUNG, SIGNAL = 0.97; EXPRESSED IN BRAIN, SIGNAL = 1.7; EXPRESSED IN BT474, SIGNAL = 2.6; EXPRESSED IN ADULT LIVER, SIGNAL = 1.1; EXPRESSED IN PLACENTA, SIGNAL = 1.3; EXPRESSED IN HEART, SIGNAL = 1.3; EXPRESSED IN HBL100, SIGNAL = 3.3; EXPRESSED IN BONE MARROW, SIGNAL = 1.8; EXPRESSED IN FETAL LIVER, SIGNAL = 0.91; EST_HUMAN HIT: AI768104.1, EVALUE 7.00e-60; SWISSPROT HIT: P51523, EVALUE 1.00e-39
PASPVSHPDGQEAKALPPFACDVCEKRFTCNSKLVIHKRSHTGERLFQCNLCGKRFMQLISLQFHQRTHTGERPYTCDVCQKQFTQKSYLKCHKRSHTGEKPFECKDCKKVFTYRGSLKEHQRIHSGEKPYKCSKCPRAFSRLKL

SEQ ID NO: 34939 - protein, 174 aa, Homo sapiens
  MAP TO AF159056.1; EXPRESSED IN BONE MARROW, SIGNAL = 3.6; EXPRESSED IN LUNG, SIGNAL =   3; EXPRESSED IN FETAL LIVER, SIGNAL = 2.5; EXPRESSED IN ADULT LIVER, SIGNAL = 2.4; EXPRESSED IN PLACENTA, SIGNAL = 2.8; EXPRESSED IN HBL100, SIGNAL = 2.4; EXPRESSED IN HELA, SIGNAL = 3.2; EXPRESSED IN HEART, SIGNAL = 3.3; EXPRESSED IN BRAIN, SIGNAL = 2.6; EXPRESSED IN BT474, SIGNAL = 2.2; EST_HUMAN HIT: AI961098.1, EVALUE 2.00e-85; SWISSPROT HIT: P03979, EVALUE 5.00e-39
SQKSSNLEGRTKSVIRQTGSSAEITCDLAEGSTGYIHWYLHQEGKAPQRLLYYDSYTSSVVLESGISPGKYDTYGSTRKNLRMILRNLIENDSGVYYCATWDGHSDSDPPYTTLKTCLVAASGTQDRAAPSHFLPPNLPCAEQEKHCLTPDLPCNITLPWQQLHPVPHPPPGLP

SEQ ID NO: 34940 - protein, 96 aa, Homo sapiens
  MAP TO AP000459.2; EXPRESSED IN FETAL LIVER, SIGNAL =  20; EXPRESSED IN HBL100, SIGNAL = 1e+02; EXPRESSED IN HELA, SIGNAL =  60; EXPRESSED IN HEART, SIGNAL = 6.5; EXPRESSED IN BONE MARROW, SIGNAL =  25; EXPRESSED IN LUNG, SIGNAL =  14; EXPRESSED IN ADULT LIVER, SIGNAL = 4.2; EXPRESSED IN BT474, SIGNAL =  61; EXPRESSED IN PLACENTA, SIGNAL =  23; EXPRESSED IN BRAIN, SIGNAL =  50; SWISSPROT HIT: P05214, EVALUE 6.00e-41; EST_HUMAN HIT: AV710456.1, EVALUE 1.00e-40
IECPNYTNLNHLIGHIVSSITASLRFDGALNIDLTEFQTNLVPYTHIHFPLAMCAPVISAEKAYHERFSVVEITNAYFEPANQMVRCDPHHGKYIT

SEQ ID NO: 34941 - protein, 75 aa, Homo sapiens
  MAP TO AC005082.2; EXPRESSED IN FETAL LIVER, SIGNAL = 7.1; EXPRESSED IN ADULT LIVER, SIGNAL = 2.1; EXPRESSED IN HBL100, SIGNAL =  11; EXPRESSED IN HELA, SIGNAL = 8.4; EXPRESSED IN HEART, SIGNAL = 5.5; EXPRESSED IN LUNG, SIGNAL = 5.1; EXPRESSED IN BT474, SIGNAL =  11; EXPRESSED IN PLACENTA, SIGNAL = 5.1; EXPRESSED IN BRAIN, SIGNAL = 4.3; EXPRESSED IN BONE MARROW, SIGNAL = 5.9; SWISSPROT HIT: Q9Z9M1, EVALUE 1.00e+00; EST_HUMAN HIT: AW968173.1, EVALUE 3.00e-39
NNRRGWNTTSQRYSNVIQPSSFSKSTPWGGSRDQEKPYFSSFDSGASTNRKEGFGLSENPFASLSPDEQKDEKKL

SEQ ID NO: 34942 - protein, 66 aa, Homo sapiens
  MAP TO AC009961.2; EXPRESSED IN BONE MARROW, SIGNAL =   2; EXPRESSED IN LUNG, SIGNAL = 2.3; EXPRESSED IN BRAIN, SIGNAL = 0.99; EXPRESSED IN FETAL LIVER, SIGNAL = 1.6; EXPRESSED IN ADULT LIVER, SIGNAL =   2; EXPRESSED IN PLACENTA, SIGNAL = 1.4; EXPRESSED IN HEART, SIGNAL = 1.1; EST_HUMAN HIT: AI568189.1, EVALUE 4.00e-32; SWISSPROT HIT: P43121, EVALUE 3.80e-01
NHILISALVIASTVILTVLGAIIWFLYKKHSDSRFTTVFSTAPQSPYNEDCVLVVGEENEYPVQFD

SEQ ID NO: 34943 - protein, 87 aa, Homo sapiens
  MAP TO AF146367.1; EXPRESSED IN HBL100, SIGNAL = 2.1; EXPRESSED IN BONE MARROW, SIGNAL = 1.7; EXPRESSED IN LUNG, SIGNAL = 1.2; EXPRESSED IN FETAL LIVER, SIGNAL = 1.4; EXPRESSED IN ADULT LIVER, SIGNAL = 1.2; EXPRESSED IN PLACENTA, SIGNAL = 2.1; EXPRESSED IN HEART, SIGNAL = 1.6; EXPRESSED IN HELA, SIGNAL = 2.2; EXPRESSED IN BRAIN, SIGNAL = 1.8; EXPRESSED IN BT474, SIGNAL = 3.3; EST_HUMAN HIT: AU142758.1, EVALUE 1.00e-46; SWISSPROT HIT: P17097, EVALUE 2.00e-47
STIRTENEQACEDMDILKSESYGTVVRISPQDFPQNPGFGDVSDSEVWLDSHLGSPGLKVTGFTFQNNCLNEETVVPKTFTKDAPQG

SEQ ID NO: 34944 - protein, 17 aa, Homo sapiens
  MAP TO AF146367.1; EXPRESSED IN HBL100, SIGNAL = 2.1; EXPRESSED IN BONE MARROW, SIGNAL = 1.7; EXPRESSED IN LUNG, SIGNAL = 1.2; EXPRESSED IN FETAL LIVER, SIGNAL = 1.4; EXPRESSED IN ADULT LIVER, SIGNAL = 1.2; EXPRESSED IN PLACENTA, SIGNAL = 2.1; EXPRESSED IN HEART, SIGNAL = 1.6; EXPRESSED IN HELA, SIGNAL = 2.2; EXPRESSED IN BRAIN, SIGNAL = 1.8; EXPRESSED IN BT474, SIGNAL = 3.3; EST_HUMAN HIT: BF530758.1, EVALUE 2.90e-02
ILRLGLKMSRPVRTWTS

SEQ ID NO: 34945 - protein, 37 aa, Homo sapiens
  MAP TO AP000354.1; EXPRESSED IN HBL100, SIGNAL = 2.1; EXPRESSED IN HELA, SIGNAL = 2.3; EXPRESSED IN BONE MARROW, SIGNAL = 2.9; EXPRESSED IN LUNG, SIGNAL = 2.5; EXPRESSED IN ADULT LIVER, SIGNAL = 2.3; EXPRESSED IN FETAL LIVER, SIGNAL = 2.4; EXPRESSED IN PLACENTA, SIGNAL = 3.6; EXPRESSED IN HEART, SIGNAL = 4.9; EXPRESSED IN BRAIN, SIGNAL = 3.6; EXPRESSED IN BT474, SIGNAL = 2.6; EST_HUMAN HIT: AL044101.1, EVALUE 3.00e-15; SWISSPROT HIT: P11274, EVALUE 4.00e-12
MNAIAGTLKLYFRELPEPLFTDEFYPSFAEGIGEHWR

SEQ ID NO: 34946 - protein, 68 aa, Homo sapiens
  MAP TO AC011019.1; EXPRESSED IN BONE MARROW, SIGNAL = 1.5; EXPRESSED IN BRAIN, SIGNAL = 1.4; EXPRESSED IN BT474, SIGNAL =  46; EXPRESSED IN FETAL LIVER, SIGNAL = 6.8; EXPRESSED IN HBL100, SIGNAL =  27; EXPRESSED IN HELA, SIGNAL =  39; EXPRESSED IN HEART, SIGNAL = 1.2; EXPRESSED IN LUNG, SIGNAL =  11; EXPRESSED IN ADULT LIVER, SIGNAL =  12; EXPRESSED IN PLACENTA, SIGNAL =  64; EST_HUMAN HIT: BE393371.1, EVALUE 2.00e-25; SWISSPROT HIT: P05784, EVALUE 2.00e-26
IDNAHLAGDDFRVKYETELAMHQSVESNIHGLRKVTDDTNVTQLQLQTEIEPLKEELLFMKKHEEEVK

SEQ ID NO: 34947 - protein, 188 aa, Homo sapiens
  MAP TO AP000163.1; EXPRESSED IN PLACENTA, SIGNAL = 2.4; EXPRESSED IN HBL100, SIGNAL = 1.4; EXPRESSED IN HELA, SIGNAL = 1.7; EXPRESSED IN HEART, SIGNAL = 0.92; EXPRESSED IN BONE MARROW, SIGNAL = 2.1; EXPRESSED IN LUNG, SIGNAL = 1.8; EXPRESSED IN BRAIN, SIGNAL = 1.5; EXPRESSED IN ADULT LIVER, SIGNAL = 1.5; EXPRESSED IN BT474, SIGNAL =   1; EXPRESSED IN FETAL LIVER, SIGNAL = 0.95; EST_HUMAN HIT: BE831331.1, EVALUE 4.00e-65; SWISSPROT HIT: P11308, EVALUE 8.00e-99
EPVLTGVFLPLLTSLGSGQIQLWQFLLELLSDSSNSSCITWEGTNGEFKMTDPDEVARRWGERKSKPNMNYDKLSRALRYYYDKNIMTKVHGKRYAYKFDFHGIAQALQPHPPESSLYKYPSDLPYMGSYHAHPQKMNFVAPHPPALPVTSSSFFAAPNPYWNSPTGGIYPNTRLPTSHMPSHLGTYY

SEQ ID NO: 34948 - protein, 18 aa, Homo sapiens
  MAP TO AL109615.8; EXPRESSED IN HBL100, SIGNAL = 3.8; EXPRESSED IN PLACENTA, SIGNAL = 4.5; EXPRESSED IN HELA, SIGNAL = 4.3; EXPRESSED IN HEART, SIGNAL = 4.4; EXPRESSED IN BRAIN, SIGNAL = 3.4; EXPRESSED IN BONE MARROW, SIGNAL = 3.9; EXPRESSED IN LUNG, SIGNAL = 3.4; EXPRESSED IN ADULT LIVER, SIGNAL = 3.6; EXPRESSED IN BT474, SIGNAL = 3.4; EXPRESSED IN FETAL LIVER, SIGNAL = 3.8; EST_HUMAN HIT: AA524514.1, EVALUE 3.40e-02
FIAVASVPRAVPGNIAAV

SEQ ID NO: 34949 - protein, 39 aa, Homo sapiens
  MAP TO AP000513.1; EXPRESSED IN BT474, SIGNAL =   3; EXPRESSED IN ADULT LIVER, SIGNAL = 2.4; EXPRESSED IN FETAL LIVER, SIGNAL = 2.4; EXPRESSED IN HBL100, SIGNAL = 3.5; EXPRESSED IN HELA, SIGNAL = 2.8; EXPRESSED IN PLACENTA, SIGNAL = 2.8; EXPRESSED IN HEART, SIGNAL = 1.8; EXPRESSED IN BRAIN, SIGNAL = 2.2; EXPRESSED IN BONE MARROW, SIGNAL = 3.2; EXPRESSED IN LUNG, SIGNAL = 2.1; EST_HUMAN HIT: AL119403.1, EVALUE 4.00e-17
SPGDPNQLTRKGRKRKSVTWPEEGKLREYFYFELDETER

SEQ ID NO: 34950 - protein, 61 aa, Homo sapiens
  MAP TO AC008134.3; EXPRESSED IN BT474, SIGNAL = 2.2; EXPRESSED IN FETAL LIVER, SIGNAL = 2.5; EXPRESSED IN PLACENTA, SIGNAL =  11; EXPRESSED IN HBL100, SIGNAL = 4.3; EXPRESSED IN HELA, SIGNAL =  10; EXPRESSED IN HEART, SIGNAL =   2; EXPRESSED IN BRAIN, SIGNAL = 5.6; EXPRESSED IN BONE MARROW, SIGNAL = 4.1; EXPRESSED IN LUNG, SIGNAL = 4.9; EXPRESSED IN ADULT LIVER, SIGNAL = 9.5; EST_HUMAN HIT: N66951.1, EVALUE 3.00e-16; SWISSPROT HIT: O18870, EVALUE 3.40e+00
PSDLSPPPQAAPRQAELGPNSSSASAPPPYNLFITSPPHTWSGLQFRSETSPPPPAQQFTL

SEQ ID NO: 34951 - protein, 91 aa, Homo sapiens
  MAP TO AF165124.1; EXPRESSED IN BRAIN, SIGNAL = 3.2; EXPRESSED IN LUNG, SIGNAL = 1.2; EXPRESSED IN BT474, SIGNAL = 1.8; EXPRESSED IN HELA, SIGNAL = 1.6; EXPRESSED IN PLACENTA, SIGNAL = 3.2; EXPRESSED IN HBL100, SIGNAL = 1.3; EXPRESSED IN HEART, SIGNAL = 1.1; SWISSPROT HIT: P18508, EVALUE 9.00e-53; EST_HUMAN HIT: AW949419.1, EVALUE 6.00e-52
APTIDIRPRSATIQMNNATHLQERDEEYGYECLDGKDCASFFCCFEDCRTGAWRHGRIHIRIAKMDSYARIFFPTAFCLFNLVYWVSYLYL

SEQ ID NO: 34952 - protein, 69 aa, Homo sapiens
  MAP TO AC004900.2; EXPRESSED IN ADULT LIVER, SIGNAL = 3.7; EXPRESSED IN BT474, SIGNAL = 4.1; EXPRESSED IN FETAL LIVER, SIGNAL = 4.4; EXPRESSED IN PLACENTA, SIGNAL = 7.1; EXPRESSED IN HBL100, SIGNAL = 3.1; EXPRESSED IN HELA, SIGNAL = 4.4; EXPRESSED IN HEART, SIGNAL = 5.9; EXPRESSED IN BRAIN, SIGNAL = 4.4; EXPRESSED IN BONE MARROW, SIGNAL = 3.1; EXPRESSED IN LUNG, SIGNAL = 2.5; EST_HUMAN HIT: AV707461.1, EVALUE 3.00e-24
TPTSRRALHRTLSDESIYNSQREHFFTSRASLLDQALPNDVLFSSTYPSLPKSLPLRRPSYTLGMKSLH

SEQ ID NO: 34953 - protein, 55 aa, Homo sapiens
  MAP TO AC004900.2; EXPRESSED IN ADULT LIVER, SIGNAL = 3.7; EXPRESSED IN BT474, SIGNAL = 4.1; EXPRESSED IN FETAL LIVER, SIGNAL = 4.4; EXPRESSED IN PLACENTA, SIGNAL = 7.1; EXPRESSED IN HBL100, SIGNAL = 3.1; EXPRESSED IN HELA, SIGNAL = 4.4; EXPRESSED IN HEART, SIGNAL = 5.9; EXPRESSED IN BRAIN, SIGNAL = 4.4; EXPRESSED IN BONE MARROW, SIGNAL = 3.1; EXPRESSED IN LUNG, SIGNAL = 2.5; EST_HUMAN HIT: AW953375.1, EVALUE 6.00e-29; SWISSPROT HIT: P16793, EVALUE 5.20e-01
PPPHGGPCTEHCRTRAFTIARGSTFSPPGRHFWTKPCPTTSSSVARTLLSPSRSR

SEQ ID NO: 34954 - protein, 129 aa, Homo sapiens [sequence omitted]

SEQ ID NO: 34955 - protein, 22 aa, Homo sapiens
  MAP TO AP000353.1; EXPRESSED IN BONE MARROW, SIGNAL = 5.2; EXPRESSED IN LUNG, SIGNAL = 2.9; EXPRESSED IN BT474, SIGNAL =   5; EXPRESSED IN ADULT LIVER, SIGNAL = 3.7; EXPRESSED IN FETAL LIVER, SIGNAL = 3.7; EXPRESSED IN HELA, SIGNAL = 4.6; EXPRESSED IN PLACENTA, SIGNAL = 4.3; EXPRESSED IN HBL100, SIGNAL = 8.7; EXPRESSED IN HEART, SIGNAL =   3; EXPRESSED IN BRAIN, SIGNAL = 3.2; EST_HUMAN HIT: H30132.1, EVALUE 1.00e-05
LSRRCRGDSKTVARTRPRGPSS

SEQ ID NO: 34956 - protein, 51 aa, Homo sapiens
  MAP TO AL096819.2; EXPRESSED IN BRAIN, SIGNAL = 1.2; EXPRESSED IN BONE MARROW, SIGNAL = 2.1; EXPRESSED IN LUNG, SIGNAL = 1.2; EXPRESSED IN BT474, SIGNAL = 2.1; EXPRESSED IN FETAL LIVER, SIGNAL = 1.5; EXPRESSED IN ADULT LIVER, SIGNAL = 1.5; EXPRESSED IN HELA, SIGNAL = 1.4; EXPRESSED IN PLACENTA, SIGNAL = 2.2; EXPRESSED IN HBL100, SIGNAL = 1.8; EXPRESSED IN HEART, SIGNAL = 1.8; EST_HUMAN HIT: AL046390.1, EVALUE 9.00e-13
MQEMIELSSQQQKEQQLPPRAVQIVSHPFFGRVVLTAGPAQFGLDLSKHKE

SEQ ID NO: 34957 - protein, 75 aa, Homo sapiens
  MAP TO AL021807.1; EXPRESSED IN ADULT LIVER, SIGNAL = 2.2; EXPRESSED IN PLACENTA, SIGNAL =  10; EXPRESSED IN HBL100, SIGNAL =  19; EXPRESSED IN HELA, SIGNAL = 5.5; EXPRESSED IN BONE MARROW, SIGNAL = 7.3; EXPRESSED IN BT474, SIGNAL =  11; EXPRESSED IN FETAL LIVER, SIGNAL = 6.6; EXPRESSED IN HEART, SIGNAL = 1.2; EXPRESSED IN BRAIN, SIGNAL = 1.3; EXPRESSED IN LUNG, SIGNAL = 3.1; SWISSPROT HIT: P57053, EVALUE 7.00e-17; EST_HUMAN HIT: BE272202.1, EVALUE 6.00e-16
MPEPAKSAPAPKKGSKKAVTKAQKKDGKKRKRSRKESYSVYVYKVLKQVHPDTGISSKAMGIMNSFVNDIFERIA

SEQ ID NO: 34958 - protein, 19 aa, Homo sapiens
  MAP TO AL021807.1; EXPRESSED IN ADULT LIVER, SIGNAL = 2.2; EXPRESSED IN PLACENTA, SIGNAL =  10; EXPRESSED IN HBL100, SIGNAL =  19; EXPRESSED IN HELA, SIGNAL = 5.5; EXPRESSED IN BONE MARROW, SIGNAL = 7.3; EXPRESSED IN BT474, SIGNAL =  11; EXPRESSED IN FETAL LIVER, SIGNAL = 6.6; EXPRESSED IN HEART, SIGNAL = 1.2; EXPRESSED IN BRAIN, SIGNAL = 1.3; EXPRESSED IN LUNG, SIGNAL = 3.1; EST_HUMAN HIT: AU134123.1, EVALUE 9.00e-04
LRIRVQGAEAGPPRHRHLL

SEQ ID NO: 34959 - protein, 52 aa, Homo sapiens
  MAP TO AC008072.2; EXPRESSED IN LUNG, SIGNAL = 5.1; EXPRESSED IN BRAIN, SIGNAL = 5.2; EXPRESSED IN BT474, SIGNAL = 4.2; EXPRESSED IN FETAL LIVER, SIGNAL = 5.6; EXPRESSED IN ADULT LIVER, SIGNAL = 9.1; EXPRESSED IN PLACENTA, SIGNAL =  17; EXPRESSED IN HEART, SIGNAL = 2.2; EXPRESSED IN HBL100, SIGNAL = 6.4; EXPRESSED IN BONE MARROW, SIGNAL =   5; EXPRESSED IN HELA, SIGNAL =  11; EST_HUMAN HIT: AU125534.1, EVALUE 2.00e-16
TRMKFGAVTRIGGPPLGDQSPVLLFFVPRERSTYDLGPQTDQPKKHLTNFKS

SEQ ID NO: 34960 - protein, 58 aa, Homo sapiens
  MAP TO AP000511.1; EXPRESSED IN HELA, SIGNAL = 8.8; EXPRESSED IN PLACENTA, SIGNAL =  13; EXPRESSED IN HBL100, SIGNAL = 9.2; EXPRESSED IN HEART, SIGNAL = 9.2; EXPRESSED IN BONE MARROW, SIGNAL = 8.8; EXPRESSED IN LUNG, SIGNAL = 8.5; EXPRESSED IN BRAIN, SIGNAL = 8.1; EXPRESSED IN ADULT LIVER, SIGNAL = 6.9; EXPRESSED IN BT474, SIGNAL = 8.7; EXPRESSED IN FETAL LIVER, SIGNAL = 8.6; EST_HUMAN HIT: BF033002.1, EVALUE 1.00e-23; SWISSPROT HIT: Q08345, EVALUE 1.00e-24
FAAFSASQGKFTTASDVWAFGVTLWEVLMLCRAQPFGQLTDEQVIENAGEFFRDQGRQ

SEQ ID NO: 34961 - protein, 96 aa, Homo sapiens
  MAP TO AP000508.1; EXPRESSED IN HELA, SIGNAL =   2; EXPRESSED IN LUNG, SIGNAL =   1; EXPRESSED IN BRAIN, SIGNAL = 1.1; EXPRESSED IN BT474, SIGNAL = 1.6; EXPRESSED IN ADULT LIVER, SIGNAL = 0.96; EXPRESSED IN PLACENTA, SIGNAL = 2.2; EXPRESSED IN HEART, SIGNAL = 0.98; EXPRESSED IN HBL100, SIGNAL = 1.9; EXPRESSED IN BONE MARROW, SIGNAL = 1.2; EXPRESSED IN FETAL LIVER, SIGNAL = 1.3; EST_HUMAN HIT: AA769858.1, EVALUE 1.00e-42; SWISSPROT HIT: P40818, EVALUE 2.00e-43
GKINYQFAGYSQDSQEFFLFLMDGLREDLNKTDNRKTYKEENNDHLNDFKAAEHAWQKHKRLYESIIVALFQGQFKSTVQCLTRHKKSRTLEAFMY

SEQ ID NO: 34962 - protein, 72 aa, Homo sapiens
  MAP TO AL121755.1; EXPRESSED IN HELA, SIGNAL = 1.8; EXPRESSED IN BONE MARROW, SIGNAL =   2; EXPRESSED IN LUNG, SIGNAL = 1.3; EXPRESSED IN BRAIN, SIGNAL = 1.8; EXPRESSED IN BT474, SIGNAL = 1.4; EXPRESSED IN PLACENTA, SIGNAL = 2.7; EXPRESSED IN HEART, SIGNAL = 2.3; EXPRESSED IN HBL100, SIGNAL = 1.8; EXPRESSED IN ADULT LIVER, SIGNAL = 3.1; EXPRESSED IN FETAL LIVER, SIGNAL = 1.6; EST_HUMAN HIT: AW997712.1, EVALUE 2.00e-25; SWISSPROT HIT: P08547, EVALUE 6.00e-21
NSKRNLQNHANIWKLNNLLLNDHWVKNKIKMEIKKFFRLNDNSDTTYQNPWDRATVVLRGKFIALKYLHQKD

SEQ ID NO: 34963 - protein, 73 aa, Homo sapiens
  MAP TO AC007378.2; EXPRESSED IN FETAL LIVER, SIGNAL = 1.1; EXPRESSED IN ADULT LIVER, SIGNAL = 1.6; EXPRESSED IN PLACENTA, SIGNAL =  19; EXPRESSED IN HELA, SIGNAL = 3.8; EXPRESSED IN HBL100, SIGNAL = 3.5; EXPRESSED IN HEART, SIGNAL = 1.3; EXPRESSED IN LUNG, SIGNAL = 2.8; EXPRESSED IN BONE MARROW, SIGNAL =   1; EXPRESSED IN BRAIN, SIGNAL = 1.3; EST_HUMAN HIT: T98917.1, EVALUE 2.00e-40; SWISSPROT HIT: P35440, EVALUE 2.00e-10
QPFRPSLSRNNSVPNYCKNDEGDIFLAAESWKPDVCTSCICIDSVISCFSESCPSVSCERPVLRKGQCCPYCI

SEQ ID NO: 34964 - protein, 52 aa, Homo sapiens
  MAP TO AP000365.1; EXPRESSED IN HEART, SIGNAL = 2.2; EXPRESSED IN LUNG, SIGNAL = 4.2; EXPRESSED IN BRAIN, SIGNAL = 4.3; EXPRESSED IN BT474, SIGNAL = 2.1; EXPRESSED IN FETAL LIVER, SIGNAL = 2.6; EXPRESSED IN ADULT LIVER, SIGNAL =   6; EXPRESSED IN PLACENTA, SIGNAL = 7.1; EXPRESSED IN HBL100, SIGNAL = 3.4; EXPRESSED IN BONE MARROW, SIGNAL = 3.4; EXPRESSED IN HELA, SIGNAL = 7.1
SPNTSSASTPPPYNPSITSPPHTWSGLQFSSATSASPPAQQFPLREVAGAEG

SEQ ID NO: 34965 - protein, 28 aa, Homo sapiens
  MAP TO AC009967.1; EXPRESSED IN FETAL LIVER, SIGNAL = 1.8; EXPRESSED IN ADULT LIVER, SIGNAL = 0.96; EXPRESSED IN HELA, SIGNAL = 4.5; EXPRESSED IN BONE MARROW, SIGNAL = 1.6; EXPRESSED IN LUNG, SIGNAL = 1.7; EXPRESSED IN BRAIN, SIGNAL = 2.1; EXPRESSED IN BT474, SIGNAL = 4.4; EXPRESSED IN PLACENTA, SIGNAL = 2.5; EXPRESSED IN HEART, SIGNAL = 1.5; EXPRESSED IN HBL100, SIGNAL = 4.4; SWISSPROT HIT: Q04504, EVALUE 4.00e-10; EST_HUMAN HIT: BF218148.1, EVALUE 6.00e-09
PVKRAREETDKEEPASKQQKTENGAGDQ

SEQ ID NO: 34966 - protein, 42 aa, Homo sapiens
  MAP TO AC007298.17; EXPRESSED IN LUNG, SIGNAL = 2.4; EXPRESSED IN BRAIN, SIGNAL = 2.7; EXPRESSED IN FETAL LIVER, SIGNAL = 3.2; EXPRESSED IN ADULT LIVER, SIGNAL =   2; EXPRESSED IN PLACENTA, SIGNAL = 4.8; EXPRESSED IN HEART, SIGNAL = 2.2; EXPRESSED IN HELA, SIGNAL = 2.1; EXPRESSED IN BONE MARROW, SIGNAL = 2.6; EXPRESSED IN BT474, SIGNAL = 3.4; EXPRESSED IN HBL100, SIGNAL = 2.5; EST_HUMAN HIT: BE378300.1, EVALUE 3.00e-08
MAISSGKFINPPRFAIATFAAHILNPVAASEHDQILKFTAQQ

SEQ ID NO: 34967 - protein, 108 aa, Homo sapiens
  MAP TO AC007425.16; EXPRESSED IN HBL100, SIGNAL =   1; EXPRESSED IN HEART, SIGNAL = 1.8; EXPRESSED IN BONE MARROW, SIGNAL = 1.6; EST_HUMAN HIT: AF075301.1, EVALUE 1.00e-14; SWISSPROT HIT: Q99680, EVALUE 2.60e+00
FRGHMCKVVCHLNHSCVDFCNLLNLGKSFDVIDKSLECLLADAIYILLGDITPSLSKVLSVLIDVVILPELISIFSVSSSVALMGILCNGEVWASIVSVTQIVNIVPN

SEQ ID NO: 34968 - protein, 45 aa, Homo sapiens
  MAP TO AP000507.1; EXPRESSED IN FETAL LIVER, SIGNAL =  11; EXPRESSED IN HBL100, SIGNAL = 9.3; EXPRESSED IN HELA, SIGNAL =  12; EXPRESSED IN HEART, SIGNAL =  11; EXPRESSED IN BONE MARROW, SIGNAL =  14; EXPRESSED IN LUNG, SIGNAL =  12; EXPRESSED IN ADULT LIVER, SIGNAL =  11; EXPRESSED IN BT474, SIGNAL = 8.4; EXPRESSED IN PLACENTA, SIGNAL =  12; EXPRESSED IN BRAIN, SIGNAL = 9.9; SWISSPROT HIT: Q66802, EVALUE 1.60e+00
PKGRNVYRVLHQRKEMSSSFTIHDPIFGYRVQLSNKGNTKNTINI

SEQ ID NO: 34969 - protein, 22 aa, Homo sapiens
  MAP TO AP000507.1; EXPRESSED IN FETAL LIVER, SIGNAL =  11; EXPRESSED IN HBL100, SIGNAL = 9.3; EXPRESSED IN HELA, SIGNAL =  12; EXPRESSED IN HEART, SIGNAL =  11; EXPRESSED IN BONE MARROW, SIGNAL =  14; EXPRESSED IN LUNG, SIGNAL =  12; EXPRESSED IN ADULT LIVER, SIGNAL =  11; EXPRESSED IN BT474, SIGNAL = 8.4; EXPRESSED IN PLACENTA, SIGNAL =  12; EXPRESSED IN BRAIN, SIGNAL = 9.9
KGQKCLPSAPPEKRNEFFLHNP

SEQ ID NO: 34970 - protein, 117 aa, Homo sapiens
  MAP TO AC006511.5; EXPRESSED IN BONE MARROW, SIGNAL = 5.4; EXPRESSED IN BRAIN, SIGNAL = 3.5; EXPRESSED IN FETAL LIVER, SIGNAL = 4.4; EXPRESSED IN ADULT LIVER, SIGNAL = 4.6; EXPRESSED IN HBL100, SIGNAL = 5.2; EXPRESSED IN HELA, SIGNAL = 5.6; EXPRESSED IN HEART, SIGNAL = 4.5; EXPRESSED IN LUNG, SIGNAL = 4.5; EXPRESSED IN BT474, SIGNAL = 4.8; EXPRESSED IN PLACENTA, SIGNAL = 6.1
QQQPPPPQQQQQQQQPPQPPPQQSQPQQQQAPAQGPSAVGGAPPLHTPSTDGCTPPGGKQAGAEGYGPPPVMAMHPPPLQHGGYHPHQHHPHSHPAQQPPPPQPQAQGQAPINNTGF

SEQ ID NO: 34971 - protein, 28 aa, Homo sapiens
  MAP TO AB020860.1; EXPRESSED IN BONE MARROW, SIGNAL = 2.1; EXPRESSED IN LUNG, SIGNAL =   1; EXPRESSED IN BRAIN, SIGNAL = 1.1; EXPRESSED IN FETAL LIVER, SIGNAL = 1.9; EXPRESSED IN ADULT LIVER, SIGNAL = 0.95; EXPRESSED IN PLACENTA, SIGNAL = 1.2; EXPRESSED IN HEART, SIGNAL = 1.5; EXPRESSED IN HELA, SIGNAL = 1.1; EXPRESSED IN HBL100, SIGNAL = 1.1; EXPRESSED IN BT474, SIGNAL = 0.95; EST_HUMAN HIT: AA806969.1, EVALUE 3.00e-09
DGCSFPACLVNQDPEQASTPAGLNSTAK

SEQ ID NO: 34972 - protein, 44 aa, Homo sapiens
  MAP TO AC006977.3; EXPRESSED IN BT474, SIGNAL = 3.3; EXPRESSED IN HBL100, SIGNAL = 3.2; EXPRESSED IN BONE MARROW, SIGNAL = 4.6; EXPRESSED IN LUNG, SIGNAL = 4.2; EXPRESSED IN FETAL LIVER, SIGNAL = 4.7; EXPRESSED IN ADULT LIVER, SIGNAL = 5.3; EXPRESSED IN PLACENTA, SIGNAL = 7.8; EXPRESSED IN HEART, SIGNAL = 4.5; EXPRESSED IN HELA, SIGNAL = 4.5; EXPRESSED IN BRAIN, SIGNAL = 3.5; EST_HUMAN HIT: AI761585.1, EVALUE 4.00e-18; SWISSPROT HIT: P00533, EVALUE 2.00e-20
ILHGAVRFSNNPALCNVESIQWRDIVSSDFLSNMSMDFQNHLGS

SEQ ID NO: 34973 - protein, 72 aa, Homo sapiens
  MAP TO AC007568.1; EXPRESSED IN ADULT LIVER, SIGNAL = 1.9; EXPRESSED IN BT474, SIGNAL = 1.6; EXPRESSED IN FETAL LIVER, SIGNAL = 1.9; EXPRESSED IN PLACENTA, SIGNAL = 2.4; EXPRESSED IN HBL100, SIGNAL = 1.7; EXPRESSED IN HELA, SIGNAL = 2.1; EXPRESSED IN HEART, SIGNAL = 2.4; EXPRESSED IN BRAIN, SIGNAL =   2; EXPRESSED IN BONE MARROW, SIGNAL = 2.7; EXPRESSED IN LUNG, SIGNAL =   2; EST_HUMAN HIT: BE783806.1, EVALUE 1.00e-20; SWISSPROT HIT: Q46929, EVALUE 7.30e+00
KEVFIQERYGRFNLNDPFLALQRDYEAGAGDKEKKPVCTNPLSILEAVMAHCKKMQERMSAQLAAAESRQKK

SEQ ID NO: 34974 - protein, 30 aa, Homo sapiens
  MAP TO AC011457.1; EXPRESSED IN BRAIN, SIGNAL = 6.9; EXPRESSED IN BONE MARROW, SIGNAL = 7.9; EXPRESSED IN LUNG, SIGNAL = 2.5; EXPRESSED IN BT474, SIGNAL = 8.2; EXPRESSED IN FETAL LIVER, SIGNAL =   4; EXPRESSED IN ADULT LIVER, SIGNAL = 2.7; EXPRESSED IN HELA, SIGNAL = 8.2; EXPRESSED IN PLACENTA, SIGNAL =   3; EXPRESSED IN HBL100, SIGNAL =   8; EXPRESSED IN HEART, SIGNAL = 3.6; EST_HUMAN HIT: AW770544.1, EVALUE 5.00e-11
VESGMNSDYMPSHIYYIHRVSLKNDFSDVE

SEQ ID NO: 34975 - protein, 30 aa, Homo sapiens
  MAP TO AC011457.1; EXPRESSED IN BRAIN, SIGNAL = 6.9; EXPRESSED IN BONE MARROW, SIGNAL = 7.9; EXPRESSED IN LUNG, SIGNAL = 2.5; EXPRESSED IN BT474, SIGNAL = 8.2; EXPRESSED IN FETAL LIVER, SIGNAL =   4; EXPRESSED IN ADULT LIVER, SIGNAL = 2.7; EXPRESSED IN HELA, SIGNAL = 8.2; EXPRESSED IN PLACENTA, SIGNAL =   3; EXPRESSED IN HBL100, SIGNAL =   8; EXPRESSED IN HEART, SIGNAL = 3.6; EST_HUMAN HIT: AW770544.1, EVALUE 7.00e-11; SWISSPROT HIT: P52738, EVALUE 2.00e-07
IRHQRSHSSEKPYECSKCGKAYSRSSSLIR

SEQ ID NO: 34976 - protein, 46 aa, Homo sapiens
  MAP TO AC009493.1; EXPRESSED IN PLACENTA, SIGNAL =   2; EXPRESSED IN HEART, SIGNAL =   1; EXPRESSED IN BONE MARROW, SIGNAL = 0.96; EXPRESSED IN LUNG, SIGNAL = 1.3; EXPRESSED IN FETAL LIVER, SIGNAL = 0.92; EST_HUMAN HIT: AV686895.1, EVALUE 5.30e-02; SWISSPROT HIT: P14210, EVALUE 4.00e-22
DLKDYEAWLGIHDVHGRGDEKCKQVLNVSQLVYGPEGSDLVLMKLA

SEQ ID NO: 34977 - protein, 33 aa, Homo sapiens
  MAP TO AC009493.1; EXPRESSED IN PLACENTA, SIGNAL =   2; EXPRESSED IN HEART, SIGNAL =   1; EXPRESSED IN BONE MARROW, SIGNAL = 0.96; EXPRESSED IN LUNG, SIGNAL = 1.3; EXPRESSED IN FETAL LIVER, SIGNAL = 0.92; SWISSPROT HIT: P11042, EVALUE 6.30e+00
LEFMMSTEEEMRNANRFSMFPSWYMALKDQIWF

SEQ ID NO: 34978 - protein, 51 aa, Homo sapiens
  MAP TO AC009507.1; EXPRESSED IN ADULT LIVER, SIGNAL = 3.3; EXPRESSED IN BT474, SIGNAL =   1; EXPRESSED IN FETAL LIVER, SIGNAL = 1.6; EXPRESSED IN PLACENTA, SIGNAL = 4.1; EXPRESSED IN HBL100, SIGNAL = 1.7; EXPRESSED IN HELA, SIGNAL = 2.9; EXPRESSED IN HEART, SIGNAL = 3.4; EXPRESSED IN BRAIN, SIGNAL = 1.6; EXPRESSED IN BONE MARROW, SIGNAL = 2.1; EXPRESSED IN LUNG, SIGNAL = 1.9; EST_HUMAN HIT: AA504795.1, EVALUE 9.00e-03
SFVLNVGGAQSVQVAILTSSLMDSLLCLLVAVFLPLELIPLGQQNAMLQEQ

SEQ ID NO: 34979 - protein, 45 aa, Homo sapiens
  MAP TO AF181898.1; EXPRESSED IN ADULT LIVER, SIGNAL = 1.2; EXPRESSED IN BT474, SIGNAL = 1.3; EXPRESSED IN FETAL LIVER, SIGNAL = 1.9; EXPRESSED IN PLACENTA, SIGNAL = 1.5; EXPRESSED IN HELA, SIGNAL = 1.3; EXPRESSED IN HBL100, SIGNAL = 1.4; EXPRESSED IN HEART, SIGNAL =   2; EXPRESSED IN LUNG, SIGNAL = 1.6; EXPRESSED IN BONE MARROW, SIGNAL = 1.8; EXPRESSED IN BRAIN, SIGNAL = 1.3; EST_HUMAN HIT: AA205247.1, EVALUE 6.00e-07; SWISSPROT HIT: Q01538, EVALUE 1.60e+00
MQSSNHAPRYSPKEAQNLHPHINPHTDVYSNIVHNCPNLEDVLQE

SEQ ID NO: 34980 - protein, 30 aa, Homo sapiens
  MAP TO AF181898.1; EXPRESSED IN ADULT LIVER, SIGNAL = 1.2; EXPRESSED IN BT474, SIGNAL = 1.3; EXPRESSED IN FETAL LIVER, SIGNAL = 1.9; EXPRESSED IN PLACENTA, SIGNAL = 1.5; EXPRESSED IN HELA, SIGNAL = 1.3; EXPRESSED IN HBL100, SIGNAL = 1.4; EXPRESSED IN HEART, SIGNAL =   2; EXPRESSED IN LUNG, SIGNAL = 1.6; EXPRESSED IN BONE MARROW, SIGNAL = 1.8; EXPRESSED IN BRAIN, SIGNAL = 1.3; EST_HUMAN HIT: AA740841.1, EVALUE 6.00e-02
CSPAITPPGIHPKKLKTYIHTSTRTQMCIA

SEQ ID NO: 34981 - protein, 88 aa, Homo sapiens
  MAP TO AC010133.1; EXPRESSED IN LUNG, SIGNAL = 0.93; EXPRESSED IN BRAIN, SIGNAL = 1.1; EXPRESSED IN ADULT LIVER, SIGNAL = 1.2; EXPRESSED IN PLACENTA, SIGNAL = 1.1; EXPRESSED IN HBL100, SIGNAL = 1.1; EXPRESSED IN HELA, SIGNAL = 2.5; EXPRESSED IN BONE MARROW, SIGNAL = 1.4; EXPRESSED IN BT474, SIGNAL = 1.4; EXPRESSED IN FETAL LIVER, SIGNAL = 1.2; EXPRESSED IN HEART, SIGNAL = 1.4; EST_HUMAN HIT: AI220048.1, EVALUE 4.00e-11; SWISSPROT HIT: P38159, EVALUE 2.00e-11
TSHGAPPARGPRMSYGGSTCHAYSNTRDRYGRSWESYSSCGDFHYCDREHVCRKDQRNPPSLGRVLPDPREACGSSSYVASIVDGGES

SEQ ID NO: 34982 - protein, 24 aa, Homo sapiens
  MAP TO AC009958.1; EXPRESSED IN HEART, SIGNAL = 2.3; EXPRESSED IN LUNG, SIGNAL =  18; EXPRESSED IN BRAIN, SIGNAL = 1.4; EXPRESSED IN FETAL LIVER, SIGNAL = 1.3; EXPRESSED IN ADULT LIVER, SIGNAL = 5.1; EXPRESSED IN PLACENTA, SIGNAL = 2.3; EXPRESSED IN HELA, SIGNAL = 1.7; EXPRESSED IN BONE MARROW, SIGNAL =  62; EXPRESSED IN BT474, SIGNAL = 1.4; EXPRESSED IN HBL100, SIGNAL = 1.5; EST_HUMAN HIT: AV697987.1, EVALUE 1.00e-04; SWISSPROT HIT: P04431, EVALUE 9.00e-06
ARCNIQMTQSPSAMSASVGDRVTI

SEQ ID NO: 34983 - protein, 37 aa, Homo sapiens
  MAP TO AF186995.1; EXPRESSED IN HBL100, SIGNAL = 8.3; EXPRESSED IN LUNG, SIGNAL = 9.8; EXPRESSED IN BRAIN, SIGNAL = 8.2; EXPRESSED IN FETAL LIVER, SIGNAL = 8.2; EXPRESSED IN ADULT LIVER, SIGNAL = 8.9; EXPRESSED IN PLACENTA, SIGNAL =  11; EXPRESSED IN HEART, SIGNAL = 9.9; EXPRESSED IN HELA, SIGNAL =  11; EXPRESSED IN BONE MARROW, SIGNAL =  11; EXPRESSED IN BT474, SIGNAL = 6.8; SWISSPROT HIT: P00750, EVALUE 1.00e-17; EST_HUMAN HIT: AA284583.1, EVALUE 2.00e-16
TLVGIISWGLGCGQKDVPGVYTKVTNYLDWIRDNMRP

SEQ ID NO: 34984 - protein, 32 aa, Homo sapiens
  MAP TO AF186995.1; EXPRESSED IN HBL100, SIGNAL = 8.3; EXPRESSED IN LUNG, SIGNAL = 9.8; EXPRESSED IN BRAIN, SIGNAL = 8.2; EXPRESSED IN FETAL LIVER, SIGNAL = 8.2; EXPRESSED IN ADULT LIVER, SIGNAL = 8.9; EXPRESSED IN PLACENTA, SIGNAL =  11; EXPRESSED IN HEART, SIGNAL = 9.9; EXPRESSED IN HELA, SIGNAL =  11; EXPRESSED IN BONE MARROW, SIGNAL =  11; EXPRESSED IN BT474, SIGNAL = 6.8; EST_HUMAN HIT: N40865.1, EVALUE 6.00e-15
DFGGHHQLGPGLWTEGCPGCVHQGYQLPRLDS

SEQ ID NO: 34985 - protein, 41 aa, Homo sapiens
  MAP TO AL031681.13; EXPRESSED IN BONE MARROW, SIGNAL = 1.7; EXPRESSED IN FETAL LIVER, SIGNAL = 1.5; EXPRESSED IN ADULT LIVER, SIGNAL = 1.4; EXPRESSED IN HBL100, SIGNAL = 1.5; EXPRESSED IN HELA, SIGNAL = 1.7; EXPRESSED IN HEART, SIGNAL = 1.7; EXPRESSED IN BRAIN, SIGNAL = 1.4; EXPRESSED IN LUNG, SIGNAL = 1.1; EXPRESSED IN BT474, SIGNAL = 1.4; EXPRESSED IN PLACENTA, SIGNAL = 1.5; EST_HUMAN HIT: AW445040.1, EVALUE 1.00e-08
SVIVENSSGSTSASELLKPMKKRKRREYQSPSEEESEPEAM

SEQ ID NO: 34986 - protein, 79 aa, Homo sapiens
  MAP TO AL080250.11; EXPRESSED IN BT474, SIGNAL = 2.3; EXPRESSED IN HBL100, SIGNAL = 5.8; EXPRESSED IN BONE MARROW, SIGNAL = 1.7; EXPRESSED IN LUNG, SIGNAL = 2.7; EXPRESSED IN ADULT LIVER, SIGNAL = 2.1; EXPRESSED IN FETAL LIVER, SIGNAL = 1.8; EXPRESSED IN PLACENTA, SIGNAL = 1.6; EXPRESSED IN HEART, SIGNAL =   2; EXPRESSED IN HELA, SIGNAL = 2.5; EXPRESSED IN BRAIN, SIGNAL = 1.3; SWISSPROT HIT: Q99715, EVALUE 5.00e-38; EST_HUMAN HIT: AW995196.1, EVALUE 2.00e-14
IKCISECSVSAWTDLVFLVDGSWSVGRNNFKYILDFIAALVSAFDIGEEKTRVGVVQYSSDTRTEFNLNQYYQRDELLA

SEQ ID NO: 34987 - protein, 35 aa, Homo sapiens
  MAP TO AL080250.11; EXPRESSED IN BT474, SIGNAL = 2.3; EXPRESSED IN HBL100, SIGNAL = 5.8; EXPRESSED IN BONE MARROW, SIGNAL = 1.7; EXPRESSED IN LUNG, SIGNAL = 2.7; EXPRESSED IN ADULT LIVER, SIGNAL = 2.1; EXPRESSED IN FETAL LIVER, SIGNAL = 1.8; EXPRESSED IN PLACENTA, SIGNAL = 1.6; EXPRESSED IN HEART, SIGNAL =   2; EXPRESSED IN HELA, SIGNAL = 2.5; EXPRESSED IN BRAIN, SIGNAL = 1.3; EST_HUMAN HIT: AA482518.1, EVALUE 3.90e-02
KISNVFQNALSVPGLIWFSSWMALGVWEEIISSTF

SEQ ID NO: 34988 - protein, 171 aa, Homo sapiens
  MAP TO AL096774.7; EXPRESSED IN BONE MARROW, SIGNAL =  20; EXPRESSED IN LUNG, SIGNAL = 9.7; EXPRESSED IN BT474, SIGNAL =   7; EXPRESSED IN ADULT LIVER, SIGNAL = 4.4; EXPRESSED IN FETAL LIVER, SIGNAL = 3.8; EXPRESSED IN HBL100, SIGNAL = 7.6; EXPRESSED IN HELA, SIGNAL = 5.9; EXPRESSED IN PLACENTA, SIGNAL = 6.6; EXPRESSED IN HEART, SIGNAL = 2.6; EXPRESSED IN BRAIN, SIGNAL = 4.1; SWISSPROT HIT: Q92558, EVALUE 4.10e-01; EST_HUMAN HIT: AW500022.1, EVALUE 2.00e-12
YPVDNQRGSGLAGPKRSSVVSPSHPPPAPPLGSPPGPKPGFAPPPAPPPPPPPMIGIPPPPPPVGFGSPGTPPPPSPPSFPPHPDFAAPPPPPPPPAADYPTLPPPPLSQPTGGAPPPPPPPPPPGPPPPPFTGADGQPAIPPPLSDTTKPKSSLPAVSDARSDLLSAIRQ

SEQ ID NO: 34989 - protein, 77 aa, Homo sapiens
  MAP TO AL096702.3; EXPRESSED IN BT474, SIGNAL = 5.3; EXPRESSED IN FETAL LIVER, SIGNAL = 2.5; EXPRESSED IN HELA, SIGNAL = 3.3; EXPRESSED IN PLACENTA, SIGNAL = 3.7; EXPRESSED IN HBL100, SIGNAL = 3.3; EXPRESSED IN HEART, SIGNAL = 2.9; EXPRESSED IN BONE MARROW, SIGNAL = 3.1; EXPRESSED IN BRAIN, SIGNAL = 2.7; EXPRESSED IN LUNG, SIGNAL = 2.5; EXPRESSED IN ADULT LIVER, SIGNAL = 2.7; EST_HUMAN HIT: BE870023.1, EVALUE 2.00e-41; SWISSPROT HIT: Q9Z2K3, EVALUE 1.00e-05
GQKCSHQDPIESSDSYGDLSDASDLKTPEKQSANGSFSCDMAVPKNKMESDGEKKYPCPECGSFFRSKSYLNKHIQK

SEQ ID NO: 34990 - protein, 39 aa, Homo sapiens
  MAP TO AP000343.1; EXPRESSED IN HEART, SIGNAL = 1.3; EXPRESSED IN LUNG, SIGNAL = 1.4; EXPRESSED IN BRAIN, SIGNAL = 1.3; EXPRESSED IN ADULT LIVER, SIGNAL = 1.2; EXPRESSED IN PLACENTA, SIGNAL = 2.2; EXPRESSED IN HBL100, SIGNAL = 1.5; EXPRESSED IN HELA, SIGNAL = 1.4; EXPRESSED IN BONE MARROW, SIGNAL = 1.3; EXPRESSED IN BT474, SIGNAL = 1.2; EXPRESSED IN FETAL LIVER, SIGNAL = 1.2; EST_HUMAN HIT: BF338795.1, EVALUE 7.00e-07; SWISSPROT HIT: P11274, EVALUE 5.00e-08
FQMVDELEAVPNIPLVPDEELDALKIKISQIKSDIQREK

SEQ ID NO: 34991 - protein, 47 aa, Homo sapiens
  MAP TO AP000347.1; EXPRESSED IN HELA, SIGNAL = 3.9; EXPRESSED IN LUNG, SIGNAL = 2.8; EXPRESSED IN BRAIN, SIGNAL = 1.6; EXPRESSED IN BT474, SIGNAL = 2.7; EXPRESSED IN ADULT LIVER, SIGNAL = 2.6; EXPRESSED IN PLACENTA, SIGNAL = 5.7; EXPRESSED IN HEART, SIGNAL = 1.7; EXPRESSED IN HBL100, SIGNAL = 5.5; EXPRESSED IN BONE MARROW, SIGNAL = 3.9; EXPRESSED IN FETAL LIVER, SIGNAL = 2.4; EST_HUMAN HIT: AI651992.1, EVALUE 1.00e-19; SWISSPROT HIT: P08236, EVALUE 2.00e-13
FVQNTDFDFFSYAGLLWSLLLYTTPPTYIDDVTVTTGVKRDSGEGFW

SEQ ID NO: 34992 - protein, 37 aa, Homo sapiens
  MAP TO AP000347.1; EXPRESSED IN HELA, SIGNAL = 3.9; EXPRESSED IN LUNG, SIGNAL = 2.8; EXPRESSED IN BRAIN, SIGNAL = 1.6; EXPRESSED IN BT474, SIGNAL = 2.7; EXPRESSED IN ADULT LIVER, SIGNAL = 2.6; EXPRESSED IN PLACENTA, SIGNAL = 5.7; EXPRESSED IN HEART, SIGNAL = 1.7; EXPRESSED IN HBL100, SIGNAL = 5.5; EXPRESSED IN BONE MARROW, SIGNAL = 3.9; EXPRESSED IN FETAL LIVER, SIGNAL = 2.4; EST_HUMAN HIT: AI651992.1, EVALUE 7.00e-08
LSRTQTLTSSATQDCCGLCFYTRHPPPTSMTSPSPPA

SEQ ID NO: 34993 - protein, 64 aa, Homo sapiens
  MAP TO AP000350.1; EXPRESSED IN PLACENTA, SIGNAL = 1.7; EXPRESSED IN BONE MARROW, SIGNAL = 2.5; EXPRESSED IN FETAL LIVER, SIGNAL = 1.6; EXPRESSED IN ADULT LIVER, SIGNAL = 1.5; EXPRESSED IN HBL100, SIGNAL = 1.6; EXPRESSED IN HELA, SIGNAL = 1.5; EXPRESSED IN HEART, SIGNAL = 2.3; EXPRESSED IN BRAIN, SIGNAL = 1.6; EXPRESSED IN LUNG, SIGNAL = 1.3; EXPRESSED IN BT474, SIGNAL = 1.7; EST_HUMAN HIT: AI208550.1, EVALUE 1.00e-29; SWISSPROT HIT: P30711, EVALUE 9.00e-05
PMAANYNVFLNSSKLAEWRMRVELNISSGLFREAHDRLMQLADWDFSTLDSMVKENISELLKKS

SEQ ID NO: 34994 - protein, 43 aa, Homo sapiens
  MAP TO AP000350.1; EXPRESSED IN PLACENTA, SIGNAL = 1.7; EXPRESSED IN BONE MARROW, SIGNAL = 2.5; EXPRESSED IN FETAL LIVER, SIGNAL = 1.6; EXPRESSED IN ADULT LIVER, SIGNAL = 1.5; EXPRESSED IN HBL100, SIGNAL = 1.6; EXPRESSED IN HELA, SIGNAL = 1.5; EXPRESSED IN HEART, SIGNAL = 2.3; EXPRESSED IN BRAIN, SIGNAL = 1.6; EXPRESSED IN LUNG, SIGNAL = 1.3; EXPRESSED IN BT474, SIGNAL = 1.7; EST_HUMAN HIT: AI223116.1, EVALUE 1.10e-01
GRMGLRLWERTRVRLVPRLTTSLSSSIHSPWQPTIMSSSTAPS

SEQ ID NO: 34995 - protein, 46 aa, Homo sapiens
  MAP TO AB020862.1; EXPRESSED IN PLACENTA, SIGNAL =   1; EXPRESSED IN BRAIN, SIGNAL = 3.3; EXPRESSED IN BT474, SIGNAL = 1.9; EXPRESSED IN FETAL LIVER, SIGNAL = 1.7; EXPRESSED IN ADULT LIVER, SIGNAL = 1.7; EXPRESSED IN HEART, SIGNAL =   1; EXPRESSED IN HELA, SIGNAL = 1.7; EXPRESSED IN HBL100, SIGNAL = 2.2; EXPRESSED IN LUNG, SIGNAL = 0.89; EXPRESSED IN BONE MARROW, SIGNAL = 2.9
IRRRRRRRSGGAGGRGGRGKTRDGRIRRRRRRGRIRRKRRRRRRKK

SEQ ID NO: 34996 - protein, 60 aa, Homo sapiens
  MAP TO AC005488.2; EXPRESSED IN BT474, SIGNAL = 5.9; EXPRESSED IN FETAL LIVER, SIGNAL = 1.6; EXPRESSED IN HELA, SIGNAL = 3.4; EXPRESSED IN PLACENTA, SIGNAL = 2.8; EXPRESSED IN HBL100, SIGNAL = 3.3; EXPRESSED IN HEART, SIGNAL = 0.98; EXPRESSED IN BONE MARROW, SIGNAL = 2.7; EXPRESSED IN BRAIN, SIGNAL = 2.7; EXPRESSED IN LUNG, SIGNAL = 2.6; EXPRESSED IN ADULT LIVER, SIGNAL = 4.4; EST_HUMAN HIT: AA770647.1, EVALUE 3.00e-29; SWISSPROT HIT: P54278, EVALUE 2.00e-27
VTISTCHVSAKVGTRLVFDHDGKIIQKTPYPHPRGTTVSVKQLFSTLPVRHKEFQRNIKK

SEQ ID NO: 34997 - protein, 39 aa, Homo sapiens
  MAP TO AC005488.2; EXPRESSED IN BT474, SIGNAL = 5.9; EXPRESSED IN FETAL LIVER, SIGNAL = 1.6; EXPRESSED IN HELA, SIGNAL = 3.4; EXPRESSED IN PLACENTA, SIGNAL = 2.8; EXPRESSED IN HBL100, SIGNAL = 3.3; EXPRESSED IN HEART, SIGNAL = 0.98; EXPRESSED IN BONE MARROW, SIGNAL = 2.7; EXPRESSED IN BRAIN, SIGNAL = 2.7; EXPRESSED IN LUNG, SIGNAL = 2.6; EXPRESSED IN ADULT LIVER, SIGNAL = 4.4; EST_HUMAN HIT: AA418026.1, EVALUE 2.00e-17
SPFLPATYRRRLGLDWCLITMGKSSRKPPTPTPEGPQSA

SEQ ID NO: 34998 - protein, 41 aa, Homo sapiens
  MAP TO AC007898.1; EXPRESSED IN ADULT LIVER, SIGNAL = 1.7; EXPRESSED IN BT474, SIGNAL = 2.5; EXPRESSED IN FETAL LIVER, SIGNAL =   2; EXPRESSED IN PLACENTA, SIGNAL = 1.9; EXPRESSED IN HELA, SIGNAL = 1.4; EXPRESSED IN HBL100, SIGNAL =   2; EXPRESSED IN HEART, SIGNAL = 1.5; EXPRESSED IN BONE MARROW, SIGNAL = 2.2; EXPRESSED IN LUNG, SIGNAL = 1.1; EXPRESSED IN BRAIN, SIGNAL =   2
  unsure 4
  unsure 39
LCPXPETARPGGMGHRQVQAPGPHRAGAGRMGRERAAAXVG

SEQ ID NO: 34999 - protein, 39 aa, Homo sapiens
  MAP TO AC008015.4; EXPRESSED IN HEART, SIGNAL =   3; EXPRESSED IN LUNG, SIGNAL = 2.5; EXPRESSED IN BRAIN, SIGNAL = 3.5; EXPRESSED IN ADULT LIVER, SIGNAL = 2.8; EXPRESSED IN PLACENTA, SIGNAL = 3.2; EXPRESSED IN HBL100, SIGNAL = 2.2; EXPRESSED IN HELA, SIGNAL = 3.8; EXPRESSED IN BONE MARROW, SIGNAL = 2.9; EXPRESSED IN BT474, SIGNAL = 2.3; EXPRESSED IN FETAL LIVER, SIGNAL = 3.3; EST_HUMAN HIT: BF185374.1, EVALUE 5.50e+00; SWISSPROT HIT: P12959, EVALUE 1.20e+00
MSSRVPSCIPLLAPTPTSNRVRLSRSSILSGKGGAMQFC

SEQ ID NO: 35000 - protein, 166 aa, Homo sapiens
  MAP TO AC007728.1; EXPRESSED IN LUNG, SIGNAL = 0.93; EXPRESSED IN BONE MARROW, SIGNAL = 1.2; EXPRESSED IN BRAIN, SIGNAL = 1.2; EXPRESSED IN ADULT LIVER, SIGNAL = 0.92; EXPRESSED IN BT474, SIGNAL = 1.2; EXPRESSED IN HBL100, SIGNAL =   1; EXPRESSED IN HEART, SIGNAL = 0.87; EST_HUMAN HIT: AW845499.1, EVALUE 3.00e-28; SWISSPROT HIT: P43527, EVALUE 4.40e-01
SPALTLFSSPGCEMCSQEAFQAQRSQLVELLVSGSLEGFESVLDWLLSWEVLSWEDYEGFHLLGQPLSHLARRLLDTVWNKGTWACQKLIAAAQEAQADSQSPKLHGCWDPHSLHPARDLQSHRPAIVRRLHSHVENMLDLAWERGFVSQYECDEIRLPIFTPSQR

SEQ ID NO: 35001 - protein, 33 aa, Homo sapiens
  MAP TO AC006369.3; EXPRESSED IN FETAL LIVER, SIGNAL = 1.2; EXPRESSED IN ADULT LIVER, SIGNAL = 2.1; EXPRESSED IN HELA, SIGNAL = 1.5; EXPRESSED IN BRAIN, SIGNAL = 1.8; EXPRESSED IN LUNG, SIGNAL = 1.1; EXPRESSED IN BONE MARROW, SIGNAL =   2; EXPRESSED IN BT474, SIGNAL = 1.2; EXPRESSED IN PLACENTA, SIGNAL = 1.9; EXPRESSED IN HEART, SIGNAL = 1.2; EXPRESSED IN HBL100, SIGNAL = 1.7; EST_HUMAN HIT: R70266.1, EVALUE 5.00e-09
TSPSCHLVKKVSCFLFAFYHDCKFPEGSPAMLN

SEQ ID NO: 35002 - protein, 45 aa, Homo sapiens
  MAP TO AC006967.2; EXPRESSED IN BONE MARROW, SIGNAL = 2.1; EXPRESSED IN FETAL LIVER, SIGNAL = 1.4; EXPRESSED IN HBL100, SIGNAL = 1.6; EXPRESSED IN HELA, SIGNAL = 1.9; EXPRESSED IN HEART, SIGNAL = 2.2; EXPRESSED IN BRAIN, SIGNAL = 1.8; EXPRESSED IN LUNG, SIGNAL = 1.2; EXPRESSED IN BT474, SIGNAL = 1.2; EXPRESSED IN ADULT LIVER, SIGNAL =   2; EXPRESSED IN PLACENTA, SIGNAL =   2; EST_HUMAN HIT: BF030578.1, EVALUE 9.20e-02; SWISSPROT HIT: P41479, EVALUE 9.20e-01
GPPTICTPHPSPTCIEPSPRIVPEPVALRPHLSSLSPHQHLPELL

SEQ ID NO: 35003 - protein, 24 aa, Homo sapiens
  MAP TO AC009401.1; EXPRESSED IN BONE MARROW, SIGNAL = 4.5; EXPRESSED IN HBL100, SIGNAL = 2.3; EXPRESSED IN HELA, SIGNAL = 3.1; EXPRESSED IN LUNG, SIGNAL = 2.4; EXPRESSED IN BRAIN, SIGNAL = 3.4; EXPRESSED IN BT474, SIGNAL = 2.1; EXPRESSED IN ADULT LIVER, SIGNAL = 4.7; EXPRESSED IN FETAL LIVER, SIGNAL =   2; EXPRESSED IN PLACENTA, SIGNAL = 3.6; EXPRESSED IN HEART, SIGNAL = 3.3; EST_HUMAN HIT: BF589937.1, EVALUE 4.00e-07
VSFLPPSEEVAFLPFAFQHDCKAS

SEQ ID NO: 35004 - protein, 26 aa, Homo sapiens
  MAP TO AC009401.1; EXPRESSED IN BONE MARROW, SIGNAL = 4.5; EXPRESSED IN HBL100, SIGNAL = 2.3; EXPRESSED IN HELA, SIGNAL = 3.1; EXPRESSED IN LUNG, SIGNAL = 2.4; EXPRESSED IN BRAIN, SIGNAL = 3.4; EXPRESSED IN BT474, SIGNAL = 2.1; EXPRESSED IN ADULT LIVER, SIGNAL = 4.7; EXPRESSED IN FETAL LIVER, SIGNAL =   2; EXPRESSED IN PLACENTA, SIGNAL = 3.6; EXPRESSED IN HEART, SIGNAL = 3.3; EST_HUMAN HIT: BF589937.1, EVALUE 2.00e-08
QEALQSCWKAKGRKATSSLGGRKETC

SEQ ID NO: 35005 - protein, 57 aa, Homo sapiens; identical to SEQ ID NO: 34613
  MAP TO AC009414.2; EXPRESSED IN PLACENTA, SIGNAL =  13; EXPRESSED IN HBL100, SIGNAL = 3.6; EXPRESSED IN HEART, SIGNAL =   1; EXPRESSED IN BRAIN, SIGNAL = 1.2; EXPRESSED IN BONE MARROW, SIGNAL = 1.1; EXPRESSED IN LUNG, SIGNAL = 1.8; EXPRESSED IN BT474, SIGNAL = 1.3; EXPRESSED IN ADULT LIVER, SIGNAL =   2; EXPRESSED IN FETAL LIVER, SIGNAL = 1.2; EXPRESSED IN HELA, SIGNAL = 2.4; SWISSPROT HIT: P25391, EVALUE 2.70e+00; EST_HUMAN HIT: AA057257.1, EVALUE 5.40e+00

SEQ ID NO: 35006 - protein, 31 aa, Homo sapiens
  MAP TO AC009414.2; EXPRESSED IN PLACENTA, SIGNAL =  13; EXPRESSED IN HBL100, SIGNAL = 3.6; EXPRESSED IN HEART, SIGNAL =   1; EXPRESSED IN BRAIN, SIGNAL = 1.2; EXPRESSED IN BONE MARROW, SIGNAL = 1.1; EXPRESSED IN LUNG, SIGNAL = 1.8; EXPRESSED IN BT474, SIGNAL = 1.3; EXPRESSED IN ADULT LIVER, SIGNAL =   2; EXPRESSED IN FETAL LIVER, SIGNAL = 1.2; EXPRESSED IN HELA, SIGNAL = 2.4
WLLIVLQMRTGLMTNCLVLNHAMKTLLLAAI

SEQ ID NO: 35007 - protein, 29 aa, Homo sapiens
  MAP TO AC009706.2; EXPRESSED IN LUNG, SIGNAL = 1.9; EXPRESSED IN ADULT LIVER, SIGNAL = 4.3; EXPRESSED IN BT474, SIGNAL = 1.4; EXPRESSED IN FETAL LIVER, SIGNAL = 1.5; EXPRESSED IN HELA, SIGNAL = 1.4; EXPRESSED IN PLACENTA, SIGNAL = 4.9; EXPRESSED IN HBL100, SIGNAL = 1.8; EXPRESSED IN HEART, SIGNAL = 2.1; EXPRESSED IN BONE MARROW, SIGNAL = 1.7; EXPRESSED IN BRAIN, SIGNAL = 1.7; EST_HUMAN HIT: AI021934.1, EVALUE 2.00e-05
YGILCEGQTLRTQLECFAMLCETQIFRPS

SEQ ID NO: 35008 - protein, 44 aa, Homo sapiens
  MAP TO AC010881.1; EXPRESSED IN BT474, SIGNAL = 2.2; EXPRESSED IN HEART, SIGNAL = 2.2; EXPRESSED IN LUNG, SIGNAL = 1.2; EXPRESSED IN BRAIN, SIGNAL = 2.2; EXPRESSED IN FETAL LIVER, SIGNAL = 2.7; EXPRESSED IN ADULT LIVER, SIGNAL =   2; EXPRESSED IN PLACENTA, SIGNAL = 2.7; EXPRESSED IN HELA, SIGNAL = 2.3; EXPRESSED IN HBL100, SIGNAL =   2; EXPRESSED IN BONE MARROW, SIGNAL = 2.4; SWISSPROT HIT: Q60002, EVALUE 2.70e+00
TTCQLLRIAADIPYWLYENWQMLGPAECWPLDSLAVQPALMLAP

SEQ ID NO: 35009 - protein, 54 aa, Homo sapiens
  MAP TO AC010889.1; EXPRESSED IN BONE MARROW, SIGNAL = 2.6; EXPRESSED IN FETAL LIVER, SIGNAL = 2.3; EXPRESSED IN HELA, SIGNAL = 2.9; EXPRESSED IN BRAIN, SIGNAL = 1.9; EXPRESSED IN LUNG, SIGNAL = 2.1; EXPRESSED IN BT474, SIGNAL = 2.8; EXPRESSED IN ADULT LIVER, SIGNAL = 2.1; EXPRESSED IN PLACENTA, SIGNAL = 3.3; EXPRESSED IN HEART, SIGNAL = 1.8; EXPRESSED IN HBL100, SIGNAL = 2.6; EST_HUMAN HIT: BE697077.1, EVALUE 1.00e-23; SWISSPROT HIT: gi10720300, EVALUE 2.00e-26
GEPKTWYGVPSLAAEHLEEVMKMLTPELFDSQPDLLHQLVTLMNPNTLMSHGVP

SEQ ID NO: 35010 - protein, 63 aa, Homo sapiens
  MAP TO AC010104.1; EXPRESSED IN HEART, SIGNAL = 1.5; EST_HUMAN HIT: AI684241.1, EVALUE 7.60e-01; SWISSPROT HIT: Q06561, EVALUE 5.10e-01
NQAIKQKEADNLSWNRRFPQIGGMGPQCEQTPPRSFPAFQKPCVGCWAFHLSNDSKHMYSDTS

SEQ ID NO: 35011 - protein, 62 aa, Homo sapiens
  MAP TO AC010130.2; EXPRESSED IN BT474, SIGNAL = 1.2; EXPRESSED IN HBL100, SIGNAL =   1; EXPRESSED IN HEART, SIGNAL = 0.87; EXPRESSED IN LUNG, SIGNAL = 1.2; EXPRESSED IN BRAIN, SIGNAL = 1.5; EXPRESSED IN FETAL LIVER, SIGNAL = 0.9; EXPRESSED IN PLACENTA, SIGNAL = 1.6; EXPRESSED IN BONE MARROW, SIGNAL = 1.1; SWISSPROT HIT: P36197, EVALUE 9.00e-11; EST_HUMAN HIT: BE830818.1, EVALUE 4.00e-30
KNANCTSDFEEYFAKRKLEERDGHAVSIEEYLQRSDTAIIYPEAPEELSRLGTPEANGQEEN

SEQ ID NO: 35012 - protein, 58 aa, Homo sapiens
  MAP TO AC010130.2; EXPRESSED IN BT474, SIGNAL = 1.2; EXPRESSED IN HBL100, SIGNAL =   1; EXPRESSED IN HEART, SIGNAL = 0.87; EXPRESSED IN LUNG, SIGNAL = 1.2; EXPRESSED IN BRAIN, SIGNAL = 1.5; EXPRESSED IN FETAL LIVER, SIGNAL = 0.9; EXPRESSED IN PLACENTA, SIGNAL = 1.6; EXPRESSED IN BONE MARROW, SIGNAL = 1.1; EST_HUMAN HIT: AL118580.1, EVALUE 3.00e-25
ILRNTLPKENWRNAMVMQSASRSTFSAVTQPLFTQKPLRSCLALARQRPMGKKKMVRL

SEQ ID NO: 35013 - protein, 34 aa, Homo sapiens
  MAP TO AC010879.1; EXPRESSED IN FETAL LIVER, SIGNAL = 0.99; EXPRESSED IN BT474, SIGNAL = 1.3; EXPRESSED IN PLACENTA, SIGNAL = 1.7; EXPRESSED IN HBL100, SIGNAL = 1.2; EXPRESSED IN HELA, SIGNAL = 1.1; EXPRESSED IN HEART, SIGNAL = 0.95; EXPRESSED IN BONE MARROW, SIGNAL = 1.3; EXPRESSED IN BRAIN, SIGNAL = 1.4
KKRKKEEKVGEKESKGKGKRRRKRRRSRRRKRRN

SEQ ID NO: 35014 - protein, 54 aa, Homo sapiens
  MAP TO AC010092.1; EXPRESSED IN BT474, SIGNAL = 4.8; EXPRESSED IN HBL100, SIGNAL = 4.8; EXPRESSED IN BONE MARROW, SIGNAL = 4.1; EXPRESSED IN LUNG, SIGNAL = 3.9; EXPRESSED IN ADULT LIVER, SIGNAL = 3.8; EXPRESSED IN FETAL LIVER, SIGNAL = 4.6; EXPRESSED IN PLACENTA, SIGNAL = 6.8; EXPRESSED IN HEART, SIGNAL = 4.2; EXPRESSED IN HELA, SIGNAL = 5.7; EXPRESSED IN BRAIN, SIGNAL = 3.1; EST_HUMAN HIT: BE173552.1, EVALUE 3.00e-25; SWISSPROT HIT: P06915, EVALUE 4.00e-01
REDIERQRKLLAKRKPPTANNSQAPSTNSEPKQRKNKAVNGAENDPFVRPNLPQ

SEQ ID NO: 35015 - protein, 89 aa, Homo sapiens
  MAP TO AC010885.1; EXPRESSED IN BRAIN, SIGNAL = 1.7; EXPRESSED IN BONE MARROW, SIGNAL = 1.8; EXPRESSED IN LUNG, SIGNAL = 1.2; EXPRESSED IN BT474, SIGNAL = 1.8; EXPRESSED IN FETAL LIVER, SIGNAL = 1.4; EXPRESSED IN ADULT LIVER, SIGNAL = 1.3; EXPRESSED IN HBL100, SIGNAL = 1.6; EXPRESSED IN HELA, SIGNAL = 1.6; EXPRESSED IN PLACENTA, SIGNAL = 1.8; EXPRESSED IN HEART, SIGNAL = 1.5; EST_HUMAN HIT: BF331317.1, EVALUE 1.10e+00; SWISSPROT HIT: P53719, EVALUE 3.00e+00
CLVASQLELLYITFHFHKDILYAGLPYVAFVSSSCQAGPASPAVPSTSAVHFPPAAVTDNFQVKSYKWKLDPQLELKRSSLELLPQSVP

SEQ ID NO: 35016 - protein, 65 aa, Homo sapiens
  MAP TO AC010102.1; EXPRESSED IN PLACENTA, SIGNAL = 5.4; EXPRESSED IN BRAIN, SIGNAL = 1.6; EXPRESSED IN FETAL LIVER, SIGNAL = 2.7; EXPRESSED IN HEART, SIGNAL = 1.5; EXPRESSED IN HELA, SIGNAL = 5.7; EXPRESSED IN HBL100, SIGNAL = 4.6; EXPRESSED IN LUNG, SIGNAL = 6.1; EXPRESSED IN BONE MARROW, SIGNAL = 2.5; EXPRESSED IN ADULT LIVER, SIGNAL = 2.9; EXPRESSED IN BT474, SIGNAL = 2.3; EST_HUMAN HIT: BF689625.1, EVALUE 1.00e-05
TSRGRERGPPPSCPCRTSSTAVTLAPVKGVMTCPCGTTPTSTASLTRPATTTRPRTRVGCCPCPH

SEQ ID NO: 35017 - protein, 70 aa, Homo sapiens
  MAP TO AC010925.1; EXPRESSED IN PLACENTA, SIGNAL = 3.7; EXPRESSED IN BRAIN, SIGNAL =   1; EXPRESSED IN FETAL LIVER, SIGNAL = 1.3; EXPRESSED IN HEART, SIGNAL = 6.3; EXPRESSED IN HELA, SIGNAL = 1.7; EXPRESSED IN HBL100, SIGNAL = 3.1; EXPRESSED IN LUNG, SIGNAL = 0.89; EXPRESSED IN ADULT LIVER, SIGNAL = 1.2; EST_HUMAN HIT: AA913929.1, EVALUE 2.00e-37; SWISSPROT HIT: Q04652, EVALUE 6.00e-13
LYAVGGRDGSSCLKSVECFDPHTNKWTLCAQMSKRRGGVGVTTWNGLLYAIGGHDAPASNLTSRLSDCVE

SEQ ID NO: 35018 - protein, 42 aa, Homo sapiens
  MAP TO AL049553.14; EXPRESSED IN HELA, SIGNAL = 2.3; EXPRESSED IN HEART, SIGNAL = 2.4; EXPRESSED IN BRAIN, SIGNAL = 2.6; EXPRESSED IN BONE MARROW, SIGNAL = 2.8; EXPRESSED IN LUNG, SIGNAL = 1.2; EXPRESSED IN ADULT LIVER, SIGNAL = 1.9; EXPRESSED IN BT474, SIGNAL = 2.4; EXPRESSED IN FETAL LIVER, SIGNAL =   3; EXPRESSED IN PLACENTA, SIGNAL = 2.5; EXPRESSED IN HBL100, SIGNAL = 2.4
SMSLDDDDDDDDDDDDDDDDDDNDDDDGRKTYRIPPGSDLSA

SEQ ID NO: 35019 - protein, 32 aa, Homo sapiens
  MAP TO AC011302.1; EXPRESSED IN HELA, SIGNAL = 9.2; EXPRESSED IN PLACENTA, SIGNAL = 8.5; EXPRESSED IN HBL100, SIGNAL = 7.1; EXPRESSED IN HEART, SIGNAL = 7.4; EXPRESSED IN BRAIN, SIGNAL = 6.8; EXPRESSED IN BONE MARROW, SIGNAL =   9; EXPRESSED IN LUNG, SIGNAL = 5.5; EXPRESSED IN BT474, SIGNAL = 6.4; EXPRESSED IN ADULT LIVER, SIGNAL = 7.3; EXPRESSED IN FETAL LIVER, SIGNAL = 9.2
VTLQLINRMMMMISMMMVMMVMVVMMMKMIVM

SEQ ID NO: 35020 - protein, 19 aa, Homo sapiens
  MAP TO AL049823.13; EXPRESSED IN BONE MARROW, SIGNAL = 0.97; EXPRESSED IN BRAIN, SIGNAL = 0.93; EXPRESSED IN FETAL LIVER, SIGNAL = 0.91; EXPRESSED IN PLACENTA, SIGNAL = 1.3; EXPRESSED IN HELA, SIGNAL = 1.1; EXPRESSED IN HBL100, SIGNAL = 1.4; EXPRESSED IN HEART, SIGNAL = 1.3
PSFLGILARKYRDGYSGLW

SEQ ID NO: 35021 - protein, 69 aa, Homo sapiens
  MAP TO Z97832.10; EXPRESSED IN BRAIN, SIGNAL = 0.97; EXPRESSED IN BONE MARROW, SIGNAL = 1.1; EXPRESSED IN FETAL LIVER, SIGNAL = 1.5; EXPRESSED IN BT474, SIGNAL = 1.1; EXPRESSED IN ADULT LIVER, SIGNAL = 1.2; EXPRESSED IN HELA, SIGNAL = 0.92; EXPRESSED IN PLACENTA, SIGNAL =   1; EXPRESSED IN HBL100, SIGNAL = 1.2; EXPRESSED IN HEART, SIGNAL = 1.1; EST_HUMAN HIT: BF371459.1, EVALUE 1.00e-08; SWISSPROT HIT: P25723, EVALUE 6.00e-08
VDECSINRGGCRFGCINTPGSYQCTCPAGQGRLHWNGKDCTGGQCPLLAKDDTAISGSSWGSGKHRVSH

SEQ ID NO: 35022 - protein, 40 aa, Homo sapiens
  MAP TO Z97832.10; EXPRESSED IN BRAIN, SIGNAL = 0.97; EXPRESSED IN BONE MARROW, SIGNAL = 1.1; EXPRESSED IN FETAL LIVER, SIGNAL = 1.5; EXPRESSED IN BT474, SIGNAL = 1.1; EXPRESSED IN ADULT LIVER, SIGNAL = 1.2; EXPRESSED IN HELA, SIGNAL = 0.92; EXPRESSED IN PLACENTA, SIGNAL =   1; EXPRESSED IN HBL100, SIGNAL = 1.2; EXPRESSED IN HEART, SIGNAL = 1.1; EST_HUMAN HIT: BE538650.1, EVALUE 2.40e+00
PLWLHQHSWQLPVYLPSRPGSAALEWQRLHRWAVPSAGQR

SEQ ID NO: 35023 - protein, 40 aa, Homo sapiens
  MAP TO AL031772.4; EXPRESSED IN PLACENTA, SIGNAL = 1.2; EXPRESSED IN HELA, SIGNAL = 1.1; EXPRESSED IN HBL100, SIGNAL = 1.2; EXPRESSED IN HEART, SIGNAL = 1.4; EXPRESSED IN BONE MARROW, SIGNAL = 1.2; EXPRESSED IN BRAIN, SIGNAL = 1.1; EXPRESSED IN FETAL LIVER, SIGNAL = 0.94; EXPRESSED IN ADULT LIVER, SIGNAL = 1.2; SWISSPROT HIT: P75602, EVALUE 3.70e+00; EST_HUMAN HIT: BE796138.1, EVALUE 7.20e+00
HWSFTKPGPSGAGNTKMSKRLPLLSRQLVGIMKSPHDEGL

SEQ ID NO: 35024 - protein, 41 aa, Homo sapiens
  MAP TO AL078590.5; EXPRESSED IN BONE MARROW, SIGNAL =   2; EXPRESSED IN BT474, SIGNAL = 1.2; EXPRESSED IN HBL100, SIGNAL = 1.4; EXPRESSED IN HEART, SIGNAL = 1.4; EXPRESSED IN LUNG, SIGNAL =   1; EXPRESSED IN BRAIN, SIGNAL = 1.3; EXPRESSED IN ADULT LIVER, SIGNAL = 1.2; EXPRESSED IN FETAL LIVER, SIGNAL = 1.5; EXPRESSED IN PLACENTA, SIGNAL = 1.2; EXPRESSED IN HELA, SIGNAL = 2.2; EST_HUMAN HIT: BE047766.1, EVALUE 1.60e+00
QIKRVYVEIHMKANLRENQEQKTKCFWVLVSLGLELYWIQD

SEQ ID NO: 35025 - protein, 39 aa, Homo sapiens
  MAP TO AL117694.1; EXPRESSED IN PLACENTA, SIGNAL = 4.3; EXPRESSED IN BONE MARROW, SIGNAL =   4; EXPRESSED IN FETAL LIVER, SIGNAL = 2.8; EXPRESSED IN HELA, SIGNAL = 3.9; EXPRESSED IN HBL100, SIGNAL =  14; EXPRESSED IN BRAIN, SIGNAL = 2.8; EXPRESSED IN LUNG, SIGNAL = 3.2; EXPRESSED IN BT474, SIGNAL = 3.8; EXPRESSED IN ADULT LIVER, SIGNAL = 2.7; EXPRESSED IN HEART, SIGNAL = 2.5; EST_HUMAN HIT: BF204345.1, EVALUE 2.00e-14; SWISSPROT HIT: Q99001, EVALUE 2.00e-15
ERLAKPERGKMRVHKISNVNKALDFIASKGVKLVSIGAE

SEQ ID NO: 35026 - protein, 54 aa, Homo sapiens
  MAP TO AL035685.13; EXPRESSED IN BT474, SIGNAL = 1.1; EXPRESSED IN HEART, SIGNAL = 1.5; EXPRESSED IN BONE MARROW, SIGNAL = 1.7; EXPRESSED IN LUNG, SIGNAL = 0.91; EXPRESSED IN ADULT LIVER, SIGNAL = 1.3; EXPRESSED IN FETAL LIVER, SIGNAL = 1.4; EXPRESSED IN PLACENTA, SIGNAL = 1.1; EXPRESSED IN HELA, SIGNAL = 1.2; EXPRESSED IN HBL100, SIGNAL = 1.3; EXPRESSED IN BRAIN, SIGNAL = 1.5; EST_HUMAN HIT: AW897230.1, EVALUE 4.00e-24
NKLLHFPTFCCQPISRAGKPQALGTFFCPLPDSVCLSLDDGAVRSSRCPPGAWQ

SEQ ID NO: 35027 - protein, 76 aa, Homo sapiens
  MAP TO AL109897.6; EXPRESSED IN PLACENTA, SIGNAL = 4.8; EXPRESSED IN BT474, SIGNAL = 2.8; EXPRESSED IN HEART, SIGNAL = 2.5; EXPRESSED IN HELA, SIGNAL =   6; EXPRESSED IN HBL100, SIGNAL = 4.3; EXPRESSED IN BRAIN, SIGNAL = 2.7; EXPRESSED IN LUNG, SIGNAL =   3; EXPRESSED IN BONE MARROW, SIGNAL = 4.5; EXPRESSED IN ADULT LIVER, SIGNAL = 4.8; EXPRESSED IN FETAL LIVER, SIGNAL = 2.9; SWISSPROT HIT: O13711, EVALUE 8.50e+00; EST_HUMAN HIT: AV708042.1, EVALUE 1.00e-09
MPSKSQGRGSGTPGARLVLVNPLWLSWYPGCQTKSPLLFPFLSLFRGSLSPWPPQLGMCWVIPEASIALSLTCDPW

SEQ ID NO: 35028 - protein, 36 aa, Homo sapiens
  MAP TO AL035415.20; EXPRESSED IN HBL100, SIGNAL = 2.5; EXPRESSED IN BRAIN, SIGNAL = 1.2; EXPRESSED IN BONE MARROW, SIGNAL = 1.3; EXPRESSED IN ADULT LIVER, SIGNAL = 1.5; EXPRESSED IN BT474, SIGNAL = 1.4; EXPRESSED IN FETAL LIVER, SIGNAL = 1.1; EXPRESSED IN HELA, SIGNAL = 1.3; EXPRESSED IN PLACENTA, SIGNAL = 1.2; EXPRESSED IN HEART, SIGNAL = 1.1; EST_HUMAN HIT: AA704971.1, EVALUE 8.00e-15
HRLVLINGVSEMSVHLICIGQNGPVPLLHMATAWLN

SEQ ID NO: 35029 - protein, 20 aa, Homo sapiens
  MAP TO AL035415.20; EXPRESSED IN HBL100, SIGNAL = 2.5; EXPRESSED IN BRAIN, SIGNAL = 1.2; EXPRESSED IN BONE MARROW, SIGNAL = 1.3; EXPRESSED IN ADULT LIVER, SIGNAL = 1.5; EXPRESSED IN BT474, SIGNAL = 1.4; EXPRESSED IN FETAL LIVER, SIGNAL = 1.1; EXPRESSED IN HELA, SIGNAL = 1.3; EXPRESSED IN PLACENTA, SIGNAL = 1.2; EXPRESSED IN HEART, SIGNAL = 1.1; EST_HUMAN HIT: AA704971.1, EVALUE 1.00e-05
HLAMQWPYAGVGQDHSAQYR

SEQ ID NO: 35030 - protein, 59 aa, Homo sapiens
  MAP TO AL050349.8; EXPRESSED IN HELA, SIGNAL = 1.1; EXPRESSED IN PLACENTA, SIGNAL = 1.3; EXPRESSED IN HBL100, SIGNAL = 1.2; EXPRESSED IN HEART, SIGNAL = 1.4; EXPRESSED IN BRAIN, SIGNAL = 1.1; EXPRESSED IN BONE MARROW, SIGNAL = 1.3; EXPRESSED IN ADULT LIVER, SIGNAL = 1.3; EXPRESSED IN BT474, SIGNAL = 1.1; EXPRESSED IN FETAL LIVER, SIGNAL =   1; EST_HUMAN HIT: AI806897.1, EVALUE 1.40e+00; SWISSPROT HIT: Q91661, EVALUE 3.40e+00
GGDTVMNVTITSYFMDLTVSGDAERFSKPTRTIQLSSTRSFSCFPTSLLPSPSNQLPKL

SEQ ID NO: 35031 - protein, 82 aa, Homo sapiens
  MAP TO AC011499.1; EXPRESSED IN FETAL LIVER, SIGNAL = 1.4; EXPRESSED IN HEART, SIGNAL = 1.1; EXPRESSED IN PLACENTA, SIGNAL = 1.1; EST_HUMAN HIT: BE090991.1, EVALUE 1.70e+00
GRDLSALVQGVSNEDGMWKLDLGSSGSGAVSRGRTGKMRRGSNNRSGVIGPCSHSGLCDAGMIAKEQASLHVQPPGQNAGVE

SEQ ID NO: 35032 - protein, 58 aa, Homo sapiens
  MAP TO AL096765.4; EXPRESSED IN BRAIN, SIGNAL = 2.6; EXPRESSED IN LUNG, SIGNAL = 2.5; EXPRESSED IN HEART, SIGNAL = 3.4; EXPRESSED IN BONE MARROW, SIGNAL = 4.2; EXPRESSED IN ADULT LIVER, SIGNAL = 2.9; EXPRESSED IN BT474, SIGNAL =   2; EXPRESSED IN FETAL LIVER, SIGNAL = 5.1; EXPRESSED IN HELA, SIGNAL = 3.4; EXPRESSED IN PLACENTA, SIGNAL = 3.2; EXPRESSED IN HBL100, SIGNAL = 6.4; SWISSPROT HIT: Q09472, EVALUE 4.00e-18; EST_HUMAN HIT: BE926785.1, EVALUE 5.00e-17
AEYYHLLAEKIYKIQKELEEKRRTRLQKQNMLPNAAGMVPVSMNPGPNMGQPQPGMTS

SEQ ID NO: 35033 - protein, 42 aa, Homo sapiens
  MAP TO AP000494.1; EXPRESSED IN ADULT LIVER, SIGNAL = 1.7; EXPRESSED IN FETAL LIVER, SIGNAL = 1.4; EXPRESSED IN BT474, SIGNAL = 1.1; EXPRESSED IN HELA, SIGNAL = 1.4; EXPRESSED IN PLACENTA, SIGNAL = 1.6; EXPRESSED IN HEART, SIGNAL = 1.3; EXPRESSED IN HBL100, SIGNAL = 1.1; EXPRESSED IN BRAIN, SIGNAL = 1.7; EXPRESSED IN LUNG, SIGNAL = 1.1; EXPRESSED IN BONE MARROW, SIGNAL = 1.8; EST_HUMAN HIT: AI033580.1, EVALUE 3.00e-04
IAVQRTVPQTCSFRVNCCSPVCRCFLQSIVLRLLFLDPRSQT

SEQ ID NO: 35034 - protein, 21 aa, Homo sapiens
  MAP TO AL079351.1; EXPRESSED IN HELA, SIGNAL = 1.3; EXPRESSED IN PLACENTA, SIGNAL = 1.3; EXPRESSED IN HEART, SIGNAL = 1.2; EXPRESSED IN HBL100, SIGNAL = 1.1; EXPRESSED IN BRAIN, SIGNAL = 1.2; EXPRESSED IN BONE MARROW, SIGNAL = 1.5; EXPRESSED IN ADULT LIVER, SIGNAL = 1.2; EXPRESSED IN BT474, SIGNAL = 1.4; EXPRESSED IN FETAL LIVER, SIGNAL = 0.92
GVGGVETPLDRISICAGDENS

SEQ ID NO: 35035 - protein, 72 aa, Homo sapiens
  MAP TO AL110122.1; EXPRESSED IN BONE MARROW, SIGNAL = 2.5; EXPRESSED IN FETAL LIVER, SIGNAL = 4.1; EXPRESSED IN ADULT LIVER, SIGNAL = 1.3; EXPRESSED IN BT474, SIGNAL = 1.1; EXPRESSED IN HELA, SIGNAL = 1.3; EXPRESSED IN PLACENTA, SIGNAL = 1.5; EXPRESSED IN HEART, SIGNAL = 1.2; EXPRESSED IN HBL100, SIGNAL = 1.2; EXPRESSED IN BRAIN, SIGNAL = 2.6; EXPRESSED IN LUNG, SIGNAL = 0.98
HWVLAEHQVADSEPALMAAVDKGCIGAQQVQEQKKAAFQRPVTTQLTVQGKMGLGANDNNDKFAHVPVKSDE

SEQ ID NO: 35036 - protein, 70 aa, Homo sapiens
  MAP TO AC009485.2; EXPRESSED IN HBL100, SIGNAL =  52; EXPRESSED IN HELA, SIGNAL =  27; EXPRESSED IN HEART, SIGNAL = 5.9; EXPRESSED IN PLACENTA, SIGNAL =  24; EXPRESSED IN BRAIN, SIGNAL =  10; EXPRESSED IN BONE MARROW, SIGNAL =  17; EXPRESSED IN LUNG, SIGNAL =  21; EXPRESSED IN BT474, SIGNAL =  66; EXPRESSED IN ADULT LIVER, SIGNAL =  10; EXPRESSED IN FETAL LIVER, SIGNAL = 9.9; EST_HUMAN HIT: BF027240.1, EVALUE 5.60e-02; SWISSPROT HIT: P06302, EVALUE 7.00e-03
MSDAAVDTSSEIIAKDLKEKKEVVKEAENGRDAPANGNANEENGEQEADKEVDEEGEESGEEEEEEKEGD

SEQ ID NO: 35037 - protein, 52 aa, Homo sapiens
  MAP TO AL031963.11; EXPRESSED IN LUNG, SIGNAL = 3.4; EXPRESSED IN ADULT LIVER, SIGNAL = 3.6; EXPRESSED IN BT474, SIGNAL = 5.5; EXPRESSED IN FETAL LIVER, SIGNAL = 5.1; EXPRESSED IN HBL100, SIGNAL = 6.3; EXPRESSED IN HELA, SIGNAL =  36; EXPRESSED IN HEART, SIGNAL = 3.4; EXPRESSED IN PLACENTA, SIGNAL = 4.8; EXPRESSED IN BONE MARROW, SIGNAL = 3.9; EXPRESSED IN BRAIN, SIGNAL = 3.5; EST_HUMAN HIT: T97495.1, EVALUE 2.00e-15; SWISSPROT HIT: Q13546, EVALUE 1.00e-23
HNEALLEEAKMMNRLRHSRVVKLLGVIIEEGKYSLVMEYMEKGNLMHVLKAE

SEQ ID NO: 35038 - protein, 59 aa, Homo sapiens
  MAP TO AC007318.2; EXPRESSED IN HBL100, SIGNAL = 4.6; EXPRESSED IN HEART, SIGNAL =   2; EXPRESSED IN BONE MARROW, SIGNAL = 2.3; EXPRESSED IN LUNG, SIGNAL =   4; EXPRESSED IN BRAIN, SIGNAL = 2.6; EXPRESSED IN ADULT LIVER, SIGNAL = 1.9; EXPRESSED IN BT474, SIGNAL = 6.4; EXPRESSED IN FETAL LIVER, SIGNAL = 3.3; EXPRESSED IN PLACENTA, SIGNAL =  10; EXPRESSED IN HELA, SIGNAL = 3.4; EST_HUMAN HIT: AW955054.1, EVALUE 1.00e-26; SWISSPROT HIT: P11476, EVALUE 2.00e-27
EFADSLGIPFLETSAKNATNVEQSFMTMAAEIKKRMGPGATAGGAEKSNVKIQSTPVKQ

SEQ ID NO: 35039 - protein, 20 aa, Homo sapiens
  MAP TO AC007318.2; EXPRESSED IN HBL100, SIGNAL = 4.6; EXPRESSED IN HEART, SIGNAL =   2; EXPRESSED IN BONE MARROW, SIGNAL = 2.3; EXPRESSED IN LUNG, SIGNAL =   4; EXPRESSED IN BRAIN, SIGNAL = 2.6; EXPRESSED IN ADULT LIVER, SIGNAL = 1.9; EXPRESSED IN BT474, SIGNAL = 6.4; EXPRESSED IN FETAL LIVER, SIGNAL = 3.3; EXPRESSED IN PLACENTA, SIGNAL =  10; EXPRESSED IN HELA, SIGNAL = 3.4; EST_HUMAN HIT: AV717718.1, EVALUE 1.00e-04
NLLIPLEFRFWKPVLRMQRM

SEQ ID NO: 35040 - protein, 66 aa, Homo sapiens
  MAP TO AL096801.15; EXPRESSED IN PLACENTA, SIGNAL = 3.5; EXPRESSED IN HBL100, SIGNAL = 2.6; EXPRESSED IN HELA, SIGNAL = 2.2; EXPRESSED IN BONE MARROW, SIGNAL = 2.8; EXPRESSED IN BT474, SIGNAL = 2.4; EXPRESSED IN FETAL LIVER, SIGNAL = 1.7; EXPRESSED IN HEART, SIGNAL = 1.6; EXPRESSED IN BRAIN, SIGNAL = 1.7; EXPRESSED IN LUNG, SIGNAL = 2.7; EXPRESSED IN ADULT LIVER, SIGNAL = 4.8; EST_HUMAN HIT: AA594019.1, EVALUE 5.00e-12; SWISSPROT HIT: O17583, EVALUE 5.70e+00
LFHTDDEEEREYNEVTEEVTDQVYVPAKAKAAKEGEVQPYLSAPPPYYFEEKTLQIFLFQRTLGKK

SEQ ID NO: 35041 - protein, 46 aa, Homo sapiens
  MAP TO AL049821.6; EXPRESSED IN PLACENTA, SIGNAL = 6.4; EXPRESSED IN HBL100, SIGNAL = 4.4; EXPRESSED IN HEART, SIGNAL = 5.5; EXPRESSED IN BONE MARROW, SIGNAL = 5.5; EXPRESSED IN LUNG, SIGNAL = 4.1; EXPRESSED IN BRAIN, SIGNAL = 4.7; EXPRESSED IN ADULT LIVER, SIGNAL = 4.7; EXPRESSED IN BT474, SIGNAL = 3.2; EXPRESSED IN FETAL LIVER, SIGNAL = 6.4; EXPRESSED IN HELA, SIGNAL = 5.4; EST_HUMAN HIT: W96412.1, EVALUE 3.50e+00
MRKVKVEDIALLTALTWTWNISFAPIPWGRTSDMVAHSCRGEAEKC

SEQ ID NO: 35042 - protein, 76 aa, Homo sapiens
  MAP TO AL049821.6; EXPRESSED IN PLACENTA, SIGNAL = 6.4; EXPRESSED IN HBL100, SIGNAL = 4.4; EXPRESSED IN HEART, SIGNAL = 5.5; EXPRESSED IN BONE MARROW, SIGNAL = 5.5; EXPRESSED IN LUNG, SIGNAL = 4.1; EXPRESSED IN BRAIN, SIGNAL = 4.7; EXPRESSED IN ADULT LIVER, SIGNAL = 4.7; EXPRESSED IN BT474, SIGNAL = 3.2; EXPRESSED IN FETAL LIVER, SIGNAL = 6.4; EXPRESSED IN HELA, SIGNAL = 5.4; SWISSPROT HIT: P52746, EVALUE 2.20e-01; EST_HUMAN HIT: BE090265.1, EVALUE 6.30e-01
AFLSLPSAAMGHHVTSSSPWNGSKRDVPGPGQGSQEGYILHLHFPHPKVRCRGLQGCKGLHSHRRKEIGSLHHHVE

SEQ ID NO: 35043 - protein, 61 aa, Homo sapiens
  MAP TO AC005082.2; EXPRESSED IN HELA, SIGNAL = 2.7; EXPRESSED IN BONE MARROW, SIGNAL = 1.1; EXPRESSED IN BRAIN, SIGNAL = 1.5; EXPRESSED IN BT474, SIGNAL = 2.4; EXPRESSED IN PLACENTA, SIGNAL = 1.8; EXPRESSED IN HEART, SIGNAL = 1.5; EXPRESSED IN HBL100, SIGNAL =   8; EXPRESSED IN ADULT LIVER, SIGNAL = 1.3; EXPRESSED IN FETAL LIVER, SIGNAL = 2.1; SWISSPROT HIT: P05848, EVALUE 7.70e-02; EST_HUMAN HIT: AA836611.1, EVALUE 5.00e-29
SMVIHLMLPETREIYELEKLWTLRSYDDQLAQIAPETVPEDFILGIEDDTSSVTPVELKCE

SEQ ID NO: 35044 - protein, 34 aa, Homo sapiens
  MAP TO AF165926.1; EXPRESSED IN PLACENTA, SIGNAL = 1.6; EXPRESSED IN HELA, SIGNAL = 1.9; EXPRESSED IN BONE MARROW, SIGNAL = 1.1; EXPRESSED IN BRAIN, SIGNAL =   1; EXPRESSED IN BT474, SIGNAL = 1.2; EXPRESSED IN HEART, SIGNAL = 8.6; EXPRESSED IN HBL100, SIGNAL = 2.1; EXPRESSED IN LUNG, SIGNAL = 1.1; EXPRESSED IN ADULT LIVER, SIGNAL = 1.1; EXPRESSED IN FETAL LIVER, SIGNAL = 1.4; EST_HUMAN HIT: AL045981.1, EVALUE 2.00e-12; SWISSPROT HIT: O75694, EVALUE 2.00e-13
NKTEKERMLRESLKEYQKISNQVDLSNVCAQYRQ

SEQ ID NO: 35045 - protein, 146 aa, Homo sapiens
  MAP TO AL080243.21; EXPRESSED IN FETAL LIVER, SIGNAL = 1.3; EXPRESSED IN ADULT LIVER, SIGNAL = 2.2; EXPRESSED IN PLACENTA, SIGNAL = 3.2; EXPRESSED IN HBL100, SIGNAL = 3.3; EXPRESSED IN HELA, SIGNAL = 1.6; EXPRESSED IN HEART, SIGNAL = 0.9; EXPRESSED IN BONE MARROW, SIGNAL = 2.4; EXPRESSED IN BRAIN, SIGNAL = 3.4; EXPRESSED IN BT474, SIGNAL = 2.6; EXPRESSED IN LUNG, SIGNAL = 1.9; SWISSPROT HIT: Q09472, EVALUE 9.00e-17; EST_HUMAN HIT: H59378.1, EVALUE 6.00e-16
AQMSSSSCPVNSPIMPPGSQGSHIHCPQLPQPALHQNSPSPVPSRTPTPHHTPPSIGAQQPPATTIPAPVPTPPAMPPGPQSQALHPPPRQTPTPPTTQLPQQVQPSLPAAPSADQPQQQPRSQQSTAASVPTPTAPLLPPQPATP

SEQ ID NO: 35046 - protein, 45 aa, Homo sapiens
  MAP TO AL080243.21; EXPRESSED IN FETAL LIVER, SIGNAL = 1.3; EXPRESSED IN ADULT LIVER, SIGNAL = 2.2; EXPRESSED IN PLACENTA, SIGNAL = 3.2; EXPRESSED IN HBL100, SIGNAL = 3.3; EXPRESSED IN HELA, SIGNAL = 1.6; EXPRESSED IN HEART, SIGNAL = 0.9; EXPRESSED IN BONE MARROW, SIGNAL = 2.4; EXPRESSED IN BRAIN, SIGNAL = 3.4; EXPRESSED IN BT474, SIGNAL = 2.6; EXPRESSED IN LUNG, SIGNAL = 1.9; EST_HUMAN HIT: H59378.1, EVALUE 4.60e+00
CSYTSCHATWATVPGSTSPSKADTYTTNNTTSPTSAAFTSCCTFC

SEQ ID NO: 35047 - protein, 38 aa, Homo sapiens
  MAP TO AL121757.2; EXPRESSED IN FETAL LIVER, SIGNAL = 1.9; EXPRESSED IN ADULT LIVER, SIGNAL = 2.3; EXPRESSED IN PLACENTA, SIGNAL = 2.1; EXPRESSED IN HBL100, SIGNAL = 2.2; EXPRESSED IN HELA, SIGNAL = 2.2; EXPRESSED IN HEART, SIGNAL = 2.2; EXPRESSED IN BRAIN, SIGNAL = 2.2; EXPRESSED IN BT474, SIGNAL = 1.4; EXPRESSED IN LUNG, SIGNAL = 1.4; EXPRESSED IN BONE MARROW, SIGNAL = 2.2
AGRLAGMGSWWQRIVSVFFLVAGELCDRGLRSLGTSGQ

SEQ ID NO: 35048 - protein, 38 aa, Homo sapiens
  MAP TO AL121757.2; EXPRESSED IN FETAL LIVER, SIGNAL = 1.9; EXPRESSED IN ADULT LIVER, SIGNAL = 2.3; EXPRESSED IN PLACENTA, SIGNAL = 2.1; EXPRESSED IN HBL100, SIGNAL = 2.2; EXPRESSED IN HELA, SIGNAL = 2.2; EXPRESSED IN HEART, SIGNAL = 2.2; EXPRESSED IN BRAIN, SIGNAL = 2.2; EXPRESSED IN BT474, SIGNAL = 1.4; EXPRESSED IN LUNG, SIGNAL = 1.4; EXPRESSED IN BONE MARROW, SIGNAL = 2.2; EST_HUMAN HIT: BE910634.1, EVALUE 4.30e+00
CWEAGWDGELVAENSVCFLPGSWRALRQRTEVIRNKRA

SEQ ID NO: 35049 - protein, 155 aa, Homo sapiens
  MAP TO AC011406.1; EXPRESSED IN HBL100, SIGNAL = 2.7; EXPRESSED IN HELA, SIGNAL =   2; EXPRESSED IN PLACENTA, SIGNAL = 2.5; EXPRESSED IN HEART, SIGNAL = 1.2; EXPRESSED IN BRAIN, SIGNAL = 1.4; EXPRESSED IN BONE MARROW, SIGNAL =   2; EXPRESSED IN LUNG, SIGNAL = 1.9; EXPRESSED IN BT474, SIGNAL =   2; EXPRESSED IN FETAL LIVER, SIGNAL = 1.5; EXPRESSED IN ADULT LIVER, SIGNAL = 1.5; EST_HUMAN HIT: BF206102.1, EVALUE 8.00e-77; SWISSPROT HIT: Q12766, EVALUE 8.00e-78
SVSCPELLDQHYTVDMTETEHSIQHPVTKTATRRIVHAGLQPNPGDPSAGHHSLALCPELAPYATILASIVDSKPNGVRQRPIAFDNATHYYLYNRLMDFLTSREIVNRQIHDIVQSCQPGEVVIRDTLYRLGVAQIKTETEEEGEEEEVAAVAE

SEQ ID NO: 35050 - protein, 42 aa, Homo sapiens
  MAP TO AL049820.14; EXPRESSED IN HBL100, SIGNAL = 1.2; EXPRESSED IN HELA, SIGNAL = 0.98; EXPRESSED IN BONE MARROW, SIGNAL = 1.2; EXPRESSED IN FETAL LIVER, SIGNAL = 0.98; EXPRESSED IN ADULT LIVER, SIGNAL = 1.2; EXPRESSED IN PLACENTA, SIGNAL = 1.3; EXPRESSED IN HEART, SIGNAL = 0.85; EXPRESSED IN BRAIN, SIGNAL = 1.1; EXPRESSED IN BT474, SIGNAL = 1.4; SWISSPROT HIT: P53341, EVALUE 2.70e+00; EST_HUMAN HIT: BF332938.1, EVALUE 3.00e-06
PPYIRSPAYPSQSGAGGRPMFSSQHPNYGNSQAPMVHQPDQY

SEQ ID NO: 35051 - protein, 38 aa, Homo sapiens
  MAP TO AL049820.14; EXPRESSED IN HBL100, SIGNAL = 1.2; EXPRESSED IN HELA, SIGNAL = 0.98; EXPRESSED IN BONE MARROW, SIGNAL = 1.2; EXPRESSED IN FETAL LIVER, SIGNAL = 0.98; EXPRESSED IN ADULT LIVER, SIGNAL = 1.2; EXPRESSED IN PLACENTA, SIGNAL = 1.3; EXPRESSED IN HEART, SIGNAL = 0.85; EXPRESSED IN BRAIN, SIGNAL = 1.1; EXPRESSED IN BT474, SIGNAL = 1.4; EST_HUMAN HIT: AA348396.1, EVALUE 1.00e-05; SWISSPROT HIT: Q63003, EVALUE 6.20e+00
RTGQAGAPWEPESCHSWGAGKKTWGVRQPQTGWDKQAT

SEQ ID NO: 35052 - protein, 51 aa, Homo sapiens
  MAP TO AL117327.3; EXPRESSED IN BT474, SIGNAL = 2.2; EXPRESSED IN FETAL LIVER, SIGNAL = 3.2; EXPRESSED IN HBL100, SIGNAL = 3.9; EXPRESSED IN HELA, SIGNAL = 7.1; EXPRESSED IN HEART, SIGNAL = 1.9; EXPRESSED IN BONE MARROW, SIGNAL = 3.4; EXPRESSED IN LUNG, SIGNAL = 4.3; EXPRESSED IN ADULT LIVER, SIGNAL = 6.2; EXPRESSED IN PLACENTA, SIGNAL =  10; EXPRESSED IN BRAIN, SIGNAL = 3.5; EST_HUMAN HIT: BE786347.1, EVALUE 2.00e-17; SWISSPROT HIT: O83536, EVALUE 7.80e+00
MKFGAVTRIGGTSLGRSIPCPPALCSMRKIHLRPLVLRPTSPRNFSPILNQ

SEQ ID NO: 35053 - protein, 23 aa, Homo sapiens
  MAP TO AF162757.1; EXPRESSED IN BONE MARROW, SIGNAL = 3.9; EXPRESSED IN LUNG, SIGNAL = 3.9; EXPRESSED IN BRAIN, SIGNAL = 2.7; EXPRESSED IN ADULT LIVER, SIGNAL = 3.1; EXPRESSED IN BT474, SIGNAL = 5.4; EXPRESSED IN FETAL LIVER, SIGNAL = 5.5; EXPRESSED IN PLACENTA, SIGNAL = 7.6; EXPRESSED IN HBL100, SIGNAL =   8; EXPRESSED IN HELA, SIGNAL = 5.7; EXPRESSED IN HEART, SIGNAL = 3.9; EST_HUMAN HIT: BE409177.1, EVALUE 1.40e-01; SWISSPROT HIT: P49321, EVALUE 1.00e-02
PEDKVQIAANEETKERGRTDKRG

SEQ ID NO: 35054 - protein, 100 aa, Homo sapiens
  MAP TO AL096829.10; EXPRESSED IN BONE MARROW, SIGNAL =  14; EXPRESSED IN BRAIN, SIGNAL =  11; EXPRESSED IN LUNG, SIGNAL =  28; EXPRESSED IN ADULT LIVER, SIGNAL =  17; EXPRESSED IN BT474, SIGNAL =  55; EXPRESSED IN FETAL LIVER, SIGNAL =  13; EXPRESSED IN HELA, SIGNAL =  46; EXPRESSED IN PLACENTA, SIGNAL =  26; EXPRESSED IN HBL100, SIGNAL =  69; EXPRESSED IN HEART, SIGNAL =  17; EST_HUMAN HIT: AI075354.1, EVALUE 8.00e-19; SWISSPROT HIT: P47914, EVALUE 4.00e-19
KMQANNAKAMSARAKAIKALVKPKEVKPKIPKGVSHKLHRLAHIAHSKLGKHDHAHIAKGLRLCGPKAKTKDQTKAQPAAPASIPAQAPKGAQATTKGSK

SEQ ID NO: 35055 - protein, 49 aa, Homo sapiens
  MAP TO AL020995.13; EXPRESSED IN PLACENTA, SIGNAL = 4.8; EXPRESSED IN HELA, SIGNAL = 6.3; EXPRESSED IN HBL100, SIGNAL =   4; EXPRESSED IN HEART, SIGNAL = 6.4; EXPRESSED IN BONE MARROW, SIGNAL = 4.7; EXPRESSED IN LUNG, SIGNAL = 3.2; EXPRESSED IN BRAIN, SIGNAL = 5.1; EXPRESSED IN ADULT LIVER, SIGNAL = 5.8; EXPRESSED IN BT474, SIGNAL = 3.6; EXPRESSED IN FETAL LIVER, SIGNAL = 6.3; EST_HUMAN HIT: R35321.1, EVALUE 4.00e-23; SWISSPROT HIT: P35678, EVALUE 2.70e+00
GRKKALTLQVTEITGRGYRHKKSQAKLEYFCDLHHDAENSNYLGIGFEN

SEQ ID NO: 35056 - protein, 51 aa, Homo sapiens
  MAP TO AL035669.27; EXPRESSED IN PLACENTA, SIGNAL = 1.6; EXPRESSED IN HELA, SIGNAL = 1.6; EXPRESSED IN HBL100, SIGNAL = 1.9; EXPRESSED IN HEART, SIGNAL =   1; EXPRESSED IN LUNG, SIGNAL =   1; EXPRESSED IN BONE MARROW, SIGNAL = 1.2; EXPRESSED IN BRAIN, SIGNAL =   1; EXPRESSED IN BT474, SIGNAL =   2; EXPRESSED IN FETAL LIVER, SIGNAL =   1; EST_HUMAN HIT: H72496.1, EVALUE 5.00e-23; SWISSPROT HIT: P47138, EVALUE 4.50e+00
PLQQPPLTMAVFHDEVEIEDFQYDEDSETYFCPCPCGDNFSITKEELENGE

SEQ ID NO: 35057 - protein, 52 aa, Homo sapiens
  MAP TO AL080245.13; EXPRESSED IN ADULT LIVER, SIGNAL = 1.3; EXPRESSED IN PLACENTA, SIGNAL = 1.4; EXPRESSED IN HBL100, SIGNAL = 1.7; EXPRESSED IN HELA, SIGNAL = 1.4; EXPRESSED IN BONE MARROW, SIGNAL = 1.7; EXPRESSED IN BT474, SIGNAL = 2.1; EXPRESSED IN FETAL LIVER, SIGNAL = 1.3; EXPRESSED IN HEART, SIGNAL = 1.9; EXPRESSED IN BRAIN, SIGNAL = 1.9; EXPRESSED IN LUNG, SIGNAL =   1; SWISSPROT HIT: P54697, EVALUE 1.20e-02; EST_HUMAN HIT: AA993492.1, EVALUE 3.00e-25
MVVDSPGFQNPRHQGKDRAATFEELCHNYAHERLQLLFYQRTFVSTLQRYQE

SEQ ID NO: 35058 - protein, 51 aa, Homo sapiens
  MAP TO AL080245.13; EXPRESSED IN ADULT LIVER, SIGNAL = 1.3; EXPRESSED IN PLACENTA, SIGNAL = 1.4; EXPRESSED IN HBL100, SIGNAL = 1.7; EXPRESSED IN HELA, SIGNAL = 1.4; EXPRESSED IN BONE MARROW, SIGNAL = 1.7; EXPRESSED IN BT474, SIGNAL = 2.1; EXPRESSED IN FETAL LIVER, SIGNAL = 1.3; EXPRESSED IN HEART, SIGNAL = 1.9; EXPRESSED IN BRAIN, SIGNAL = 1.9; EXPRESSED IN LUNG, SIGNAL =   1; EST_HUMAN HIT: AA993492.1, EVALUE 2.00e-15
WWWTLQASRTPGTRARTGRPPLRSCATTTPMSACSCCSTSGPLSPRYSDIK

SEQ ID NO: 35059 - protein, 41 aa, Homo sapiens
  MAP TO AL031847.9; EXPRESSED IN LUNG, SIGNAL = 2.1; EXPRESSED IN BRAIN, SIGNAL = 4.8; EXPRESSED IN BT474, SIGNAL = 3.9; EXPRESSED IN FETAL LIVER, SIGNAL = 4.1; EXPRESSED IN ADULT LIVER, SIGNAL = 2.4; EXPRESSED IN PLACENTA, SIGNAL = 2.9; EXPRESSED IN HBL100, SIGNAL = 5.5; EXPRESSED IN HEART, SIGNAL = 2.6; EXPRESSED IN BONE MARROW, SIGNAL = 3.3; EXPRESSED IN HELA, SIGNAL = 4.8; EST_HUMAN HIT: BE255216.1, EVALUE 1.00e-12; SWISSPROT HIT: Q64559, EVALUE 3.00e-13
LPVSVCGPQPETEDEKKRFEEGKGRYLQMKAKRQGHAEPQP

SEQ ID NO: 35060 - protein, 70 aa, Homo sapiens
  MAP TO AC007028.2; EXPRESSED IN HELA, SIGNAL = 2.5; EXPRESSED IN PLACENTA, SIGNAL = 1.4; EXPRESSED IN HBL100, SIGNAL = 1.6; EXPRESSED IN HEART, SIGNAL = 1.3; EXPRESSED IN BONE MARROW, SIGNAL = 1.8; EXPRESSED IN BRAIN, SIGNAL = 1.1; EXPRESSED IN ADULT LIVER, SIGNAL = 1.1; EXPRESSED IN BT474, SIGNAL = 1.1; EXPRESSED IN FETAL LIVER, SIGNAL = 2.2; EST_HUMAN HIT: T62628.1, EVALUE 4.00e-07; SWISSPROT HIT: Q09601, EVALUE 1.10e+00
LNLQFKSANLEGDNTKREHWSCGREQLGKTRGLHSREKSKNTQTNISFGGSSETLERSHPDSCSQYEPRE

SEQ ID NO: 35061 - protein, 57 aa, Homo sapiens
  MAP TO AC007688.15; EXPRESSED IN BT474, SIGNAL = 2.5; EXPRESSED IN FETAL LIVER, SIGNAL = 5.3; EXPRESSED IN PLACENTA, SIGNAL = 5.5; EXPRESSED IN HELA, SIGNAL = 5.8; EXPRESSED IN HBL100, SIGNAL = 3.2; EXPRESSED IN HEART, SIGNAL = 5.1; EXPRESSED IN LUNG, SIGNAL = 3.8; EXPRESSED IN BONE MARROW, SIGNAL = 4.3; EXPRESSED IN BRAIN, SIGNAL = 4.7; EXPRESSED IN ADULT LIVER, SIGNAL = 4.2; SWISSPROT HIT: P73660, EVALUE 7.70e+00; EST_HUMAN HIT: AA527446.1, EVALUE 7.00e-26
VLAGHTLRMLPSQVLAGHTLRMLPSQVLAGHCASVDSLHQGKSQGRRNTRLRKHASV

SEQ ID NO: 35062 - protein, 62 aa, Homo sapiens
  MAP TO AC007688.15; EXPRESSED IN BT474, SIGNAL = 2.5; EXPRESSED IN FETAL LIVER, SIGNAL = 5.3; EXPRESSED IN PLACENTA, SIGNAL = 5.5; EXPRESSED IN HELA, SIGNAL = 5.8; EXPRESSED IN HBL100, SIGNAL = 3.2; EXPRESSED IN HEART, SIGNAL = 5.1; EXPRESSED IN LUNG, SIGNAL = 3.8; EXPRESSED IN BONE MARROW, SIGNAL = 4.3; EXPRESSED IN BRAIN, SIGNAL = 4.7; EXPRESSED IN ADULT LIVER, SIGNAL = 4.2; EST_HUMAN HIT: AA527446.1, EVALUE 4.00e-25; SWISSPROT HIT: Q46135, EVALUE 3.40e+00
PASTWEGSMRSVWPASTWEGSMRSVWPAGTWEGSMRSVWPASAWEGSMRSVFVRMQELYTCS

SEQ ID NO: 35063 - protein, 149 aa, Homo sapiens
  MAP TO Z83844.5; EXPRESSED IN LUNG, SIGNAL = 3.9; EXPRESSED IN BRAIN, SIGNAL = 4.6; EXPRESSED IN BT474, SIGNAL = 3.3; EXPRESSED IN ADULT LIVER, SIGNAL = 4.4; EXPRESSED IN PLACENTA, SIGNAL = 4.9; EXPRESSED IN HBL100, SIGNAL = 4.1; EXPRESSED IN BONE MARROW, SIGNAL = 4.2; EXPRESSED IN FETAL LIVER, SIGNAL = 3.5; EXPRESSED IN HELA, SIGNAL = 5.4; EXPRESSED IN HEART, SIGNAL = 3.5; SWISSPROT HIT: O43474, EVALUE 1.30e-01; EST_HUMAN HIT: BE974261.1, EVALUE 2.60e-01
SGRGPPPHHPPGPAPEKALQRGLWPVLSHQRGRWAVADQDRPSWKWATARAWQEPQLLQTPRGRPLAAHDFLLLCSALHTTSMLQHPRGKSKPSFSLPPDITPLPSTNRSLFGSRPRDPELGPCHSQRQLSPTQCYQFSPTRRLGSKLG

SEQ ID NO: 35064 - protein, 79 aa, Homo sapiens
  MAP TO AC008068.2; EXPRESSED IN HELA, SIGNAL = 3.5; EXPRESSED IN BONE MARROW, SIGNAL = 2.9; EXPRESSED IN LUNG, SIGNAL = 2.3; EXPRESSED IN BRAIN, SIGNAL = 3.2; EXPRESSED IN BT474, SIGNAL = 2.2; EXPRESSED IN PLACENTA, SIGNAL = 3.3; EXPRESSED IN HEART, SIGNAL = 3.2; EXPRESSED IN HBL100, SIGNAL = 2.6; EXPRESSED IN ADULT LIVER, SIGNAL = 2.4; EXPRESSED IN FETAL LIVER, SIGNAL =   3
EPAERAGVGEPPEPGGRPEPGPRGFVPQKEIVYNKLLPYAERLDAESDLQLAQIKCNLGRAVQLQELWPGGLFWTRKLS

SEQ ID NO: 35065 - protein, 22 aa, Homo sapiens
  MAP TO AC008068.2; EXPRESSED IN HELA, SIGNAL = 3.5; EXPRESSED IN BONE MARROW, SIGNAL = 2.9; EXPRESSED IN LUNG, SIGNAL = 2.3; EXPRESSED IN BRAIN, SIGNAL = 3.2; EXPRESSED IN BT474, SIGNAL = 2.2; EXPRESSED IN PLACENTA, SIGNAL = 3.3; EXPRESSED IN HEART, SIGNAL = 3.2; EXPRESSED IN HBL100, SIGNAL = 2.6; EXPRESSED IN ADULT LIVER, SIGNAL = 2.4; EXPRESSED IN FETAL LIVER, SIGNAL =   3
ARGASSRRRRSSTTSCCPTRSG

SEQ ID NO: 35066 - protein, 34 aa, Homo sapiens
  MAP TO AL031985.10; EXPRESSED IN HEART, SIGNAL = 7.3; EXPRESSED IN LUNG, SIGNAL =  17; EXPRESSED IN BRAIN, SIGNAL = 5.7; EXPRESSED IN BT474, SIGNAL =  21; EXPRESSED IN FETAL LIVER, SIGNAL =  14; EXPRESSED IN ADULT LIVER, SIGNAL =  11; EXPRESSED IN PLACENTA, SIGNAL =  24; EXPRESSED IN HBL100, SIGNAL =  22; EXPRESSED IN BONE MARROW, SIGNAL =  15; EXPRESSED IN HELA, SIGNAL =  20; SWISSPROT HIT: P41512, EVALUE 8.20e+00; EST_HUMAN HIT: AV747900.1, EVALUE 2.00e-08
NEEYQPYGQKRHLPVIRQNDKHKGKEERHPIHVL

SEQ ID NO: 35067 - protein, 31 aa, Homo sapiens
  MAP TO AP000508.1; EXPRESSED IN HELA, SIGNAL =  44; EXPRESSED IN LUNG, SIGNAL = 1e+02; EXPRESSED IN BRAIN, SIGNAL = 6.9; EXPRESSED IN BT474, SIGNAL =  12; EXPRESSED IN ADULT LIVER, SIGNAL =  20; EXPRESSED IN PLACENTA, SIGNAL =  32; EXPRESSED IN HEART, SIGNAL =  14; EXPRESSED IN HBL100, SIGNAL =  91; EXPRESSED IN BONE MARROW, SIGNAL =  48; EXPRESSED IN FETAL LIVER, SIGNAL =  16; SWISSPROT HIT: Q29631, EVALUE 6.30e+00
IMGIVAGLAVLVVLAVLGAVVTAMMCRRKSS

SEQ ID NO: 35068 - protein, 26 aa, Homo sapiens
  MAP TO AP000508.1; EXPRESSED IN HELA, SIGNAL =  44; EXPRESSED IN LUNG, SIGNAL = 1e+02; EXPRESSED IN BRAIN, SIGNAL = 6.9; EXPRESSED IN BT474, SIGNAL =  12; EXPRESSED IN ADULT LIVER, SIGNAL =  20; EXPRESSED IN PLACENTA, SIGNAL =  32; EXPRESSED IN HEART, SIGNAL =  14; EXPRESSED IN HBL100, SIGNAL =  91; EXPRESSED IN BONE MARROW, SIGNAL =  48; EXPRESSED IN FETAL LIVER, SIGNAL =  16
HHGHRCWPGCPGCPSCPWSCGHRYDV

SEQ ID NO: 35069 - protein, 108 aa, Homo sapiens
  MAP TO AL035669.27; EXPRESSED IN FETAL LIVER, SIGNAL = 7.4; EXPRESSED IN ADULT LIVER, SIGNAL = 3.3; EXPRESSED IN PLACENTA, SIGNAL =   9; EXPRESSED IN HELA, SIGNAL =  16; EXPRESSED IN BONE MARROW, SIGNAL = 5.9; EXPRESSED IN BRAIN, SIGNAL = 2.8; EXPRESSED IN BT474, SIGNAL =  16; EXPRESSED IN HEART, SIGNAL = 4.6; EXPRESSED IN HBL100, SIGNAL =  13; EXPRESSED IN LUNG, SIGNAL = 6.4; EST_HUMAN HIT: AA703499.1, EVALUE 2.00e-25; SWISSPROT HIT: P22674, EVALUE 1.60e+00
PRRKTGGPRRKRQPWQPQRKQPLQAPRWASSLHLETSCQRSLLLLMWQQPHQPLKSHPQVSRAPSPRGHGSPLPHRVVLQLPGRPDRHLQRQRLPPRSSLAPLLWWEP

SEQ ID NO: 35070 - protein, 24 aa, Homo sapiens
  MAP TO AL022312.7; EXPRESSED IN HBL100, SIGNAL =  14; EXPRESSED IN HELA, SIGNAL =  14; EXPRESSED IN HEART, SIGNAL = 4.3; EXPRESSED IN LUNG, SIGNAL =  11; EXPRESSED IN BRAIN, SIGNAL = 4.1; EXPRESSED IN BT474, SIGNAL =  26; EXPRESSED IN ADULT LIVER, SIGNAL =   6; EXPRESSED IN PLACENTA, SIGNAL =  25; EXPRESSED IN BONE MARROW, SIGNAL = 6.6; EXPRESSED IN FETAL LIVER, SIGNAL = 9.6; SWISSPROT HIT: P18848, EVALUE 2.00e-07; EST_HUMAN HIT: BF206733.1, EVALUE 2.00e-06
DKAKAGSSEWLAVDGLVSPSNNSK

SEQ ID NO: 35071 - protein, 127 aa, Homo sapiens
  MAP TO AL022312.7; EXPRESSED IN HBL100, SIGNAL =  14; EXPRESSED IN HELA, SIGNAL =  14; EXPRESSED IN HEART, SIGNAL = 4.3; EXPRESSED IN LUNG, SIGNAL =  11; EXPRESSED IN BRAIN, SIGNAL = 4.1; EXPRESSED IN BT474, SIGNAL =  26; EXPRESSED IN ADULT LIVER, SIGNAL =   6; EXPRESSED IN PLACENTA, SIGNAL =  25; EXPRESSED IN BONE MARROW, SIGNAL = 6.6; EXPRESSED IN FETAL LIVER, SIGNAL = 9.6; EST_HUMAN HIT: BE270680.1, EVALUE 1.00e-55; SWISSPROT HIT: P18848, EVALUE 2.00e-56
DAFSGTDWMLEKMDLKEFDLDALLGIDDLETMPDDLLTTLDDTCDLFAPLVQETNKQPPQTVNPIGHLPESLTKPDQVAPFTFLQPLPLSPGVLSSTPDHSFSLELGSEVDITEGDRKPDYTAYVAM

SEQ ID NO: 35072 - protein, 30 aa, Homo sapiens
  MAP TO AL022312.7; EXPRESSED IN HBL100, SIGNAL =  14; EXPRESSED IN HELA, SIGNAL =  14; EXPRESSED IN HEART, SIGNAL = 4.3; EXPRESSED IN LUNG, SIGNAL =  11; EXPRESSED IN BRAIN, SIGNAL = 4.1; EXPRESSED IN BT474, SIGNAL =  26; EXPRESSED IN ADULT LIVER, SIGNAL =   6; EXPRESSED IN PLACENTA, SIGNAL =  25; EXPRESSED IN BONE MARROW, SIGNAL = 6.6; EXPRESSED IN FETAL LIVER, SIGNAL = 9.6; EST_HUMAN HIT: AA362566.1, EVALUE 7.00e-14; SWISSPROT HIT: P48809, EVALUE 4.80e+00
PPNGWLWMGWSVPPTTARVSGPPPHRPGGI

SEQ ID NO: 35073 - protein, 76 aa, Homo sapiens
  MAP TO AC007283.3; EXPRESSED IN FETAL LIVER, SIGNAL = 2.3; EXPRESSED IN ADULT LIVER, SIGNAL = 3.1; EXPRESSED IN HBL100, SIGNAL = 2.4; EXPRESSED IN HELA, SIGNAL = 2.7; EXPRESSED IN HEART, SIGNAL = 3.8; EXPRESSED IN BONE MARROW, SIGNAL = 2.8; EXPRESSED IN LUNG, SIGNAL = 5.4; EXPRESSED IN BRAIN, SIGNAL = 1.6; EXPRESSED IN BT474, SIGNAL = 3.6; EXPRESSED IN PLACENTA, SIGNAL = 5.9; EST_HUMAN HIT: AI139524.1, EVALUE 2.00e-38
NYVVSEGQLEDSSLLEVDGPAMKNVEFKAQKRGLCTVHREADFFWSLCTADMSLLEQSHSSPSLYLQCLSQKLRQE

SEQ ID NO: 35074 - protein, 21 aa, Homo sapiens
  MAP TO AC007283.3; EXPRESSED IN FETAL LIVER, SIGNAL = 2.3; EXPRESSED IN ADULT LIVER, SIGNAL = 3.1; EXPRESSED IN HBL100, SIGNAL = 2.4; EXPRESSED IN HELA, SIGNAL = 2.7; EXPRESSED IN HEART, SIGNAL = 3.8; EXPRESSED IN BONE MARROW, SIGNAL = 2.8; EXPRESSED IN LUNG, SIGNAL = 5.4; EXPRESSED IN BRAIN, SIGNAL = 1.6; EXPRESSED IN BT474, SIGNAL = 3.6; EXPRESSED IN PLACENTA, SIGNAL = 5.9; EST_HUMAN HIT: AW391475.1, EVALUE 3.00e-07
TMWCQRASWRTAASWRWMGQR

SEQ ID NO: 35075 - protein, 44 aa, Homo sapiens
  MAP TO AC011004.1; EXPRESSED IN LUNG, SIGNAL = 1.4; EXPRESSED IN BRAIN, SIGNAL =   1; EXPRESSED IN FETAL LIVER, SIGNAL = 1.6; EXPRESSED IN ADULT LIVER, SIGNAL = 2.4; EXPRESSED IN PLACENTA, SIGNAL = 2.4; EXPRESSED IN HELA, SIGNAL = 1.7; EXPRESSED IN HEART, SIGNAL = 1.9; EXPRESSED IN BONE MARROW, SIGNAL = 2.3; EXPRESSED IN BT474, SIGNAL = 3.6; EXPRESSED IN HBL100, SIGNAL = 4.6; EST_HUMAN HIT: AI497807.1, EVALUE 2.00e-18
TCWSIMDVKEAETLLHKASGSKSTRYLETNSLCSIIQKIVLSYL

SEQ ID NO: 35076 - protein, 44 aa, Homo sapiens
  MAP TO AC011004.1; EXPRESSED IN LUNG, SIGNAL = 1.4; EXPRESSED IN BRAIN, SIGNAL =   1; EXPRESSED IN FETAL LIVER, SIGNAL = 1.6; EXPRESSED IN ADULT LIVER, SIGNAL = 2.4; EXPRESSED IN PLACENTA, SIGNAL = 2.4; EXPRESSED IN HELA, SIGNAL = 1.7; EXPRESSED IN HEART, SIGNAL = 1.9; EXPRESSED IN BONE MARROW, SIGNAL = 2.3; EXPRESSED IN BT474, SIGNAL = 3.6; EXPRESSED IN HBL100, SIGNAL = 4.6; EST_HUMAN HIT: AI497807.1, EVALUE 8.00e-21
HVLVHYGCEGSRDPAPQSLGFQVYQIPRNQFFVFNNTENRTFIF

SEQ ID NO: 35077 - protein, 47 aa, Homo sapiens
  MAP TO AC009363.3; EXPRESSED IN HBL100, SIGNAL = 4.6; EXPRESSED IN HELA, SIGNAL = 6.3; EXPRESSED IN LUNG, SIGNAL = 4.1; EXPRESSED IN BRAIN, SIGNAL = 4.5; EXPRESSED IN BT474, SIGNAL = 3.5; EXPRESSED IN FETAL LIVER, SIGNAL = 6.2; EXPRESSED IN ADULT LIVER, SIGNAL = 6.2; EXPRESSED IN PLACENTA, SIGNAL = 6.9; EXPRESSED IN HEART, SIGNAL = 5.9; EXPRESSED IN BONE MARROW, SIGNAL = 5.1; EST_HUMAN HIT: BE906024.1, EVALUE 1.00e-19; SWISSPROT HIT: Q60765, EVALUE 8.00e-13
ESERLELMNAELKTQIEELKQERQQLILMLNRHRPTCIVRTDSVKTP

SEQ ID NO: 35078 - protein, 33 aa, Homo sapiens
  MAP TO AC004938.2; EXPRESSED IN HBL100, SIGNAL = 4.4; EXPRESSED IN HELA, SIGNAL = 4.4; EXPRESSED IN HEART, SIGNAL = 2.4; EXPRESSED IN LUNG, SIGNAL = 2.2; EXPRESSED IN BRAIN, SIGNAL = 2.3; EXPRESSED IN BT474, SIGNAL = 3.7; EXPRESSED IN ADULT LIVER, SIGNAL = 3.1; EXPRESSED IN PLACENTA, SIGNAL = 4.1; EXPRESSED IN BONE MARROW, SIGNAL = 2.8; EXPRESSED IN FETAL LIVER, SIGNAL = 3.2; EST_HUMAN HIT: BE613861.1, EVALUE 2.00e-14
PSCLGQTSYSSFRWSVRLRKTNSSCCMPCSSCH

SEQ ID NO: 35079 - protein, 37 aa, Homo sapiens
  MAP TO AC009433.1; EXPRESSED IN FETAL LIVER, SIGNAL = 1.5; EXPRESSED IN ADULT LIVER, SIGNAL =   3; EXPRESSED IN HBL100, SIGNAL = 1.7; EXPRESSED IN HELA, SIGNAL = 1.7; EXPRESSED IN HEART, SIGNAL = 1.6; EXPRESSED IN LUNG, SIGNAL = 0.95; EXPRESSED IN BRAIN, SIGNAL = 1.5; EXPRESSED IN BT474, SIGNAL = 1.5; EXPRESSED IN PLACENTA, SIGNAL = 1.5; EXPRESSED IN BONE MARROW, SIGNAL = 2.2; SWISSPROT HIT: Q00449, EVALUE 4.70e+00; EST_HUMAN HIT: BF528338.1, EVALUE 4.00e-15
GLFAWHRRRQKEKGRDLAPRVSYTPAMRMTSTDYSLS

SEQ ID NO: 35080 - protein, 59 aa, Homo sapiens
  MAP TO AC007778.1; EXPRESSED IN FETAL LIVER, SIGNAL = 4.1; EXPRESSED IN ADULT LIVER, SIGNAL =  12; EXPRESSED IN HBL100, SIGNAL =  20; EXPRESSED IN HELA, SIGNAL = 8.8; EXPRESSED IN HEART, SIGNAL = 5.1; EXPRESSED IN LUNG, SIGNAL = 7.6; EXPRESSED IN BT474, SIGNAL = 8.4; EXPRESSED IN PLACENTA, SIGNAL =  11; EXPRESSED IN BRAIN, SIGNAL = 4.9; EXPRESSED IN BONE MARROW, SIGNAL = 7.5; EST_HUMAN HIT: H91193.1, EVALUE 2.00e-15
  unsure 3
LLXAARLELFVPPGGFVVSLASGVKLQTFAVSVKAFKVAHPPGRFIVSLASGVTLQTFA

SEQ ID NO: 35081 - protein, 102 aa, Homo sapiens
  MAP TO AC004897.1; EXPRESSED IN PLACENTA, SIGNAL =  10; EXPRESSED IN HBL100, SIGNAL = 1.8; EXPRESSED IN HEART, SIGNAL = 1.2; EXPRESSED IN BONE MARROW, SIGNAL = 1.5; EXPRESSED IN BRAIN, SIGNAL = 0.91; EXPRESSED IN LUNG, SIGNAL = 1.6; EXPRESSED IN ADULT LIVER, SIGNAL = 2.8; EXPRESSED IN BT474, SIGNAL = 0.99; EXPRESSED IN FETAL LIVER, SIGNAL = 1.4; EXPRESSED IN HELA, SIGNAL = 1.7; SWISSPROT HIT: P14077, EVALUE 1.00e-09; EST_HUMAN HIT: AA668227.1, EVALUE 1.00e-34
DQEEQVEQDKRDKKKATALVMAFRQADFGDSGTGKGWANQMPNRACFQCSLQGHFKKDCQNRNKPPPRPCPLCQGNHWKVHCPRGQRSSESEATNQKIQQQD

SEQ ID NO: 35082 - protein, 56 aa, Homo sapiens
  MAP TO AC007917.15; EXPRESSED IN PLACENTA, SIGNAL = 1.4; EXPRESSED IN HELA, SIGNAL = 1.1; EXPRESSED IN HEART, SIGNAL = 1.3; EXPRESSED IN BONE MARROW, SIGNAL = 1.1; EXPRESSED IN FETAL LIVER, SIGNAL =   1; EST_HUMAN HIT: H23494.1, EVALUE 3.00e-10; SWISSPROT HIT: P49619, EVALUE 2.00e-14
SNMAEKQAPAEDQVAATPLEPPVPRSSSSESPVVYLKDVVCYLSLLETGRPQDKLE

SEQ ID NO: 35083 - protein, 36 aa, Homo sapiens
  MAP TO AC007917.15; EXPRESSED IN PLACENTA, SIGNAL = 1.4; EXPRESSED IN HELA, SIGNAL = 1.1; EXPRESSED IN HEART, SIGNAL = 1.3; EXPRESSED IN BONE MARROW, SIGNAL = 1.1; EXPRESSED IN FETAL LIVER, SIGNAL =   1; EST_HUMAN HIT: H23494.1, EVALUE 1.00e-14; SWISSPROT HIT: O08808, EVALUE 8.20e+00
PPGTPRPSVFKLGIPSGIPEGCCVLPVPAGDGEASG

SEQ ID NO: 35084 - protein, 46 aa, Homo sapiens
  MAP TO AC007938.1; EXPRESSED IN BONE MARROW, SIGNAL = 1.4; EXPRESSED IN BT474, SIGNAL = 1.7; EXPRESSED IN PLACENTA, SIGNAL = 1.5; EXPRESSED IN HBL100, SIGNAL = 1.6; EXPRESSED IN HEART, SIGNAL = 0.99; EXPRESSED IN BRAIN, SIGNAL = 1.3; EST_HUMAN HIT: BF642802.1, EVALUE 2.00e-19; SWISSPROT HIT: P53620, EVALUE 5.00e-15
LEDLEVTVSDHIQKVLKPNFAAAWEEVGDTFEKEETFALSSTKTLE

SEQ ID NO: 35085 - protein, 113 aa, Homo sapiens
  MAP TO AC007993.2; EXPRESSED IN HELA, SIGNAL = 1.1; EXPRESSED IN PLACENTA, SIGNAL = 1.3; EXPRESSED IN HBL100, SIGNAL = 1.6; EXPRESSED IN HEART, SIGNAL = 1.1; EXPRESSED IN BONE MARROW, SIGNAL = 1.7; EXPRESSED IN BRAIN, SIGNAL = 0.93; EXPRESSED IN LUNG, SIGNAL = 0.98; EXPRESSED IN ADULT LIVER, SIGNAL = 1.5; EXPRESSED IN BT474, SIGNAL = 1.5; EXPRESSED IN FETAL LIVER, SIGNAL =   1; EST_HUMAN HIT: BE080485.1, EVALUE 1.00e-14; SWISSPROT HIT: Q92793, EVALUE 6.80e+00
FPQEVEPSLTQQEIPAQIPEPPMEAEPSPTQQEATVQTPEPPKEVEPSSQQMVPSQPPEPPKEVAAQPPAHYEVTVPTQGQDQAQHSILPSITVQPLDLGLTITPESTTEVEL

SEQ ID NO: 35086 - protein, 36 aa, Homo sapiens
  MAP TO AC009288.8; EXPRESSED IN ADULT LIVER, SIGNAL =   1; EXPRESSED IN BT474, SIGNAL = 2.3; EXPRESSED IN FETAL LIVER, SIGNAL = 1.4; EXPRESSED IN PLACENTA, SIGNAL = 3.1; EXPRESSED IN HBL100, SIGNAL = 1.3; EXPRESSED IN HEART, SIGNAL =   1; EXPRESSED IN LUNG, SIGNAL =   1; SWISSPROT HIT: P01088, EVALUE 6.20e+00; EST_HUMAN HIT: BE717028.1, EVALUE 1.00e-16
CGVSTAAGHRSGRTLVPHGGLPHHYLVQCEWLPGTF

SEQ ID NO: 35087 - protein, 89 aa, Homo sapiens
  MAP TO AC009288.8; EXPRESSED IN ADULT LIVER, SIGNAL =   1; EXPRESSED IN BT474, SIGNAL = 2.3; EXPRESSED IN FETAL LIVER, SIGNAL = 1.4; EXPRESSED IN PLACENTA, SIGNAL = 3.1; EXPRESSED IN HBL100, SIGNAL = 1.3; EXPRESSED IN HEART, SIGNAL =   1; EXPRESSED IN LUNG, SIGNAL =   1; SWISSPROT HIT: Q62786, EVALUE 4.00e-12; EST_HUMAN HIT: BE717028.1, EVALUE 1.00e-26
AQRQVTVQEGPLYRTEGSHITIWCNVSGYQGPSEQNFQWSIYLPSSPEREVQIVSTMDSSFPYAIYTQRVRGGKIFIERVQGNPTLLHI

SEQ ID NO: 35088 - protein, 42 aa, Homo sapiens
  MAP TO AJ239326.3; EXPRESSED IN HELA, SIGNAL =   4; EXPRESSED IN BONE MARROW, SIGNAL = 2.2; EXPRESSED IN LUNG, SIGNAL = 2.9; EXPRESSED IN BRAIN, SIGNAL =   2; EXPRESSED IN BT474, SIGNAL = 2.4; EXPRESSED IN PLACENTA, SIGNAL =   2; EXPRESSED IN HEART, SIGNAL =   2; EXPRESSED IN HBL100, SIGNAL = 2.5; EXPRESSED IN ADULT LIVER, SIGNAL = 1.8; EXPRESSED IN FETAL LIVER, SIGNAL = 1.7; EST_HUMAN HIT: AA860220.1, EVALUE 1.10e-01; SWISSPROT HIT: P79295, EVALUE 3.60e+00
RVPQGWQHTWAWRGLSALQWGWWWPRQKAAPGGGQQWPLQVP

SEQ ID NO: 35089 - protein, 68 aa, Homo sapiens
  MAP TO AC010680.2; EXPRESSED IN ADULT LIVER, SIGNAL = 1.8; EXPRESSED IN BT474, SIGNAL = 1.9; EXPRESSED IN HEART, SIGNAL = 3.1
VTIMEEKERAYTLEEEAVSVQREEEYEEYEEYDYKEFEEYEPTEEYDQYEEYEEREYERYEEHEEYIT

SEQ ID NO: 35090 - protein, 30 aa, Homo sapiens
  MAP TO AC010726.2; EXPRESSED IN PLACENTA, SIGNAL = 1.1; EXPRESSED IN HEART, SIGNAL = 1.6; EXPRESSED IN BONE MARROW, SIGNAL = 1.2; EXPRESSED IN BT474, SIGNAL = 1.1; EXPRESSED IN FETAL LIVER, SIGNAL = 0.99; EXPRESSED IN ADULT LIVER, SIGNAL = 1.2; EXPRESSED IN HELA, SIGNAL = 1.5
FWPNYTMQFQILSLMSALKILSFVCQLLRM

SEQ ID NO: 35091 - protein, 53 aa, Homo sapiens
  MAP TO AC011193.1; EXPRESSED IN HBL100, SIGNAL = 1.4; EXPRESSED IN HELA, SIGNAL = 1.3; EXPRESSED IN HEART, SIGNAL = 1.5; EXPRESSED IN LUNG, SIGNAL = 1.8; EXPRESSED IN BRAIN, SIGNAL = 1.6; EXPRESSED IN BT474, SIGNAL = 1.1; EXPRESSED IN ADULT LIVER, SIGNAL = 1.7; EXPRESSED IN PLACENTA, SIGNAL = 2.2; EXPRESSED IN BONE MARROW, SIGNAL = 1.5; EXPRESSED IN FETAL LIVER, SIGNAL = 2.4; EST_HUMAN HIT: AV734258.1, EVALUE 1.00e-17
  unsure 3
  unsure 30
SHXRSREVENNPETFTSHAEAHTLALQDEXFLQRFCACCSWQPLSALRDLLSQ

SEQ ID NO: 35092 - protein, 41 aa, Homo sapiens
  MAP TO AC010872.2; EXPRESSED IN FETAL LIVER, SIGNAL = 5.3; EXPRESSED IN HBL100, SIGNAL = 1.8; EXPRESSED IN HELA, SIGNAL = 2.2; EXPRESSED IN HEART, SIGNAL = 2.3; EXPRESSED IN BONE MARROW, SIGNAL =   2; EXPRESSED IN LUNG, SIGNAL = 1.4; EXPRESSED IN ADULT LIVER, SIGNAL =  12; EXPRESSED IN BT474, SIGNAL = 1.4; EXPRESSED IN PLACENTA, SIGNAL = 2.3; EXPRESSED IN BRAIN, SIGNAL = 1.5; EST_HUMAN HIT: AI174976.1, EVALUE 9.00e-16; SWISSPROT HIT: P04114, EVALUE 1.00e-16
VVTYLVALIPEPSAQQLREIFNMARDQRSRATLYALSHAVN

SEQ ID NO: 35093 - protein, 121 aa, Homo sapiens
  MAP TO AC011191.1; EXPRESSED IN BT474, SIGNAL = 2.3; EXPRESSED IN HBL100, SIGNAL = 2.7; EXPRESSED IN HELA, SIGNAL = 3.6; EXPRESSED IN BONE MARROW, SIGNAL = 4.1; EXPRESSED IN LUNG, SIGNAL = 2.7; EXPRESSED IN ADULT LIVER, SIGNAL = 3.4; EXPRESSED IN FETAL LIVER, SIGNAL = 3.7; EXPRESSED IN PLACENTA, SIGNAL = 3.9; EXPRESSED IN HEART, SIGNAL = 3.9; EXPRESSED IN BRAIN, SIGNAL = 2.8; SWISSPROT HIT: P46626, EVALUE 1.80e+00; EST_HUMAN HIT: BE882341.1, EVALUE 1.90e-01
ELASMLSLGCEHPRARRRPLPHLQLVQWHIQLLQPQFLRALREGQGSSAYPNKMPFCRGPSRQRFPALHTPTSSPSGRVGVRKKPGWELPNRERRGGKEGEALRWPHLHEASRSQMVRVVE

SEQ ID NO: 35094 - protein, 50 aa, Homo sapiens
  MAP TO AC011290.1; EXPRESSED IN PLACENTA, SIGNAL = 7.2; EXPRESSED IN BONE MARROW, SIGNAL = 6.6; EXPRESSED IN BRAIN, SIGNAL = 5.8; EXPRESSED IN BT474, SIGNAL = 4.1; EXPRESSED IN FETAL LIVER, SIGNAL = 7.6; EXPRESSED IN HBL100, SIGNAL = 5.6; EXPRESSED IN HELA, SIGNAL = 7.6; EXPRESSED IN HEART, SIGNAL =  10; EXPRESSED IN LUNG, SIGNAL =   5; EXPRESSED IN ADULT LIVER, SIGNAL = 7.2; EST_HUMAN HIT: AI928867.1, EVALUE 6.00e-21; SWISSPROT HIT: P56223, EVALUE 5.00e-10
EMTEIAEKLNYDREVVRVWFCNKRQALKNTIKRLKQHEPATAVPLEPLTD

SEQ ID NO: 35095 - protein, 35 aa, Homo sapiens
  MAP TO AC011290.1; EXPRESSED IN PLACENTA, SIGNAL = 7.2; EXPRESSED IN BONE MARROW, SIGNAL = 6.6; EXPRESSED IN BRAIN, SIGNAL = 5.8; EXPRESSED IN BT474, SIGNAL = 4.1; EXPRESSED IN FETAL LIVER, SIGNAL = 7.6; EXPRESSED IN HBL100, SIGNAL = 5.6; EXPRESSED IN HELA, SIGNAL = 7.6; EXPRESSED IN HEART, SIGNAL =  10; EXPRESSED IN LUNG, SIGNAL =   5; EXPRESSED IN ADULT LIVER, SIGNAL = 7.2; SWISSPROT HIT: P36368, EVALUE 8.20e+00
LKSWTSPLKVPRRSSRCLSGGWLRLRPAIEQVCRT

SEQ ID NO: 35096 - protein, 46 aa, Homo sapiens
  MAP TO AL035691.17; EXPRESSED IN BONE MARROW, SIGNAL = 2.4; EXPRESSED IN LUNG, SIGNAL = 1.4; EXPRESSED IN BT474, SIGNAL = 1.8; EXPRESSED IN ADULT LIVER, SIGNAL = 1.9; EXPRESSED IN FETAL LIVER, SIGNAL = 1.6; EXPRESSED IN HELA, SIGNAL =   2; EXPRESSED IN PLACENTA, SIGNAL = 2.1; EXPRESSED IN HBL100, SIGNAL = 2.7; EXPRESSED IN HEART, SIGNAL = 1.3; EXPRESSED IN BRAIN, SIGNAL = 1.8; SWISSPROT HIT: O28392, EVALUE 6.00e+00; EST_HUMAN HIT: AA088605.1, EVALUE 4.00e-01
VTLTSCFSSFPVIHGKLLIPKIMYFIKSTSVEVWILSSAGHQVLFV

SEQ ID NO: 35097 - protein, 47 aa, Homo sapiens
  MAP TO AL049593.4; EXPRESSED IN ADULT LIVER, SIGNAL = 2.1; EXPRESSED IN BT474, SIGNAL =   2; EXPRESSED IN FETAL LIVER, SIGNAL = 2.5; EXPRESSED IN PLACENTA, SIGNAL = 2.2; EXPRESSED IN HBL100, SIGNAL = 1.8; EXPRESSED IN HELA, SIGNAL =   2; EXPRESSED IN HEART, SIGNAL =   2; EXPRESSED IN BRAIN, SIGNAL = 2.8; EXPRESSED IN BONE MARROW, SIGNAL = 2.4; EXPRESSED IN LUNG, SIGNAL = 1.4; SWISSPROT HIT: P10687, EVALUE 2.00e-06; EST_HUMAN HIT: BE697682.1, EVALUE 3.00e-05
EQDLAALDAEMTQKLIDLKDKQQQQLLNLRQEQYYSEKYQKREHIKL

SEQ ID NO: 35098 - protein, 28 aa, Homo sapiens
  MAP TO AL049812.3; EXPRESSED IN HEART, SIGNAL = 1.4; EXPRESSED IN LUNG, SIGNAL = 1.1; EXPRESSED IN BRAIN, SIGNAL = 2.9; EXPRESSED IN BT474, SIGNAL = 2.1; EXPRESSED IN ADULT LIVER, SIGNAL = 3.5; EXPRESSED IN PLACENTA, SIGNAL = 2.7; EXPRESSED IN HBL100, SIGNAL = 2.4; EXPRESSED IN BONE MARROW, SIGNAL = 3.1; EXPRESSED IN FETAL LIVER, SIGNAL = 3.9; EXPRESSED IN HELA, SIGNAL =   2; EST_HUMAN HIT: AA707422.1, EVALUE 5.50e-02
GKPQEAYSHGGREGIAAMSHGKRERRRF

SEQ ID NO: 35099 - protein, 77 aa, Homo sapiens
  MAP TO AL109757.1; EXPRESSED IN PLACENTA, SIGNAL = 1.5; EXPRESSED IN HBL100, SIGNAL = 2.9; EXPRESSED IN HEART, SIGNAL = 0.95; EXPRESSED IN LUNG, SIGNAL =   1; EXPRESSED IN BRAIN, SIGNAL = 0.99; EXPRESSED IN BONE MARROW, SIGNAL = 0.96; EXPRESSED IN BT474, SIGNAL = 2.8; EXPRESSED IN ADULT LIVER, SIGNAL = 0.91; EXPRESSED IN FETAL LIVER, SIGNAL = 0.89; SWISSPROT HIT: Q07878, EVALUE 5.00e-06; EST_HUMAN HIT: M78374.1, EVALUE 4.00e-26
IIGGLTSVITSTVEGVKTEGGVSGFISGLGKGLVGTVTKPVAGALDFASETAQAVRDTATLSGPRSVVWEEWLLQFP

SEQ ID NO: 35100 - protein, 65 aa, Homo sapiens
  MAP TO AL109757.1; EXPRESSED IN PLACENTA, SIGNAL = 1.5; EXPRESSED IN HBL100, SIGNAL = 2.9; EXPRESSED IN HEART, SIGNAL = 0.95; EXPRESSED IN LUNG, SIGNAL =   1; EXPRESSED IN BRAIN, SIGNAL = 0.99; EXPRESSED IN BONE MARROW, SIGNAL = 0.96; EXPRESSED IN BT474, SIGNAL = 2.8; EXPRESSED IN ADULT LIVER, SIGNAL = 0.91; EXPRESSED IN FETAL LIVER, SIGNAL = 0.89; EST_HUMAN HIT: M78374.1, EVALUE 2.00e-26
SGRCENRRGCQRFHIWPWKRACWHCNQASGRRPGFCIRNSPGGERHSHTQRPQVSGVGRMAFAVS

SEQ ID NO: 35101 - protein, 63 aa, Homo sapiens
  MAP TO AL109801.5; EXPRESSED IN FETAL LIVER, SIGNAL = 1.2; EXPRESSED IN ADULT LIVER, SIGNAL = 1.1; EXPRESSED IN HELA, SIGNAL = 1.4; EXPRESSED IN PLACENTA, SIGNAL = 1.3; EXPRESSED IN HBL100, SIGNAL = 0.93; EXPRESSED IN HEART, SIGNAL = 1.4; EXPRESSED IN BONE MARROW, SIGNAL = 1.2; EXPRESSED IN BRAIN, SIGNAL =   1; EST_HUMAN HIT: AA581502.1, EVALUE 4.00e-06
TCTGIRMMQRRLAWSLHKDDAQIREVFHIKTKKKKKVDHGRREARLDCSSNFDEQSSMWRLAS

SEQ ID NO: 35102 - protein, 32 aa, Homo sapiens
  MAP TO AL050330.9; EXPRESSED IN BONE MARROW, SIGNAL =   1; EXPRESSED IN BRAIN, SIGNAL = 1.2; EXPRESSED IN FETAL LIVER, SIGNAL = 1.2; EXPRESSED IN ADULT LIVER, SIGNAL = 1.3; EXPRESSED IN PLACENTA, SIGNAL = 1.2; EXPRESSED IN HELA, SIGNAL = 1.3; EXPRESSED IN HEART, SIGNAL = 1.2
QPMECLASENMYSTGSVRNKYPRKYNIAQTRS

SEQ ID NO: 35103 - protein, 77 aa, Homo sapiens
  MAP TO Z97832.10; EXPRESSED IN BONE MARROW, SIGNAL = 2.9; EXPRESSED IN LUNG, SIGNAL = 2.5; EXPRESSED IN BRAIN, SIGNAL = 2.8; EXPRESSED IN FETAL LIVER, SIGNAL = 2.2; EXPRESSED IN ADULT LIVER, SIGNAL = 2.4; EXPRESSED IN PLACENTA, SIGNAL = 4.1; EXPRESSED IN HEART, SIGNAL = 2.4; EXPRESSED IN HELA, SIGNAL = 2.7; EXPRESSED IN HBL100, SIGNAL = 5.2; EXPRESSED IN BT474, SIGNAL = 3.1; EST_HUMAN HIT: BE742328.1, EVALUE 2.00e-42; SWISSPROT HIT: P36508, EVALUE 1.00e-41
EKPYVCTVPGCGKRFTEYSSLYKHHVVHTHCKPYTCSTCGKTYRQTSTLAMHKRSAHGELEATEESEQALYEQQQLE

SEQ ID NO: 35104 - protein, 189 aa, Homo sapiens
  MAP TO AL035685.13; EXPRESSED IN BRAIN, SIGNAL = 4.3; EXPRESSED IN BT474, SIGNAL = 3.4; EXPRESSED IN FETAL LIVER, SIGNAL =   5; EXPRESSED IN HBL100, SIGNAL = 3.3; EXPRESSED IN HELA, SIGNAL = 3.2; EXPRESSED IN HEART, SIGNAL = 3.2; EXPRESSED IN LUNG, SIGNAL = 2.8; EXPRESSED IN BONE MARROW, SIGNAL = 3.3; EXPRESSED IN ADULT LIVER, SIGNAL = 4.8; EXPRESSED IN PLACENTA, SIGNAL = 3.6; SWISSPROT HIT: Q14721, EVALUE 1.00e-103; EST_HUMAN HIT: U69191.1, EVALUE 9.00e-38
ILAIISIMFIVLSTIALSLNTLPELQSLDEFGQSTDNPQLAHVEAVCIAWFTMEYLLRFLSSPKKWKFFKGPLNAIDLLAILPYYVTIFLTESNKSVLQFQNVRRVVQIFRIMRILRILKLARHSTGLQSLGFTLRRSYNELGLLILFLAMGIMIFSSLVFFAEKDEDDTKFKSIPASFWWATITMTTV

SEQ ID NO: 35105 - protein, 35 aa, Homo sapiens
  MAP TO AL035685.13; EXPRESSED IN BRAIN, SIGNAL = 4.3; EXPRESSED IN BT474, SIGNAL = 3.4; EXPRESSED IN FETAL LIVER, SIGNAL =   5; EXPRESSED IN HBL100, SIGNAL = 3.3; EXPRESSED IN HELA, SIGNAL = 3.2; EXPRESSED IN HEART, SIGNAL = 3.2; EXPRESSED IN LUNG, SIGNAL = 2.8; EXPRESSED IN BONE MARROW, SIGNAL = 3.3; EXPRESSED IN ADULT LIVER, SIGNAL = 4.8; EXPRESSED IN PLACENTA, SIGNAL = 3.6; EST_HUMAN HIT: W73722.1, EVALUE 3.30e+00; SWISSPROT HIT: P22544, EVALUE 3.60e+00
WLITKSHSLLLTDPCHNFHHVHRPLHHCPVPQHAA

SEQ ID NO: 35106 - protein, 133 aa, Homo sapiens
  MAP TO AL049843.18; EXPRESSED IN PLACENTA, SIGNAL = 7.4; EXPRESSED IN HBL100, SIGNAL = 8.1; EXPRESSED IN HELA, SIGNAL = 7.4; EXPRESSED IN HEART, SIGNAL = 4.5; EXPRESSED IN BONE MARROW, SIGNAL = 6.9; EXPRESSED IN LUNG, SIGNAL = 4.1; EXPRESSED IN BRAIN, SIGNAL = 5.5; EXPRESSED IN ADULT LIVER, SIGNAL = 5.1; EXPRESSED IN BT474, SIGNAL = 6.4; EXPRESSED IN FETAL LIVER, SIGNAL = 8.6; EST_HUMAN HIT: BF437021.1, EVALUE 6.00e-13; SWISSPROT HIT: P37094, EVALUE 5.10e-01
SDPRTGSHSLFDFFGGKVQVAIADPLNLKPVPKTVVAAAFELDLQHVDGLLHETPARGVCVPVVLHAVLEPLAQGVLQRAPKQKAAESHKEEDDVEENTDSQVRLQPGLPSGILGWVQGVVADLPSQRVEDTG

SEQ ID NO: 35107 - protein, 28 aa, Homo sapiens
  MAP TO AL049843.18; EXPRESSED IN PLACENTA, SIGNAL = 7.4; EXPRESSED IN HBL100, SIGNAL = 8.1; EXPRESSED IN HELA, SIGNAL = 7.4; EXPRESSED IN HEART, SIGNAL = 4.5; EXPRESSED IN BONE MARROW, SIGNAL = 6.9; EXPRESSED IN LUNG, SIGNAL = 4.1; EXPRESSED IN BRAIN, SIGNAL = 5.5; EXPRESSED IN ADULT LIVER, SIGNAL = 5.1; EXPRESSED IN BT474, SIGNAL = 6.4; EXPRESSED IN FETAL LIVER, SIGNAL = 8.6; SWISSPROT HIT: O13374, EVALUE 3.70e+00
VGPRALAHELVLRVGWHHHLQPRTVPED

SEQ ID NO: 35108 - protein, 59 aa, Homo sapiens
  MAP TO NM_006894.1; EXPRESSED IN LUNG, SIGNAL = 2.9; EXPRESSED IN HEART, SIGNAL = 0.89; SWISSPROT HIT: Q99518, EVALUE 7.00e-30; EST_HUMAN HIT: AV733798.1, EVALUE 9.00e-29
DGRASIYQSVVTNTSKEMSCFSDFPMPEDFPNFLHNSKLLEYFRIFAKKFDLLKYIQFQ

SEQ ID NO: 35109 - protein, 22 aa, Homo sapiens
  MAP TO NM_006894.1; EXPRESSED IN LUNG, SIGNAL = 2.9; EXPRESSED IN HEART, SIGNAL = 0.89; EST_HUMAN HIT: BF672555.1, EVALUE 1.00e-06
RWPSKYLSICRYQHQQRNVLFQ

SEQ ID NO: 35110 - protein, 53 aa, Homo sapiens
  MAP TO Z83844.5; EXPRESSED IN BRAIN, SIGNAL = 1.1; EXPRESSED IN BONE MARROW, SIGNAL = 1.8; EXPRESSED IN LUNG, SIGNAL = 1.3; EXPRESSED IN BT474, SIGNAL = 1.8; EXPRESSED IN ADULT LIVER, SIGNAL = 1.3; EXPRESSED IN FETAL LIVER, SIGNAL = 1.6; EXPRESSED IN HELA, SIGNAL = 1.4; EXPRESSED IN PLACENTA, SIGNAL =   3; EXPRESSED IN HBL100, SIGNAL =   2; EXPRESSED IN HEART, SIGNAL = 1.1; EST_HUMAN HIT: BE394230.1, EVALUE 6.00e-23; SWISSPROT HIT: P97434, EVALUE 6.00e-06
DKRFTSGKYQDVYVELSHIKTRSEREIEQLKEHLRLAMAALQEKESMRNSLAE

SEQ ID NO: 35111 - protein, 52 aa, Homo sapiens
  MAP TO Z83844.5; EXPRESSED IN BRAIN, SIGNAL = 1.1; EXPRESSED IN BONE MARROW, SIGNAL = 1.8; EXPRESSED IN LUNG, SIGNAL = 1.3; EXPRESSED IN BT474, SIGNAL = 1.8; EXPRESSED IN ADULT LIVER, SIGNAL = 1.3; EXPRESSED IN FETAL LIVER, SIGNAL = 1.6; EXPRESSED IN HELA, SIGNAL = 1.4; EXPRESSED IN PLACENTA, SIGNAL =   3; EXPRESSED IN HBL100, SIGNAL =   2; EXPRESSED IN HEART, SIGNAL = 1.1; EST_HUMAN HIT: R78078.1, EVALUE 2.00e-10
RGGCRGVCPAGWAGAEALPHPGLPGPPQPGHFLLLASNSRSVKRTMKPATRG

SEQ ID NO: 35112 - protein, 509 aa, Homo sapiens
  MAP TO AC011307.1; EXPRESSED IN HEART, SIGNAL = 1.5; EXPRESSED IN BRAIN, SIGNAL = 1.5; EXPRESSED IN BONE MARROW, SIGNAL = 1.5; EXPRESSED IN LUNG, SIGNAL = 1.7; EXPRESSED IN BT474, SIGNAL = 4.2; EXPRESSED IN ADULT LIVER, SIGNAL = 2.5; EXPRESSED IN FETAL LIVER, SIGNAL = 1.3; EXPRESSED IN HELA, SIGNAL = 1.2; EXPRESSED IN PLACENTA, SIGNAL = 2.3; EXPRESSED IN HBL100, SIGNAL = 1.5; EST_HUMAN HIT: AW207280.1, EVALUE 7.00e-40; SWISSPROT HIT: P08640, EVALUE 3.00e-03
TATSAEESSADVPLLSEGKHILSTISSASMGLEHHNNGVILVEPEVTSTPLEEVVDEYSKKTEEMTSTEGDLKGTAASTLISEPYEQSPTLHTLDTVYEEPTHEETETEGWSAADVGSSPDPTSSEYELPLVVVSLAESKPVQYFDPDLETNSQPHEDNIKEYSFAHLTPTAIIWFNDSSTSLSFEDSTVGEQGVPGKSHLQGPTENIQLVKSSFSTQDTLLIKKGMKEMSQTLQGGNMLEGDPTHSRSSENEGQESKSITLPDSTLGITSSTSPVKKPAETTVVTLLHKDTTTETTPRQKVASSSTMSTHPSRRRPNGRKLHPHKFHHRHKQTPPTTFAPLETFSTQPTQATDIKISNQMESSLVPTSWEINTVNTPKQLEMEKNVELISKGTPRRKHGKRPNKHRYTPSTVSSRASASKPSPSPENKHRNIVTPSSETTLLPRNVSLKTEGVYDSLDYTTTTRKIHSSHHKVQDTLPVMYKPTSDGKEIQDDVATNVDKHKSDILVP

SEQ ID NO: 35113 - protein, 32 aa, Homo sapiens
  MAP TO AC011307.1; EXPRESSED IN HEART, SIGNAL = 1.5; EXPRESSED IN BRAIN, SIGNAL = 1.5; EXPRESSED IN BONE MARROW, SIGNAL = 1.5; EXPRESSED IN LUNG, SIGNAL = 1.7; EXPRESSED IN BT474, SIGNAL = 4.2; EXPRESSED IN ADULT LIVER, SIGNAL = 2.5; EXPRESSED IN FETAL LIVER, SIGNAL = 1.3; EXPRESSED IN HELA, SIGNAL = 1.2; EXPRESSED IN PLACENTA, SIGNAL = 2.3; EXPRESSED IN HBL100, SIGNAL = 1.5; EST_HUMAN HIT: AW410893.1, EVALUE 3.00e-08
ADHITVGITVTKKGSGSPSKRGRWPGPKALSR

SEQ ID NO: 35114 - protein, 39 aa, Homo sapiens
  MAP TO AC007308.13; EXPRESSED IN HEART, SIGNAL = 3.3; EXPRESSED IN LUNG, SIGNAL = 3.7; EXPRESSED IN BRAIN, SIGNAL = 3.2; EXPRESSED IN FETAL LIVER, SIGNAL = 4.4; EXPRESSED IN ADULT LIVER, SIGNAL = 2.1; EXPRESSED IN PLACENTA, SIGNAL = 3.2; EXPRESSED IN HELA, SIGNAL =  17; EXPRESSED IN HBL100, SIGNAL = 3.1; EXPRESSED IN BONE MARROW, SIGNAL = 3.4; EXPRESSED IN BT474, SIGNAL = 2.3; EST_HUMAN HIT: N87172.1, EVALUE 6.40e+00
VQKLLCMCPVDFHGIFQLDERRRDAVIALGIFLIESDLQ

SEQ ID NO: 35115 - protein, 17 aa, Homo sapiens
  MAP TO AC007308.13; EXPRESSED IN HEART, SIGNAL = 3.3; EXPRESSED IN LUNG, SIGNAL = 3.7; EXPRESSED IN BRAIN, SIGNAL = 3.2; EXPRESSED IN FETAL LIVER, SIGNAL = 4.4; EXPRESSED IN ADULT LIVER, SIGNAL = 2.1; EXPRESSED IN PLACENTA, SIGNAL = 3.2; EXPRESSED IN HELA, SIGNAL =  17; EXPRESSED IN HBL100, SIGNAL = 3.1; EXPRESSED IN BONE MARROW, SIGNAL = 3.4; EXPRESSED IN BT474, SIGNAL = 2.3
SKSFFACVQWISMGSSS

SEQ ID NO: 35116 - protein, 38 aa, Homo sapiens
  MAP TO AC007375.4; EXPRESSED IN FETAL LIVER, SIGNAL = 2.8; EXPRESSED IN HELA, SIGNAL = 2.3; EXPRESSED IN LUNG, SIGNAL = 4.2; EXPRESSED IN BRAIN, SIGNAL = 2.4; EXPRESSED IN BT474, SIGNAL = 1.5; EXPRESSED IN ADULT LIVER, SIGNAL = 2.1; EXPRESSED IN PLACENTA, SIGNAL = 2.4; EXPRESSED IN HEART, SIGNAL = 2.2; EXPRESSED IN HBL100, SIGNAL = 1.7; EXPRESSED IN BONE MARROW, SIGNAL =   2; SWISSPROT HIT: P35219, EVALUE 2.80e+00; EST_HUMAN HIT: BF370841.1, EVALUE 2.00e-17
PGLRLCDHCEEPPDGHRLSALPQAPLPRGHWCPSAAGQ

SEQ ID NO: 35117 - protein, 19 aa, Homo sapiens
  MAP TO AC007375.4; EXPRESSED IN FETAL LIVER, SIGNAL = 2.8; EXPRESSED IN HELA, SIGNAL = 2.3; EXPRESSED IN LUNG, SIGNAL = 4.2; EXPRESSED IN BRAIN, SIGNAL = 2.4; EXPRESSED IN BT474, SIGNAL = 1.5; EXPRESSED IN ADULT LIVER, SIGNAL = 2.1; EXPRESSED IN PLACENTA, SIGNAL = 2.4; EXPRESSED IN HEART, SIGNAL = 2.2; EXPRESSED IN HBL100, SIGNAL = 1.7; EXPRESSED IN BONE MARROW, SIGNAL =   2
CASSPLCCLPSSQTWPTAL

SEQ ID NO: 35118 - protein, 39 aa, Homo sapiens
  MAP TO AC007078.2; EXPRESSED IN BT474, SIGNAL = 3.3; EXPRESSED IN HBL100, SIGNAL = 4.2; EXPRESSED IN LUNG, SIGNAL = 2.8; EXPRESSED IN BRAIN, SIGNAL = 3.7; EXPRESSED IN FETAL LIVER, SIGNAL = 3.9; EXPRESSED IN ADULT LIVER, SIGNAL = 3.4; EXPRESSED IN PLACENTA, SIGNAL = 4.4; EXPRESSED IN HEART, SIGNAL = 4.5; EXPRESSED IN HELA, SIGNAL = 4.2; EXPRESSED IN BONE MARROW, SIGNAL = 4.7; SWISSPROT HIT: P53785, EVALUE 2.00e-17; EST_HUMAN HIT: BE747227.1, EVALUE 3.00e-16
VTDDALVYSTFLLHDPRPVGNLSIVRTNRAEIPIECRYP

SEQ ID NO: 35119 - protein, 40 aa, Homo sapiens
  MAP TO AC007242.3; EXPRESSED IN BONE MARROW, SIGNAL = 4.4; EXPRESSED IN FETAL LIVER, SIGNAL = 5.3; EXPRESSED IN HBL100, SIGNAL = 3.3; EXPRESSED IN HELA, SIGNAL = 4.8; EXPRESSED IN HEART, SIGNAL = 4.8; EXPRESSED IN BRAIN, SIGNAL = 4.4; EXPRESSED IN LUNG, SIGNAL = 3.1; EXPRESSED IN BT474, SIGNAL = 3.4; EXPRESSED IN ADULT LIVER, SIGNAL = 4.2; EXPRESSED IN PLACENTA, SIGNAL =   5; SWISSPROT HIT: Q04899, EVALUE 9.00e-14; EST_HUMAN HIT: BE562611.1, EVALUE 7.00e-17
FMFQLLRGLAYIHHQHVLHRDLKPQNLLISHLGELKLADF

SEQ ID NO: 35120 - protein, 21 aa, Homo sapiens
  MAP TO AC007242.3; EXPRESSED IN BONE MARROW, SIGNAL = 4.4; EXPRESSED IN FETAL LIVER, SIGNAL = 5.3; EXPRESSED IN HBL100, SIGNAL = 3.3; EXPRESSED IN HELA, SIGNAL = 4.8; EXPRESSED IN HEART, SIGNAL = 4.8; EXPRESSED IN BRAIN, SIGNAL = 4.4; EXPRESSED IN LUNG, SIGNAL = 3.1; EXPRESSED IN BT474, SIGNAL = 3.4; EXPRESSED IN ADULT LIVER, SIGNAL = 4.2; EXPRESSED IN PLACENTA, SIGNAL =   5; EST_HUMAN HIT: BE562611.1, EVALUE 8.30e+00
SCFNFCGAWRTSTTNTFFTGT

SEQ ID NO: 35121 - protein, 49 aa, Homo sapiens
  MAP TO AC007279.3; EXPRESSED IN BONE MARROW, SIGNAL = 1.5; EXPRESSED IN LUNG, SIGNAL = 0.9; EXPRESSED IN FETAL LIVER, SIGNAL = 1.4; EXPRESSED IN ADULT LIVER, SIGNAL =   1; EXPRESSED IN PLACENTA, SIGNAL = 1.6; EXPRESSED IN HEART, SIGNAL = 1.9; EXPRESSED IN HELA, SIGNAL = 1.5; EXPRESSED IN HBL100, SIGNAL = 1.5; EXPRESSED IN BRAIN, SIGNAL = 1.2; EXPRESSED IN BT474, SIGNAL =   4; EST_HUMAN HIT: AI444821.1, EVALUE 7.00e-22; SWISSPROT HIT: P54936, EVALUE 8.00e-02
DEDLQEMENLAQRMETQFGQFFDHVIVNDSLHDACAQLLSAIQKAQEEP

SEQ ID NO: 35122 - protein, 70 aa, Homo sapiens
  MAP TO AC007375.4; EXPRESSED IN BT474, SIGNAL = 1.7; EXPRESSED IN FETAL LIVER, SIGNAL = 2.4; EXPRESSED IN ADULT LIVER, SIGNAL = 1.2; EXPRESSED IN HBL100, SIGNAL = 1.7; EXPRESSED IN HELA, SIGNAL = 1.8; EXPRESSED IN PLACENTA, SIGNAL =   2; EXPRESSED IN HEART, SIGNAL = 1.7; EXPRESSED IN BRAIN, SIGNAL = 2.1; EXPRESSED IN BONE MARROW, SIGNAL = 2.4; EXPRESSED IN LUNG, SIGNAL = 1.3
GDDSAGKPGLLLTLAVMQLPPAPCPLLGLLLTLAVMQLPPAPCPLLPLLVAATLAGPNCKSRGLLGLRPL

SEQ ID NO: 35123 - protein, 46 aa, Homo sapiens
  MAP TO AC007688.15; EXPRESSED IN PLACENTA, SIGNAL = 1.3; EXPRESSED IN BT474, SIGNAL = 1.5; EXPRESSED IN FETAL LIVER, SIGNAL = 1.8; EXPRESSED IN HBL100, SIGNAL = 1.1; EXPRESSED IN HELA, SIGNAL = 1.2; EXPRESSED IN HEART, SIGNAL = 0.99; EXPRESSED IN LUNG, SIGNAL = 1.2; EXPRESSED IN BONE MARROW, SIGNAL = 1.3; EXPRESSED IN ADULT LIVER, SIGNAL = 1.1; SWISSPROT HIT: P44744, EVALUE 5.30e-01; EST_HUMAN HIT: BF081325.1, EVALUE 5.00e-20
EEVAYEERACEGGKFATVEVTDKPVDEALREAMPKVAKYAGGTNDK

SEQ ID NO: 35124 - protein, 46 aa, Homo sapiens
  MAP TO AC007688.15; EXPRESSED IN PLACENTA, SIGNAL = 1.3; EXPRESSED IN BT474, SIGNAL = 1.5; EXPRESSED IN FETAL LIVER, SIGNAL = 1.8; EXPRESSED IN HBL100, SIGNAL = 1.1; EXPRESSED IN HELA, SIGNAL = 1.2; EXPRESSED IN HEART, SIGNAL = 0.99; EXPRESSED IN LUNG, SIGNAL = 1.2; EXPRESSED IN BONE MARROW, SIGNAL = 1.3; EXPRESSED IN ADULT LIVER, SIGNAL = 1.1; EST_HUMAN HIT: R77154.1, EVALUE 1.00e-08
QISLWMRLYGKQCPRSQSMRGAPMTRVSTPAGCGSGLGDQLCKVSL

SEQ ID NO: 35125 - protein, 61 aa, Homo sapiens
  MAP TO AC009496.1; EXPRESSED IN FETAL LIVER, SIGNAL = 1.4; EXPRESSED IN HEART, SIGNAL = 0.86; EXPRESSED IN BRAIN, SIGNAL = 0.99; EST_HUMAN HIT: BE564212.1, EVALUE 9.10e-01; SWISSPROT HIT: Q16625, EVALUE 5.80e+00
QKKSAVHRAIPICISQALPREKHKVFWKCKHVKGTVVYQGHKKHCGSTKAQLAAAEITALE

SEQ ID NO: 35126 - protein, 52 aa, Homo sapiens
  MAP TO AC009496.1; EXPRESSED IN FETAL LIVER, SIGNAL = 1.4; EXPRESSED IN HEART, SIGNAL = 0.86; EXPRESSED IN BRAIN, SIGNAL = 0.99; SWISSPROT HIT: P21849, EVALUE 2.60e+00
GRRSRLCTEPSLSAYPRHSQGRSTKCFGNVNMLREQSSIKATRSIVDPRRHN

SEQ ID NO: 35127 - protein, 29 aa, Homo sapiens
  MAP TO AC009503.2; EXPRESSED IN FETAL LIVER, SIGNAL = 1.1; EXPRESSED IN PLACENTA, SIGNAL = 0.97; EXPRESSED IN HEART, SIGNAL = 0.94; EXPRESSED IN BRAIN, SIGNAL = 0.91; EST_HUMAN HIT: AA343827.1, EVALUE 1.80e+00
TYSKSQFKLATFQMLNGYWQLHWMAQLYR

SEQ ID NO: 35128 - protein, 53 aa, Homo sapiens
  MAP TO AC009896.2; EXPRESSED IN BT474, SIGNAL = 1.3; EXPRESSED IN HBL100, SIGNAL = 1.7; EXPRESSED IN BONE MARROW, SIGNAL = 2.1; EXPRESSED IN LUNG, SIGNAL = 1.5; EXPRESSED IN ADULT LIVER, SIGNAL = 1.4; EXPRESSED IN FETAL LIVER, SIGNAL = 2.3; EXPRESSED IN PLACENTA, SIGNAL = 1.8; EXPRESSED IN HEART, SIGNAL = 2.3; EXPRESSED IN HELA, SIGNAL = 1.9; EXPRESSED IN BRAIN, SIGNAL = 2.4; EST_HUMAN HIT: BF206667.1, EVALUE 2.20e+00
  unsure 3
  unsure 6
  unsure 12
LPXLLXLVSPSXSFALWAQAHIGAPLGFLQCSFLLATGPVVGAYLFFLVQDFP

SEQ ID NO: 35129 - protein, 48 aa, Homo sapiens
  MAP TO AC009896.2; EXPRESSED IN BT474, SIGNAL = 1.3; EXPRESSED IN HBL100, SIGNAL = 1.7; EXPRESSED IN BONE MARROW, SIGNAL = 2.1; EXPRESSED IN LUNG, SIGNAL = 1.5; EXPRESSED IN ADULT LIVER, SIGNAL = 1.4; EXPRESSED IN FETAL LIVER, SIGNAL = 2.3; EXPRESSED IN PLACENTA, SIGNAL = 1.8; EXPRESSED IN HEART, SIGNAL = 2.3; EXPRESSED IN HELA, SIGNAL = 1.9; EXPRESSED IN BRAIN, SIGNAL = 2.4
  unsure 43
  unsure 44
  unsure 48
LESPVPRRKGKHLPPGLWQGEKNIGGSQGGPQCGPGPKAQMRXXAKLX

SEQ ID NO: 35130 - protein, 65 aa, Homo sapiens
  MAP TO AC009946.1; EXPRESSED IN PLACENTA, SIGNAL = 2.3; EXPRESSED IN BRAIN, SIGNAL = 3.3; EXPRESSED IN FETAL LIVER, SIGNAL = 3.3; EXPRESSED IN HBL100, SIGNAL = 5.5; EXPRESSED IN HELA, SIGNAL =   5; EXPRESSED IN HEART, SIGNAL = 1.5; EXPRESSED IN LUNG, SIGNAL = 7.2; EXPRESSED IN BONE MARROW, SIGNAL = 1.6; EXPRESSED IN ADULT LIVER, SIGNAL = 5.8; EXPRESSED IN BT474, SIGNAL =   9; SWISSPROT HIT: O17397, EVALUE 2.00e-08; EST_HUMAN HIT: BE515052.1, EVALUE 6.00e-23
MVPPKISLLKLTQGETLRKLYEQHHVVQDMLVPMKCLQQALHTFQNDIHVSGAGQGGRTRCIPLE

SEQ ID NO: 35131 - protein, 127 aa, Homo sapiens
  MAP TO AC009955.1; EXPRESSED IN BT474, SIGNAL = 3.1; EXPRESSED IN BONE MARROW, SIGNAL = 3.5; EXPRESSED IN LUNG, SIGNAL = 1.9; EXPRESSED IN BRAIN, SIGNAL = 3.5; EXPRESSED IN ADULT LIVER, SIGNAL = 2.4; EXPRESSED IN FETAL LIVER, SIGNAL = 3.4; EXPRESSED IN PLACENTA, SIGNAL = 3.2; EXPRESSED IN HEART, SIGNAL = 2.1; EXPRESSED IN HELA, SIGNAL = 2.7; EXPRESSED IN HBL100, SIGNAL = 2.9; EST_HUMAN HIT: BE277465.1, EVALUE 2.00e-32; SWISSPROT HIT: P40603, EVALUE 3.30e+00
WFVQQHPELELMSSFRERFGRNWLQYRSHLEPSGNPLPATPTTSAPSAPPASSQGPDTAPRPSPPQEEARGPQESPQKMSEEVRAEPQEEEEEKEGKEEKEEGEMVEQGEEEAGEEEEEEQDQKEVE

SEQ ID NO: 35132 - protein, 49 aa, Homo sapiens
  MAP TO AC009955.1; EXPRESSED IN BT474, SIGNAL = 3.1; EXPRESSED IN BONE MARROW, SIGNAL = 3.5; EXPRESSED IN LUNG, SIGNAL = 1.9; EXPRESSED IN BRAIN, SIGNAL = 3.5; EXPRESSED IN ADULT LIVER, SIGNAL = 2.4; EXPRESSED IN FETAL LIVER, SIGNAL = 3.4; EXPRESSED IN PLACENTA, SIGNAL = 3.2; EXPRESSED IN HEART, SIGNAL = 2.1; EXPRESSED IN HELA, SIGNAL = 2.7; EXPRESSED IN HBL100, SIGNAL = 2.9
HRRRKRRRRGRRRRRRGRWWNREKRRQERRKKRSRTRRKWKVSPLWAGA

SEQ ID NO: 35133 - protein, 113 aa, Homo sapiens
  MAP TO AC009961.2; EXPRESSED IN FETAL LIVER, SIGNAL = 1.4; EXPRESSED IN HEART, SIGNAL = 0.87; EST_HUMAN HIT: BE006233.1, EVALUE 4.00e-23; SWISSPROT HIT: P49260, EVALUE 4.40e-01
FITSLLPDMEATLWIGLRWTAYEKINKWTDNRELTYSNFHPLLVSGRLRIPENVSFFKNQYSSYLCEILESFIHFWTKQNPTVLFHLYEMSRIGTSKIVSRLVIARGYGGWKD

SEQ ID NO: 35134 - protein, 25 aa, Homo sapiens
  MAP TO AC009961.2; EXPRESSED IN FETAL LIVER, SIGNAL = 1.4; EXPRESSED IN HEART, SIGNAL = 0.87; EST_HUMAN HIT: BE006233.1, EVALUE 7.00e-09
TLLHPCFRIWKLLYGLVCAGLPMKR

SEQ ID NO: 35135 - protein, 40 aa, Homo sapiens
  MAP TO AC010135.1; EXPRESSED IN ADULT LIVER, SIGNAL =   4; EXPRESSED IN BT474, SIGNAL = 1.7; EXPRESSED IN FETAL LIVER, SIGNAL = 1.4; EXPRESSED IN PLACENTA, SIGNAL = 3.8; EXPRESSED IN HBL100, SIGNAL = 1.8; EXPRESSED IN HELA, SIGNAL = 2.1; EXPRESSED IN HEART, SIGNAL = 1.4; EXPRESSED IN BONE MARROW, SIGNAL = 3.2; EXPRESSED IN LUNG, SIGNAL = 1.7; EXPRESSED IN BRAIN, SIGNAL = 1.8; EST_HUMAN HIT: AI686005.1, EVALUE 4.00e-13
AGLRIFDRKAMGCPWPQCFGAMPLFMLRTRWYWSAVIGLW

SEQ ID NO: 35136 - protein, 26 aa, Homo sapiens
  MAP TO AC009813.2; EXPRESSED IN BONE MARROW, SIGNAL =   7; EXPRESSED IN LUNG, SIGNAL = 6.5; EXPRESSED IN ADULT LIVER, SIGNAL = 8.3; EXPRESSED IN BT474, SIGNAL = 4.5; EXPRESSED IN FETAL LIVER, SIGNAL = 3.9; EXPRESSED IN HBL100, SIGNAL = 5.3; EXPRESSED IN PLACENTA, SIGNAL =  10; EXPRESSED IN HELA, SIGNAL = 5.7; EXPRESSED IN HEART, SIGNAL = 6.5; EXPRESSED IN BRAIN, SIGNAL = 5.9; EST_HUMAN HIT: BE897739.1, EVALUE 1.20e-02
  unsure 23
MVDPPTACAMNLEKPQILNASQXKAA

SEQ ID NO: 35137 - protein, 47 aa, Homo sapiens [sequence omitted]

SEQ ID NO: 35138 - protein, 47 aa, Homo sapiens
  MAP TO AC010734.1; EXPRESSED IN FETAL LIVER, SIGNAL = 1.8; EXPRESSED IN HELA, SIGNAL = 1.1; EXPRESSED IN PLACENTA, SIGNAL = 1.2; EXPRESSED IN HBL100, SIGNAL = 1.1; EXPRESSED IN HEART, SIGNAL = 1.1; EXPRESSED IN BONE MARROW, SIGNAL = 1.2; EXPRESSED IN BRAIN, SIGNAL = 1.6; EST_HUMAN HIT: AW393957.1, EVALUE 4.50e+00
PKTELSEAIGEFCGDGEEDPPKCLTLLASKSTWGIAYLILLDFFFNQ

SEQ ID NO: 35139 - protein, 35 aa, Homo sapiens
  MAP TO AC010734.1; EXPRESSED IN FETAL LIVER, SIGNAL = 1.8; EXPRESSED IN HELA, SIGNAL = 1.1; EXPRESSED IN PLACENTA, SIGNAL = 1.2; EXPRESSED IN HBL100, SIGNAL = 1.1; EXPRESSED IN HEART, SIGNAL = 1.1; EXPRESSED IN BONE MARROW, SIGNAL = 1.2; EXPRESSED IN BRAIN, SIGNAL = 1.6
TQKLSSLKLLVSSVGMERKIPLNALPSWHLSPPGV

SEQ ID NO: 35140 - protein, 26 aa, Homo sapiens
  MAP TO AC011415.1; EXPRESSED IN BT474, SIGNAL = 1.2; EXPRESSED IN FETAL LIVER, SIGNAL = 1.3; EXPRESSED IN HELA, SIGNAL =   1; EXPRESSED IN HBL100, SIGNAL = 1.3; EXPRESSED IN HEART, SIGNAL = 0.88; EXPRESSED IN BRAIN, SIGNAL = 1.6; EXPRESSED IN BONE MARROW, SIGNAL = 0.94
PLPQCPTPAAVEAAGPAAAGCHGNDQ

SEQ ID NO: 35141 - protein, 24 aa, Homo sapiens
  MAP TO AC011415.1; EXPRESSED IN BT474, SIGNAL = 1.2; EXPRESSED IN FETAL LIVER, SIGNAL = 1.3; EXPRESSED IN HELA, SIGNAL =   1; EXPRESSED IN HBL100, SIGNAL = 1.3; EXPRESSED IN HEART, SIGNAL = 0.88; EXPRESSED IN BRAIN, SIGNAL = 1.6; EXPRESSED IN BONE MARROW, SIGNAL = 0.94; EST_HUMAN HIT: BE743182.1, EVALUE 2.80e+00
PPPPVPHPCCGRGCWPGSCWLPWQ

SEQ ID NO: 35142 - protein, 46 aa, Homo sapiens
  MAP TO AC011460.1; EXPRESSED IN FETAL LIVER, SIGNAL = 1.5; EXPRESSED IN ADULT LIVER, SIGNAL = 1.2; EXPRESSED IN HELA, SIGNAL = 0.91; EXPRESSED IN BRAIN, SIGNAL = 1.4; EXPRESSED IN BONE MARROW, SIGNAL = 1.3; EXPRESSED IN BT474, SIGNAL = 1.5; EXPRESSED IN PLACENTA, SIGNAL = 1.2; EXPRESSED IN HEART, SIGNAL = 1.5; EXPRESSED IN HBL100, SIGNAL = 1.3; EST_HUMAN HIT: BF025996.1, EVALUE 1.00e-17; SWISSPROT HIT: Q06730, EVALUE 2.00e-12
GSLSFEDVAVGFTREEWQFLDQSQKVLYKEVMLENYINLVSIGKDS

SEQ ID NO: 35143 - protein, 42 aa, Homo sapiens
  MAP TO AC011460.1; EXPRESSED IN FETAL LIVER, SIGNAL = 1.5; EXPRESSED IN ADULT LIVER, SIGNAL = 1.2; EXPRESSED IN HELA, SIGNAL = 0.91; EXPRESSED IN BRAIN, SIGNAL = 1.4; EXPRESSED IN BONE MARROW, SIGNAL = 1.3; EXPRESSED IN BT474, SIGNAL = 1.5; EXPRESSED IN PLACENTA, SIGNAL = 1.2; EXPRESSED IN HEART, SIGNAL = 1.5; EXPRESSED IN HBL100, SIGNAL = 1.3; EST_HUMAN HIT: BF027258.1, EVALUE 1.00e-13; SWISSPROT HIT: P21260, EVALUE 4.70e+00
IHLRLHWNCYYRGHCHSKMWLWASPGRSGSFWTSLRRSCTRK

SEQ ID NO: 35144 - protein, 62 aa, Homo sapiens
  MAP TO AC011482.1; EXPRESSED IN BT474, SIGNAL = 2.3; EXPRESSED IN HEART, SIGNAL = 1.2; EXPRESSED IN BRAIN, SIGNAL = 2.1; EXPRESSED IN FETAL LIVER, SIGNAL = 1.5; EXPRESSED IN ADULT LIVER, SIGNAL = 1.2; EXPRESSED IN PLACENTA, SIGNAL = 1.8; EXPRESSED IN HELA, SIGNAL = 1.8; EXPRESSED IN HBL100, SIGNAL = 2.6; EXPRESSED IN BONE MARROW, SIGNAL = 1.5
LSPRPPSPSHPQRVRRDRRLCLRLGLPAAPAPGPLSWSQSAAWAASEAASRIRTSSWKKKRS

SEQ ID NO: 35145 - protein, 78 aa, Homo sapiens
  MAP TO AL033526.19; EXPRESSED IN BRAIN, SIGNAL = 2.2; EXPRESSED IN BONE MARROW, SIGNAL = 1.9; EXPRESSED IN LUNG, SIGNAL = 1.2; EXPRESSED IN BT474, SIGNAL = 1.6; EXPRESSED IN FETAL LIVER, SIGNAL = 2.1; EXPRESSED IN ADULT LIVER, SIGNAL = 1.7; EXPRESSED IN HBL100, SIGNAL = 1.9; EXPRESSED IN HELA, SIGNAL = 1.9; EXPRESSED IN PLACENTA, SIGNAL = 1.9; EXPRESSED IN HEART, SIGNAL = 1.8; SWISSPROT HIT: P34820, EVALUE 6.00e-32; EST_HUMAN HIT: BE906200.1, EVALUE 6.00e-15
ARAILSASPALLCLLVERDRALGHQEPHWKEFRFDLTQIPAGEAVTAAEFRIYKVPSIHLLNRTLHVSMFQVVQEQSN

SEQ ID NO: 35146 - protein, 73 aa, Homo sapiens
  MAP TO AL080238.9; EXPRESSED IN HEART, SIGNAL = 1.3; EXPRESSED IN BRAIN, SIGNAL = 1.1; EXPRESSED IN BONE MARROW, SIGNAL = 0.94; EXPRESSED IN BT474, SIGNAL = 1.1; EXPRESSED IN FETAL LIVER, SIGNAL = 1.1; EXPRESSED IN HELA, SIGNAL =   5; SWISSPROT HIT: P75616, EVALUE 3.10e+00; EST_HUMAN HIT: BE512940.1, EVALUE 5.10e-01
YGERLGEYSLFLLCVPSELNQGKCERVSSYFGMNLSGVLKKLPFPPTRESWPPPHFTGTPHNHHGGVSNGALG

SEQ ID NO: 35147 - protein, 18 aa, Homo sapiens
  MAP TO AL080238.9; EXPRESSED IN HEART, SIGNAL = 1.3; EXPRESSED IN BRAIN, SIGNAL = 1.1; EXPRESSED IN BONE MARROW, SIGNAL = 0.94; EXPRESSED IN BT474, SIGNAL = 1.1; EXPRESSED IN FETAL LIVER, SIGNAL = 1.1; EXPRESSED IN HELA, SIGNAL =   5
MGRDLENTLSSCYVYHQN

SEQ ID NO: 35148 - protein, 99 aa, Homo sapiens
  MAP TO AL022337.19; EXPRESSED IN PLACENTA, SIGNAL = 1.6; EXPRESSED IN BONE MARROW, SIGNAL = 1.2; EXPRESSED IN BRAIN, SIGNAL = 1.4; EXPRESSED IN FETAL LIVER, SIGNAL = 1.2; EXPRESSED IN BT474, SIGNAL = 0.96; EXPRESSED IN HEART, SIGNAL = 0.98; EXPRESSED IN HELA, SIGNAL = 1.8; EXPRESSED IN HBL100, SIGNAL = 1.1; EXPRESSED IN LUNG, SIGNAL =   1; EXPRESSED IN ADULT LIVER, SIGNAL = 1.1
KVGQNLVCEHVYYHHHYTMTITIIIITVIISIITITIIIIAIIIIIISIISITTTIIAMIIIMIITIIIIKLSLSSSPTWPSSPSSLSLPSSLNYRYHH

SEQ ID NO: 35149 - protein, 79 aa, Homo sapiens
  MAP TO AL078463.11; EXPRESSED IN ADULT LIVER, SIGNAL = 1.4; EXPRESSED IN PLACENTA, SIGNAL = 1.3; EXPRESSED IN BRAIN, SIGNAL = 1.1; EXPRESSED IN LUNG, SIGNAL =   1; EXPRESSED IN BONE MARROW, SIGNAL =   1; EXPRESSED IN FETAL LIVER, SIGNAL = 1.5; EXPRESSED IN HEART, SIGNAL = 1.3; EXPRESSED IN HELA, SIGNAL = 0.94; EXPRESSED IN HBL100, SIGNAL = 0.95
LGSSTPLGFIHQIWNSDCLKPWRTATRQQRASWFLRRSRLSRRYRSRASSRGRLVHHPTTSCSLPPLPSSRLPGSKSRQ

SEQ ID NO: 35150 - protein, 39 aa, Homo sapiens
  MAP TO AL049612.11; EXPRESSED IN BT474, SIGNAL = 1.1; EXPRESSED IN FETAL LIVER, SIGNAL = 3.8; EXPRESSED IN ADULT LIVER, SIGNAL = 1.5; EXPRESSED IN HELA, SIGNAL = 1.8; EXPRESSED IN PLACENTA, SIGNAL = 2.2; EXPRESSED IN HBL100, SIGNAL = 1.3; EXPRESSED IN HEART, SIGNAL = 2.5; EXPRESSED IN BRAIN, SIGNAL = 2.3; EXPRESSED IN BONE MARROW, SIGNAL =   2; EXPRESSED IN LUNG, SIGNAL = 1.3; SWISSPROT HIT: P46567, EVALUE 8.10e+00
MAHQGDTKFTITPSLEFLSMVVLEYYFLNFNSSFLQTQP

SEQ ID NO: 35151 - protein, 27 aa, Homo sapiens
  MAP TO AF172272.1; EXPRESSED IN ADULT LIVER, SIGNAL = 1.1; EXPRESSED IN BT474, SIGNAL = 1.4; EXPRESSED IN FETAL LIVER, SIGNAL = 1.8; EXPRESSED IN HELA, SIGNAL = 1.7; EXPRESSED IN PLACENTA, SIGNAL =   1; EXPRESSED IN HEART, SIGNAL = 0.99; EXPRESSED IN BRAIN, SIGNAL = 0.93; EST_HUMAN HIT: BE006292.1, EVALUE 2.00e-05
ILMDISNQTRMDTMFVHKDFFHSSNKP

SEQ ID NO: 35152 - protein, 45 aa, Homo sapiens
  MAP TO AL034346.18; EXPRESSED IN FETAL LIVER, SIGNAL = 6.6; EXPRESSED IN HELA, SIGNAL = 6.4; EXPRESSED IN PLACENTA, SIGNAL = 7.7; EXPRESSED IN HBL100, SIGNAL = 4.9; EXPRESSED IN HEART, SIGNAL = 8.6; EXPRESSED IN BRAIN, SIGNAL = 4.3; EXPRESSED IN BONE MARROW, SIGNAL = 6.4; EXPRESSED IN LUNG, SIGNAL = 4.9; EXPRESSED IN BT474, SIGNAL =   4; EXPRESSED IN ADULT LIVER, SIGNAL = 4.8
MNLKEEEAKGMSKNTVFGILRSCRSVPLQQDSPREAAGSLAPLHG

SEQ ID NO: 35153 - protein, 20 aa, Homo sapiens
  MAP TO AL034346.18; EXPRESSED IN FETAL LIVER, SIGNAL = 6.6; EXPRESSED IN HELA, SIGNAL = 6.4; EXPRESSED IN PLACENTA, SIGNAL = 7.7; EXPRESSED IN HBL100, SIGNAL = 4.9; EXPRESSED IN HEART, SIGNAL = 8.6; EXPRESSED IN BRAIN, SIGNAL = 4.3; EXPRESSED IN BONE MARROW, SIGNAL = 6.4; EXPRESSED IN LUNG, SIGNAL = 4.9; EXPRESSED IN BT474, SIGNAL =   4; EXPRESSED IN ADULT LIVER, SIGNAL = 4.8
AMQRCQTACCLSRTVLLQWD

SEQ ID NO: 35154 - protein, 75 aa, Homo sapiens
  MAP TO Z95330.7; EXPRESSED IN HEART, SIGNAL = 1.4; EXPRESSED IN LUNG, SIGNAL =   1; EXPRESSED IN BRAIN, SIGNAL = 1.4; EXPRESSED IN ADULT LIVER, SIGNAL = 1.3; EXPRESSED IN PLACENTA, SIGNAL = 1.6; EXPRESSED IN HELA, SIGNAL =   4; EXPRESSED IN HBL100, SIGNAL = 4.1; EXPRESSED IN BONE MARROW, SIGNAL = 1.3; EXPRESSED IN BT474, SIGNAL = 2.1; EXPRESSED IN FETAL LIVER, SIGNAL = 1.3; EST_HUMAN HIT: BE302937.1, EVALUE 6.00e-11
DDAIQHQHIAVGFTAEDKDVLVVRVLVVEQRQGLPGPQATRLVERDFGDGSEAGGSRALRVRLHGRQAMWGTDLG

SEQ ID NO: 35155 - protein, 60 aa, Homo sapiens
  MAP TO Z95330.7; EXPRESSED IN HEART, SIGNAL = 1.4; EXPRESSED IN LUNG, SIGNAL =   1; EXPRESSED IN BRAIN, SIGNAL = 1.4; EXPRESSED IN ADULT LIVER, SIGNAL = 1.3; EXPRESSED IN PLACENTA, SIGNAL = 1.6; EXPRESSED IN HELA, SIGNAL =   4; EXPRESSED IN HBL100, SIGNAL = 4.1; EXPRESSED IN BONE MARROW, SIGNAL = 1.3; EXPRESSED IN BT474, SIGNAL = 2.1; EXPRESSED IN FETAL LIVER, SIGNAL = 1.3; SWISSPROT HIT: Q64674, EVALUE 1.00e-14; EST_HUMAN HIT: AW162076.1, EVALUE 4.00e-14
SKTYSNMLVLDGIVLGIGRDEFSCQEMVAILPLCSHPKPRKVLIIVGRDGCLAQGGEAPL

SEQ ID NO: 35156 - protein, 39 aa, Homo sapiens
  MAP TO AL049820.14; EXPRESSED IN BONE MARROW, SIGNAL = 1.1; EXPRESSED IN ADULT LIVER, SIGNAL = 1.2; EXPRESSED IN PLACENTA, SIGNAL = 1.2; EXPRESSED IN HEART, SIGNAL = 0.92; EXPRESSED IN BRAIN, SIGNAL = 0.98
GTRLELRMLLEDFVYGQHSHGGWVLQRVREHHVNAWPLP

SEQ ID NO: 35157 - protein, 60 aa, Homo sapiens
  MAP TO AL110114.1; EXPRESSED IN PLACENTA, SIGNAL = 1.4; EXPRESSED IN HELA, SIGNAL = 1.4; EXPRESSED IN HBL100, SIGNAL = 1.1; EXPRESSED IN HEART, SIGNAL = 1.4; EXPRESSED IN BONE MARROW, SIGNAL = 1.2; EXPRESSED IN BRAIN, SIGNAL = 1.3; EXPRESSED IN ADULT LIVER, SIGNAL = 1.1; EXPRESSED IN BT474, SIGNAL = 0.98; EXPRESSED IN FETAL LIVER, SIGNAL = 1.2; EST_HUMAN HIT: BE964106.2, EVALUE 2.10e+00; SWISSPROT HIT: P39880, EVALUE 5.10e-01
LIQEPSDTSFVPWTKTEMGKDVAWKAGWWSSPDPQLWYQTELRSKLAFPYFLAVRVTSPL

SEQ ID NO: 35158 - protein, 140 aa, Homo sapiens
  MAP TO AP000497.1; EXPRESSED IN BT474, SIGNAL = 1.3; EXPRESSED IN FETAL LIVER, SIGNAL = 1.6; EXPRESSED IN HEART, SIGNAL = 1.8; EXPRESSED IN LUNG, SIGNAL = 1.1; EXPRESSED IN BRAIN, SIGNAL = 1.9; EXPRESSED IN ADULT LIVER, SIGNAL = 1.4; EXPRESSED IN PLACENTA, SIGNAL = 2.1; EXPRESSED IN HELA, SIGNAL = 1.7; EXPRESSED IN HBL100, SIGNAL = 1.7; EXPRESSED IN BONE MARROW, SIGNAL = 1.9; EST_HUMAN HIT: BE813232.1, EVALUE 8.00e-24; SWISSPROT HIT: P02640, EVALUE 5.00e-09
EIHGAPCVTAGWGESFLHEQRGTLYPEQSGVLGEKPRGSEEGPGLPLLRSGFPGPGVGHLCHGLGCPSGWLTALLSVLARLPEEVPSFQPRLFECSSHMGCLVLAEVGFFSQEDLDKYDIMLLDTWQEVRWPSLPGGAVN

SEQ ID NO: 35159 - protein, 167 aa, Homo sapiens
  MAP TO AL034405.4; EXPRESSED IN FETAL LIVER, SIGNAL = 2.8; EXPRESSED IN HELA, SIGNAL =   3; EXPRESSED IN HEART, SIGNAL =   5; EXPRESSED IN LUNG, SIGNAL = 1.9; EXPRESSED IN BRAIN, SIGNAL = 3.3; EXPRESSED IN BT474, SIGNAL = 2.4; EXPRESSED IN ADULT LIVER, SIGNAL = 2.4; EXPRESSED IN PLACENTA, SIGNAL = 3.7; EXPRESSED IN HBL100, SIGNAL = 2.6; EXPRESSED IN BONE MARROW, SIGNAL = 2.8; EST_HUMAN HIT: AA601246.1, EVALUE 6.00e-27; SWISSPROT HIT: P39770, EVALUE 5.00e-13
KQVSVAVALLSQKAGSQGLSLDTLNKPSYLTSIPSAASSVTPWLTPFTLKLDRTRVLLNIVSQLPSALLPQAWVLCSSRVLSLLWHYTHPRKRKISHQTSEMCVKPKDEAILYKHNCKNCSKVWETGSSLQIYPHMHTGERPFMFSVCGHGFTTKGNLKVYFNQYPQ

SEQ ID NO: 35160 - protein, 45 aa, Homo sapiens
  MAP TO AL079307.2; EXPRESSED IN PLACENTA, SIGNAL = 4.4; EXPRESSED IN HBL100, SIGNAL = 2.8; EXPRESSED IN HEART, SIGNAL = 3.9; EXPRESSED IN FETAL LIVER, SIGNAL = 3.3; EXPRESSED IN ADULT LIVER, SIGNAL = 2.6; EXPRESSED IN HELA, SIGNAL = 3.8; EXPRESSED IN BRAIN, SIGNAL = 3.3; EXPRESSED IN LUNG, SIGNAL = 2.7; EXPRESSED IN BONE MARROW, SIGNAL = 4.1; EXPRESSED IN BT474, SIGNAL = 3.3
PAERCPWRPGCCWPWPSWMSGSTSALTTSSLPLDGPWQMPGTVPV

SEQ ID NO: 35161 - protein, 45 aa, Homo sapiens
  MAP TO AL035704.7; EXPRESSED IN HBL100, SIGNAL = 1.6; EXPRESSED IN HEART, SIGNAL = 1.7; EXPRESSED IN LUNG, SIGNAL = 0.99; EXPRESSED IN FETAL LIVER, SIGNAL = 1.4; EXPRESSED IN ADULT LIVER, SIGNAL = 2.3; EXPRESSED IN PLACENTA, SIGNAL = 2.1; EXPRESSED IN HELA, SIGNAL = 1.8; EXPRESSED IN BRAIN, SIGNAL =   2; EXPRESSED IN BONE MARROW, SIGNAL = 1.8; EXPRESSED IN BT474, SIGNAL = 1.2; EST_HUMAN HIT: BF087692.1, EVALUE 1.40e+00; SWISSPROT HIT: P08639, EVALUE 1.20e+00
GLYLMSLLSQDGWWPNLLKVKKKWLLPAICSFFCLLSVVMTGCFL

SEQ ID NO: 35162 - protein, 83 aa, Homo sapiens
  MAP TO AL034347.15; EXPRESSED IN FETAL LIVER, SIGNAL = 1.3; EXPRESSED IN BT474, SIGNAL = 1.1; EXPRESSED IN HBL100, SIGNAL = 1.9; EXPRESSED IN PLACENTA, SIGNAL = 1.3; EXPRESSED IN HELA, SIGNAL = 1.3; EXPRESSED IN HEART, SIGNAL = 1.4; EXPRESSED IN BRAIN, SIGNAL = 1.2; EXPRESSED IN BONE MARROW, SIGNAL = 0.99
SPRRYSPSQVHTWHMEGVYGVNELMILRGLFGNQWATIIWEPGNITGNGETGGTLHSDPIDDSKTGTGRNFPGFSKMVESKQQ

SEQ ID NO: 35163 - protein, 111 aa, Homo sapiens
  MAP TO AL078583.15; EXPRESSED IN BONE MARROW, SIGNAL = 4.7; EXPRESSED IN HBL100, SIGNAL = 3.1; EXPRESSED IN HELA, SIGNAL = 3.8; EXPRESSED IN HEART, SIGNAL = 3.9; EXPRESSED IN BRAIN, SIGNAL = 3.8; EXPRESSED IN LUNG, SIGNAL = 2.9; EXPRESSED IN BT474, SIGNAL = 2.6; EXPRESSED IN ADULT LIVER, SIGNAL = 4.8; EXPRESSED IN FETAL LIVER, SIGNAL =   4; EXPRESSED IN PLACENTA, SIGNAL = 3.9; SWISSPROT HIT: P09714, EVALUE 1.20e+00; EST_HUMAN HIT: AA614352.1, EVALUE 3.00e-03
PGCLPTPAHAQHGHQSLLLPPGSGSWGQRVELRRLHRLDSIPAGRLTSPSHLGSPVSLFYPVSSSLRSRINYNIYFGASSDKPTTGQGVPNLPSHGPVPVRSLLGTRPHSQ

SEQ ID NO: 35164 - protein, 24 aa, Homo sapiens
  MAP TO AL121757.2; EXPRESSED IN HELA, SIGNAL = 1.3; EXPRESSED IN HEART, SIGNAL = 1.5; EXPRESSED IN PLACENTA, SIGNAL = 0.98; EXPRESSED IN BONE MARROW, SIGNAL = 1.7; EXPRESSED IN BRAIN, SIGNAL =   1; EXPRESSED IN FETAL LIVER, SIGNAL = 1.6
STSLTPDTPWMELGPWGKRVRKEK

SEQ ID NO: 35165 - protein, 75 aa, Homo sapiens
  MAP TO AP000426.1; EXPRESSED IN BT474, SIGNAL = 1.1; EXPRESSED IN BONE MARROW, SIGNAL = 1.3; EXPRESSED IN ADULT LIVER, SIGNAL = 1.1; EXPRESSED IN FETAL LIVER, SIGNAL = 1.8; EXPRESSED IN PLACENTA, SIGNAL = 1.3; EXPRESSED IN HEART, SIGNAL = 1.4; EXPRESSED IN HELA, SIGNAL = 0.93; EXPRESSED IN HBL100, SIGNAL = 1.1; EXPRESSED IN BRAIN, SIGNAL = 1.4; EST_HUMAN HIT: R76228.1, EVALUE 5.70e+00
PSASAFRSRLITFLSDVYPAPPSRCVLSCRRGLRGIGLSSLLLCQSISKCSSCILGLGRTFQTGSCCSFRKGQGH

SEQ ID NO: 35166 - protein, 60 aa, Homo sapiens
  MAP TO AL049537.18; EXPRESSED IN PLACENTA, SIGNAL = 1.4; EXPRESSED IN HEART, SIGNAL = 1.1; EXPRESSED IN BRAIN, SIGNAL = 1.1; EXPRESSED IN BONE MARROW, SIGNAL = 0.99; EXPRESSED IN BT474, SIGNAL = 4.5; EXPRESSED IN FETAL LIVER, SIGNAL = 0.97; EXPRESSED IN ADULT LIVER, SIGNAL = 1.2; EXPRESSED IN HBL100, SIGNAL = 1.3; EXPRESSED IN HELA, SIGNAL = 1.1; EST_HUMAN HIT: AA508649.1, EVALUE 3.00e-25; SWISSPROT HIT: P11075, EVALUE 2.00e-04
ALLTAVTSPHIEIHEGTILQTVRTCYNIYLASKNLINQTTAKATLTQMLNVIFTRMENQV

SEQ ID NO: 35167 - protein, 62 aa, Homo sapiens
  MAP TO AF191068.1; EXPRESSED IN FETAL LIVER, SIGNAL = 1.7; EXPRESSED IN ADULT LIVER, SIGNAL =   1; EXPRESSED IN PLACENTA, SIGNAL = 1.2; EXPRESSED IN HELA, SIGNAL = 1.2; EXPRESSED IN HEART, SIGNAL = 1.7; EXPRESSED IN BONE MARROW, SIGNAL = 1.3; EXPRESSED IN LUNG, SIGNAL = 0.89; EXPRESSED IN BRAIN, SIGNAL = 1.4; EST_HUMAN HIT: BF248119.1, EVALUE 7.90e-02; SWISSPROT HIT: P13864, EVALUE 1.50e+00
RPWRLSSSKCCRRQCQKGTVPVAGRSHRKAASQTQTGPRWISKVSKRSWPNPGKNICEWGQY

SEQ ID NO: 35168 - protein, 54 aa, Homo sapiens
  MAP TO AF191068.1; EXPRESSED IN FETAL LIVER, SIGNAL = 1.7; EXPRESSED IN ADULT LIVER, SIGNAL =   1; EXPRESSED IN PLACENTA, SIGNAL = 1.2; EXPRESSED IN HELA, SIGNAL = 1.2; EXPRESSED IN HEART, SIGNAL = 1.7; EXPRESSED IN BONE MARROW, SIGNAL = 1.3; EXPRESSED IN LUNG, SIGNAL = 0.89; EXPRESSED IN BRAIN, SIGNAL = 1.4; EST_HUMAN HIT: BE836950.1, EVALUE 3.70e+00; SWISSPROT HIT: P07687, EVALUE 3.40e+00
NEIKLHFQGQQEALEAEFLEVLPKAMPEGNSPSSRKEPQKSSIANADGPEVDLK

SEQ ID NO: 35169 - protein, 24 aa, Homo sapiens
  MAP TO AL117694.1; EXPRESSED IN HBL100, SIGNAL = 2.7; EXPRESSED IN HELA, SIGNAL = 2.6; EXPRESSED IN PLACENTA, SIGNAL = 3.5; EXPRESSED IN HEART, SIGNAL = 2.4; EXPRESSED IN BRAIN, SIGNAL =   3; EXPRESSED IN BONE MARROW, SIGNAL =   5; EXPRESSED IN LUNG, SIGNAL =   2; EXPRESSED IN BT474, SIGNAL = 2.2; EXPRESSED IN ADULT LIVER, SIGNAL = 3.2; EXPRESSED IN FETAL LIVER, SIGNAL = 2.6
VSGWQRQKRWRRRKGRQERQAQSV

SEQ ID NO: 35170 - protein, 32 aa, Homo sapiens
  MAP TO AL031943.5; EXPRESSED IN PLACENTA, SIGNAL = 2.2; EXPRESSED IN HBL100, SIGNAL = 1.5; EXPRESSED IN HELA, SIGNAL = 1.9; EXPRESSED IN HEART, SIGNAL = 1.8; EXPRESSED IN BRAIN, SIGNAL = 2.1; EXPRESSED IN BONE MARROW, SIGNAL = 1.9; EXPRESSED IN LUNG, SIGNAL = 1.2; EXPRESSED IN ADULT LIVER, SIGNAL = 1.7; EXPRESSED IN BT474, SIGNAL = 1.2; EXPRESSED IN FETAL LIVER, SIGNAL = 1.8
KQTLRPEFSCKQFLQAVLLEKLINRQEQHSRK

SEQ ID NO: 35171 - protein, 73 aa, Homo sapiens
  MAP TO AL121714.1; EXPRESSED IN BRAIN, SIGNAL = 1.8; EXPRESSED IN BT474, SIGNAL = 1.5; EXPRESSED IN HELA, SIGNAL = 1.1; EXPRESSED IN PLACENTA, SIGNAL =   1; EXPRESSED IN HBL100, SIGNAL = 0.99; EXPRESSED IN HEART, SIGNAL =   1; SWISSPROT HIT: P32687, EVALUE 3.00e-01; EST_HUMAN HIT: AL044275.1, EVALUE 3.00e-33
EYDEEWAKKIQSEKFRWHNSQWLEMVESRQMDESEQYLYGDDRIEPYIHEGDILERPDLFYNSGDNQSESKQF

SEQ ID NO: 35172 - protein, 29 aa, Homo sapiens
  MAP TO AL035703.17; EXPRESSED IN HBL100, SIGNAL = 1.4; EXPRESSED IN HEART, SIGNAL = 1.6; EXPRESSED IN BONE MARROW, SIGNAL = 1.7; EXPRESSED IN LUNG, SIGNAL = 1.1; EXPRESSED IN BRAIN, SIGNAL = 1.8; EXPRESSED IN ADULT LIVER, SIGNAL = 1.5; EXPRESSED IN BT474, SIGNAL = 1.3; EXPRESSED IN FETAL LIVER, SIGNAL = 1.5; EXPRESSED IN PLACENTA, SIGNAL = 2.3; EXPRESSED IN HELA, SIGNAL = 1.5
MPWLHPRQCKDSMTSAAEQEHGDKDQGHP

SEQ ID NO: 35173 - protein, 62 aa, Homo sapiens
  MAP TO AL078602.10; EXPRESSED IN PLACENTA, SIGNAL = 6.5; EXPRESSED IN HELA, SIGNAL = 6.2; EXPRESSED IN HBL100, SIGNAL = 3.8; EXPRESSED IN HEART, SIGNAL = 6.1; EXPRESSED IN LUNG, SIGNAL = 4.6; EXPRESSED IN BONE MARROW, SIGNAL = 6.1; EXPRESSED IN BRAIN, SIGNAL = 6.7; EXPRESSED IN ADULT LIVER, SIGNAL = 5.2; EXPRESSED IN BT474, SIGNAL = 3.9; EXPRESSED IN FETAL LIVER, SIGNAL = 6.4; SWISSPROT HIT: P56287, EVALUE 7.50e+00
RVNVESSPNHFVEMDARVLNKHSEHFLCWFVLTPQRDIFSSDMRASKGKNDNMHYYFALNSY

SEQ ID NO: 35174 - protein, 20 aa, Homo sapiens
  MAP TO AL078602.10; EXPRESSED IN PLACENTA, SIGNAL = 6.5; EXPRESSED IN HELA, SIGNAL = 6.2; EXPRESSED IN HBL100, SIGNAL = 3.8; EXPRESSED IN HEART, SIGNAL = 6.1; EXPRESSED IN LUNG, SIGNAL = 4.6; EXPRESSED IN BONE MARROW, SIGNAL = 6.1; EXPRESSED IN BRAIN, SIGNAL = 6.7; EXPRESSED IN ADULT LIVER, SIGNAL = 5.2; EXPRESSED IN BT474, SIGNAL = 3.9; EXPRESSED IN FETAL LIVER, SIGNAL = 6.4
QSQCGVIPESLCGNGCPRIE

SEQ ID NO: 35175 - protein, 71 aa, Homo sapiens
  MAP TO AL121675.2; EXPRESSED IN BT474, SIGNAL =   2; EXPRESSED IN HEART, SIGNAL = 1.8; EXPRESSED IN LUNG, SIGNAL = 1.2; EXPRESSED IN BRAIN, SIGNAL = 1.4; EXPRESSED IN ADULT LIVER, SIGNAL = 1.4; EXPRESSED IN FETAL LIVER, SIGNAL = 1.5; EXPRESSED IN PLACENTA, SIGNAL = 1.6; EXPRESSED IN HELA, SIGNAL = 1.6; EXPRESSED IN HBL100, SIGNAL = 2.3; EXPRESSED IN BONE MARROW, SIGNAL = 1.3; SWISSPROT HIT: Q08163, EVALUE 5.70e-02; EST_HUMAN HIT: BE877915.1, EVALUE 6.00e-03
TTPLLRDIHSKPSSRLVGPSHPQLLPSQPTAGQLPFPAPPTWPNPMVPTSLNLSETSSPLTAASLWEGFLL

SEQ ID NO: 35176 - protein, 32 aa, Homo sapiens
  MAP TO AJ239326.3; EXPRESSED IN PLACENTA, SIGNAL =  14; EXPRESSED IN HBL100, SIGNAL =  15; EXPRESSED IN HEART, SIGNAL =  45; EXPRESSED IN FETAL LIVER, SIGNAL =  19; EXPRESSED IN ADULT LIVER, SIGNAL =  25; EXPRESSED IN HELA, SIGNAL =  17; EXPRESSED IN BRAIN, SIGNAL =  30; EXPRESSED IN LUNG, SIGNAL = 7.3; EXPRESSED IN BONE MARROW, SIGNAL =  14; EXPRESSED IN BT474, SIGNAL =  39; SWISSPROT HIT: Q9ZXY2, EVALUE 1.00e-10; EST_HUMAN HIT: AV759061.1, EVALUE 6.00e-10
LLIRAELGQPGNLLGNDHIHDVIVTAHAFVII

SEQ ID NO: 35177 - protein, 50 aa, Homo sapiens
  MAP TO AL034346.18; EXPRESSED IN BT474, SIGNAL = 1.2; EXPRESSED IN HEART, SIGNAL = 0.87; EXPRESSED IN PLACENTA, SIGNAL = 0.99; EXPRESSED IN HBL100, SIGNAL = 1.1; EXPRESSED IN HELA, SIGNAL = 1.1; EXPRESSED IN BONE MARROW, SIGNAL = 0.93; EST_HUMAN HIT: BE968438.1, EVALUE 2.20e+00; SWISSPROT HIT: Q00039, EVALUE 2.70e+00
VLPIVCSRRKAVPAHPETRAAEPFFSPEQPRAGIYGRFAQSLSLYQHFEF

SEQ ID NO: 35178 - protein, 18 aa, Homo sapiens
  MAP TO AC011460.1; EXPRESSED IN FETAL LIVER, SIGNAL = 1.5; EXPRESSED IN PLACENTA, SIGNAL = 1.5; EXPRESSED IN BT474, SIGNAL = 1.7; EXPRESSED IN HEART, SIGNAL = 1.5; EXPRESSED IN HELA, SIGNAL = 1.1; EXPRESSED IN HBL100, SIGNAL = 0.92; EXPRESSED IN BRAIN, SIGNAL = 1.2; EXPRESSED IN BONE MARROW, SIGNAL = 1.4; EXPRESSED IN ADULT LIVER, SIGNAL = 1.1; EST_HUMAN HIT: W17364.1, EVALUE 2.00e-04
TLLTGRLHKCLLWPLRHH

SEQ ID NO: 35179 - protein, 66 aa, Homo sapiens
  MAP TO AC011145.1; EXPRESSED IN PLACENTA, SIGNAL = 3.1; EXPRESSED IN HEART, SIGNAL = 3.5; EXPRESSED IN HBL100, SIGNAL = 2.5; EXPRESSED IN BRAIN, SIGNAL = 2.2; EXPRESSED IN BONE MARROW, SIGNAL =   2; EXPRESSED IN LUNG, SIGNAL = 2.3; EXPRESSED IN ADULT LIVER, SIGNAL = 1.8; EXPRESSED IN BT474, SIGNAL = 3.1; EXPRESSED IN FETAL LIVER, SIGNAL = 2.9; EXPRESSED IN HELA, SIGNAL = 3.1; SWISSPROT HIT: P14746, EVALUE 3.00e-03; EST_HUMAN HIT: BF103945.1, EVALUE 2.00e-31
MPLLTQQIQDEDDQYSLVASLDNVRNLSTILKAIHFREHATCFATKNGIKVTVENAKCVQANAFIQ

SEQ ID NO: 35180 - protein, 20 aa, Homo sapiens
  MAP TO AC011145.1; EXPRESSED IN PLACENTA, SIGNAL = 3.1; EXPRESSED IN HEART, SIGNAL = 3.5; EXPRESSED IN HBL100, SIGNAL = 2.5; EXPRESSED IN BRAIN, SIGNAL = 2.2; EXPRESSED IN BONE MARROW, SIGNAL =   2; EXPRESSED IN LUNG, SIGNAL = 2.3; EXPRESSED IN ADULT LIVER, SIGNAL = 1.8; EXPRESSED IN BT474, SIGNAL = 3.1; EXPRESSED IN FETAL LIVER, SIGNAL = 2.9; EXPRESSED IN HELA, SIGNAL = 3.1; EST_HUMAN HIT: BF696588.1, EVALUE 8.00e-05
EVVGPRSIPRGRMRSGRCPF

SEQ ID NO: 35181 - protein, 77 aa, Homo sapiens
  MAP TO AC011474.1; EXPRESSED IN HELA, SIGNAL = 1.8; EXPRESSED IN HBL100, SIGNAL = 1.2; EXPRESSED IN BRAIN, SIGNAL = 1.9; EXPRESSED IN PLACENTA, SIGNAL = 2.1; EXPRESSED IN HEART, SIGNAL = 2.4; EXPRESSED IN LUNG, SIGNAL = 1.3; EXPRESSED IN BONE MARROW, SIGNAL = 1.8; EXPRESSED IN ADULT LIVER, SIGNAL = 1.6; EXPRESSED IN BT474, SIGNAL = 1.1; EXPRESSED IN FETAL LIVER, SIGNAL = 2.8; EST_HUMAN HIT: BE266604.1, EVALUE 4.10e+00; SWISSPROT HIT: P46957, EVALUE 1.90e+00
LMKVFLELLLMECLAQWWDFSPTGEETIFCKVKHLPSTLTHCLGALGQAGSTPILQNKPRSAVMGAFLKVIELGPAG

SEQ ID NO: 35182 - protein, 63 aa, Homo sapiens
  MAP TO AL080316.8; EXPRESSED IN BONE MARROW, SIGNAL =   3; EXPRESSED IN ADULT LIVER, SIGNAL = 5.6; EXPRESSED IN FETAL LIVER, SIGNAL = 2.9; EXPRESSED IN BT474, SIGNAL =   2; EXPRESSED IN HELA, SIGNAL = 7.4; EXPRESSED IN PLACENTA, SIGNAL = 9.1; EXPRESSED IN HEART, SIGNAL = 2.2; EXPRESSED IN HBL100, SIGNAL =   3; EXPRESSED IN BRAIN, SIGNAL = 4.1; EXPRESSED IN LUNG, SIGNAL = 5.3; EST_HUMAN HIT: N66951.1, EVALUE 1.00e-17; SWISSPROT HIT: Q10207, EVALUE 3.30e+00
AAPRQAELGPNSSSASAPPPYNPFITSPPHTWSGLQFHSVTSPPPPAQQFTLKRVAEAKGIVK

SEQ ID NO: 35183 - protein, 63 aa, Homo sapiens
  MAP TO AC004913.2; EXPRESSED IN PLACENTA, SIGNAL = 2.4; EXPRESSED IN HBL100, SIGNAL = 1.6; EXPRESSED IN LUNG, SIGNAL = 1.4; EXPRESSED IN BRAIN, SIGNAL = 1.9; EXPRESSED IN BONE MARROW, SIGNAL = 2.1; EXPRESSED IN ADULT LIVER, SIGNAL = 6.4; EXPRESSED IN HEART, SIGNAL = 1.8; EXPRESSED IN FETAL LIVER, SIGNAL = 1.2; EXPRESSED IN BT474, SIGNAL = 1.5; EXPRESSED IN HELA, SIGNAL = 2.6; SWISSPROT HIT: Q14141, EVALUE 1.00e-07; EST_HUMAN HIT: AA297895.1, EVALUE 2.00e-06
LHEKFDRLKKLHQDEKKKLEDKKKSLDDEVNAFKQRKTAAELLQSQGSQAGGSQTLKRDKEKK

SEQ ID NO: 35184 - protein, 62 aa, Homo sapiens
  MAP TO AC005049.2; EXPRESSED IN HELA, SIGNAL = 1.2; EXPRESSED IN PLACENTA, SIGNAL = 1.2; EXPRESSED IN HBL100, SIGNAL = 1.1; EXPRESSED IN BRAIN, SIGNAL = 1.4; EXPRESSED IN HEART, SIGNAL = 1.1; EXPRESSED IN BONE MARROW, SIGNAL = 1.2; EXPRESSED IN ADULT LIVER, SIGNAL = 1.3; EXPRESSED IN FETAL LIVER, SIGNAL = 0.91; EXPRESSED IN BT474, SIGNAL =   1; EST_HUMAN HIT: AA446529.1, EVALUE 1.00e-28; SWISSPROT HIT: P27124, EVALUE 8.00e-10
MELGLLSMRRGELARFLFKPNYAYGTLGCPPLIPPNTTVLFEIELLDFLDCAESDKFCALSA

SEQ ID NO: 35185 - protein, 40 aa, Homo sapiens
  MAP TO AC005049.2; EXPRESSED IN HELA, SIGNAL = 1.2; EXPRESSED IN PLACENTA, SIGNAL = 1.2; EXPRESSED IN HBL100, SIGNAL = 1.1; EXPRESSED IN BRAIN, SIGNAL = 1.4; EXPRESSED IN HEART, SIGNAL = 1.1; EXPRESSED IN BONE MARROW, SIGNAL = 1.2; EXPRESSED IN ADULT LIVER, SIGNAL = 1.3; EXPRESSED IN FETAL LIVER, SIGNAL = 0.91; EXPRESSED IN BT474, SIGNAL =   1; SWISSPROT HIT: Q06965, EVALUE 5.40e-01; EST_HUMAN HIT: AA446529.1, EVALUE 3.00e-18
GAGPSEHAERRAGQVSVQTELRLWNAGLPSLDPPKHHCPV

SEQ ID NO: 35186 - protein, 47 aa, Homo sapiens
  MAP TO AL022400.8; EXPRESSED IN FETAL LIVER, SIGNAL =   1; EXPRESSED IN ADULT LIVER, SIGNAL = 1.1; EXPRESSED IN HELA, SIGNAL =   1; EXPRESSED IN PLACENTA, SIGNAL = 0.99; EXPRESSED IN HEART, SIGNAL = 1.4; EXPRESSED IN BRAIN, SIGNAL = 0.91; EXPRESSED IN BONE MARROW, SIGNAL =   1; SWISSPROT HIT: Q08100, EVALUE 2.70e+00; EST_HUMAN HIT: AA253954.1, EVALUE 4.00e-21
SEGKGHTNAGDAIYEVVSLQRESDKEEPVTPTSGGGPMSPQDDEAEE

SEQ ID NO: 35187 - protein, 58 aa, Homo sapiens
  MAP TO AC010896.1; EXPRESSED IN BONE MARROW, SIGNAL = 2.4; EXPRESSED IN FETAL LIVER, SIGNAL = 2.6; EXPRESSED IN ADULT LIVER, SIGNAL = 2.2; EXPRESSED IN BT474, SIGNAL = 1.5; EXPRESSED IN HELA, SIGNAL = 2.3; EXPRESSED IN HBL100, SIGNAL = 1.5; EXPRESSED IN PLACENTA, SIGNAL = 2.2; EXPRESSED IN HEART, SIGNAL = 3.3; EXPRESSED IN BRAIN, SIGNAL = 2.4; EXPRESSED IN LUNG, SIGNAL = 1.6; EST_HUMAN HIT: AA625755.1, EVALUE 7.00e-10
PLFSSLCQSVMSTTRGISIVLASLATSGTPASASITLLVKASTTTSLVAALSSAIPNP

SEQ ID NO: 35188 - protein, 44 aa, Homo sapiens
  MAP TO AL109928.5; EXPRESSED IN PLACENTA, SIGNAL = 1.7; EXPRESSED IN HEART, SIGNAL = 1.6; EXPRESSED IN LUNG, SIGNAL = 1.2; EXPRESSED IN BRAIN, SIGNAL = 1.7; EXPRESSED IN BONE MARROW, SIGNAL = 1.9; EXPRESSED IN FETAL LIVER, SIGNAL = 1.6; EXPRESSED IN ADULT LIVER, SIGNAL = 1.1; EXPRESSED IN BT474, SIGNAL = 1.9; EXPRESSED IN HELA, SIGNAL = 1.4; EXPRESSED IN HBL100, SIGNAL = 2.4; EST_HUMAN HIT: AA282955.1, EVALUE 1.00e-18
ETTEENRQVVTIAGLSQAEQRVRWRGMGLLLAVRALEMASWRRW

SEQ ID NO: 35189 - protein, 80 aa, Homo sapiens
  MAP TO AL031651.32; EXPRESSED IN HBL100, SIGNAL = 1.5; EXPRESSED IN HELA, SIGNAL = 1.7; EXPRESSED IN HEART, SIGNAL = 4.1; EXPRESSED IN PLACENTA, SIGNAL =  58; EXPRESSED IN LUNG, SIGNAL =  17; EXPRESSED IN BRAIN, SIGNAL = 1.2; EXPRESSED IN BONE MARROW, SIGNAL = 1.4; EXPRESSED IN ADULT LIVER, SIGNAL = 3.3; EXPRESSED IN FETAL LIVER, SIGNAL = 2.7; SWISSPROT HIT: P21980, EVALUE 7.00e-43; EST_HUMAN HIT: AU140189.1, EVALUE 6.00e-42
TYCCGPVPVRAIKEGDLSTKYDAPFVFAEVNADVVDWIQQDDGSVHKSINRSLIVGLKISTKSVGRDEREDITHTYKYPE

SEQ ID NO: 35190 - protein, 20 aa, Homo sapiens
  MAP TO AL031651.32; EXPRESSED IN HBL100, SIGNAL = 1.5; EXPRESSED IN HELA, SIGNAL = 1.7; EXPRESSED IN HEART, SIGNAL = 4.1; EXPRESSED IN PLACENTA, SIGNAL =  58; EXPRESSED IN LUNG, SIGNAL =  17; EXPRESSED IN BRAIN, SIGNAL = 1.2; EXPRESSED IN BONE MARROW, SIGNAL = 1.4; EXPRESSED IN ADULT LIVER, SIGNAL = 3.3; EXPRESSED IN FETAL LIVER, SIGNAL = 2.7; EST_HUMAN HIT: AA345479.1, EVALUE 4.90e-02
LCQGRTAVAQFQFVPSRRAT

SEQ ID NO: 35191 - protein, 71 aa, Homo sapiens
  MAP TO AL008718.23; EXPRESSED IN LUNG, SIGNAL = 2.9; EXPRESSED IN BRAIN, SIGNAL =   6; EXPRESSED IN BONE MARROW, SIGNAL = 2.9; EXPRESSED IN FETAL LIVER, SIGNAL = 2.2; EXPRESSED IN ADULT LIVER, SIGNAL = 2.5; EXPRESSED IN BT474, SIGNAL = 3.7; EXPRESSED IN HELA, SIGNAL = 2.5; EXPRESSED IN HEART, SIGNAL = 2.1; EXPRESSED IN HBL100, SIGNAL = 3.4; EXPRESSED IN PLACENTA, SIGNAL =   3; EST_HUMAN HIT: BE407261.1, EVALUE 5.00e-38; SWISSPROT HIT: Q24167, EVALUE 8.20e+00
QLILPSLPLCSNRRWEHEKFDGFALGWEYLTHAQFQKGLQLSRRPRSRQNGLLLPAKEHRQHAHLQPGTSH

SEQ ID NO: 35192 - protein, 28 aa, Homo sapiens
  MAP TO AL078633.10; EXPRESSED IN PLACENTA, SIGNAL = 2.8; EXPRESSED IN LUNG, SIGNAL = 2.2; EXPRESSED IN BRAIN, SIGNAL = 1.6; EXPRESSED IN BONE MARROW, SIGNAL = 1.9; EXPRESSED IN FETAL LIVER, SIGNAL = 1.4; EXPRESSED IN ADULT LIVER, SIGNAL = 1.3; EXPRESSED IN HEART, SIGNAL = 2.2; EXPRESSED IN BT474, SIGNAL = 4.9; EXPRESSED IN HELA, SIGNAL = 3.3; EXPRESSED IN HBL100, SIGNAL = 6.4; SWISSPROT HIT: P48004, EVALUE 1.00e-11; EST_HUMAN HIT: BE620472.1, EVALUE 2.00e-10
SALIVGFDFDGTPRLYQTDPSGTYHAWK

SEQ ID NO: 35193 - protein, 27 aa, Homo sapiens
  MAP TO AL078633.10; EXPRESSED IN PLACENTA, SIGNAL = 2.8; EXPRESSED IN LUNG, SIGNAL = 2.2; EXPRESSED IN BRAIN, SIGNAL = 1.6; EXPRESSED IN BONE MARROW, SIGNAL = 1.9; EXPRESSED IN FETAL LIVER, SIGNAL = 1.4; EXPRESSED IN ADULT LIVER, SIGNAL = 1.3; EXPRESSED IN HEART, SIGNAL = 2.2; EXPRESSED IN BT474, SIGNAL = 4.9; EXPRESSED IN HELA, SIGNAL = 3.3; EXPRESSED IN HBL100, SIGNAL = 6.4; EST_HUMAN HIT: AI313489.1, EVALUE 2.00e-08
LPSSWVSTLMALLGSIRLTPRAHTMPG

SEQ ID NO: 35194 - protein, 37 aa, Homo sapiens
  MAP TO AC007868.1; EXPRESSED IN BT474, SIGNAL = 2.9; EXPRESSED IN HBL100, SIGNAL = 2.7; EXPRESSED IN HELA, SIGNAL = 2.1; EXPRESSED IN HEART, SIGNAL =   2; EXPRESSED IN PLACENTA, SIGNAL =  15; EXPRESSED IN LUNG, SIGNAL = 3.4; EXPRESSED IN BRAIN, SIGNAL = 2.8; EXPRESSED IN BONE MARROW, SIGNAL = 2.5; EXPRESSED IN ADULT LIVER, SIGNAL = 1.2; EXPRESSED IN FETAL LIVER, SIGNAL = 1.7; EST_HUMAN HIT: H09377.1, EVALUE 8.00e-04
VPHRWPPMLLEILLVFWSREQAAWLERRQRDKRNVGH

SEQ ID NO: 35195 - protein, 25 aa, Homo sapiens
  MAP TO AC007981.24; EXPRESSED IN FETAL LIVER, SIGNAL = 4.3; EXPRESSED IN ADULT LIVER, SIGNAL = 1.3; EXPRESSED IN BT474, SIGNAL = 2.6; EXPRESSED IN HBL100, SIGNAL = 1.6; EXPRESSED IN HELA, SIGNAL = 1.5; EXPRESSED IN HEART, SIGNAL = 1.5; EXPRESSED IN PLACENTA, SIGNAL = 2.5; EXPRESSED IN LUNG, SIGNAL = 1.9; EXPRESSED IN BRAIN, SIGNAL = 2.4; EXPRESSED IN BONE MARROW, SIGNAL = 1.7; SWISSPROT HIT: P11274, EVALUE 9.00e-06; EST_HUMAN HIT: AL046113.1, EVALUE 4.00e-06
MEEVGIYRMSGVAADIQALKAAFNV

SEQ ID NO: 35196 - protein, 43 aa, Homo sapiens
  MAP TO AC007981.24; EXPRESSED IN FETAL LIVER, SIGNAL = 4.3; EXPRESSED IN ADULT LIVER, SIGNAL = 1.3; EXPRESSED IN BT474, SIGNAL = 2.6; EXPRESSED IN HBL100, SIGNAL = 1.6; EXPRESSED IN HELA, SIGNAL = 1.5; EXPRESSED IN HEART, SIGNAL = 1.5; EXPRESSED IN PLACENTA, SIGNAL = 2.5; EXPRESSED IN LUNG, SIGNAL = 1.9; EXPRESSED IN BRAIN, SIGNAL = 2.4; EXPRESSED IN BONE MARROW, SIGNAL = 1.7; EST_HUMAN HIT: AL046113.1, EVALUE 4.00e-03
QGALHRAPVRGGDRAPRHGGGGHLPHVWGGRRHPGTEGSLQRQ

SEQ ID NO: 35197 - protein, 119 aa, Homo sapiens
  MAP TO AF107885.2; EXPRESSED IN FETAL LIVER, SIGNAL = 1.7; EXPRESSED IN ADULT LIVER, SIGNAL = 1.7; EXPRESSED IN BT474, SIGNAL = 3.4; EXPRESSED IN HBL100, SIGNAL = 1.3; EXPRESSED IN HELA, SIGNAL = 1.5; EXPRESSED IN HEART, SIGNAL = 2.3; EXPRESSED IN BRAIN, SIGNAL = 1.5; EXPRESSED IN PLACENTA, SIGNAL = 3.2; EXPRESSED IN LUNG, SIGNAL = 1.8; EXPRESSED IN BONE MARROW, SIGNAL =   2; EST_HUMAN HIT: AL120171.1, EVALUE 2.00e-43; SWISSPROT HIT: P10600, EVALUE 2.00e-46
SHMKMHLQRALVVLALLNFATVSLSLSTCTTLDFGHIKKKRVEAIRGQILSKLRLTSPPEPTVMTHVPYQVLALYNSTRELLEEMHGEREEGCTQENTESEYYAKEIHKFDMIQGLAEH

SEQ ID NO: 35198 - protein, 26 aa, Homo sapiens
  MAP TO AF107885.2; EXPRESSED IN FETAL LIVER, SIGNAL = 1.7; EXPRESSED IN ADULT LIVER, SIGNAL = 1.7; EXPRESSED IN BT474, SIGNAL = 3.4; EXPRESSED IN HBL100, SIGNAL = 1.3; EXPRESSED IN HELA, SIGNAL = 1.5; EXPRESSED IN HEART, SIGNAL = 2.3; EXPRESSED IN BRAIN, SIGNAL = 1.5; EXPRESSED IN PLACENTA, SIGNAL = 3.2; EXPRESSED IN LUNG, SIGNAL = 1.8; EXPRESSED IN BONE MARROW, SIGNAL =   2; EST_HUMAN HIT: AW340552.1, EVALUE 7.00e-09
PPSARLLGSLPLQALPSPWPLFPAHT

SEQ ID NO: 35199 - protein, 85 aa, Homo sapiens
  MAP TO AL096801.15; EXPRESSED IN BONE MARROW, SIGNAL = 1.1; EXPRESSED IN LUNG, SIGNAL = 1.4; EXPRESSED IN BRAIN, SIGNAL = 1.4; EXPRESSED IN ADULT LIVER, SIGNAL =   1; EXPRESSED IN BT474, SIGNAL = 1.1; EXPRESSED IN HBL100, SIGNAL = 1.2; EXPRESSED IN HELA, SIGNAL = 1.2; EXPRESSED IN HEART, SIGNAL = 1.2; EXPRESSED IN PLACENTA, SIGNAL = 2.4; EST_HUMAN HIT: AA155873.1, EVALUE 1.00e-40; SWISSPROT HIT: P46590, EVALUE 1.40e-01
MNSTESNSSASVRPKVLSSIQEGTVPDNTSSARGKEDVNKTLPNLQVVNHQQGPHHRHILKLLPSMEATGGEKSSTPIKGPKRGH

SEQ ID NO: 35200 - protein, 65 aa, Homo sapiens
  MAP TO AC009966.2; EXPRESSED IN HELA, SIGNAL = 3.9; EXPRESSED IN HEART, SIGNAL = 7.8; EXPRESSED IN PLACENTA, SIGNAL =  73; EXPRESSED IN BRAIN, SIGNAL = 2.5; EXPRESSED IN BONE MARROW, SIGNAL = 2.1; EXPRESSED IN LUNG, SIGNAL =  44; EXPRESSED IN FETAL LIVER, SIGNAL = 3.2; EXPRESSED IN ADULT LIVER, SIGNAL = 5.5; EXPRESSED IN BT474, SIGNAL = 1.7; EXPRESSED IN HBL100, SIGNAL = 3.1; EST_HUMAN HIT: AW051785.1, EVALUE 2.00e-37; SWISSPROT HIT: P35625, EVALUE 2.00e-38
IKSCYYLPCFVTSKNECLWTDMLSNFGYPGYQSKHYACIRQKGGYCSWYRGWAPPDKSIINATDP

SEQ ID NO: 35201 - protein, 107 aa, Homo sapiens
  MAP TO AC010684.1; EXPRESSED IN BT474, SIGNAL =  29; EXPRESSED IN FETAL LIVER, SIGNAL = 8.4; EXPRESSED IN ADULT LIVER, SIGNAL = 4.8; EXPRESSED IN HBL100, SIGNAL =  15; EXPRESSED IN HELA, SIGNAL =  11; EXPRESSED IN HEART, SIGNAL = 3.7; EXPRESSED IN PLACENTA, SIGNAL = 9.6; EXPRESSED IN BRAIN, SIGNAL = 4.8; EXPRESSED IN BONE MARROW, SIGNAL =   9; EXPRESSED IN LUNG, SIGNAL =   9; SWISSPROT HIT: P72297, EVALUE 9.00e+00; EST_HUMAN HIT: AW088574.1, EVALUE 5.00e-21
GDKKEVQGSQGTQEASFSLFFYSVLSIAQNILACPLVMLRRDWERCGMTLLQVTSSLRRRRLQSRRKNAKRVLLHIELKESLMQQKRELSRLKKSKKKRRKLRKMKR

SEQ ID NO: 35202 - protein, 34 aa, Homo sapiens
  MAP TO AC010684.1; EXPRESSED IN BT474, SIGNAL =  29; EXPRESSED IN FETAL LIVER, SIGNAL = 8.4; EXPRESSED IN ADULT LIVER, SIGNAL = 4.8; EXPRESSED IN HBL100, SIGNAL =  15; EXPRESSED IN HELA, SIGNAL =  11; EXPRESSED IN HEART, SIGNAL = 3.7; EXPRESSED IN PLACENTA, SIGNAL = 9.6; EXPRESSED IN BRAIN, SIGNAL = 4.8; EXPRESSED IN BONE MARROW, SIGNAL =   9; EXPRESSED IN LUNG, SIGNAL =   9; SWISSPROT HIT: P07155, EVALUE 2.80e-02; EST_HUMAN HIT: AW088574.1, EVALUE 2.00e-10
KGRQERSSRIPRHPRGLLQPFFLFCSEYCPKHPG

SEQ ID NO: 35203 - protein, 22 aa, Homo sapiens
  MAP TO AC010684.1; EXPRESSED IN BT474, SIGNAL =  29; EXPRESSED IN FETAL LIVER, SIGNAL = 8.4; EXPRESSED IN ADULT LIVER, SIGNAL = 4.8; EXPRESSED IN HBL100, SIGNAL =  15; EXPRESSED IN HELA, SIGNAL =  11; EXPRESSED IN HEART, SIGNAL = 3.7; EXPRESSED IN PLACENTA, SIGNAL = 9.6; EXPRESSED IN BRAIN, SIGNAL = 4.8; EXPRESSED IN BONE MARROW, SIGNAL =   9; EXPRESSED IN LUNG, SIGNAL =   9; EST_HUMAN HIT: BE972578.1, EVALUE 2.00e-04
ALGEEGCKAEGKMRKGSCCISS

SEQ ID NO: 35204 - protein, 70 aa, Homo sapiens
  MAP TO AL020996.3; EXPRESSED IN LUNG, SIGNAL =   2; EXPRESSED IN ADULT LIVER, SIGNAL = 1.8; EXPRESSED IN BT474, SIGNAL = 2.8; EXPRESSED IN FETAL LIVER, SIGNAL = 1.6; EXPRESSED IN HBL100, SIGNAL = 1.7; EXPRESSED IN HELA, SIGNAL = 1.8; EXPRESSED IN HEART, SIGNAL = 3.3; EXPRESSED IN PLACENTA, SIGNAL =   4; EXPRESSED IN BONE MARROW, SIGNAL = 1.4; EXPRESSED IN BRAIN, SIGNAL = 1.9; EST_HUMAN HIT: AW961709.1, EVALUE 3.00e-25; SWISSPROT HIT: Q15390, EVALUE 8.50e-01
SDTRPLRHTWKPSPLIVMQRNASVPNLRGSEERLLALKKPALPALSRTTELQDELSHLRSQIAKIVAADA

SEQ ID NO: 35205 - protein, 79 aa, Homo sapiens
  MAP TO AC007938.1; EXPRESSED IN PLACENTA, SIGNAL = 2.1; EXPRESSED IN BONE MARROW, SIGNAL = 1.6; EXPRESSED IN LUNG, SIGNAL =   1; EXPRESSED IN BRAIN, SIGNAL = 1.6; EXPRESSED IN BT474, SIGNAL = 1.4; EXPRESSED IN FETAL LIVER, SIGNAL = 1.5; EXPRESSED IN HBL100, SIGNAL = 1.3; EXPRESSED IN HELA, SIGNAL = 2.1; EXPRESSED IN HEART, SIGNAL = 1.6; EXPRESSED IN ADULT LIVER, SIGNAL = 5.9; EST_HUMAN HIT: AA367102.1, EVALUE 4.00e-31; SWISSPROT HIT: P15085, EVALUE 4.00e-32
SNPCSETYHGKFANSEVEVKSIVDFVKDHGNIKAFISIHSYSQLLMYPYGYKTEPVPDQDELVGTDLGLPPRPQGGFGQ

SEQ ID NO: 35206 - protein, 88 aa, Homo sapiens
  MAP TO NM_006994.1; EXPRESSED IN PLACENTA, SIGNAL = 1.8; EXPRESSED IN BONE MARROW, SIGNAL = 1.5; EXPRESSED IN LUNG, SIGNAL = 4.5; EXPRESSED IN ADULT LIVER, SIGNAL = 1.9; EXPRESSED IN BT474, SIGNAL = 1.2; EXPRESSED IN HBL100, SIGNAL = 1.7; EXPRESSED IN HELA, SIGNAL = 1.7; EXPRESSED IN HEART, SIGNAL = 0.94; EST_HUMAN HIT: AW591602.1, EVALUE 5.00e-46; SWISSPROT HIT: P18892, EVALUE 5.00e-19
HVEVKGYEDGGIHLECRSTGWYPQPQIQWSNAKGENIPAVEAPVVADGVGLYEVAASVIMRGGSGEGVSCIIRNSLLGLEKTASISIA

SEQ ID NO: 35207 - protein, 76 aa, Homo sapiens
  MAP TO AP000425.1; EXPRESSED IN BONE MARROW, SIGNAL = 4.4; EXPRESSED IN LUNG, SIGNAL = 4.2; EXPRESSED IN BRAIN, SIGNAL = 2.6; EXPRESSED IN BT474, SIGNAL = 2.2; EXPRESSED IN FETAL LIVER, SIGNAL = 3.3; EXPRESSED IN HEART, SIGNAL =   3; EXPRESSED IN HELA, SIGNAL = 4.9; EXPRESSED IN HBL100, SIGNAL = 2.6; EXPRESSED IN ADULT LIVER, SIGNAL = 8.1; EXPRESSED IN PLACENTA, SIGNAL =   5; SWISSPROT HIT: O60813, EVALUE 7.10e+00; EST_HUMAN HIT: AI239729.1, EVALUE 2.00e-30
KGYTRQHFCHENTLNKGDRDIYNLTHSPYCCYQFPLAGTGPHILYLSQLASNLELFKRGKGREQRKEEVTCGMLRK

SEQ ID NO: 35208 - protein, 119 aa, Homo sapiens
  MAP TO AC006441.13; EXPRESSED IN PLACENTA, SIGNAL = 2.3; EXPRESSED IN HELA, SIGNAL = 2.5; EXPRESSED IN HBL100, SIGNAL =   5; EXPRESSED IN HEART, SIGNAL = 0.86; EXPRESSED IN BONE MARROW, SIGNAL = 1.7; EXPRESSED IN LUNG, SIGNAL = 2.5; EXPRESSED IN BRAIN, SIGNAL = 1.6; EXPRESSED IN ADULT LIVER, SIGNAL = 2.3; EXPRESSED IN BT474, SIGNAL =  47; EXPRESSED IN FETAL LIVER, SIGNAL = 1.2; EST_HUMAN HIT: BE278489.1, EVALUE 2.00e-05; SWISSPROT HIT: Q14847, EVALUE 2.00e-05
VRYKEEFEKNKGKGFSVVADTPELQRIKKTQDQISNVSSCPALRHPCCPLFGPLPASLADASLADVNEASASTTPALQGGPGEELGVPRCLFSVYPQTTSTHSIFFLKGLYSVGACVLN

SEQ ID NO: 35209 - protein, 22 aa, Homo sapiens
  MAP TO AC006441.13; EXPRESSED IN PLACENTA, SIGNAL = 2.3; EXPRESSED IN HELA, SIGNAL = 2.5; EXPRESSED IN HBL100, SIGNAL =   5; EXPRESSED IN HEART, SIGNAL = 0.86; EXPRESSED IN BONE MARROW, SIGNAL = 1.7; EXPRESSED IN LUNG, SIGNAL = 2.5; EXPRESSED IN BRAIN, SIGNAL = 1.6; EXPRESSED IN ADULT LIVER, SIGNAL = 2.3; EXPRESSED IN BT474, SIGNAL =  47; EXPRESSED IN FETAL LIVER, SIGNAL = 1.2
FLPSCRCATRRSLRRTRAKVSA

SEQ ID NO: 35210 - protein, 60 aa, Homo sapiens
  MAP TO AB015752.1; EXPRESSED IN BT474, SIGNAL = 3.3; EXPRESSED IN FETAL LIVER, SIGNAL = 7.2; EXPRESSED IN PLACENTA, SIGNAL = 5.7; EXPRESSED IN HBL100, SIGNAL = 4.6; EXPRESSED IN HELA, SIGNAL = 5.5; EXPRESSED IN HEART, SIGNAL = 6.2; EXPRESSED IN BRAIN, SIGNAL = 5.7; EXPRESSED IN BONE MARROW, SIGNAL = 6.4; EXPRESSED IN LUNG, SIGNAL = 3.7; EXPRESSED IN ADULT LIVER, SIGNAL = 4.7; EST_HUMAN HIT: BF513302.1, EVALUE 3.50e+00; SWISSPROT HIT: P04274, EVALUE 7.60e+00
TNCYIKGQFHSEDKGYIAFCFKVGHELKRDGFKRHPAATVLGALRTPGLQDPVRVDLKRL

SEQ ID NO: 35211 - protein, 57 aa, Homo sapiens
  MAP TO AB020863.1; EXPRESSED IN BRAIN, SIGNAL = 1.2; EXPRESSED IN BONE MARROW, SIGNAL = 1.1; EXPRESSED IN FETAL LIVER, SIGNAL = 1.2; EXPRESSED IN HEART, SIGNAL = 0.94; SWISSPROT HIT: P54419, EVALUE 4.50e+00
FILYCIVVVISKEIDNHSFCIVVIISKEIDNHLQRHAVNPVVPEFQKVPEDVGYRLQ

SEQ ID NO: 35212 - protein, 35 aa, Homo sapiens
  MAP TO AC007158.5; EXPRESSED IN ADULT LIVER, SIGNAL = 2.2; EXPRESSED IN PLACENTA, SIGNAL = 2.1; EXPRESSED IN HBL100, SIGNAL = 1.7; EXPRESSED IN HELA, SIGNAL =   2; EXPRESSED IN BONE MARROW, SIGNAL =   2; EXPRESSED IN BT474, SIGNAL = 1.3; EXPRESSED IN FETAL LIVER, SIGNAL = 2.5; EXPRESSED IN HEART, SIGNAL = 2.4; EXPRESSED IN BRAIN, SIGNAL = 2.2; EXPRESSED IN LUNG, SIGNAL = 1.3
LIFLLDRQREKGRWCWRGRWKEKHREKRKRESEVK

SEQ ID NO: 35213 - protein, 82 aa, Homo sapiens
  MAP TO AC007298.17; EXPRESSED IN BRAIN, SIGNAL = 1.9; EXPRESSED IN BONE MARROW, SIGNAL = 1.9; EXPRESSED IN BT474, SIGNAL = 1.5; EXPRESSED IN FETAL LIVER, SIGNAL = 3.4; EXPRESSED IN ADULT LIVER, SIGNAL = 2.9; EXPRESSED IN HELA, SIGNAL = 1.2; EXPRESSED IN PLACENTA, SIGNAL = 1.7; EXPRESSED IN HBL100, SIGNAL = 1.5; EXPRESSED IN HEART, SIGNAL =   2; SWISSPROT HIT: P42357, EVALUE 1.00e-44; EST_HUMAN HIT: AV689503.1, EVALUE 2.00e-18
MPRYTVHVRGEWLAVPCQDAQLTVGWLGREAVRRYIKNKPDNGGFTSVDDAHFLVRRCKGLGLLDNEDRLEVALENNEFVEV

SEQ ID NO: 35214 - protein, 25 aa, Homo sapiens
  MAP TO AC007298.17; EXPRESSED IN BRAIN, SIGNAL = 1.9; EXPRESSED IN BONE MARROW, SIGNAL = 1.9; EXPRESSED IN BT474, SIGNAL = 1.5; EXPRESSED IN FETAL LIVER, SIGNAL = 3.4; EXPRESSED IN ADULT LIVER, SIGNAL = 2.9; EXPRESSED IN HELA, SIGNAL = 1.2; EXPRESSED IN PLACENTA, SIGNAL = 1.7; EXPRESSED IN HBL100, SIGNAL = 1.5; EXPRESSED IN HEART, SIGNAL =   2; EST_HUMAN HIT: AV689503.1, EVALUE 5.00e-06
GSALPGRAAHCGLAGPGGREALYQE

SEQ ID NO: 35215 - protein, 38 aa, Homo sapiens
  MAP TO AB023048.1; EXPRESSED IN HELA, SIGNAL = 4.4; EXPRESSED IN PLACENTA, SIGNAL = 3.4; EXPRESSED IN HBL100, SIGNAL = 3.4; EXPRESSED IN HEART, SIGNAL = 3.7; EXPRESSED IN BONE MARROW, SIGNAL = 3.2; EXPRESSED IN LUNG, SIGNAL = 3.2; EXPRESSED IN BRAIN, SIGNAL = 2.3; EXPRESSED IN ADULT LIVER, SIGNAL = 1.8; EXPRESSED IN BT474, SIGNAL = 7.3; EXPRESSED IN FETAL LIVER, SIGNAL =   3; EST_HUMAN HIT: AW177771.1, EVALUE 2.90e+00; SWISSPROT HIT: P10041, EVALUE 1.60e+00
SEAPEGLCLRLGHCVDHSHFGGSNCQPNVRYQEGEQCH

SEQ ID NO: 35216 - protein, 39 aa, Homo sapiens
  MAP TO AC006364.3; EXPRESSED IN HELA, SIGNAL = 1.5; EXPRESSED IN BONE MARROW, SIGNAL = 2.2; EXPRESSED IN LUNG, SIGNAL = 1.5; EXPRESSED IN BRAIN, SIGNAL = 1.8; EXPRESSED IN BT474, SIGNAL = 1.5; EXPRESSED IN PLACENTA, SIGNAL = 2.2; EXPRESSED IN HEART, SIGNAL = 2.3; EXPRESSED IN HBL100, SIGNAL = 1.6; EXPRESSED IN ADULT LIVER, SIGNAL = 1.7; EXPRESSED IN FETAL LIVER, SIGNAL = 1.8; EST_HUMAN HIT: AA331940.1, EVALUE 6.00e-05
FFLNFRSRPLENTGQTVLVVGGVQWLNSNHLQIIHKVLK

SEQ ID NO: 35217 - protein, 25 aa, Homo sapiens
  MAP TO AC006978.2; EXPRESSED IN HELA, SIGNAL = 2.2; EXPRESSED IN LUNG, SIGNAL = 1.5; EXPRESSED IN BRAIN, SIGNAL = 2.2; EXPRESSED IN BT474, SIGNAL = 1.5; EXPRESSED IN ADULT LIVER, SIGNAL = 2.2; EXPRESSED IN PLACENTA, SIGNAL = 2.7; EXPRESSED IN HEART, SIGNAL = 2.6; EXPRESSED IN HBL100, SIGNAL = 1.7; EXPRESSED IN BONE MARROW, SIGNAL = 2.1; EXPRESSED IN FETAL LIVER, SIGNAL = 2.3
KPTTNKKGLILNLRLVNTPIGRKNT

SEQ ID NO: 35218 - protein, 52 aa, Homo sapiens
  MAP TO AB020866.1; EXPRESSED IN HELA, SIGNAL = 1.3; EXPRESSED IN BONE MARROW, SIGNAL = 1.2; EXPRESSED IN LUNG, SIGNAL = 1.6; EXPRESSED IN BRAIN, SIGNAL = 1.2; EXPRESSED IN BT474, SIGNAL = 2.9; EXPRESSED IN PLACENTA, SIGNAL = 2.4; EXPRESSED IN HEART, SIGNAL = 1.1; EXPRESSED IN HBL100, SIGNAL = 1.9; EXPRESSED IN ADULT LIVER, SIGNAL = 1.7; EXPRESSED IN FETAL LIVER, SIGNAL = 1.9; EST_HUMAN HIT: BE885079.1, EVALUE 2.00e-24; SWISSPROT HIT: P18160, EVALUE 2.00e+00
NPQVASTWNEVNSHSNAQCVSNNRDGRTVNSNCEINNRSAANIRALNVPPSL

SEQ ID NO: 35219 - protein, 28 aa, Homo sapiens
  MAP TO AB020873.1; EXPRESSED IN LUNG, SIGNAL = 1.9; EXPRESSED IN BRAIN, SIGNAL = 2.4; EXPRESSED IN FETAL LIVER, SIGNAL = 2.7; EXPRESSED IN ADULT LIVER, SIGNAL = 2.7; EXPRESSED IN PLACENTA, SIGNAL = 3.2; EXPRESSED IN HELA, SIGNAL = 2.4; EXPRESSED IN BONE MARROW, SIGNAL = 2.8; EXPRESSED IN BT474, SIGNAL = 1.5; EXPRESSED IN HBL100, SIGNAL = 1.8; EXPRESSED IN HEART, SIGNAL =   3
PIATYILVCVCMRTTIILAADFLMMLLF

SEQ ID NO: 35220 - protein, 46 aa, Homo sapiens
  MAP TO AB026898.1; EXPRESSED IN FETAL LIVER, SIGNAL = 2.3; EXPRESSED IN ADULT LIVER, SIGNAL =   2; EXPRESSED IN PLACENTA, SIGNAL = 3.1; EXPRESSED IN HBL100, SIGNAL = 1.4; EXPRESSED IN HELA, SIGNAL = 2.6; EXPRESSED IN HEART, SIGNAL = 2.4; EXPRESSED IN BRAIN, SIGNAL =   2; EXPRESSED IN BONE MARROW, SIGNAL = 2.2; EXPRESSED IN BT474, SIGNAL = 1.2; EXPRESSED IN LUNG, SIGNAL = 1.5; EST_HUMAN HIT: AA626621.1, EVALUE 2.70e-02
VDVDHHKGLLIVFTLSRLRTRRKRSVWLVLLSQGWQKQRKFMYYYE

SEQ ID NO: 35221 - protein, 32 aa, Homo sapiens
  MAP TO AB026898.1; EXPRESSED IN FETAL LIVER, SIGNAL = 2.3; EXPRESSED IN ADULT LIVER, SIGNAL =   2; EXPRESSED IN PLACENTA, SIGNAL = 3.1; EXPRESSED IN HBL100, SIGNAL = 1.4; EXPRESSED IN HELA, SIGNAL = 2.6; EXPRESSED IN HEART, SIGNAL = 2.4; EXPRESSED IN BRAIN, SIGNAL =   2; EXPRESSED IN BONE MARROW, SIGNAL = 2.2; EXPRESSED IN BT474, SIGNAL = 1.2; EXPRESSED IN LUNG, SIGNAL = 1.5; EST_HUMAN HIT: AI825583.1, EVALUE 3.00e-01
RQQDQPDTPFPPCPQPTQREDNEKPFVMIHVH

SEQ ID NO: 35222 - protein, 29 aa, Homo sapiens
  MAP TO AC007488.15; EXPRESSED IN BONE MARROW, SIGNAL =   1; EXPRESSED IN ADULT LIVER, SIGNAL =   1; EXPRESSED IN PLACENTA, SIGNAL = 0.97; EXPRESSED IN HEART, SIGNAL = 0.95
SWKSTGQKVKTITSGLAWGSMSWSLTRTG

SEQ ID NO: 35223 - protein, 31 aa, Homo sapiens
  MAP TO AF165147.1; EXPRESSED IN FETAL LIVER, SIGNAL = 1.4; EXPRESSED IN HBL100, SIGNAL = 1.4; EXPRESSED IN HELA, SIGNAL = 4.5; EXPRESSED IN HEART, SIGNAL = 1.5; EXPRESSED IN BONE MARROW, SIGNAL = 2.4; EXPRESSED IN ADULT LIVER, SIGNAL = 1.2; EXPRESSED IN PLACENTA, SIGNAL = 1.3; EXPRESSED IN BRAIN, SIGNAL = 1.7; EST_HUMAN HIT: BE246844.1, EVALUE 2.70e-01
QQSSSESDSVPHGHLGNVWRHFPCHNPGEKV

SEQ ID NO: 35224 - protein, 60 aa, Homo sapiens
  MAP TO AC010000.1; EXPRESSED IN BONE MARROW, SIGNAL = 1.4; EXPRESSED IN BRAIN, SIGNAL = 1.4; EXPRESSED IN BT474, SIGNAL = 1.3; EXPRESSED IN FETAL LIVER, SIGNAL = 1.3; EXPRESSED IN HBL100, SIGNAL = 0.92; EXPRESSED IN HELA, SIGNAL = 1.4; EXPRESSED IN HEART, SIGNAL = 2.4; EXPRESSED IN ADULT LIVER, SIGNAL = 1.4; EXPRESSED IN PLACENTA, SIGNAL =   1; EST_HUMAN HIT: H90874.1, EVALUE 1.00e-23; SWISSPROT HIT: P97697, EVALUE 1.00e-24
IRSVGTAAVNMCLVATGGADAYYEMGIHCWDVAGAGIIVTEAGGVLMDVTGKIMESEADL

SEQ ID NO: 35225 - protein, 73 aa, Homo sapiens
  MAP TO AC010134.1; EXPRESSED IN BT474, SIGNAL = 1.3; EXPRESSED IN FETAL LIVER, SIGNAL = 0.98; EXPRESSED IN ADULT LIVER, SIGNAL = 0.94; EXPRESSED IN HELA, SIGNAL = 0.96; EXPRESSED IN HEART, SIGNAL = 0.89; EXPRESSED IN LUNG, SIGNAL = 0.98; EXPRESSED IN BONE MARROW, SIGNAL = 1.2; EXPRESSED IN PLACENTA, SIGNAL =   1; EXPRESSED IN BRAIN, SIGNAL = 1.3; EST_HUMAN HIT: BE888771.1, EVALUE 9.10e+00; SWISSPROT HIT: P50607, EVALUE 8.10e-01
TRQLVTVCDCKLLANSIHGLNAARPDYIASKASPTSTEEEQVMLRNDQDTLMARWTGRNSRSSLQVDWHEEEW

SEQ ID NO: 35226 - protein, 27 aa, Homo sapiens
  MAP TO AC010134.1; EXPRESSED IN BT474, SIGNAL = 1.3; EXPRESSED IN FETAL LIVER, SIGNAL = 0.98; EXPRESSED IN ADULT LIVER, SIGNAL = 0.94; EXPRESSED IN HELA, SIGNAL = 0.96; EXPRESSED IN HEART, SIGNAL = 0.89; EXPRESSED IN LUNG, SIGNAL = 0.98; EXPRESSED IN BONE MARROW, SIGNAL = 1.2; EXPRESSED IN PLACENTA, SIGNAL =   1; EXPRESSED IN BRAIN, SIGNAL = 1.3
PWFVCTCRHGSWSRSATASSWPTPSMG

SEQ ID NO: 35227 - protein, 42 aa, Homo sapiens
  MAP TO AC011502.1; EXPRESSED IN BT474, SIGNAL = 5.5; EXPRESSED IN FETAL LIVER, SIGNAL = 1.3; EXPRESSED IN PLACENTA, SIGNAL = 4.6; EXPRESSED IN HBL100, SIGNAL = 1.6; EXPRESSED IN HELA, SIGNAL = 1.3; EXPRESSED IN HEART, SIGNAL = 1.8; EXPRESSED IN BRAIN, SIGNAL = 2.1; EXPRESSED IN BONE MARROW, SIGNAL = 2.9; EXPRESSED IN LUNG, SIGNAL = 1.9; EXPRESSED IN ADULT LIVER, SIGNAL = 1.4; SWISSPROT HIT: Q03923, EVALUE 5.00e-17; EST_HUMAN HIT: BF530154.1, EVALUE 2.00e-17
GSLTFRDVAIQFSLEEWQCLDTAQQNLYRNVMLENYRNLVFL

SEQ ID NO: 35228 - protein, 102 aa, Homo sapiens
  MAP TO AC009497.2; EXPRESSED IN BT474, SIGNAL = 2.6; EXPRESSED IN ADULT LIVER, SIGNAL = 2.9; EXPRESSED IN PLACENTA, SIGNAL = 1.4; EXPRESSED IN BONE MARROW, SIGNAL = 1.8; EXPRESSED IN LUNG, SIGNAL = 0.88; EXPRESSED IN FETAL LIVER, SIGNAL = 1.1; EXPRESSED IN HELA, SIGNAL = 1.1; EXPRESSED IN HEART, SIGNAL = 1.1; EXPRESSED IN BRAIN, SIGNAL = 1.1; SWISSPROT HIT: gi127998, EVALUE 8.00e-15; EST_HUMAN HIT: BF576570.1, EVALUE 1.00e-34
YKLDHEKQKGHYVGTLTARDDNKIRWALIADKLQNEREYRLDWAKWKAKIQSPVDMLSILHSKNSQALVSDMDYRNYLHQWTCMPDQNDVIQAKKAYELQSD

SEQ ID NO: 35229 - protein, 28 aa, Homo sapiens
  MAP TO AC009497.2; EXPRESSED IN BT474, SIGNAL = 2.6; EXPRESSED IN ADULT LIVER, SIGNAL = 2.9; EXPRESSED IN PLACENTA, SIGNAL = 1.4; EXPRESSED IN BONE MARROW, SIGNAL = 1.8; EXPRESSED IN LUNG, SIGNAL = 0.88; EXPRESSED IN FETAL LIVER, SIGNAL = 1.1; EXPRESSED IN HELA, SIGNAL = 1.1; EXPRESSED IN HEART, SIGNAL = 1.1; EXPRESSED IN BRAIN, SIGNAL = 1.1
ISLTMRSRRDTTWAPSQPGMTTRSAGPS

SEQ ID NO: 35230 - protein, 73 aa, Homo sapiens
  MAP TO AC009612.2; EXPRESSED IN PLACENTA, SIGNAL =  13; EXPRESSED IN HBL100, SIGNAL = 9.5; EXPRESSED IN HEART, SIGNAL = 8.1; EXPRESSED IN BONE MARROW, SIGNAL =   3; EXPRESSED IN BRAIN, SIGNAL = 2.5; EXPRESSED IN LUNG, SIGNAL = 7.5; EXPRESSED IN ADULT LIVER, SIGNAL = 3.9; EXPRESSED IN BT474, SIGNAL =  10; EXPRESSED IN FETAL LIVER, SIGNAL = 2.1; EXPRESSED IN HELA, SIGNAL =   7; EST_HUMAN HIT: BE773082.1, EVALUE 5.00e-26; SWISSPROT HIT: P31631, EVALUE 2.20e+00
GFPATVGQRAEGVPLVPDLLAPGVDIVGVIVIQLVELLGKGCDLLHAVLVCRSQVALEGLVLENEGFDVRQHG

SEQ ID NO: 35231 - protein, 44 aa, Homo sapiens
  MAP TO AC009612.2; EXPRESSED IN PLACENTA, SIGNAL =  13; EXPRESSED IN HBL100, SIGNAL = 9.5; EXPRESSED IN HEART, SIGNAL = 8.1; EXPRESSED IN BONE MARROW, SIGNAL =   3; EXPRESSED IN BRAIN, SIGNAL = 2.5; EXPRESSED IN LUNG, SIGNAL = 7.5; EXPRESSED IN ADULT LIVER, SIGNAL = 3.9; EXPRESSED IN BT474, SIGNAL =  10; EXPRESSED IN FETAL LIVER, SIGNAL = 2.1; EXPRESSED IN HELA, SIGNAL =   7; EST_HUMAN HIT: AW752974.1, EVALUE 8.00e-14; SWISSPROT HIT: Q05095, EVALUE 6.10e+00
CHAVGHQSPHSQARGLRELPGCGTPAPRGADRSLCPGAQRAGLL

SEQ ID NO: 35232 - protein, 34 aa, Homo sapiens
  MAP TO AF165423.1; EXPRESSED IN HELA, SIGNAL =   3; EXPRESSED IN PLACENTA, SIGNAL = 3.4; EXPRESSED IN HBL100, SIGNAL = 1.7; EXPRESSED IN HEART, SIGNAL = 2.4; EXPRESSED IN BONE MARROW, SIGNAL = 2.2; EXPRESSED IN BRAIN, SIGNAL = 2.4; EXPRESSED IN LUNG, SIGNAL = 2.8; EXPRESSED IN ADULT LIVER, SIGNAL = 3.1; EXPRESSED IN BT474, SIGNAL = 2.1; EXPRESSED IN FETAL LIVER, SIGNAL = 1.8; EST_HUMAN HIT: BF327942.1, EVALUE 2.00e-03
LTPRRSAIAPSKRLRRRSSAETIVFSLWITAQRQ

SEQ ID NO: 35233 - protein, 90 aa, Homo sapiens
  MAP TO AC010102.1; EXPRESSED IN LUNG, SIGNAL = 1.2; EXPRESSED IN BRAIN, SIGNAL = 1.1; EXPRESSED IN BT474, SIGNAL = 1.6; EXPRESSED IN ADULT LIVER, SIGNAL = 1.5; EXPRESSED IN PLACENTA, SIGNAL = 1.4; EXPRESSED IN HBL100, SIGNAL = 1.6; EXPRESSED IN BONE MARROW, SIGNAL = 1.3; EXPRESSED IN FETAL LIVER, SIGNAL = 1.1; EXPRESSED IN HELA, SIGNAL = 1.5; EXPRESSED IN HEART, SIGNAL = 1.1; EST_HUMAN HIT: AW962016.1, EVALUE 2.00e-31
LRQMPNDRRKVDVEFFSSFWCSCKRTSFRDCSQLVVVNFRRLAATLLIFKALLSFAKLLEPPLHGMFISSSWAIDVASCLHCFTIHFELE

SEQ ID NO: 35234 - protein, 78 aa, Homo sapiens
  MAP TO AC010102.1; EXPRESSED IN LUNG, SIGNAL = 1.2; EXPRESSED IN BRAIN, SIGNAL = 1.1; EXPRESSED IN BT474, SIGNAL = 1.6; EXPRESSED IN ADULT LIVER, SIGNAL = 1.5; EXPRESSED IN PLACENTA, SIGNAL = 1.4; EXPRESSED IN HBL100, SIGNAL = 1.6; EXPRESSED IN BONE MARROW, SIGNAL = 1.3; EXPRESSED IN FETAL LIVER, SIGNAL = 1.1; EXPRESSED IN HELA, SIGNAL = 1.5; EXPRESSED IN HEART, SIGNAL = 1.1; EST_HUMAN HIT: AW962016.1, EVALUE 2.00e-13
SSFFTFPVCVKCRMTVERWTLSSSAASGVVVRGPASVIALSWWLSTSDDWPLRSSSSRLSSLLQNFLNPHCTVCSLAV

SEQ ID NO: 35235 - protein, 36 aa, Homo sapiens
  MAP TO AC010152.1; EXPRESSED IN HELA, SIGNAL = 2.6; EXPRESSED IN PLACENTA, SIGNAL = 4.5; EXPRESSED IN HBL100, SIGNAL = 2.6; EXPRESSED IN HEART, SIGNAL =  10; EXPRESSED IN BONE MARROW, SIGNAL = 3.6; EXPRESSED IN LUNG, SIGNAL = 2.1; EXPRESSED IN BRAIN, SIGNAL = 3.3; EXPRESSED IN ADULT LIVER, SIGNAL = 3.9; EXPRESSED IN BT474, SIGNAL = 1.9; EXPRESSED IN FETAL LIVER, SIGNAL = 2.5; EST_HUMAN HIT: BE062167.1, EVALUE 1.30e-02
DLLNGFDQNADNDMDNEVQDEVVSDGGEEVVGNCSK

SEQ ID NO: 35236 - protein, 78 aa, Homo sapiens; identical to SEQ ID NO: 35145
  MAP TO AL033527.25; EXPRESSED IN HEART, SIGNAL = 1.3; EXPRESSED IN LUNG, SIGNAL = 0.89; EXPRESSED IN BRAIN, SIGNAL = 1.4; EXPRESSED IN BT474, SIGNAL = 0.99; EXPRESSED IN FETAL LIVER, SIGNAL = 1.4; EXPRESSED IN ADULT LIVER, SIGNAL = 0.97; EXPRESSED IN PLACENTA, SIGNAL = 0.95; EXPRESSED IN HBL100, SIGNAL = 1.3; EXPRESSED IN BONE MARROW, SIGNAL = 1.4; EXPRESSED IN HELA, SIGNAL = 1.1; EST_HUMAN HIT: BE906200.1, EVALUE 6.00e-15; SWISSPROT HIT: P34820, EVALUE 6.00e-32

SEQ ID NO: 35237 - protein, 31 aa, Homo sapiens
  MAP TO AL033527.25; EXPRESSED IN HEART, SIGNAL = 1.3; EXPRESSED IN LUNG, SIGNAL = 0.89; EXPRESSED IN BRAIN, SIGNAL = 1.4; EXPRESSED IN BT474, SIGNAL = 0.99; EXPRESSED IN FETAL LIVER, SIGNAL = 1.4; EXPRESSED IN ADULT LIVER, SIGNAL = 0.97; EXPRESSED IN PLACENTA, SIGNAL = 0.95; EXPRESSED IN HBL100, SIGNAL = 1.3; EXPRESSED IN BONE MARROW, SIGNAL = 1.4; EXPRESSED IN HELA, SIGNAL = 1.1
HSECQPSAALSSSGARPCPGPPGAPLEGVPL

SEQ ID NO: 35238 - protein, 74 aa, Homo sapiens
  MAP TO AL034384.1; EXPRESSED IN FETAL LIVER, SIGNAL = 9.6; EXPRESSED IN ADULT LIVER, SIGNAL = 7.6; EXPRESSED IN HELA, SIGNAL =  25; EXPRESSED IN BONE MARROW, SIGNAL =  16; EXPRESSED IN LUNG, SIGNAL =  19; EXPRESSED IN BRAIN, SIGNAL =  15; EXPRESSED IN BT474, SIGNAL =  35; EXPRESSED IN PLACENTA, SIGNAL =  32; EXPRESSED IN HEART, SIGNAL =  19; EXPRESSED IN HBL100, SIGNAL =  28; SWISSPROT HIT: Q13495, EVALUE 8.00e-04
QPSLLHYLQQPTPTQASSATASSTATATLQLQQQQQQQQQQPDHSSFLLQQMMQQPQRFQRSVASDSMPALPRQ

SEQ ID NO: 35239 - protein, 39 aa, Homo sapiens
  MAP TO AL034384.1; EXPRESSED IN FETAL LIVER, SIGNAL = 9.6; EXPRESSED IN ADULT LIVER, SIGNAL = 7.6; EXPRESSED IN HELA, SIGNAL =  25; EXPRESSED IN BONE MARROW, SIGNAL =  16; EXPRESSED IN LUNG, SIGNAL =  19; EXPRESSED IN BRAIN, SIGNAL =  15; EXPRESSED IN BT474, SIGNAL =  35; EXPRESSED IN PLACENTA, SIGNAL =  32; EXPRESSED IN HEART, SIGNAL =  19; EXPRESSED IN HBL100, SIGNAL =  28
QRRPPQPLPPPRPLPPCSCSSSSSNSSSSLTILHSFCSR

SEQ ID NO: 35240 - protein, 42 aa, Homo sapiens
  MAP TO AL096699.11; EXPRESSED IN FETAL LIVER, SIGNAL = 5.3; EXPRESSED IN ADULT LIVER, SIGNAL = 3.7; EXPRESSED IN PLACENTA, SIGNAL = 4.4; EXPRESSED IN HELA, SIGNAL = 4.6; EXPRESSED IN BRAIN, SIGNAL = 4.3; EXPRESSED IN BONE MARROW, SIGNAL = 4.2; EXPRESSED IN BT474, SIGNAL = 2.5; EXPRESSED IN HEART, SIGNAL = 5.1; EXPRESSED IN HBL100, SIGNAL = 3.6; EXPRESSED IN LUNG, SIGNAL =   3; EST_HUMAN HIT: BE299007.1, EVALUE 3.00e-17; SWISSPROT HIT: P11532, EVALUE 3.00e-18
VKNVMKNIMAGLQQTNSEKILLSWVRQSTRNYPQVNVINFTT

SEQ ID NO: 35241 - protein, 89 aa, Homo sapiens
  MAP TO AL034548.24; EXPRESSED IN HEART, SIGNAL =   3; EXPRESSED IN LUNG, SIGNAL = 1.4; EXPRESSED IN BRAIN, SIGNAL = 2.1; EXPRESSED IN FETAL LIVER, SIGNAL = 3.2; EXPRESSED IN ADULT LIVER, SIGNAL = 2.1; EXPRESSED IN PLACENTA, SIGNAL = 2.7; EXPRESSED IN HELA, SIGNAL = 2.1; EXPRESSED IN BONE MARROW, SIGNAL = 2.4; EXPRESSED IN BT474, SIGNAL = 1.3; EXPRESSED IN HBL100, SIGNAL = 1.7
KEEEEEERRKEKEEEEEEEEEEKKKKKKRKRKKKKRKKKKKKEEEKKKKKKKKKKKKKKKKKKKKKRKEEEEEKKKNSEEHMTGNHSLK

SEQ ID NO: 35242 - protein, 38 aa, Homo sapiens
  MAP TO AL035414.18; EXPRESSED IN HBL100, SIGNAL = 3.3; EXPRESSED IN HELA, SIGNAL = 8.3; EXPRESSED IN HEART, SIGNAL = 5.3; EXPRESSED IN LUNG, SIGNAL = 4.6; EXPRESSED IN BRAIN, SIGNAL =   5; EXPRESSED IN BT474, SIGNAL =   3; EXPRESSED IN ADULT LIVER, SIGNAL = 5.5; EXPRESSED IN PLACENTA, SIGNAL = 5.9; EXPRESSED IN BONE MARROW, SIGNAL = 5.5; EXPRESSED IN FETAL LIVER, SIGNAL = 5.2; EST_HUMAN HIT: H54707.1, EVALUE 2.20e-01; SWISSPROT HIT: P21522, EVALUE 9.00e-03
RIDEFHPKATRTLFIGNLEERTTYHDLRNIFQRFGEIV

SEQ ID NO: 35243 - protein, 115 aa, Homo sapiens
  MAP TO AL033378.6; EXPRESSED IN BONE MARROW, SIGNAL = 1.1; EXPRESSED IN LUNG, SIGNAL = 2.3; EXPRESSED IN FETAL LIVER, SIGNAL =   1; EXPRESSED IN ADULT LIVER, SIGNAL = 1.4; EXPRESSED IN PLACENTA, SIGNAL = 2.1; EXPRESSED IN HEART, SIGNAL = 1.2; EXPRESSED IN HELA, SIGNAL = 1.1; EXPRESSED IN BRAIN, SIGNAL = 1.4; EXPRESSED IN BT474, SIGNAL = 1.5; EST_HUMAN HIT: AU141284.1, EVALUE 4.00e-25; SWISSPROT HIT: O65992, EVALUE 2.00e+00
GEEHVFENSPVLDERSALYSGVHKKPLFFDGSPEKPPEDDSDSLTTSPSSSSLDTWGAGRKLVKTFSKGESRGLIKPPKKMGTFFSYPEEEKAQKVSRSLTEGEMKKGLGSLSHG

SEQ ID NO: 35244 - protein, 83 aa, Homo sapiens
  MAP TO AL033378.6; EXPRESSED IN BONE MARROW, SIGNAL = 1.1; EXPRESSED IN LUNG, SIGNAL = 2.3; EXPRESSED IN FETAL LIVER, SIGNAL =   1; EXPRESSED IN ADULT LIVER, SIGNAL = 1.4; EXPRESSED IN PLACENTA, SIGNAL = 2.1; EXPRESSED IN HEART, SIGNAL = 1.2; EXPRESSED IN HELA, SIGNAL = 1.1; EXPRESSED IN BRAIN, SIGNAL = 1.4; EXPRESSED IN BT474, SIGNAL = 1.5; SWISSPROT HIT: P37743, EVALUE 6.90e-01; EST_HUMAN HIT: AU141284.1, EVALUE 5.00e-31
QETLLVSLQVGRSTCLRIRRSWMNGPPSTLACTRSPFSLMALLRNLPKMTQTLSPRLHPPAAWTPGGLAGSWSKPSAKERAGA

SEQ ID NO: 35245 - protein, 157 aa, Homo sapiens
  MAP TO AL034485.5; EXPRESSED IN BONE MARROW, SIGNAL = 1.1; EXPRESSED IN BRAIN, SIGNAL = 1.2; EXPRESSED IN FETAL LIVER, SIGNAL =   1; EXPRESSED IN ADULT LIVER, SIGNAL = 1.1; EXPRESSED IN PLACENTA, SIGNAL =   1; EXPRESSED IN HEART, SIGNAL = 0.84; EXPRESSED IN HELA, SIGNAL = 0.92; EXPRESSED IN HBL100, SIGNAL =   1; EXPRESSED IN BT474, SIGNAL = 1.1; EST_HUMAN HIT: N55323.1, EVALUE 9.00e-20; SWISSPROT HIT: O67943, EVALUE 4.50e+00
QQAHGHPNVPGGDGHALGVVGQVTSLGGDAVQYVTNHRIHDTHGLLGKAEGLVNLLQHPGEIGGKAVPEDISAAVGMAPTGASKPSLLLLLGRHGVGLFGLLDALVFLRGCLRESLSHGGGSGHWMARTDNDGCGQGKGGGEFSVATWLYVTVQLDI

SEQ ID NO: 35246 - protein, 26 aa, Homo sapiens
  MAP TO AL034485.5; EXPRESSED IN BONE MARROW, SIGNAL = 1.1; EXPRESSED IN BRAIN, SIGNAL = 1.2; EXPRESSED IN FETAL LIVER, SIGNAL =   1; EXPRESSED IN ADULT LIVER, SIGNAL = 1.1; EXPRESSED IN PLACENTA, SIGNAL =   1; EXPRESSED IN HEART, SIGNAL = 0.84; EXPRESSED IN HELA, SIGNAL = 0.92; EXPRESSED IN HBL100, SIGNAL =   1; EXPRESSED IN BT474, SIGNAL = 1.1
KTTSEEDQSIQEPKEANSMTAQKQKK

SEQ ID NO: 35247 - protein, 33 aa, Homo sapiens
  MAP TO AL034485.5; EXPRESSED IN BONE MARROW, SIGNAL = 1.1; EXPRESSED IN BRAIN, SIGNAL = 1.2; EXPRESSED IN FETAL LIVER, SIGNAL =   1; EXPRESSED IN ADULT LIVER, SIGNAL = 1.1; EXPRESSED IN PLACENTA, SIGNAL =   1; EXPRESSED IN HEART, SIGNAL = 0.84; EXPRESSED IN HELA, SIGNAL = 0.92; EXPRESSED IN HBL100, SIGNAL =   1; EXPRESSED IN BT474, SIGNAL = 1.1; EST_HUMAN HIT: N55323.1, EVALUE 2.00e-09; SWISSPROT HIT: Q99880, EVALUE 2.00e-04
ILDRIATEAGHLAHYSKCVTITSRDIRMAVCLL

SEQ ID NO: 35248 - protein, 159 aa, Homo sapiens
  MAP TO AL035588.21; EXPRESSED IN BT474, SIGNAL = 1.2; EXPRESSED IN FETAL LIVER, SIGNAL = 1.4; EXPRESSED IN HBL100, SIGNAL = 1.4; EXPRESSED IN PLACENTA, SIGNAL = 1.9; EXPRESSED IN HELA, SIGNAL = 1.3; EXPRESSED IN HEART, SIGNAL =   2; EXPRESSED IN BRAIN, SIGNAL = 1.7; EXPRESSED IN BONE MARROW, SIGNAL = 1.6; EXPRESSED IN LUNG, SIGNAL = 2.8; EXPRESSED IN ADULT LIVER, SIGNAL = 1.5; EST_HUMAN HIT: BF342930.1, EVALUE 7.00e-29; SWISSPROT HIT: P19484, EVALUE 3.00e-34
ELEMQARVHGLPTTSPSGMNMAELAQQVVKQELPSEEGPGEALMLGAEVPDPEPLPALPPQAPLPLPTQPPSPFHHLDFSHSLSFGGREDEGPPGYPEPLAPGHGSPFPSLSKKDLDLMLLDDSLLPLASDPLLSTMSPEASKASSRRSSFSMEEGDVL

SEQ ID NO: 35249 - protein, 35 aa, Homo sapiens
  MAP TO AL035588.21; EXPRESSED IN BT474, SIGNAL = 1.2; EXPRESSED IN FETAL LIVER, SIGNAL = 1.4; EXPRESSED IN HBL100, SIGNAL = 1.4; EXPRESSED IN PLACENTA, SIGNAL = 1.9; EXPRESSED IN HELA, SIGNAL = 1.3; EXPRESSED IN HEART, SIGNAL =   2; EXPRESSED IN BRAIN, SIGNAL = 1.7; EXPRESSED IN BONE MARROW, SIGNAL = 1.6; EXPRESSED IN LUNG, SIGNAL = 2.8; EXPRESSED IN ADULT LIVER, SIGNAL = 1.5; EST_HUMAN HIT: AA252432.1, EVALUE 1.30e+00
CYRWPLIHFCPPCPPRPPRPAAAGAASAWRRAMCC

SEQ ID NO: 35250 - protein, 207 aa, Homo sapiens
  MAP TO AL078605.18; EXPRESSED IN ADULT LIVER, SIGNAL = 1.7; EXPRESSED IN BT474, SIGNAL = 3.2; EXPRESSED IN FETAL LIVER, SIGNAL = 0.89; EXPRESSED IN PLACENTA, SIGNAL = 3.2; EXPRESSED IN HBL100, SIGNAL =   2; EXPRESSED IN HELA, SIGNAL = 1.7; EXPRESSED IN HEART, SIGNAL = 1.3; EXPRESSED IN BRAIN, SIGNAL = 1.6; EXPRESSED IN BONE MARROW, SIGNAL = 1.3; EXPRESSED IN LUNG, SIGNAL = 2.4; SWISSPROT HIT: Q04893, EVALUE 3.00e-06; EST_HUMAN HIT: AW193024.1, EVALUE 5.00e-59
SEPRQEVPMCSDPEPRQEVPTCTGPESRREVPMCSDPEPRQEVPMCTGPEARQEVPMYTDSEPRQEVPMYTDSEPRQEVPMYTGSEPRQEVPMYTGPESRQEVPMYTGPESRQEVLIRTDPESRQEIMCTGHESKQEVPICTDPISKQEDSMCTHAEINQKLPVATDFEFKLEALMCTNPEIKQEDPTNVGPEVKQQVTMVSDTEIL

SEQ ID NO: 35251 - protein, 28 aa, Homo sapiens
  MAP TO AL078605.18; EXPRESSED IN ADULT LIVER, SIGNAL = 1.7; EXPRESSED IN BT474, SIGNAL = 3.2; EXPRESSED IN FETAL LIVER, SIGNAL = 0.89; EXPRESSED IN PLACENTA, SIGNAL = 3.2; EXPRESSED IN HBL100, SIGNAL =   2; EXPRESSED IN HELA, SIGNAL = 1.7; EXPRESSED IN HEART, SIGNAL = 1.3; EXPRESSED IN BRAIN, SIGNAL = 1.6; EXPRESSED IN BONE MARROW, SIGNAL = 1.3; EXPRESSED IN LUNG, SIGNAL = 2.4
RCNNFGQTSNIHEFRRRIQGRSSHVFRC

SEQ ID NO: 35252 - protein, 107 aa, Homo sapiens
  MAP TO AP000352.2; EXPRESSED IN BONE MARROW, SIGNAL = 6.2; EXPRESSED IN LUNG, SIGNAL = 6.1; EXPRESSED IN BT474, SIGNAL = 6.8; EXPRESSED IN ADULT LIVER, SIGNAL = 3.7; EXPRESSED IN FETAL LIVER, SIGNAL = 7.9; EXPRESSED IN HELA, SIGNAL = 9.8; EXPRESSED IN PLACENTA, SIGNAL = 9.7; EXPRESSED IN HBL100, SIGNAL = 8.5; EXPRESSED IN HEART, SIGNAL = 8.4; EXPRESSED IN BRAIN, SIGNAL =   6; EST_HUMAN HIT: AI682428.1, EVALUE 6.10e-01; SWISSPROT HIT: Q9Y6J0, EVALUE 2.00e-59
ESLESTEGFRAAEQGVQKPAAETPASACIPGKPSASTPTLWDGKKRGDLPGEPVAFPQGLPAGAEEQRQFLTEQCIASFRLCLSRFPQHYKSLYRLAFLYTYSKTHR

SEQ ID NO: 35253 - protein, 83 aa, Homo sapiens
  MAP TO AP000352.2; EXPRESSED IN BONE MARROW, SIGNAL = 6.2; EXPRESSED IN LUNG, SIGNAL = 6.1; EXPRESSED IN BT474, SIGNAL = 6.8; EXPRESSED IN ADULT LIVER, SIGNAL = 3.7; EXPRESSED IN FETAL LIVER, SIGNAL = 7.9; EXPRESSED IN HELA, SIGNAL = 9.8; EXPRESSED IN PLACENTA, SIGNAL = 9.7; EXPRESSED IN HBL100, SIGNAL = 8.5; EXPRESSED IN HEART, SIGNAL = 8.4; EXPRESSED IN BRAIN, SIGNAL =   6; EST_HUMAN HIT: AA931620.1, EVALUE 3.70e-02; SWISSPROT HIT: P09279, EVALUE 1.60e+00
RSHWRVQKASGLQSKVSRSLLQKPQPLLASLASPQHPHPPCGMGRREGTSQGSQWPSPRGCRLVLRSSGSFSQSSASPPSACA

SEQ ID NO: 35254 - protein, 59 aa, Homo sapiens
  MAP TO AP000356.1; EXPRESSED IN HELA, SIGNAL = 5.3; EXPRESSED IN PLACENTA, SIGNAL = 5.1; EXPRESSED IN HBL100, SIGNAL = 2.9; EXPRESSED IN HEART, SIGNAL = 4.3; EXPRESSED IN BONE MARROW, SIGNAL = 4.9; EXPRESSED IN BRAIN, SIGNAL = 3.9; EXPRESSED IN LUNG, SIGNAL = 3.5; EXPRESSED IN ADULT LIVER, SIGNAL = 4.3; EXPRESSED IN BT474, SIGNAL = 2.3; EXPRESSED IN FETAL LIVER, SIGNAL = 3.6; EST_HUMAN HIT: BF689014.1, EVALUE 2.10e+00
AVPRIRTRMTPIHFPGPLLRWSLHPGLCLTRMVGRGGGTSPTLLSPLWPLSFQDCSGWV

SEQ ID NO: 35255 - protein, 176 aa, Homo sapiens
  MAP TO AL035660.11; EXPRESSED IN HELA, SIGNAL =   1; EXPRESSED IN PLACENTA, SIGNAL = 1.1; EXPRESSED IN HBL100, SIGNAL = 1.4; EXPRESSED IN HEART, SIGNAL = 0.92; EXPRESSED IN BRAIN, SIGNAL = 1.6; EXPRESSED IN BONE MARROW, SIGNAL = 1.4; EXPRESSED IN BT474, SIGNAL = 1.5; EXPRESSED IN FETAL LIVER, SIGNAL = 0.92; EXPRESSED IN ADULT LIVER, SIGNAL = 1.1; SWISSPROT HIT: P04279, EVALUE 1.00e-102; EST_HUMAN HIT: BF679236.1, EVALUE 1.00e-100
GSKGRLPSEFSQFPHGQKGQHYSGQKGKQQTESKGSFSIQYTYHVDANDHDQSRKSQQYDLNALHKTTKSQRHLGGSQQLLHNKQEGRDHDKSKGHFHRVVIHHKGGKAHRGTQNPSQDQGNSPSGKGISSQYSNTEERLWVHGLSKEQTSVSGAQKGRKQGGSQSSYVLQTEELV

SEQ ID NO: 35256 - protein, 35 aa, Homo sapiens
  MAP TO AL035660.11; EXPRESSED IN HELA, SIGNAL =   1; EXPRESSED IN PLACENTA, SIGNAL = 1.1; EXPRESSED IN HBL100, SIGNAL = 1.4; EXPRESSED IN HEART, SIGNAL = 0.92; EXPRESSED IN BRAIN, SIGNAL = 1.6; EXPRESSED IN BONE MARROW, SIGNAL = 1.4; EXPRESSED IN BT474, SIGNAL = 1.5; EXPRESSED IN FETAL LIVER, SIGNAL = 0.92; EXPRESSED IN ADULT LIVER, SIGNAL = 1.1; EST_HUMAN HIT: BF677908.1, EVALUE 1.00e-06; SWISSPROT HIT: Q42460, EVALUE 6.20e+00
IMNAYLLIINYQVDQKADYQVNFPNFHTDKRASTI

SEQ ID NO: 35257 - protein, 42 aa, Homo sapiens
  MAP TO AP000346.1; EXPRESSED IN BT474, SIGNAL = 3.7; EXPRESSED IN FETAL LIVER, SIGNAL = 8.4; EXPRESSED IN HELA, SIGNAL =  11; EXPRESSED IN PLACENTA, SIGNAL = 4.5; EXPRESSED IN HBL100, SIGNAL = 3.3; EXPRESSED IN HEART, SIGNAL = 4.7; EXPRESSED IN BONE MARROW, SIGNAL = 5.5; EXPRESSED IN LUNG, SIGNAL = 3.9; EXPRESSED IN BRAIN, SIGNAL = 5.1; EXPRESSED IN ADULT LIVER, SIGNAL = 6.7; EST_HUMAN HIT: W28156.1, EVALUE 9.30e+00
NEQVSICPLSTSRKGQVELVFSGHKPQLPQRSFIHSLTHSFT

SEQ ID NO: 35258 - protein, 33 aa, Homo sapiens
  MAP TO AP000346.1; EXPRESSED IN BT474, SIGNAL = 3.7; EXPRESSED IN FETAL LIVER, SIGNAL = 8.4; EXPRESSED IN HELA, SIGNAL =  11; EXPRESSED IN PLACENTA, SIGNAL = 4.5; EXPRESSED IN HBL100, SIGNAL = 3.3; EXPRESSED IN HEART, SIGNAL = 4.7; EXPRESSED IN BONE MARROW, SIGNAL = 5.5; EXPRESSED IN LUNG, SIGNAL = 3.9; EXPRESSED IN BRAIN, SIGNAL = 5.1; EXPRESSED IN ADULT LIVER, SIGNAL = 6.7; EST_HUMAN HIT: BE870600.1, EVALUE 1.10e+00
MSRSASALCPRLERARWSWCSQATSPSCPRGHS

SEQ ID NO: 35259 - protein, 43 aa, Homo sapiens
  MAP TO AL079339.11; EXPRESSED IN HEART, SIGNAL = 2.2; EXPRESSED IN LUNG, SIGNAL = 0.9; EXPRESSED IN BRAIN, SIGNAL = 1.6; EXPRESSED IN BT474, SIGNAL = 1.3; EXPRESSED IN ADULT LIVER, SIGNAL = 1.3; EXPRESSED IN PLACENTA, SIGNAL = 1.6; EXPRESSED IN HBL100, SIGNAL = 1.2; EXPRESSED IN BONE MARROW, SIGNAL = 1.5; EXPRESSED IN FETAL LIVER, SIGNAL = 1.3; EXPRESSED IN HELA, SIGNAL = 1.1
MMPMPIPMTMVMQIMMQMVMHVLMQVLMLRQVLMQIMMQMLMQ

SEQ ID NO: 35260 - protein, 19 aa, Homo sapiens
  MAP TO AP000354.1; EXPRESSED IN HELA, SIGNAL = 1.8; EXPRESSED IN LUNG, SIGNAL =   1; EXPRESSED IN BRAIN, SIGNAL = 1.3; EXPRESSED IN BT474, SIGNAL = 1.8; EXPRESSED IN ADULT LIVER, SIGNAL = 1.3; EXPRESSED IN PLACENTA, SIGNAL = 1.4; EXPRESSED IN HEART, SIGNAL = 1.4; EXPRESSED IN HBL100, SIGNAL = 1.2; EXPRESSED IN BONE MARROW, SIGNAL = 1.4; EXPRESSED IN FETAL LIVER, SIGNAL = 1.2; EST_HUMAN HIT: AW809376.1, EVALUE 6.60e-01
MLPRLVSWVQWILLPQPLE

SEQ ID NO: 35261 - protein, 37 aa, Homo sapiens
  MAP TO AP000471.1; EXPRESSED IN FETAL LIVER, SIGNAL = 3.4; EXPRESSED IN ADULT LIVER, SIGNAL = 1.9; EXPRESSED IN PLACENTA, SIGNAL = 3.1; EXPRESSED IN HELA, SIGNAL = 2.6; EXPRESSED IN BRAIN, SIGNAL = 2.6; EXPRESSED IN BONE MARROW, SIGNAL = 2.9; EXPRESSED IN BT474, SIGNAL = 1.7; EXPRESSED IN HEART, SIGNAL = 2.4; EXPRESSED IN HBL100, SIGNAL = 2.1; EXPRESSED IN LUNG, SIGNAL = 1.8
LLTSDREKQKVTVRIRRKRRRRGRARLSMRLSRRRVR

SEQ ID NO: 35262 - protein, 42 aa, Homo sapiens
  MAP TO AP000471.1; EXPRESSED IN FETAL LIVER, SIGNAL = 3.4; EXPRESSED IN ADULT LIVER, SIGNAL = 1.9; EXPRESSED IN PLACENTA, SIGNAL = 3.1; EXPRESSED IN HELA, SIGNAL = 2.6; EXPRESSED IN BRAIN, SIGNAL = 2.6; EXPRESSED IN BONE MARROW, SIGNAL = 2.9; EXPRESSED IN BT474, SIGNAL = 1.7; EXPRESSED IN HEART, SIGNAL = 2.4; EXPRESSED IN HBL100, SIGNAL = 2.1; EXPRESSED IN LUNG, SIGNAL = 1.8; SWISSPROT HIT: gi2497597, EVALUE 2.10e+00; EST_HUMAN HIT: AU142850.1, EVALUE 1.00e-20
FGEKDGEEEGLGCRCVCPGGESGNQGGQRTLWRRGHLQKHIM

SEQ ID NO: 35263 - protein, 41 aa, Homo sapiens
  MAP TO AP000510.1; EXPRESSED IN FETAL LIVER, SIGNAL = 3.4; EXPRESSED IN ADULT LIVER, SIGNAL = 2.1; EXPRESSED IN HELA, SIGNAL = 2.1; EXPRESSED IN BONE MARROW, SIGNAL = 1.7; EXPRESSED IN LUNG, SIGNAL = 1.3; EXPRESSED IN BRAIN, SIGNAL = 1.6; EXPRESSED IN BT474, SIGNAL = 1.3; EXPRESSED IN PLACENTA, SIGNAL = 2.1; EXPRESSED IN HEART, SIGNAL = 2.1; EXPRESSED IN HBL100, SIGNAL = 1.4; EST_HUMAN HIT: AI804667.1, EVALUE 2.00e-06; SWISSPROT HIT: Q9Z470, EVALUE 8.00e+00
MKPNPTKSTTVTVVAARDMRIIPMGVRSLVGFTAVTEVVHR

SEQ ID NO: 35264 - protein, 79 aa, Homo sapiens
  MAP TO AP000513.1; EXPRESSED IN HEART, SIGNAL = 0.94; EXPRESSED IN LUNG, SIGNAL = 5.7; EXPRESSED IN BRAIN, SIGNAL = 2.5; EXPRESSED IN FETAL LIVER, SIGNAL = 1.7; EXPRESSED IN ADULT LIVER, SIGNAL = 1.5; EXPRESSED IN PLACENTA, SIGNAL = 2.6; EXPRESSED IN HELA, SIGNAL = 2.7; EXPRESSED IN BONE MARROW, SIGNAL = 1.9; EXPRESSED IN BT474, SIGNAL = 1.9; EXPRESSED IN HBL100, SIGNAL = 3.3; EST_HUMAN HIT: AI088439.1, EVALUE 3.00e-17; SWISSPROT HIT: P36915, EVALUE 1.00e-17
TWESHPETTELVVLQGRVGPAGDEEEEEEEELSSSCEEEGEEDRDADEEGEGDEETPTSAPGSSLAGRNPYALLGEDEC

SEQ ID NO: 35265 - protein, 105 aa, Homo sapiens
  MAP TO AL008639.10; EXPRESSED IN HBL100, SIGNAL = 3.5; EXPRESSED IN HELA, SIGNAL = 4.4; EXPRESSED IN HEART, SIGNAL = 2.3; EXPRESSED IN LUNG, SIGNAL = 6.1; EXPRESSED IN BRAIN, SIGNAL = 3.7; EXPRESSED IN BT474, SIGNAL = 5.4; EXPRESSED IN FETAL LIVER, SIGNAL = 2.2; EXPRESSED IN ADULT LIVER, SIGNAL =   3; EXPRESSED IN PLACENTA, SIGNAL =   5; EXPRESSED IN BONE MARROW, SIGNAL = 3.1; EST_HUMAN HIT: AV716024.1, EVALUE 3.00e-39; SWISSPROT HIT: O60035, EVALUE 1.60e-01
VLDVVVYKPLNDSVRAQYSNWLLAGNLALSPTGNAKKPPLGLFLEWVMVAWNSISSESIVQGFKKCHISSNLEEEDDVLWEIESELPGGGEPPKDCDTESMAESN

SEQ ID NO: 35266 - protein, 104 aa, Homo sapiens
  MAP TO AB020873.1; EXPRESSED IN LUNG, SIGNAL =  12; EXPRESSED IN FETAL LIVER, SIGNAL = 7.6; EXPRESSED IN ADULT LIVER, SIGNAL = 7.3; EXPRESSED IN PLACENTA, SIGNAL = 8.9; EXPRESSED IN HBL100, SIGNAL =  22; EXPRESSED IN HELA, SIGNAL =  13; EXPRESSED IN HEART, SIGNAL =  22; EXPRESSED IN BRAIN, SIGNAL =  12; EXPRESSED IN BONE MARROW, SIGNAL =  15; EXPRESSED IN BT474, SIGNAL =  22; SWISSPROT HIT: P23961, EVALUE 5.00e-04; EST_HUMAN HIT: AA584620.1, EVALUE 4.00e-12
VSLCCPCWSAALPSQVAAALTTWAQVILPPQPPRWDCRCAPPCPANYFFFFSFSFLFLSFSSSSSSPSPSRLFPPPPPPSPPPPLPPPPPSSSRQGLSMLPRLV

SEQ ID NO: 35267 - protein, 66 aa, Homo sapiens
  MAP TO AC007721.7; EXPRESSED IN HBL100, SIGNAL = 2.4; EXPRESSED IN LUNG, SIGNAL = 4.6; EXPRESSED IN BRAIN, SIGNAL = 3.6; EXPRESSED IN FETAL LIVER, SIGNAL =  12; EXPRESSED IN ADULT LIVER, SIGNAL = 3.9; EXPRESSED IN PLACENTA, SIGNAL = 4.4; EXPRESSED IN HEART, SIGNAL =   5; EXPRESSED IN HELA, SIGNAL = 4.3; EXPRESSED IN BONE MARROW, SIGNAL =   5; EXPRESSED IN BT474, SIGNAL = 2.3; SWISSPROT HIT: P33737, EVALUE 7.40e+00; EST_HUMAN HIT: BF333627.1, EVALUE 2.00e-11
STQGRRNEDARDQPDGAAPEEGNPTELPGVGRAVDPAGAQGPSAAAAAAGRTSQGGKDAGCLSSVR

SEQ ID NO: 35268 - protein, 44 aa, Homo sapiens
  MAP TO AC004852.2; EXPRESSED IN BT474, SIGNAL = 1.1; EXPRESSED IN FETAL LIVER, SIGNAL =   1; EXPRESSED IN ADULT LIVER, SIGNAL = 0.97; EXPRESSED IN HELA, SIGNAL = 1.3; EXPRESSED IN PLACENTA, SIGNAL = 1.1; EXPRESSED IN HEART, SIGNAL = 1.5; EXPRESSED IN BRAIN, SIGNAL = 1.3; EXPRESSED IN BONE MARROW, SIGNAL = 1.3; EST_HUMAN HIT: AA320774.1, EVALUE 5.00e-10; SWISSPROT HIT: P11369, EVALUE 1.00e-03
IHDGILLHDKKKNELMVFAATWMELEAIILNEVTQEWKTKYCVL

SEQ ID NO: 35269 - protein, 20 aa, Homo sapiens
  MAP TO AC006205.7; EXPRESSED IN FETAL LIVER, SIGNAL = 2.5; EXPRESSED IN HBL100, SIGNAL = 1.9; EXPRESSED IN HELA, SIGNAL = 1.8; EXPRESSED IN HEART, SIGNAL = 1.9; EXPRESSED IN LUNG, SIGNAL = 2.7; EXPRESSED IN BONE MARROW, SIGNAL = 4.2; EXPRESSED IN ADULT LIVER, SIGNAL = 1.4; EXPRESSED IN BT474, SIGNAL = 1.5; EXPRESSED IN PLACENTA, SIGNAL = 1.9; EXPRESSED IN BRAIN, SIGNAL =   2
LRAVAPSLTLSPHSTSLQHG

SEQ ID NO: 35270 - protein, 65 aa, Homo sapiens [sequence omitted]

SEQ ID NO: 35271 - protein, 25 aa, Homo sapiens
  MAP TO AC008000.7; EXPRESSED IN FETAL LIVER, SIGNAL = 1.2; EXPRESSED IN PLACENTA, SIGNAL = 1.1; EXPRESSED IN HELA, SIGNAL = 1.9; EXPRESSED IN HEART, SIGNAL = 1.2; EXPRESSED IN BRAIN, SIGNAL = 1.2; EXPRESSED IN BONE MARROW, SIGNAL = 1.1
ANGHCVHMLAKKPPSAALCTFKSTI

SEQ ID NO: 35272 - protein, 81 aa, Homo sapiens
  MAP TO AC006466.3; EXPRESSED IN HEART, SIGNAL = 0.9; EXPRESSED IN PLACENTA, SIGNAL = 1.1; EXPRESSED IN BONE MARROW, SIGNAL = 1.2; EXPRESSED IN BRAIN, SIGNAL = 1.5; EXPRESSED IN FETAL LIVER, SIGNAL = 1.2; EST_HUMAN HIT: AW630780.1, EVALUE 1.00e-16; SWISSPROT HIT: P70205, EVALUE 6.00e-28
VECKAVMVFFHYCVVSNYFWLFIEGLYLFTLLVETFFPERRYFYWYTIIGWGRFLAVAWTGSGPVVRCVQVCLWFHLQEVS

SEQ ID NO: 35273 - protein, 52 aa, Homo sapiens
  MAP TO AC005003.2; EXPRESSED IN PLACENTA, SIGNAL = 2.4; EXPRESSED IN BRAIN, SIGNAL = 2.4; EXPRESSED IN BT474, SIGNAL = 7.1; EXPRESSED IN FETAL LIVER, SIGNAL = 1.9; EXPRESSED IN ADULT LIVER, SIGNAL = 1.6; EXPRESSED IN HBL100, SIGNAL =   4; EXPRESSED IN HELA, SIGNAL = 2.9; EXPRESSED IN HEART, SIGNAL =   3; EXPRESSED IN LUNG, SIGNAL = 2.1; EXPRESSED IN BONE MARROW, SIGNAL = 3.1; SWISSPROT HIT: Q9Z2K3, EVALUE 2.00e-04; EST_HUMAN HIT: BE268977.1, EVALUE 2.00e-25
DASDLKTPEKQSANGSFSCDMAVPKNKMESDGEKKYPCPECGSFFRSKSYLN

SEQ ID NO: 35274 - protein, 52 aa, Homo sapiens
  MAP TO AC006445.10; EXPRESSED IN HELA, SIGNAL =   1; EXPRESSED IN PLACENTA, SIGNAL =   1; EXPRESSED IN HBL100, SIGNAL = 0.97; EXPRESSED IN HEART, SIGNAL =   1; EXPRESSED IN BRAIN, SIGNAL = 1.2; EXPRESSED IN BONE MARROW, SIGNAL = 1.1; EXPRESSED IN FETAL LIVER, SIGNAL =  54; EXPRESSED IN ADULT LIVER, SIGNAL = 1.1; EST_HUMAN HIT: BE791748.1, EVALUE 7.50e-01; SWISSPROT HIT: P02745, EVALUE 9.00e-01
KGKAFNPGFIYHVPLLGDSADPSVQVALAGLTGKAEDPGPFLLPGVTGRRVQ

SEQ ID NO: 35275 - protein, 34 aa, Homo sapiens
  MAP TO AC006977.3; EXPRESSED IN ADULT LIVER, SIGNAL = 2.1; EXPRESSED IN BT474, SIGNAL = 1.5; EXPRESSED IN FETAL LIVER, SIGNAL = 2.3; EXPRESSED IN PLACENTA, SIGNAL = 2.7; EXPRESSED IN HELA, SIGNAL = 2.2; EXPRESSED IN HBL100, SIGNAL = 1.6; EXPRESSED IN HEART, SIGNAL = 2.6; EXPRESSED IN LUNG, SIGNAL = 1.6; EXPRESSED IN BONE MARROW, SIGNAL = 2.3; EXPRESSED IN BRAIN, SIGNAL = 2.3; EST_HUMAN HIT: AA126462.1, EVALUE 1.80e-02
CALQCGNDILGKRSCSKEASSDVVTSCGERECCT

SEQ ID NO: 35276 - protein, 63 aa, Homo sapiens
  MAP TO AC009406.1; EXPRESSED IN HEART, SIGNAL = 0.86; EXPRESSED IN BRAIN, SIGNAL = 0.92; EXPRESSED IN BONE MARROW, SIGNAL = 0.97; EXPRESSED IN FETAL LIVER, SIGNAL = 2.1; SWISSPROT HIT: P00485, EVALUE 5.70e+00; EST_HUMAN HIT: BF088057.1, EVALUE 7.70e+00
MLNNLFGEAIEFYGKNPVSERKVFSQTAPTRSSTFSAIPYSGFSIPLNNLSRLILPVCNSIFL

SEQ ID NO: 35277 - protein, 17 aa, Homo sapiens
  MAP TO AC009406.1; EXPRESSED IN HEART, SIGNAL = 0.86; EXPRESSED IN BRAIN, SIGNAL = 0.92; EXPRESSED IN BONE MARROW, SIGNAL = 0.97; EXPRESSED IN FETAL LIVER, SIGNAL = 2.1
CSTIFLVRLLSSMEKIL

SEQ ID NO: 35278 - protein, 40 aa, Homo sapiens
  MAP TO AC009413.1; EXPRESSED IN HELA, SIGNAL = 1.5; EXPRESSED IN LUNG, SIGNAL = 0.94; EXPRESSED IN BRAIN, SIGNAL = 2.3; EXPRESSED IN BT474, SIGNAL = 1.2; EXPRESSED IN ADULT LIVER, SIGNAL = 1.4; EXPRESSED IN PLACENTA, SIGNAL = 1.5; EXPRESSED IN HEART, SIGNAL = 1.8; EXPRESSED IN HBL100, SIGNAL = 1.4; EXPRESSED IN BONE MARROW, SIGNAL = 2.1; EXPRESSED IN FETAL LIVER, SIGNAL = 2.1; EST_HUMAN HIT: BE543646.1, EVALUE 1.40e+00
IPVTFCCSLYSPQPSPRVETQPTRIMGPRASKSCSFQTTP

SEQ ID NO: 35279 - protein, 35 aa, Homo sapiens; identical to SEQ ID NO: 33817
  MAP TO AC009421.1; EXPRESSED IN LUNG, SIGNAL = 3.1; EXPRESSED IN FETAL LIVER, SIGNAL =   3; EXPRESSED IN ADULT LIVER, SIGNAL = 4.8; EXPRESSED IN PLACENTA, SIGNAL = 6.6; EXPRESSED IN HELA, SIGNAL = 4.8; EXPRESSED IN BRAIN, SIGNAL = 3.7; EXPRESSED IN BONE MARROW, SIGNAL = 4.3; EXPRESSED IN BT474, SIGNAL = 1.9; EXPRESSED IN HEART, SIGNAL = 5.2; EXPRESSED IN HBL100, SIGNAL = 2.7; EST_HUMAN HIT: H11838.1, EVALUE 1.00e-09

SEQ ID NO: 35280 - protein, 56 aa, Homo sapiens
  MAP TO AC009474.1; EXPRESSED IN HBL100, SIGNAL = 1.4; EXPRESSED IN HEART, SIGNAL = 1.8; EXPRESSED IN LUNG, SIGNAL = 1.1; EXPRESSED IN BRAIN, SIGNAL = 2.1; EXPRESSED IN FETAL LIVER, SIGNAL = 1.3; EXPRESSED IN ADULT LIVER, SIGNAL = 1.4; EXPRESSED IN PLACENTA, SIGNAL = 2.2; EXPRESSED IN HELA, SIGNAL = 1.6; EXPRESSED IN BONE MARROW, SIGNAL = 1.7; EXPRESSED IN BT474, SIGNAL = 1.1; SWISSPROT HIT: Q09357, EVALUE 2.60e+00
DEIGLEQGEQTDPSSVTSKRGQWVLNPGTKLWLLIYTFSLLIIMAILVKRNFPGPE

SEQ ID NO: 35281 - protein, 54 aa, Homo sapiens
  MAP TO AC009403.1; EXPRESSED IN PLACENTA, SIGNAL = 1.3; EXPRESSED IN HBL100, SIGNAL = 0.92; EXPRESSED IN HELA, SIGNAL = 3.5; EXPRESSED IN HEART, SIGNAL = 1.3; EXPRESSED IN BONE MARROW, SIGNAL = 1.3; EXPRESSED IN BRAIN, SIGNAL = 1.1; EXPRESSED IN FETAL LIVER, SIGNAL = 1.3; EXPRESSED IN ADULT LIVER, SIGNAL =   1; EST_HUMAN HIT: BF683208.1, EVALUE 2.20e+00; SWISSPROT HIT: P77156, EVALUE 3.40e+00
WNCSGKELNTEGLEISNGFAVCILIWITLWSLAVYAALGRLRGYLQSASLSSAT

SEQ ID NO: 35282 - protein, 23 aa, Homo sapiens
  MAP TO AC009403.1; EXPRESSED IN PLACENTA, SIGNAL = 1.3; EXPRESSED IN HBL100, SIGNAL = 0.92; EXPRESSED IN HELA, SIGNAL = 3.5; EXPRESSED IN HEART, SIGNAL = 1.3; EXPRESSED IN BONE MARROW, SIGNAL = 1.3; EXPRESSED IN BRAIN, SIGNAL = 1.1; EXPRESSED IN FETAL LIVER, SIGNAL = 1.3; EXPRESSED IN ADULT LIVER, SIGNAL =   1
GTALAKSSILRAWKLATALLCAF

SEQ ID NO: 35283 - protein, 25 aa, Homo sapiens
  MAP TO AC009408.2; EXPRESSED IN HBL100, SIGNAL = 1.9; EXPRESSED IN HELA, SIGNAL = 2.8; EXPRESSED IN LUNG, SIGNAL =   2; EXPRESSED IN BRAIN, SIGNAL = 3.2; EXPRESSED IN BT474, SIGNAL =   2; EXPRESSED IN ADULT LIVER, SIGNAL = 2.4; EXPRESSED IN FETAL LIVER, SIGNAL = 2.6; EXPRESSED IN PLACENTA, SIGNAL = 3.4; EXPRESSED IN HEART, SIGNAL = 2.9; EXPRESSED IN BONE MARROW, SIGNAL = 3.1; EST_HUMAN HIT: AU131423.1, EVALUE 2.00e-08; SWISSPROT HIT: Q10010, EVALUE 6.00e-03
VKWMMYWIIFALFTTAETFTDIFLC

SEQ ID NO: 35284 - protein, 25 aa, Homo sapiens
  MAP TO AC009408.2; EXPRESSED IN HBL100, SIGNAL = 1.9; EXPRESSED IN HELA, SIGNAL = 2.8; EXPRESSED IN LUNG, SIGNAL =   2; EXPRESSED IN BRAIN, SIGNAL = 3.2; EXPRESSED IN BT474, SIGNAL =   2; EXPRESSED IN ADULT LIVER, SIGNAL = 2.4; EXPRESSED IN FETAL LIVER, SIGNAL = 2.6; EXPRESSED IN PLACENTA, SIGNAL = 3.4; EXPRESSED IN HEART, SIGNAL = 2.9; EXPRESSED IN BONE MARROW, SIGNAL = 3.1; EST_HUMAN HIT: AU131423.1, EVALUE 8.00e-04
YLHFSPQQRHSQTSSFVGKYSRSWD

SEQ ID NO: 35285 - protein, 45 aa, Homo sapiens
  MAP TO AC009599.2; EXPRESSED IN BONE MARROW, SIGNAL =  11; EXPRESSED IN FETAL LIVER, SIGNAL =  14; EXPRESSED IN HBL100, SIGNAL = 7.1; EXPRESSED IN HELA, SIGNAL =  16; EXPRESSED IN HEART, SIGNAL =  21; EXPRESSED IN BRAIN, SIGNAL =  11; EXPRESSED IN LUNG, SIGNAL = 8.7; EXPRESSED IN BT474, SIGNAL = 5.6; EXPRESSED IN ADULT LIVER, SIGNAL =  10; EXPRESSED IN PLACENTA, SIGNAL =  17; EST_HUMAN HIT: BF516116.1, EVALUE 1.40e+00; SWISSPROT HIT: Q03524, EVALUE 6.10e+00
  unsure 7
TVRQLLXKKIKNMKLPSNSAILRNKYSKELKAESLKGIYTSMVIA

SEQ ID NO: 35286 - protein, 26 aa, Homo sapiens
  MAP TO AC009974.2; EXPRESSED IN ADULT LIVER, SIGNAL = 1.1; EXPRESSED IN BT474, SIGNAL =   1; EXPRESSED IN FETAL LIVER, SIGNAL = 1.5; EXPRESSED IN HBL100, SIGNAL = 0.96; EXPRESSED IN PLACENTA, SIGNAL = 1.3; EXPRESSED IN HELA, SIGNAL = 1.2; EXPRESSED IN HEART, SIGNAL =   1; EXPRESSED IN BRAIN, SIGNAL = 1.1; EXPRESSED IN BONE MARROW, SIGNAL = 1.2; EXPRESSED IN LUNG, SIGNAL = 0.98; EST_HUMAN HIT: BE892553.1, EVALUE 2.00e-08; SWISSPROT HIT: P17569, EVALUE 6.40e+00
ETEDTEEELVDGLEDCCSRDENEEEE

SEQ ID NO: 35287 - protein, 60 aa, Homo sapiens
  MAP TO AC010889.1; EXPRESSED IN ADULT LIVER, SIGNAL = 0.9; EXPRESSED IN PLACENTA, SIGNAL = 1.9; EXPRESSED IN HELA, SIGNAL = 1.2; EXPRESSED IN BONE MARROW, SIGNAL = 1.2; EXPRESSED IN LUNG, SIGNAL = 1.7; EXPRESSED IN BRAIN, SIGNAL =   1; EXPRESSED IN BT474, SIGNAL = 1.7; EXPRESSED IN HEART, SIGNAL = 0.86; EXPRESSED IN HBL100, SIGNAL = 0.94; EST_HUMAN HIT: AU123787.1, EVALUE 1.00e-21; SWISSPROT HIT: P41229, EVALUE 1.00e-22
NGDHYPCLDDLEGLVAVGRDLPVGLEELRQLELQVLTAHSWREKASKTFLKKNSCYTLLE

SEQ ID NO: 35288 - protein, 19 aa, Homo sapiens
  MAP TO AC010889.1; EXPRESSED IN ADULT LIVER, SIGNAL = 0.9; EXPRESSED IN PLACENTA, SIGNAL = 1.9; EXPRESSED IN HELA, SIGNAL = 1.2; EXPRESSED IN BONE MARROW, SIGNAL = 1.2; EXPRESSED IN LUNG, SIGNAL = 1.7; EXPRESSED IN BRAIN, SIGNAL =   1; EXPRESSED IN BT474, SIGNAL = 1.7; EXPRESSED IN HEART, SIGNAL = 0.86; EXPRESSED IN HBL100, SIGNAL = 0.94; EST_HUMAN HIT: BE884062.1, EVALUE 2.20e-02
MTWRAWWLWAGTCLWGWKS

SEQ ID NO: 35289 - protein, 62 aa, Homo sapiens
  MAP TO AC010106.1; EXPRESSED IN BRAIN, SIGNAL = 2.1; EXPRESSED IN BONE MARROW, SIGNAL = 2.4; EXPRESSED IN LUNG, SIGNAL = 1.9; EXPRESSED IN ADULT LIVER, SIGNAL = 2.8; EXPRESSED IN BT474, SIGNAL = 8.6; EXPRESSED IN FETAL LIVER, SIGNAL = 1.6; EXPRESSED IN PLACENTA, SIGNAL = 2.6; EXPRESSED IN HBL100, SIGNAL = 1.7; EXPRESSED IN HELA, SIGNAL =   2; EXPRESSED IN HEART, SIGNAL = 2.2; EST_HUMAN HIT: BE385006.1, EVALUE 3.00e-13; SWISSPROT HIT: P15501, EVALUE 3.90e-01
VMSRGCESWESSEEDRRMRENLKLPRGWLSGCNQNADKDMDNKVQGDEVSDGDEEDIGNKNK

SEQ ID NO: 35290 - protein, 50 aa, Homo sapiens
  MAP TO AC010125.2; EXPRESSED IN HELA, SIGNAL = 1.3; EXPRESSED IN HEART, SIGNAL = 1.6; EXPRESSED IN LUNG, SIGNAL = 1.2; EXPRESSED IN BRAIN, SIGNAL = 1.4; EXPRESSED IN ADULT LIVER, SIGNAL = 1.5; EXPRESSED IN FETAL LIVER, SIGNAL = 1.4; EXPRESSED IN PLACENTA, SIGNAL = 2.4; EXPRESSED IN HBL100, SIGNAL = 1.2; EXPRESSED IN BONE MARROW, SIGNAL = 1.2; EST_HUMAN HIT: BE892326.1, EVALUE 5.10e+00; SWISSPROT HIT: P07207, EVALUE 3.50e+00
VSSRSSHLLDHCQCTLMTSNFLKLGCLCSMGFGVSCSLDLGRVRSSPLCM

SEQ ID NO: 35291 - protein, 35 aa, Homo sapiens
  MAP TO AC010132.2; EXPRESSED IN FETAL LIVER, SIGNAL = 1.5; EXPRESSED IN ADULT LIVER, SIGNAL = 1.1; EXPRESSED IN HELA, SIGNAL = 2.7; EXPRESSED IN BRAIN, SIGNAL = 0.97; EXPRESSED IN LUNG, SIGNAL = 1.1; EXPRESSED IN BONE MARROW, SIGNAL =   1; EXPRESSED IN BT474, SIGNAL = 4.5; EXPRESSED IN PLACENTA, SIGNAL = 2.2; EXPRESSED IN HEART, SIGNAL = 1.5; EXPRESSED IN HBL100, SIGNAL = 1.9; EST_HUMAN HIT: BF130930.1, EVALUE 8.00e-14; SWISSPROT HIT: P49722, EVALUE 6.00e-15
EKKQKSILYDERSVHKVEPITKHIGLVYSGMGPDY

SEQ ID NO: 35292 - protein, 17 aa, Homo sapiens
  MAP TO AC010132.2; EXPRESSED IN FETAL LIVER, SIGNAL = 1.5; EXPRESSED IN ADULT LIVER, SIGNAL = 1.1; EXPRESSED IN HELA, SIGNAL = 2.7; EXPRESSED IN BRAIN, SIGNAL = 0.97; EXPRESSED IN LUNG, SIGNAL = 1.1; EXPRESSED IN BONE MARROW, SIGNAL =   1; EXPRESSED IN BT474, SIGNAL = 4.5; EXPRESSED IN PLACENTA, SIGNAL = 2.2; EXPRESSED IN HEART, SIGNAL = 1.5; EXPRESSED IN HBL100, SIGNAL = 1.9; EST_HUMAN HIT: BE890154.1, EVALUE 6.00e-03
LRKNRNPFCMMSEVYTK

SEQ ID NO: 35293 - protein, 71 aa, Homo sapiens
  MAP TO AC010925.1; EXPRESSED IN PLACENTA, SIGNAL = 2.1; EXPRESSED IN HELA, SIGNAL = 1.2; EXPRESSED IN HBL100, SIGNAL = 1.4; EXPRESSED IN HEART, SIGNAL = 1.2; EXPRESSED IN FETAL LIVER, SIGNAL = 1.9; EXPRESSED IN ADULT LIVER, SIGNAL = 0.95; EXPRESSED IN BT474, SIGNAL = 2.3; SWISSPROT HIT: Q04652, EVALUE 5.00e-10; EST_HUMAN HIT: AU133080.1, EVALUE 5.00e-34
EHFMEVIRNQEFVLLPASEIAKLLASDDMNIPNEETILNALLTWVRHDLEQRRKDLSKLLAYIRLPLLAPQ

SEQ ID NO: 35294 - protein, 31 aa, Homo sapiens
  MAP TO AC011235.1; EXPRESSED IN BT474, SIGNAL = 1.3; EXPRESSED IN HBL100, SIGNAL = 1.6; EXPRESSED IN HEART, SIGNAL = 1.6; EXPRESSED IN LUNG, SIGNAL = 0.93; EXPRESSED IN BRAIN, SIGNAL = 1.7; EXPRESSED IN FETAL LIVER, SIGNAL =   2; EXPRESSED IN ADULT LIVER, SIGNAL = 1.1; EXPRESSED IN PLACENTA, SIGNAL = 1.6; EXPRESSED IN HELA, SIGNAL = 1.4; EXPRESSED IN BONE MARROW, SIGNAL = 1.6
IPEPTSRNSMVMIIDDDDDDDDGGGGGSGSS

SEQ ID NO: 35295 - protein, 18 aa, Homo sapiens
  MAP TO AC011235.1; EXPRESSED IN BT474, SIGNAL = 1.3; EXPRESSED IN HBL100, SIGNAL = 1.6; EXPRESSED IN HEART, SIGNAL = 1.6; EXPRESSED IN LUNG, SIGNAL = 0.93; EXPRESSED IN BRAIN, SIGNAL = 1.7; EXPRESSED IN FETAL LIVER, SIGNAL =   2; EXPRESSED IN ADULT LIVER, SIGNAL = 1.1; EXPRESSED IN PLACENTA, SIGNAL = 1.6; EXPRESSED IN HELA, SIGNAL = 1.4; EXPRESSED IN BONE MARROW, SIGNAL = 1.6
MMMMMMMVVVVAVAAVVS

SEQ ID NO: 35296 - protein, 60 aa, Homo sapiens
  MAP TO AC011242.1; EXPRESSED IN BONE MARROW, SIGNAL = 3.1; EXPRESSED IN FETAL LIVER, SIGNAL =   4; EXPRESSED IN HBL100, SIGNAL = 2.9; EXPRESSED IN HELA, SIGNAL = 4.1; EXPRESSED IN HEART, SIGNAL = 3.6; EXPRESSED IN BRAIN, SIGNAL = 3.4; EXPRESSED IN LUNG, SIGNAL = 3.3; EXPRESSED IN BT474, SIGNAL = 2.7; EXPRESSED IN ADULT LIVER, SIGNAL = 2.6; EXPRESSED IN PLACENTA, SIGNAL = 3.4; SWISSPROT HIT: P47808, EVALUE 3.00e-04; EST_HUMAN HIT: BE783963.1, EVALUE 3.00e-10
TCQLFINAAVDSPAIDYHISLAQSALQICLTHPELQNEICCQLIKQTRRRQPQNQPGPLQ

SEQ ID NO: 35297 - protein, 62 aa, Homo sapiens
  MAP TO AL049652.13; EXPRESSED IN BONE MARROW, SIGNAL = 2.8; EXPRESSED IN FETAL LIVER, SIGNAL = 3.5; EXPRESSED IN HBL100, SIGNAL = 2.6; EXPRESSED IN HELA, SIGNAL = 3.1; EXPRESSED IN HEART, SIGNAL = 3.1; EXPRESSED IN BRAIN, SIGNAL =   3; EXPRESSED IN LUNG, SIGNAL =   2; EXPRESSED IN BT474, SIGNAL = 2.2; EXPRESSED IN ADULT LIVER, SIGNAL = 2.7; EXPRESSED IN PLACENTA, SIGNAL = 3.5; SWISSPROT HIT: P53914, EVALUE 9.00e-16; EST_HUMAN HIT: AU132657.1, EVALUE 3.00e-28
HRKKRMRQLQKKIKNGTLNIKQDDPFELFIAATNIRYCYYNETHKILGNTFGMCVLQVGGFL

SEQ ID NO: 35298 - protein, 32 aa, Homo sapiens
  MAP TO AC011331.1; EXPRESSED IN BT474, SIGNAL = 4.7; EXPRESSED IN HEART, SIGNAL = 1.5; EXPRESSED IN LUNG, SIGNAL = 1.2; EST_HUMAN HIT: AA469387.1, EVALUE 6.00e-13; SWISSPROT HIT: P46934, EVALUE 8.00e-11
DSEYYNSLKWILENDPTELDLMFCIDEENFGQ

SEQ ID NO: 35299 - protein, 54 aa, Homo sapiens
  MAP TO AL078463.11; EXPRESSED IN BONE MARROW, SIGNAL = 1.5; EXPRESSED IN LUNG, SIGNAL = 1.9; EXPRESSED IN BT474, SIGNAL =   1; EXPRESSED IN ADULT LIVER, SIGNAL = 1.8; EXPRESSED IN HBL100, SIGNAL = 1.8; EXPRESSED IN HELA, SIGNAL = 2.1; EXPRESSED IN PLACENTA, SIGNAL = 2.3; EXPRESSED IN HEART, SIGNAL = 0.92; EXPRESSED IN BRAIN, SIGNAL = 1.5; SWISSPROT HIT: P98171, EVALUE 7.00e-07; EST_HUMAN HIT: AW997484.1, EVALUE 2.00e-24
KDQNVLSPVNCWNLLLNQVKRESRDHTTLSDIYLNNIIPRFVQVSEDSGRLFKK

SEQ ID NO: 35300 - protein, 29 aa, Homo sapiens
  MAP TO AL117378.1; EXPRESSED IN ADULT LIVER, SIGNAL = 1.3; EXPRESSED IN BT474, SIGNAL = 1.2; EXPRESSED IN PLACENTA, SIGNAL = 1.2; EXPRESSED IN HEART, SIGNAL = 0.91; EXPRESSED IN BONE MARROW, SIGNAL = 1.1; EST_HUMAN HIT: AV752481.1, EVALUE 7.00e-11; SWISSPROT HIT: P22413, EVALUE 5.00e-12
ALFVGYGPGFKHGIEADTFENIEVYNLMC

SEQ ID NO: 35301 - protein, 34 aa, Homo sapiens
  MAP TO AL117192.1; EXPRESSED IN PLACENTA, SIGNAL = 1.9; EXPRESSED IN BONE MARROW, SIGNAL =   1; EXPRESSED IN BRAIN, SIGNAL = 2.1; EXPRESSED IN BT474, SIGNAL = 2.3; EXPRESSED IN HEART, SIGNAL = 1.1; EXPRESSED IN HELA, SIGNAL = 1.1; EXPRESSED IN HBL100, SIGNAL = 1.3; EXPRESSED IN LUNG, SIGNAL = 1.1; EXPRESSED IN ADULT LIVER, SIGNAL = 1.1; EST_HUMAN HIT: BE734211.1, EVALUE 4.00e-03
GLAIILVGFKDDVSQLVDDDVQGALLLDRPAKVQ

SEQ ID NO: 35302 - protein, 41 aa, Homo sapiens
  MAP TO AL117192.1; EXPRESSED IN PLACENTA, SIGNAL = 1.9; EXPRESSED IN BONE MARROW, SIGNAL =   1; EXPRESSED IN BRAIN, SIGNAL = 2.1; EXPRESSED IN BT474, SIGNAL = 2.3; EXPRESSED IN HEART, SIGNAL = 1.1; EXPRESSED IN HELA, SIGNAL = 1.1; EXPRESSED IN HBL100, SIGNAL = 1.3; EXPRESSED IN LUNG, SIGNAL = 1.1; EXPRESSED IN ADULT LIVER, SIGNAL = 1.1; EST_HUMAN HIT: BE732545.1, EVALUE 9.00e-13
PQPRAAWSSLTWNLCTSSRDWLSFWSASRMTSVSLWMMTSR

SEQ ID NO: 35303 - protein, 66 aa, Homo sapiens
  MAP TO AC011351.1; EXPRESSED IN ADULT LIVER, SIGNAL =  11; EXPRESSED IN BT474, SIGNAL = 4.5; EXPRESSED IN FETAL LIVER, SIGNAL =  22; EXPRESSED IN HELA, SIGNAL =  14; EXPRESSED IN PLACENTA, SIGNAL =  20; EXPRESSED IN HBL100, SIGNAL =   8; EXPRESSED IN HEART, SIGNAL =  17; EXPRESSED IN BONE MARROW, SIGNAL =  15; EXPRESSED IN BRAIN, SIGNAL =  19; EXPRESSED IN LUNG, SIGNAL =  14; EST_HUMAN HIT: R42755.1, EVALUE 4.40e+00; SWISSPROT HIT: Q10849, EVALUE 4.30e+00
NCTIRCTKLLVLGKADSPPPFSVAAMNPLTSPVASIKCLLPLNTTAWLTLFLALANSPILTGLSTS

SEQ ID NO: 35304 - protein, 67 aa, Homo sapiens
  MAP TO AL035457.11; EXPRESSED IN PLACENTA, SIGNAL = 1.2; EXPRESSED IN HEART, SIGNAL = 0.85; EXPRESSED IN BRAIN, SIGNAL = 1.2; EXPRESSED IN BONE MARROW, SIGNAL = 0.9; EXPRESSED IN BT474, SIGNAL = 4.6; EXPRESSED IN FETAL LIVER, SIGNAL = 0.93; EXPRESSED IN ADULT LIVER, SIGNAL = 0.95
MLMLVVMLMLVVMLVQMLMQMLKRVLMLMQVLKQVLVLIQMLRQVLMMLLALSSNSQSSLGISFHLW

SEQ ID NO: 35305 - protein, 42 aa, Homo sapiens
  MAP TO AL035457.11; EXPRESSED IN PLACENTA, SIGNAL = 1.2; EXPRESSED IN HEART, SIGNAL = 0.85; EXPRESSED IN BRAIN, SIGNAL = 1.2; EXPRESSED IN BONE MARROW, SIGNAL = 0.9; EXPRESSED IN BT474, SIGNAL = 4.6; EXPRESSED IN FETAL LIVER, SIGNAL = 0.93; EXPRESSED IN ADULT LIVER, SIGNAL = 0.95
VLMLMQVPMLKQVLMQVLKKVLVQVQMLMLVVMLMQALMLMQ

SEQ ID NO: 35306 - protein, 64 aa, Homo sapiens
  MAP TO AL035460.12; EXPRESSED IN BONE MARROW, SIGNAL = 4.1; EXPRESSED IN HBL100, SIGNAL = 3.4; EXPRESSED IN HELA, SIGNAL = 4.8; EXPRESSED IN HEART, SIGNAL = 4.4; EXPRESSED IN LUNG, SIGNAL = 3.2; EXPRESSED IN BRAIN, SIGNAL = 4.9; EXPRESSED IN BT474, SIGNAL =   3; EXPRESSED IN ADULT LIVER, SIGNAL = 4.4; EXPRESSED IN FETAL LIVER, SIGNAL = 5.4; EXPRESSED IN PLACENTA, SIGNAL = 5.3; EST_HUMAN HIT: AI765147.1, EVALUE 2.50e-01; SWISSPROT HIT: Q04207, EVALUE 1.80e+00
GPGPPAPDKIYWPGPAQPLTCQPLAMVQTGEDKSSSPVGHTHLNNACTGRTWWLQAAAQSLCPV

SEQ ID NO: 35307 - protein, 50 aa, Homo sapiens
  MAP TO AL110122.1; EXPRESSED IN PLACENTA, SIGNAL = 4.9; EXPRESSED IN FETAL LIVER, SIGNAL =   2; EXPRESSED IN ADULT LIVER, SIGNAL = 3.4; EXPRESSED IN HEART, SIGNAL = 2.5; EXPRESSED IN HELA, SIGNAL = 2.7; EXPRESSED IN HBL100, SIGNAL = 2.2; EXPRESSED IN BRAIN, SIGNAL = 2.7; EXPRESSED IN LUNG, SIGNAL = 2.1; EXPRESSED IN BONE MARROW, SIGNAL =   3; EXPRESSED IN BT474, SIGNAL = 1.6; EST_HUMAN HIT: BE873166.1, EVALUE 5.10e+00
FVNKTNVQEAIEHQTPRTGKGPKIWDTSCSPFMMWVLRLWGGGQRTGRRR

SEQ ID NO: 35308 - protein, 24 aa, Homo sapiens
  MAP TO AL110122.1; EXPRESSED IN PLACENTA, SIGNAL = 4.9; EXPRESSED IN FETAL LIVER, SIGNAL =   2; EXPRESSED IN ADULT LIVER, SIGNAL = 3.4; EXPRESSED IN HEART, SIGNAL = 2.5; EXPRESSED IN HELA, SIGNAL = 2.7; EXPRESSED IN HBL100, SIGNAL = 2.2; EXPRESSED IN BRAIN, SIGNAL = 2.7; EXPRESSED IN LUNG, SIGNAL = 2.1; EXPRESSED IN BONE MARROW, SIGNAL =   3; EXPRESSED IN BT474, SIGNAL = 1.6
FWDPSLSLASDALWLLGHLFYSQT

SEQ ID NO: 35309 - protein, 42 aa, Homo sapiens
  MAP TO AL008639.10; EXPRESSED IN BT474, SIGNAL = 1.7; EXPRESSED IN HBL100, SIGNAL = 1.1; EXPRESSED IN BRAIN, SIGNAL = 1.3; EXPRESSED IN ADULT LIVER, SIGNAL = 0.97; EXPRESSED IN FETAL LIVER, SIGNAL = 0.95; EXPRESSED IN PLACENTA, SIGNAL = 1.5; EXPRESSED IN HEART, SIGNAL = 0.91; EXPRESSED IN HELA, SIGNAL = 1.4; EXPRESSED IN BONE MARROW, SIGNAL = 1.1; EST_HUMAN HIT: AW672798.1, EVALUE 3.00e-17; SWISSPROT HIT: P51815, EVALUE 3.00e-07
VPALFDEVAIYFSDEEWEVLTEQQKALYREVMRMNYETVLSL

SEQ ID NO: 35310 - protein, 75 aa, Homo sapiens
  MAP TO AL121756.2; EXPRESSED IN BONE MARROW, SIGNAL = 4.4; EXPRESSED IN HBL100, SIGNAL = 2.6; EXPRESSED IN HELA, SIGNAL = 7.2; EXPRESSED IN BRAIN, SIGNAL = 4.6; EXPRESSED IN LUNG, SIGNAL = 3.2; EXPRESSED IN BT474, SIGNAL = 2.6; EXPRESSED IN ADULT LIVER, SIGNAL = 4.4; EXPRESSED IN FETAL LIVER, SIGNAL = 6.2; EXPRESSED IN PLACENTA, SIGNAL = 7.1; EXPRESSED IN HEART, SIGNAL = 5.4; EST_HUMAN HIT: BF528132.1, EVALUE 3.30e+00; SWISSPROT HIT: P21877, EVALUE 6.10e-01
PIVKSVAGDIIDFPKSRAPAKVPPKKDHTSQVMVPLYLFNTTFGLLQTNGALDMDITPELVSVVPGGWGWGLLAL

SEQ ID NO: 35311 - protein, 68 aa, Homo sapiens
  MAP TO AL121754.3; EXPRESSED IN BT474, SIGNAL = 2.2; EXPRESSED IN PLACENTA, SIGNAL = 4.1; EXPRESSED IN BONE MARROW, SIGNAL = 3.3; EXPRESSED IN BRAIN, SIGNAL = 3.8; EXPRESSED IN FETAL LIVER, SIGNAL = 4.3; EXPRESSED IN ADULT LIVER, SIGNAL = 3.5; EXPRESSED IN HEART, SIGNAL = 3.6; EXPRESSED IN HELA, SIGNAL = 3.6; EXPRESSED IN HBL100, SIGNAL =   3; EXPRESSED IN LUNG, SIGNAL = 2.5
MRVLRVVSTYYSGGGGGGRRGGGKDREDGAAGEEGGKAGARDVLEIEGIVFPEGESSTFLASVGEGKE

SEQ ID NO: 35312 - protein, 97 aa, Homo sapiens
  MAP TO AL121760.1; EXPRESSED IN ADULT LIVER, SIGNAL = 1.7; EXPRESSED IN BT474, SIGNAL = 0.96; EXPRESSED IN FETAL LIVER, SIGNAL =   2; EXPRESSED IN PLACENTA, SIGNAL = 1.4; EXPRESSED IN HBL100, SIGNAL = 1.3; EXPRESSED IN HELA, SIGNAL = 1.4; EXPRESSED IN HEART, SIGNAL = 2.2; EXPRESSED IN BONE MARROW, SIGNAL = 1.7; EXPRESSED IN LUNG, SIGNAL = 1.1; EXPRESSED IN BRAIN, SIGNAL = 1.9; SWISSPROT HIT: P14433, EVALUE 2.40e-02; EST_HUMAN HIT: AI363143.1, EVALUE 4.00e-03
THVHVQDRVNLTCHVLHFYPAHLRLTWMENRSMIQTLVSPRPLRPPEIQMGHTLWSTRGRQRPRWRSVSLLAGWSTMSSPHSRPTSPCKPRCAGRGK

SEQ ID NO: 35313 - protein, 44 aa, Homo sapiens
  MAP TO AL121760.1; EXPRESSED IN ADULT LIVER, SIGNAL = 1.7; EXPRESSED IN BT474, SIGNAL = 0.96; EXPRESSED IN FETAL LIVER, SIGNAL =   2; EXPRESSED IN PLACENTA, SIGNAL = 1.4; EXPRESSED IN HBL100, SIGNAL = 1.3; EXPRESSED IN HELA, SIGNAL = 1.4; EXPRESSED IN HEART, SIGNAL = 2.2; EXPRESSED IN BONE MARROW, SIGNAL = 1.7; EXPRESSED IN LUNG, SIGNAL = 1.1; EXPRESSED IN BRAIN, SIGNAL = 1.9; SWISSPROT HIT: P32127, EVALUE 1.20e+00
TWQAEATLEEREFACWVVHDEQPPLKANVTLQAQVRRQGKGGYS

SEQ ID NO: 35314 - protein, 29 aa, Homo sapiens
  MAP TO AL078601.10; EXPRESSED IN PLACENTA, SIGNAL = 1.4; EXPRESSED IN HEART, SIGNAL = 1.4; EXPRESSED IN BONE MARROW, SIGNAL = 1.3; EXPRESSED IN BRAIN, SIGNAL = 1.4; EXPRESSED IN FETAL LIVER, SIGNAL = 1.5; EXPRESSED IN ADULT LIVER, SIGNAL = 1.5; EXPRESSED IN HELA, SIGNAL = 1.5; EST_HUMAN HIT: AW807853.1, EVALUE 6.10e-01
DKKRLGERVSRYRSWRKSKANRYQTRIKR

SEQ ID NO: 35315 - protein, 57 aa, Homo sapiens
  MAP TO AL021578.1; EXPRESSED IN BONE MARROW, SIGNAL = 6.4; EXPRESSED IN BT474, SIGNAL = 7.5; EXPRESSED IN HBL100, SIGNAL = 8.6; EXPRESSED IN LUNG, SIGNAL =   9; EXPRESSED IN BRAIN, SIGNAL = 5.6; EXPRESSED IN ADULT LIVER, SIGNAL =   5; EXPRESSED IN FETAL LIVER, SIGNAL = 4.8; EXPRESSED IN PLACENTA, SIGNAL = 5.3; EXPRESSED IN HEART, SIGNAL = 4.7; EXPRESSED IN HELA, SIGNAL = 6.6; EST_HUMAN HIT: AA258502.1, EVALUE 6.00e-25; SWISSPROT HIT: P31431, EVALUE 7.00e-26
RAGSGSQVPTEPKKLEENEVIPKRISPVEESEDVSNKVSMSSTVQGSNIFERTEVLA

SEQ ID NO: 35316 - protein, 18 aa, Homo sapiens
  MAP TO AL035704.7; EXPRESSED IN BT474, SIGNAL = 1.1; EXPRESSED IN PLACENTA, SIGNAL = 1.3; EXPRESSED IN BONE MARROW, SIGNAL = 1.6; EXPRESSED IN FETAL LIVER, SIGNAL =   1; EXPRESSED IN ADULT LIVER, SIGNAL = 1.1; EXPRESSED IN HEART, SIGNAL =   2; EXPRESSED IN HELA, SIGNAL = 1.4; EXPRESSED IN HBL100, SIGNAL = 1.1; EXPRESSED IN BRAIN, SIGNAL = 1.5
MMMMMMMMMMMMMMMMMK

SEQ ID NO: 35317 - protein, 32 aa, Homo sapiens
  MAP TO AL033539.16; EXPRESSED IN ADULT LIVER, SIGNAL = 1.7; EXPRESSED IN PLACENTA, SIGNAL = 2.7; EXPRESSED IN BONE MARROW, SIGNAL = 2.2; EXPRESSED IN BRAIN, SIGNAL = 2.3; EXPRESSED IN FETAL LIVER, SIGNAL = 3.2; EXPRESSED IN BT474, SIGNAL = 1.4; EXPRESSED IN HEART, SIGNAL =   3; EXPRESSED IN HELA, SIGNAL = 2.5; EXPRESSED IN HBL100, SIGNAL = 1.7; EXPRESSED IN LUNG, SIGNAL = 3.6
FHIYEMAVIIIIIIIIIIIIIIFIISSPFWDA

SEQ ID NO: 35318 - protein, 53 aa, Homo sapiens
  MAP TO AL049697.8; EXPRESSED IN PLACENTA, SIGNAL = 3.1; EXPRESSED IN BRAIN, SIGNAL = 1.9; EXPRESSED IN ADULT LIVER, SIGNAL = 2.2; EXPRESSED IN FETAL LIVER, SIGNAL = 2.5; EXPRESSED IN BT474, SIGNAL = 1.8; EXPRESSED IN HEART, SIGNAL = 3.1; EXPRESSED IN HELA, SIGNAL = 2.9; EXPRESSED IN HBL100, SIGNAL = 1.8; EXPRESSED IN LUNG, SIGNAL = 2.9; EXPRESSED IN BONE MARROW, SIGNAL = 2.3; SWISSPROT HIT: Q05506, EVALUE 1.00e-07; EST_HUMAN HIT: BF212301.1, EVALUE 4.00e-23
VYVQVNKEAADDKSVAKAAQEFFQRLELGDVQALSLWQKFRDLSIEEYIRVYK

SEQ ID NO: 35319 - protein, 44 aa, Homo sapiens
  MAP TO AP000550.1; EXPRESSED IN PLACENTA, SIGNAL =   7; EXPRESSED IN HBL100, SIGNAL = 3.6; EXPRESSED IN HELA, SIGNAL = 5.7; EXPRESSED IN HEART, SIGNAL = 6.6; EXPRESSED IN BRAIN, SIGNAL = 5.8; EXPRESSED IN BONE MARROW, SIGNAL = 5.1; EXPRESSED IN LUNG, SIGNAL = 4.2; EXPRESSED IN ADULT LIVER, SIGNAL = 5.1; EXPRESSED IN BT474, SIGNAL =  15; EXPRESSED IN FETAL LIVER, SIGNAL = 5.6; EST_HUMAN HIT: H55650.1, EVALUE 5.00e-19; SWISSPROT HIT: P11274, EVALUE 3.00e-19
NKDVSVMMSEMDVNAIAGMLKLYFRELPEPLFTDEFYPNFAEGI

SEQ ID NO: 35320 - protein, 62 aa, Homo sapiens
  MAP TO AC009967.1; EXPRESSED IN BT474, SIGNAL = 3.4; EXPRESSED IN FETAL LIVER, SIGNAL = 1.9; EXPRESSED IN ADULT LIVER, SIGNAL = 1.3; EXPRESSED IN HELA, SIGNAL = 5.8; EXPRESSED IN PLACENTA, SIGNAL = 2.8; EXPRESSED IN HBL100, SIGNAL = 2.6; EXPRESSED IN HEART, SIGNAL = 1.6; EXPRESSED IN BRAIN, SIGNAL = 1.8; EXPRESSED IN BONE MARROW, SIGNAL = 1.1; EXPRESSED IN LUNG, SIGNAL = 1.7; SWISSPROT HIT: P05455, EVALUE 6.00e-21; EST_HUMAN HIT: BE843070.1, EVALUE 7.00e-20
GIILFKEKAKEALGKAKDANNGNLQLRNKEVTWEVLEGEVEKEALKKIIEDQQESLNKWKSK

SEQ ID NO: 35321 - protein, 100 aa, Homo sapiens
  MAP TO AL031685.15; EXPRESSED IN BT474, SIGNAL =  23; EXPRESSED IN ADULT LIVER, SIGNAL = 4.9; EXPRESSED IN FETAL LIVER, SIGNAL = 2.7; EXPRESSED IN HELA, SIGNAL =  28; EXPRESSED IN PLACENTA, SIGNAL =  35; EXPRESSED IN HBL100, SIGNAL =  14; EXPRESSED IN HEART, SIGNAL = 1.1; EXPRESSED IN LUNG, SIGNAL =   7; EST_HUMAN HIT: BE394340.1, EVALUE 2.00e-43; SWISSPROT HIT: P05783, EVALUE 2.00e-42
MAGDLAGMGGIQNEKETMQSLNDHLASYLDRMRSLETKNWKPESKIREHLEKKGPQVRDWSHHFKTIEDLRAQIFTNTVDNACIVLQINNACLAADDFTV

SEQ ID NO: 35322 - protein, 65 aa, Homo sapiens
  MAP TO AL031685.15; EXPRESSED IN BT474, SIGNAL =  23; EXPRESSED IN ADULT LIVER, SIGNAL = 4.9; EXPRESSED IN FETAL LIVER, SIGNAL = 2.7; EXPRESSED IN HELA, SIGNAL =  28; EXPRESSED IN PLACENTA, SIGNAL =  35; EXPRESSED IN HBL100, SIGNAL =  14; EXPRESSED IN HEART, SIGNAL = 1.1; EXPRESSED IN LUNG, SIGNAL =   7; EST_HUMAN HIT: BE538893.1, EVALUE 3.00e-10
PAMAPGRSAVWLASMQVPGALVPGSPSPTPPASGAAWGPGTWPGGWLGIWQEWEASRTRRRPCKA

SEQ ID NO: 35323 - protein, 72 aa, Homo sapiens
  MAP TO AL096887.5; EXPRESSED IN PLACENTA, SIGNAL =   1; EXPRESSED IN HBL100, SIGNAL =   2; EXPRESSED IN HEART, SIGNAL = 0.96; EXPRESSED IN BONE MARROW, SIGNAL = 0.92; EXPRESSED IN ADULT LIVER, SIGNAL = 2.9; EXPRESSED IN BT474, SIGNAL = 1.4; EXPRESSED IN FETAL LIVER, SIGNAL = 1.4; EXPRESSED IN HELA, SIGNAL = 0.95; EST_HUMAN HIT: T28608.1, EVALUE 1.00e-32; SWISSPROT HIT: P00740, EVALUE 2.00e-38
EHNIEETEHTEQKRNVIRIIPHHNYNAAINKYNHDIALLELDEPLVLNSYVTPICIADKEYTNIFLKFGSGY

SEQ ID NO: 35324 - protein, 33 aa, Homo sapiens
  MAP TO AB020878.1; EXPRESSED IN BONE MARROW, SIGNAL = 4.8; EXPRESSED IN BT474, SIGNAL = 3.8; EXPRESSED IN HBL100, SIGNAL = 5.4; EXPRESSED IN BRAIN, SIGNAL = 4.1; EXPRESSED IN LUNG, SIGNAL = 5.2; EXPRESSED IN ADULT LIVER, SIGNAL = 5.2; EXPRESSED IN FETAL LIVER, SIGNAL = 3.8; EXPRESSED IN PLACENTA, SIGNAL =  58; EXPRESSED IN HEART, SIGNAL = 5.5; EXPRESSED IN HELA, SIGNAL = 6.6; EST_HUMAN HIT: AU140683.1, EVALUE 6.00e-13
HEGWQQPQSGIQQCPRLSAGHESGASSVRTDIV

SEQ ID NO: 35325 - protein, 74 aa, Homo sapiens
  MAP TO AL035427.17; EXPRESSED IN PLACENTA, SIGNAL = 2.2; EXPRESSED IN BONE MARROW, SIGNAL = 1.6; EXPRESSED IN FETAL LIVER, SIGNAL = 1.7; EXPRESSED IN HEART, SIGNAL = 2.2; EXPRESSED IN HELA, SIGNAL = 1.3; EXPRESSED IN HBL100, SIGNAL = 1.3; EXPRESSED IN BRAIN, SIGNAL =   3; EXPRESSED IN LUNG, SIGNAL = 2.1; EXPRESSED IN BT474, SIGNAL = 1.4; EXPRESSED IN ADULT LIVER, SIGNAL = 1.5; EST_HUMAN HIT: BE879524.1, EVALUE 1.00e-35; SWISSPROT HIT: Q61398, EVALUE 4.30e-02
IEPSAQAKPEKKAGEEVIAGPERENDVPLVVRPKVRTQATTGARPKTETKSVPAARPKTEAQAMSGARPKTEVQ

SEQ ID NO: 35326 - protein, 95 aa, Homo sapiens
  MAP TO AC006001.2; EXPRESSED IN BRAIN, SIGNAL =   2; EXPRESSED IN BT474, SIGNAL = 1.6; EXPRESSED IN BONE MARROW, SIGNAL = 1.7; EXPRESSED IN LUNG, SIGNAL = 1.1; EXPRESSED IN ADULT LIVER, SIGNAL = 1.9; EXPRESSED IN FETAL LIVER, SIGNAL = 1.6; EXPRESSED IN PLACENTA, SIGNAL = 2.6; EXPRESSED IN HEART, SIGNAL = 1.9; EXPRESSED IN HELA, SIGNAL = 1.7; EXPRESSED IN HBL100, SIGNAL = 1.3; EST_HUMAN HIT: AA077589.1, EVALUE 7.00e-14
VTSPSREMAPSSSTWWLRPENREASLDHLTLTTHTRATTKTLQFYLQNKSLPHFPLFSLPPLCQAITSLALEASTASFPPPCLLSTPNSQNNLQK

SEQ ID NO: 35327 - protein, 25 aa, Homo sapiens
  MAP TO AC006001.2; EXPRESSED IN BRAIN, SIGNAL =   2; EXPRESSED IN BT474, SIGNAL = 1.6; EXPRESSED IN BONE MARROW, SIGNAL = 1.7; EXPRESSED IN LUNG, SIGNAL = 1.1; EXPRESSED IN ADULT LIVER, SIGNAL = 1.9; EXPRESSED IN FETAL LIVER, SIGNAL = 1.6; EXPRESSED IN PLACENTA, SIGNAL = 2.6; EXPRESSED IN HEART, SIGNAL = 1.9; EXPRESSED IN HELA, SIGNAL = 1.7; EXPRESSED IN HBL100, SIGNAL = 1.3
EEVRQHQVMVNLRAIWGVSILVQMQ

SEQ ID NO: 35328 - protein, 76 aa, Homo sapiens
  MAP TO AC009892.1; EXPRESSED IN PLACENTA, SIGNAL =   2; EXPRESSED IN HEART, SIGNAL = 1.6; EXPRESSED IN BRAIN, SIGNAL = 2.4; EXPRESSED IN BT474, SIGNAL = 1.8; EXPRESSED IN HELA, SIGNAL = 2.8; EXPRESSED IN HBL100, SIGNAL = 2.1; EXPRESSED IN LUNG, SIGNAL = 3.2; EXPRESSED IN BONE MARROW, SIGNAL = 4.8; EXPRESSED IN ADULT LIVER, SIGNAL = 2.1; EXPRESSED IN FETAL LIVER, SIGNAL = 2.8; EST_HUMAN HIT: AU120192.1, EVALUE 8.00e-33; SWISSPROT HIT: P43631, EVALUE 2.00e-12
LQCVSDVSYDRFVLYKEGERDFLQLPGPQPQAGLSQANFTLGPVSRSYGGQYRCSGAYNLSSEWSAPSDPLDILIA

SEQ ID NO: 35329 - protein, 25 aa, Homo sapiens
  MAP TO AC009892.1; EXPRESSED IN PLACENTA, SIGNAL =   2; EXPRESSED IN HEART, SIGNAL = 1.6; EXPRESSED IN BRAIN, SIGNAL = 2.4; EXPRESSED IN BT474, SIGNAL = 1.8; EXPRESSED IN HELA, SIGNAL = 2.8; EXPRESSED IN HBL100, SIGNAL = 2.1; EXPRESSED IN LUNG, SIGNAL = 3.2; EXPRESSED IN BONE MARROW, SIGNAL = 4.8; EXPRESSED IN ADULT LIVER, SIGNAL = 2.1; EXPRESSED IN FETAL LIVER, SIGNAL = 2.8; EST_HUMAN HIT: AA281873.1, EVALUE 2.00e-07; SWISSPROT HIT: Q16787, EVALUE 2.90e+00
GASTDAPVHTTSPPSGRPPATPWTS

SEQ ID NO: 35330 - protein, 114 aa, Homo sapiens
  MAP TO AL109613.10; EXPRESSED IN LUNG, SIGNAL = 1.1; EXPRESSED IN ADULT LIVER, SIGNAL = 0.91; EXPRESSED IN PLACENTA, SIGNAL = 2.9; EXPRESSED IN BRAIN, SIGNAL = 0.97; EXPRESSED IN BT474, SIGNAL = 1.8; EXPRESSED IN HEART, SIGNAL = 0.92; EXPRESSED IN HELA, SIGNAL = 2.3; EXPRESSED IN HBL100, SIGNAL = 1.1; EST_HUMAN HIT: BE720648.1, EVALUE 2.00e-44; SWISSPROT HIT: O13993, EVALUE 2.00e+00
CAQGSHTELLTAKQNEAPGPRNSGVNYLILDDDDRERPWEPAAAQMEKGQWDKGEFVTPLLETVSSFRPNEFESKFLPPENKPLETAMLKRAKELFTNNDPKVIAQHVLSMDCR

SEQ ID NO: 35331 - protein, 56 aa, Homo sapiens
  MAP TO AC005048.2; EXPRESSED IN HBL100, SIGNAL = 1.6; EXPRESSED IN PLACENTA, SIGNAL = 3.8; EXPRESSED IN HELA, SIGNAL = 2.1; EXPRESSED IN HEART, SIGNAL = 2.1; EXPRESSED IN BRAIN, SIGNAL = 1.6; EXPRESSED IN BONE MARROW, SIGNAL = 1.6; EXPRESSED IN LUNG, SIGNAL = 1.5; EXPRESSED IN ADULT LIVER, SIGNAL = 1.4; EXPRESSED IN BT474, SIGNAL =   3; EXPRESSED IN FETAL LIVER, SIGNAL = 1.6; EST_HUMAN HIT: BF081244.1, EVALUE 4.00e-17; SWISSPROT HIT: P15800, EVALUE 6.00e-21
CSCNSHSSRCHFDMTTYLASGGLSGGVCEDCQHNTEGQHCDRCRPLFYRDPLKTIS

SEQ ID NO: 35332 - protein, 20 aa, Homo sapiens
  MAP TO AC005048.2; EXPRESSED IN HBL100, SIGNAL = 1.6; EXPRESSED IN PLACENTA, SIGNAL = 3.8; EXPRESSED IN HELA, SIGNAL = 2.1; EXPRESSED IN HEART, SIGNAL = 2.1; EXPRESSED IN BRAIN, SIGNAL = 1.6; EXPRESSED IN BONE MARROW, SIGNAL = 1.6; EXPRESSED IN LUNG, SIGNAL = 1.5; EXPRESSED IN ADULT LIVER, SIGNAL = 1.4; EXPRESSED IN BT474, SIGNAL =   3; EXPRESSED IN FETAL LIVER, SIGNAL = 1.6
TVFSFQRAAVIATPAAVTLT

SEQ ID NO: 35333 - protein, 118 aa, Homo sapiens
  MAP TO AC009704.2; EXPRESSED IN LUNG, SIGNAL =  19; EXPRESSED IN ADULT LIVER, SIGNAL = 8.8; EXPRESSED IN PLACENTA, SIGNAL =  18; EXPRESSED IN BRAIN, SIGNAL = 5.5; EXPRESSED IN BONE MARROW, SIGNAL = 9.3; EXPRESSED IN FETAL LIVER, SIGNAL = 4.1; EXPRESSED IN BT474, SIGNAL =  81; EXPRESSED IN HEART, SIGNAL =  12; EXPRESSED IN HELA, SIGNAL =  30; EXPRESSED IN HBL100, SIGNAL =  12; SWISSPROT HIT: P35544, EVALUE 4.00e-23; EST_HUMAN HIT: BF347807.1, EVALUE 6.00e-47
MVAQIKAHVASLEGIAPEDQVVLLAGAPLEDEATLGQCGVEALTALEVAGRMLGGKVHGSLARAGKVRGQTPKVAKQEKKKKKRKKKTGQATRRMQYNRRFVNVVPTFSKKKGPNANS

SEQ ID NO: 35334 - protein, 18 aa, Homo sapiens
  MAP TO AC009704.2; EXPRESSED IN LUNG, SIGNAL =  19; EXPRESSED IN ADULT LIVER, SIGNAL = 8.8; EXPRESSED IN PLACENTA, SIGNAL =  18; EXPRESSED IN BRAIN, SIGNAL = 5.5; EXPRESSED IN BONE MARROW, SIGNAL = 9.3; EXPRESSED IN FETAL LIVER, SIGNAL = 4.1; EXPRESSED IN BT474, SIGNAL =  81; EXPRESSED IN HEART, SIGNAL =  12; EXPRESSED IN HELA, SIGNAL =  30; EXPRESSED IN HBL100, SIGNAL =  12; EST_HUMAN HIT: AW795076.1, EVALUE 6.40e-02
GHCPGRSSRAPGRCTAGG

SEQ ID NO: 35335 - protein, 67 aa, Homo sapiens
  MAP TO AL034405.4; EXPRESSED IN HELA, SIGNAL = 1.4; EXPRESSED IN HEART, SIGNAL = 1.1; EXPRESSED IN BONE MARROW, SIGNAL =   1; EXPRESSED IN BRAIN, SIGNAL = 1.2; EXPRESSED IN ADULT LIVER, SIGNAL =   1; EXPRESSED IN FETAL LIVER, SIGNAL = 0.95; EXPRESSED IN PLACENTA, SIGNAL = 1.4; SWISSPROT HIT: P22596, EVALUE 8.60e-01; EST_HUMAN HIT: BF056751.1, EVALUE 8.00e-23
ISMTQSGGVPTLPVSVGANSAVNNTAESKMDGSQSGISANVEKPGATETVPTHWFPHFLEENKIVVS

SEQ ID NO: 35336 - protein, 61 aa, Homo sapiens
  MAP TO AC009954.1; EXPRESSED IN PLACENTA, SIGNAL =  10; EXPRESSED IN HBL100, SIGNAL = 5.1; EXPRESSED IN HELA, SIGNAL = 8.9; EXPRESSED IN HEART, SIGNAL = 4.3; EXPRESSED IN BRAIN, SIGNAL = 2.7; EXPRESSED IN BONE MARROW, SIGNAL = 2.4; EXPRESSED IN LUNG, SIGNAL = 4.7; EXPRESSED IN ADULT LIVER, SIGNAL = 3.6; EXPRESSED IN BT474, SIGNAL =  11; EXPRESSED IN FETAL LIVER, SIGNAL =   2; EST_HUMAN HIT: BF591032.1, EVALUE 7.00e-28; SWISSPROT HIT: P20618, EVALUE 6.00e-29
VGFKNMQNVEHVPLSLDRAMRLVKDVFISAAERDVYTGDALRICIVTKEGIREETVSLRKD

SEQ ID NO: 35337 - protein, 22 aa, Homo sapiens
  MAP TO AC009954.1; EXPRESSED IN PLACENTA, SIGNAL =  10; EXPRESSED IN HBL100, SIGNAL = 5.1; EXPRESSED IN HELA, SIGNAL = 8.9; EXPRESSED IN HEART, SIGNAL = 4.3; EXPRESSED IN BRAIN, SIGNAL = 2.7; EXPRESSED IN BONE MARROW, SIGNAL = 2.4; EXPRESSED IN LUNG, SIGNAL = 4.7; EXPRESSED IN ADULT LIVER, SIGNAL = 3.6; EXPRESSED IN BT474, SIGNAL =  11; EXPRESSED IN FETAL LIVER, SIGNAL =   2; EST_HUMAN HIT: BF220129.1, EVALUE 1.00e-08
LVLRTCRMWSMFRCPWTEPCGW

SEQ ID NO: 35338 - protein, 158 aa, Homo sapiens
  MAP TO AC008037.3; EXPRESSED IN BT474, SIGNAL =  63; EXPRESSED IN ADULT LIVER, SIGNAL =  27; EXPRESSED IN FETAL LIVER, SIGNAL =  10; EXPRESSED IN HELA, SIGNAL =  66; EXPRESSED IN PLACENTA, SIGNAL =  35; EXPRESSED IN HBL100, SIGNAL =  41; EXPRESSED IN HEART, SIGNAL =  35; EXPRESSED IN BRAIN, SIGNAL = 8.8; EXPRESSED IN BONE MARROW, SIGNAL =  35; EXPRESSED IN LUNG, SIGNAL =  40; SWISSPROT HIT: P19944, EVALUE 5.00e-24; EST_HUMAN HIT: AA379861.1, EVALUE 5.00e-22
MASISELACIYSALILHDNEVTVTEYKIKALIKAAGVNVEPFRPGLFAKAPANVNIRSLICNVGAGGPAPAAGAAPAGGDPPASTSLSAGIIGMSHRGQPRMRILSPFFLHAYAHFCLGCPPPLLLLQLRRRKWKQRKKNLRTLMMTWALVFLTKPLL

SEQ ID NO: 35339 - protein, 110 aa, Homo sapiens
  MAP TO AP000507.1; EXPRESSED IN BT474, SIGNAL = 2.4; EXPRESSED IN FETAL LIVER, SIGNAL = 2.7; EXPRESSED IN PLACENTA, SIGNAL = 4.4; EXPRESSED IN HBL100, SIGNAL = 6.3; EXPRESSED IN HELA, SIGNAL = 7.6; EXPRESSED IN HEART, SIGNAL = 2.6; EXPRESSED IN BRAIN, SIGNAL = 3.5; EXPRESSED IN BONE MARROW, SIGNAL = 3.3; EXPRESSED IN LUNG, SIGNAL =   4; EXPRESSED IN ADULT LIVER, SIGNAL = 1.9; SWISSPROT HIT: Q30201, EVALUE 9.00e-16; EST_HUMAN HIT: BE877225.1, EVALUE 8.00e-54
TGSALSSPVPPMVNVTRSEASEGNITVTCRASSFYPRNIILTWRQDGVSLSHDTQQWGDVLPDGNGTYQTWVATRICRGEEQRFTCYMEHSGNHSTHPVPSGEPRVTLER

SEQ ID NO: 35340 - protein, 62 aa, Homo sapiens
  MAP TO AL035665.22; EXPRESSED IN BT474, SIGNAL = 1.1; EXPRESSED IN ADULT LIVER, SIGNAL =   1; EXPRESSED IN FETAL LIVER, SIGNAL =   1; EXPRESSED IN HELA, SIGNAL = 0.99; EXPRESSED IN PLACENTA, SIGNAL = 8.1; EXPRESSED IN HBL100, SIGNAL =   1; EXPRESSED IN HEART, SIGNAL = 2.6; EXPRESSED IN BRAIN, SIGNAL = 1.2; EXPRESSED IN LUNG, SIGNAL = 3.4; EST_HUMAN HIT: AA846225.1, EVALUE 1.00e-19; SWISSPROT HIT: P07287, EVALUE 1.10e+00
EKYLEQKLLTVHPCCMLALILNQEMALNSRSEHRNRGCQHSNQKQSLTGRGERDLAQGQEGG

SEQ ID NO: 35341 - protein, 46 aa, Homo sapiens
  MAP TO AP000553.1; EXPRESSED IN BRAIN, SIGNAL = 1.5; EXPRESSED IN BONE MARROW, SIGNAL = 1.9; EXPRESSED IN LUNG, SIGNAL = 1.5; EXPRESSED IN BT474, SIGNAL = 2.1; EXPRESSED IN FETAL LIVER, SIGNAL = 1.8; EXPRESSED IN ADULT LIVER, SIGNAL = 1.8; EXPRESSED IN HELA, SIGNAL = 4.4; EXPRESSED IN PLACENTA, SIGNAL = 2.2; EXPRESSED IN HBL100, SIGNAL = 4.7; EXPRESSED IN HEART, SIGNAL = 1.5; EST_HUMAN HIT: AW379617.1, EVALUE 1.00e-13
EVSAFGEDGEGDDLDLWTVRCSGQHWEREAAVRFQHVGTSVFLSVT

SEQ ID NO: 35342 - protein, 85 aa, Homo sapiens
  MAP TO AP000553.1; EXPRESSED IN BRAIN, SIGNAL = 1.5; EXPRESSED IN BONE MARROW, SIGNAL = 1.9; EXPRESSED IN LUNG, SIGNAL = 1.5; EXPRESSED IN BT474, SIGNAL = 2.1; EXPRESSED IN FETAL LIVER, SIGNAL = 1.8; EXPRESSED IN ADULT LIVER, SIGNAL = 1.8; EXPRESSED IN HELA, SIGNAL = 4.4; EXPRESSED IN PLACENTA, SIGNAL = 2.2; EXPRESSED IN HBL100, SIGNAL = 4.7; EXPRESSED IN HEART, SIGNAL = 1.5; EST_HUMAN HIT: AW136812.1, EVALUE 6.00e-45; SWISSPROT HIT: P38190, EVALUE 2.70e+00
TARATTWTYGQCAALDSTGSVRLLCASSMWAPLCSCQSRVSSMEAPSVGSMRSTACPVPTRTIRGRPWKASSSSLVWSPLQVTMN

SEQ ID NO: 35343 - protein, 59 aa, Homo sapiens
  MAP TO AC010678.1; EXPRESSED IN PLACENTA, SIGNAL = 5.1; EXPRESSED IN HBL100, SIGNAL = 5.5; EXPRESSED IN HEART, SIGNAL = 3.3; EXPRESSED IN BONE MARROW, SIGNAL =   3; EXPRESSED IN BRAIN, SIGNAL = 2.5; EXPRESSED IN LUNG, SIGNAL = 2.8; EXPRESSED IN ADULT LIVER, SIGNAL =  10; EXPRESSED IN BT474, SIGNAL = 6.6; EXPRESSED IN FETAL LIVER, SIGNAL = 3.5; EXPRESSED IN HELA, SIGNAL = 7.8; SWISSPROT HIT: P75497, EVALUE 1.00e-01; EST_HUMAN HIT: BF576337.1, EVALUE 6.00e-23
GSAGREIKDTHKIVKAGFRGVTVFWSCDAANALDIPAFIIKFSEGGGRLVRDLASFDYE

SEQ ID NO: 35344 - protein, 59 aa, Homo sapiens
  MAP TO AL096775.9; EXPRESSED IN BONE MARROW, SIGNAL = 3.4; EXPRESSED IN FETAL LIVER, SIGNAL = 3.4; EXPRESSED IN HELA, SIGNAL =   4; EXPRESSED IN HEART, SIGNAL =  29; EXPRESSED IN LUNG, SIGNAL = 3.2; EXPRESSED IN BRAIN, SIGNAL = 2.7; EXPRESSED IN BT474, SIGNAL = 2.5; EXPRESSED IN ADULT LIVER, SIGNAL = 3.9; EXPRESSED IN PLACENTA, SIGNAL = 4.1; EXPRESSED IN HBL100, SIGNAL = 2.3; EST_HUMAN HIT: BE294281.1, EVALUE 3.00e-28; SWISSPROT HIT: Q05713, EVALUE 1.00e-03
LAADGTVMNTFAHKCQLPEDVDPTSVTSALREDGSLTIRARRHPHTEHVQQTFRTEIKI

SEQ ID NO: 35345 - protein, 86 aa, Homo sapiens
  MAP TO AC009312.1; EXPRESSED IN HELA, SIGNAL = 1.1; EXPRESSED IN PLACENTA, SIGNAL = 1.1; EXPRESSED IN HBL100, SIGNAL = 1.4; EXPRESSED IN HEART, SIGNAL = 0.87; EXPRESSED IN BT474, SIGNAL = 1.2; EXPRESSED IN FETAL LIVER, SIGNAL = 1.1; EST_HUMAN HIT: AU124767.1, EVALUE 5.00e-36; SWISSPROT HIT: P12036, EVALUE 1.40e+00
TQNGDVSEETMGSRKVKKSKQKPMNVGLSETQNGGMSQEAVGNIKVTKSPQKSTVLTNGEAAMQSSNSESKKKKKKKRKMVNDAEP

SEQ ID NO: 35346 - protein, 24 aa, Homo sapiens
  MAP TO AC009312.1; EXPRESSED IN HELA, SIGNAL = 1.1; EXPRESSED IN PLACENTA, SIGNAL = 1.1; EXPRESSED IN HBL100, SIGNAL = 1.4; EXPRESSED IN HEART, SIGNAL = 0.87; EXPRESSED IN BT474, SIGNAL = 1.2; EXPRESSED IN FETAL LIVER, SIGNAL = 1.1; EST_HUMAN HIT: BF475819.1, EVALUE 6.00e-07
KLKMEMYLKKQWEVERLKNQNKSP

SEQ ID NO: 35347 - protein, 142 aa, Homo sapiens
  MAP TO AC008116.8; EXPRESSED IN BT474, SIGNAL = 2.7; EXPRESSED IN FETAL LIVER, SIGNAL = 2.3; EXPRESSED IN HEART, SIGNAL = 2.4; EXPRESSED IN LUNG, SIGNAL = 3.3; EXPRESSED IN BRAIN, SIGNAL = 3.1; EXPRESSED IN ADULT LIVER, SIGNAL = 3.4; EXPRESSED IN PLACENTA, SIGNAL = 3.6; EXPRESSED IN HELA, SIGNAL = 4.2; EXPRESSED IN HBL100, SIGNAL = 2.8; EXPRESSED IN BONE MARROW, SIGNAL = 2.4; SWISSPROT HIT: Q93075, EVALUE 1.00e-85; EST_HUMAN HIT: BE697125.1, EVALUE 7.00e-76
PPRPCGGHASSSLPKSHLEPSLEEGFIDTHCHLDMLYSKLSFQGTFTKFRKIYSSSFPKEFQGCISDFCDPRTLTDCLWEELLKEDLVWGAFGCHPHFARYYSESQERNLLQALRHPKAVAFGEMGLDYSYKCTTPVPEQHK

SEQ ID NO: 35348 - protein, 21 aa, Homo sapiens
  MAP TO AC008116.8; EXPRESSED IN BT474, SIGNAL = 2.7; EXPRESSED IN FETAL LIVER, SIGNAL = 2.3; EXPRESSED IN HEART, SIGNAL = 2.4; EXPRESSED IN LUNG, SIGNAL = 3.3; EXPRESSED IN BRAIN, SIGNAL = 3.1; EXPRESSED IN ADULT LIVER, SIGNAL = 3.4; EXPRESSED IN PLACENTA, SIGNAL = 3.6; EXPRESSED IN HELA, SIGNAL = 4.2; EXPRESSED IN HBL100, SIGNAL = 2.8; EXPRESSED IN BONE MARROW, SIGNAL = 2.4; EST_HUMAN HIT: BE697125.1, EVALUE 1.00e-05
LRVLVEDTHPAPCQRATWSQA

SEQ ID NO: 35349 - protein, 44 aa, Homo sapiens
  MAP TO AC005488.2; EXPRESSED IN HEART, SIGNAL = 1.2; EXPRESSED IN PLACENTA, SIGNAL = 1.5; EXPRESSED IN BONE MARROW, SIGNAL = 1.3; EXPRESSED IN FETAL LIVER, SIGNAL = 1.4; EXPRESSED IN HELA, SIGNAL = 2.2; EXPRESSED IN HBL100, SIGNAL = 1.3; EXPRESSED IN BRAIN, SIGNAL = 1.4; EXPRESSED IN LUNG, SIGNAL = 1.6; EXPRESSED IN BT474, SIGNAL = 3.2; EXPRESSED IN ADULT LIVER, SIGNAL = 1.7; SWISSPROT HIT: P54278, EVALUE 4.00e-16; EST_HUMAN HIT: BF680924.1, EVALUE 1.00e-17
PAKAIKPIDRKSVHQICSGPVVLSLSTAVKKIVGNSLDAGATNI

SEQ ID NO: 35350 - protein, 23 aa, Homo sapiens
  MAP TO AC005488.2; EXPRESSED IN HEART, SIGNAL = 1.2; EXPRESSED IN PLACENTA, SIGNAL = 1.5; EXPRESSED IN BONE MARROW, SIGNAL = 1.3; EXPRESSED IN FETAL LIVER, SIGNAL = 1.4; EXPRESSED IN HELA, SIGNAL = 2.2; EXPRESSED IN HBL100, SIGNAL = 1.3; EXPRESSED IN BRAIN, SIGNAL = 1.4; EXPRESSED IN LUNG, SIGNAL = 1.6; EXPRESSED IN BT474, SIGNAL = 3.2; EXPRESSED IN ADULT LIVER, SIGNAL = 1.7; EST_HUMAN HIT: AW630204.1, EVALUE 3.00e-06
NLLRPSNLLIGSQSIRFALGRWY

SEQ ID NO: 35351 - protein, 60 aa, Homo sapiens
  MAP TO AC008080.1; EXPRESSED IN BT474, SIGNAL =   1; EXPRESSED IN HEART, SIGNAL = 1.7; EXPRESSED IN PLACENTA, SIGNAL = 1.9; EXPRESSED IN ADULT LIVER, SIGNAL = 1.2; EXPRESSED IN FETAL LIVER, SIGNAL = 1.6; EXPRESSED IN HELA, SIGNAL = 1.2; EXPRESSED IN HBL100, SIGNAL = 1.2; EXPRESSED IN BRAIN, SIGNAL = 1.8; EXPRESSED IN LUNG, SIGNAL = 1.1; EXPRESSED IN BONE MARROW, SIGNAL = 1.6; SWISSPROT HIT: Q28300, EVALUE 3.40e+00; EST_HUMAN HIT: BF082089.1, EVALUE 1.40e-01
GCQVRDDSLQLLLMFALGEEPPNPAVCADVIQCLWSSPGVSNPGTMYRYQSVVCGLLGTA

SEQ ID NO: 35352 - protein, 36 aa, Homo sapiens
  MAP TO AC007917.15; EXPRESSED IN HBL100, SIGNAL = 3.3; EXPRESSED IN HELA, SIGNAL = 8.5; EXPRESSED IN HEART, SIGNAL = 7.7; EXPRESSED IN PLACENTA, SIGNAL = 8.4; EXPRESSED IN BRAIN, SIGNAL = 6.5; EXPRESSED IN BONE MARROW, SIGNAL = 8.7; EXPRESSED IN LUNG, SIGNAL = 5.3; EXPRESSED IN BT474, SIGNAL = 3.7; EXPRESSED IN FETAL LIVER, SIGNAL = 8.3; EXPRESSED IN ADULT LIVER, SIGNAL = 6.9; EST_HUMAN HIT: AA322377.1, EVALUE 5.00e-06; SWISSPROT HIT: P49619, EVALUE 9.00e-16
LVMLDRWHLEVIPREEVENGDQVPYSIMNNYFSIGV

SEQ ID NO: 35353 - protein, 36 aa, Homo sapiens
  MAP TO AC007917.15; EXPRESSED IN HBL100, SIGNAL = 3.3; EXPRESSED IN HELA, SIGNAL = 8.5; EXPRESSED IN HEART, SIGNAL = 7.7; EXPRESSED IN PLACENTA, SIGNAL = 8.4; EXPRESSED IN BRAIN, SIGNAL = 6.5; EXPRESSED IN BONE MARROW, SIGNAL = 8.7; EXPRESSED IN LUNG, SIGNAL = 5.3; EXPRESSED IN BT474, SIGNAL = 3.7; EXPRESSED IN FETAL LIVER, SIGNAL = 8.3; EXPRESSED IN ADULT LIVER, SIGNAL = 6.9; EST_HUMAN HIT: AA322377.1, EVALUE 2.00e-06
LGDAGPLASGSHPQRGSGKRGPGPIQHHEQLFLHWC

SEQ ID NO: 35354 - protein, 85 aa, Homo sapiens
  MAP TO AC008000.7; EXPRESSED IN PLACENTA, SIGNAL = 3.4; EXPRESSED IN HELA, SIGNAL = 2.1; EXPRESSED IN BT474, SIGNAL =   2; EXPRESSED IN HEART, SIGNAL = 2.5; EXPRESSED IN HBL100, SIGNAL =   2; EXPRESSED IN BRAIN, SIGNAL = 3.7; EXPRESSED IN LUNG, SIGNAL = 1.6; EXPRESSED IN BONE MARROW, SIGNAL = 2.4; EXPRESSED IN ADULT LIVER, SIGNAL =   3; EXPRESSED IN FETAL LIVER, SIGNAL = 2.8; EST_HUMAN HIT: AW611841.1, EVALUE 3.00e-26; SWISSPROT HIT: Q01814, EVALUE 1.00e-28
CATAQGGAEDEGEAEAGWIEGAAILLSVICVVLVTAFNDWSKEKQFRGLQSRIEQEQKFTVVRAGQVVQIPVAEIVVGDIAQVKY

SEQ ID NO: 35355 - protein, 21 aa, Homo sapiens
  MAP TO AC008000.7; EXPRESSED IN PLACENTA, SIGNAL = 3.4; EXPRESSED IN HELA, SIGNAL = 2.1; EXPRESSED IN BT474, SIGNAL =   2; EXPRESSED IN HEART, SIGNAL = 2.5; EXPRESSED IN HBL100, SIGNAL =   2; EXPRESSED IN BRAIN, SIGNAL = 3.7; EXPRESSED IN LUNG, SIGNAL = 1.6; EXPRESSED IN BONE MARROW, SIGNAL = 2.4; EXPRESSED IN ADULT LIVER, SIGNAL =   3; EXPRESSED IN FETAL LIVER, SIGNAL = 2.8
LDRGGRHSPLSYLCGPGHGLQ

SEQ ID NO: 35356 - protein, 17 aa, Homo sapiens
  MAP TO AC009473.2; EXPRESSED IN BRAIN, SIGNAL = 4.9; EXPRESSED IN LUNG, SIGNAL =   4; EXPRESSED IN HEART, SIGNAL = 3.6; EXPRESSED IN PLACENTA, SIGNAL = 6.9; EXPRESSED IN BONE MARROW, SIGNAL = 5.4; EXPRESSED IN ADULT LIVER, SIGNAL = 5.9; EXPRESSED IN BT474, SIGNAL = 3.6; EXPRESSED IN FETAL LIVER, SIGNAL = 2.5; EXPRESSED IN HELA, SIGNAL = 4.1; EXPRESSED IN HBL100, SIGNAL = 3.6
IAGMTFTPVPIKFLIST

SEQ ID NO: 35357 - protein, 39 aa, Homo sapiens
  MAP TO AC010170.3; EXPRESSED IN PLACENTA, SIGNAL = 2.2; EXPRESSED IN HEART, SIGNAL = 2.8; EXPRESSED IN HBL100, SIGNAL = 1.9; EXPRESSED IN HELA, SIGNAL = 2.6; EXPRESSED IN BRAIN, SIGNAL = 2.5; EXPRESSED IN BONE MARROW, SIGNAL = 2.2; EXPRESSED IN LUNG, SIGNAL =   2; EXPRESSED IN ADULT LIVER, SIGNAL = 2.2; EXPRESSED IN BT474, SIGNAL = 1.5; EXPRESSED IN FETAL LIVER, SIGNAL = 3.2
TLGGRTVERQGHSCVTVGKSKLIGKQGGTCQLGPAGVII

SEQ ID NO: 35358 - protein, 91 aa, Homo sapiens
  MAP TO AC010726.2; EXPRESSED IN PLACENTA, SIGNAL = 1.1; EXPRESSED IN BRAIN, SIGNAL = 1.1; EXPRESSED IN LUNG, SIGNAL = 1.6; EXPRESSED IN HEART, SIGNAL = 0.84; EXPRESSED IN BONE MARROW, SIGNAL =   1; EXPRESSED IN ADULT LIVER, SIGNAL =   2; EXPRESSED IN FETAL LIVER, SIGNAL = 1.2; EXPRESSED IN HELA, SIGNAL = 1.8; EST_HUMAN HIT: AU140604.1, EVALUE 5.00e-31; SWISSPROT HIT: O97649, EVALUE 2.10e+00
SYLWKISSLHLSFWIDTTRCMSEAKRRVFITHSNIKCSVLFSWLSEAMVICGSRHPHTIVSMDFCRSIHPGERSNEWRKRHISPVRTILCS

SEQ ID NO: 35359 - protein, 116 aa, Homo sapiens
  MAP TO AL021707.2; EXPRESSED IN HELA, SIGNAL = 1.5; EXPRESSED IN PLACENTA, SIGNAL = 1.2; EXPRESSED IN HEART, SIGNAL = 1.3; EXPRESSED IN HBL100, SIGNAL = 1.7; EXPRESSED IN BRAIN, SIGNAL = 1.4; EXPRESSED IN BONE MARROW, SIGNAL = 2.3; EXPRESSED IN LUNG, SIGNAL =   2; EXPRESSED IN ADULT LIVER, SIGNAL = 0.92; EXPRESSED IN BT474, SIGNAL = 1.6; EXPRESSED IN FETAL LIVER, SIGNAL = 1.3; EST_HUMAN HIT: BE884955.1, EVALUE 1.00e-63; SWISSPROT HIT: O00178, EVALUE 1.00e-64
VAVVGNVDAGKSTLLGVLTHGELDNGRGFARQKLFRHKHEIESGRTSSVGNDILGFDSEGNVVNKPDSHGGSLEWTKICEKSTKVITFIDLAGHEKYLKTTVFGMTGHLPDFCMLM

SEQ ID NO: 35360 - protein, 55 aa, Homo sapiens
  MAP TO AC011079.1; EXPRESSED IN BRAIN, SIGNAL = 5.8; EXPRESSED IN BONE MARROW, SIGNAL = 5.2; EXPRESSED IN LUNG, SIGNAL =   5; EXPRESSED IN ADULT LIVER, SIGNAL = 8.9; EXPRESSED IN BT474, SIGNAL = 3.5; EXPRESSED IN FETAL LIVER, SIGNAL = 3.7; EXPRESSED IN HELA, SIGNAL = 5.6; EXPRESSED IN HEART, SIGNAL = 5.5; EXPRESSED IN PLACENTA, SIGNAL = 7.1; EXPRESSED IN HBL100, SIGNAL = 4.2; EST_HUMAN HIT: H52941.1, EVALUE 1.00e-15; SWISSPROT HIT: P32872, EVALUE 2.60e+00
MGVQALGKYSHYKWEKLAKTKGLQAPCKSEIQQGSQILKLSFDSMSHIQVTLMQE

SEQ ID NO: 35361 - protein, 68 aa, Homo sapiens
  MAP TO AL022398.1; EXPRESSED IN ADULT LIVER, SIGNAL = 1.2; EXPRESSED IN BT474, SIGNAL = 1.2; EXPRESSED IN FETAL LIVER, SIGNAL =   1; EXPRESSED IN HELA, SIGNAL = 0.98; EXPRESSED IN PLACENTA, SIGNAL = 1.5; EXPRESSED IN HEART, SIGNAL = 1.2; EXPRESSED IN BRAIN, SIGNAL =   1; EXPRESSED IN BONE MARROW, SIGNAL = 0.99; SWISSPROT HIT: O14896, EVALUE 4.00e-37; EST_HUMAN HIT: BE540926.1, EVALUE 3.00e-36
AWAVETGKYQEGVDDPDPAKWKAQLRCALNKSREFNLMYDGTKEVPMNPVKIYQVCDIPQPQGSIINP

SEQ ID NO: 35362 - protein, 62 aa, Homo sapiens
  MAP TO AC010872.2; EXPRESSED IN FETAL LIVER, SIGNAL = 2.9; EXPRESSED IN ADULT LIVER, SIGNAL =  11; EXPRESSED IN BT474, SIGNAL = 1.2; EXPRESSED IN HELA, SIGNAL =   1; EXPRESSED IN PLACENTA, SIGNAL = 1.1; EXPRESSED IN HEART, SIGNAL =   1; EXPRESSED IN HBL100, SIGNAL =   1; EXPRESSED IN BRAIN, SIGNAL = 2.6; EST_HUMAN HIT: T84725.1, EVALUE 3.00e-15; SWISSPROT HIT: P04114, EVALUE 9.00e-30
MQAELVAKPSVSVEFVTNMGIIIPDFARSGVQMNTNFFHESGLEAHVALKAGKLKFIIPSPK

SEQ ID NO: 35363 - protein, 23 aa, Homo sapiens
  MAP TO AC010872.2; EXPRESSED IN FETAL LIVER, SIGNAL = 2.9; EXPRESSED IN ADULT LIVER, SIGNAL =  11; EXPRESSED IN BT474, SIGNAL = 1.2; EXPRESSED IN HELA, SIGNAL =   1; EXPRESSED IN PLACENTA, SIGNAL = 1.1; EXPRESSED IN HEART, SIGNAL =   1; EXPRESSED IN HBL100, SIGNAL =   1; EXPRESSED IN BRAIN, SIGNAL = 2.6; EST_HUMAN HIT: BF125023.1, EVALUE 2.10e+00
IGCFLTYRCRLNWWQNPPCLWSL

SEQ ID NO: 35364 - protein, 52 aa, Homo sapiens
  MAP TO AC010898.1; EXPRESSED IN PLACENTA, SIGNAL = 1.8; EXPRESSED IN HBL100, SIGNAL = 1.1; EXPRESSED IN HEART, SIGNAL = 1.4; EXPRESSED IN LUNG, SIGNAL = 0.99; EXPRESSED IN BRAIN, SIGNAL = 1.9; EXPRESSED IN BONE MARROW, SIGNAL = 1.2; EXPRESSED IN FETAL LIVER, SIGNAL = 1.3; EXPRESSED IN ADULT LIVER, SIGNAL = 1.1; EXPRESSED IN BT474, SIGNAL = 1.1; EXPRESSED IN HELA, SIGNAL = 1.5; SWISSPROT HIT: P56279, EVALUE 3.50e+00; EST_HUMAN HIT: AW119123.1, EVALUE 4.00e-07
DRSRVMSKCPPLGKALPKEYPCLWAWPCNMSLSFLCARPIPEKGVTSPMRWT

SEQ ID NO: 35365 - protein, 146 aa, Homo sapiens
  MAP TO AC011297.1; EXPRESSED IN LUNG, SIGNAL = 1.5; EXPRESSED IN BRAIN, SIGNAL = 2.7; EXPRESSED IN BONE MARROW, SIGNAL = 2.7; EXPRESSED IN FETAL LIVER, SIGNAL = 3.4; EXPRESSED IN ADULT LIVER, SIGNAL = 2.4; EXPRESSED IN BT474, SIGNAL =   2; EXPRESSED IN HELA, SIGNAL = 2.2; EXPRESSED IN HBL100, SIGNAL = 1.8; EXPRESSED IN PLACENTA, SIGNAL = 3.2; EXPRESSED IN HEART, SIGNAL =   3; SWISSPROT HIT: Q99218, EVALUE 4.00e-24
YSSYGYEPMGGWLHHQIIPVVSQQHPLTHTLQSHHHIPVVPAQQPRVRQQALMPVPGQQSMTPTQHHQPNLPLPAQQPFQPQPVQPQPHQPMQPQPPVQPMQPLLPQPPLPPMFPLRPLPPILPDLHLEAWPATDKTKQEEVVSTP

SEQ ID NO: 35366 - protein, 18 aa, Homo sapiens
  MAP TO AC011297.1; EXPRESSED IN LUNG, SIGNAL = 1.5; EXPRESSED IN BRAIN, SIGNAL = 2.7; EXPRESSED IN BONE MARROW, SIGNAL = 2.7; EXPRESSED IN FETAL LIVER, SIGNAL = 3.4; EXPRESSED IN ADULT LIVER, SIGNAL = 2.4; EXPRESSED IN BT474, SIGNAL =   2; EXPRESSED IN HELA, SIGNAL = 2.2; EXPRESSED IN HBL100, SIGNAL = 1.8; EXPRESSED IN PLACENTA, SIGNAL = 3.2; EXPRESSED IN HEART, SIGNAL =   3
WVDGCTTKSSPWCPNSTP

SEQ ID NO: 35367 - protein, 43 aa, Homo sapiens
  MAP TO AC011297.1; EXPRESSED IN LUNG, SIGNAL = 1.5; EXPRESSED IN BRAIN, SIGNAL = 2.7; EXPRESSED IN BONE MARROW, SIGNAL = 2.7; EXPRESSED IN FETAL LIVER, SIGNAL = 3.4; EXPRESSED IN ADULT LIVER, SIGNAL = 2.4; EXPRESSED IN BT474, SIGNAL =   2; EXPRESSED IN HELA, SIGNAL = 2.2; EXPRESSED IN HBL100, SIGNAL = 1.8; EXPRESSED IN PLACENTA, SIGNAL = 3.2; EXPRESSED IN HEART, SIGNAL =   3; EST_HUMAN HIT: AW665671.1, EVALUE 3.00e-03; SWISSPROT HIT: Q14990, EVALUE 4.00e-04
PCSPCCHSHLCLQCSPCGPCPPYFLICIWKLGQQQTRPSRRKW

SEQ ID NO: 35368 - protein, 83 aa, Homo sapiens
  MAP TO AL109624.1; EXPRESSED IN BT474, SIGNAL = 6.9; EXPRESSED IN HBL100, SIGNAL = 3.4; EXPRESSED IN HELA, SIGNAL = 5.6; EXPRESSED IN HEART, SIGNAL =  19; EXPRESSED IN PLACENTA, SIGNAL = 5.6; EXPRESSED IN LUNG, SIGNAL = 2.9; EXPRESSED IN BRAIN, SIGNAL = 6.7; EXPRESSED IN BONE MARROW, SIGNAL = 3.6; EXPRESSED IN ADULT LIVER, SIGNAL =  10; EXPRESSED IN FETAL LIVER, SIGNAL =   6; EST_HUMAN HIT: AI753726.1, EVALUE 2.00e-05; SWISSPROT HIT: P37141, EVALUE 6.50e+00
LPCFRSLPHEYCESAAVTKYHSPGGAYQQQKFISRSSGDWEGQDQGASRWVSGVCLPPGSQMAVFLLSAHMAEEGERVFWDPL

SEQ ID NO: 35369 - protein, 72 aa, Homo sapiens
  MAP TO AL035698.12; EXPRESSED IN FETAL LIVER, SIGNAL = 1.7; EXPRESSED IN ADULT LIVER, SIGNAL =   1; EXPRESSED IN BT474, SIGNAL = 1.1; EXPRESSED IN HELA, SIGNAL = 1.1; EXPRESSED IN HEART, SIGNAL = 1.2; EXPRESSED IN PLACENTA, SIGNAL = 1.2; EXPRESSED IN BONE MARROW, SIGNAL = 1.4; EXPRESSED IN BRAIN, SIGNAL = 1.5; SWISSPROT HIT: Q13255, EVALUE 4.00e-38; EST_HUMAN HIT: BF528769.1, EVALUE 2.40e+00
NESLEENYVQDSKMGFVINAIYAMAHGLQNMHHALCPGHVGLCDAMKPIDGSKLLDFLIKSSFIGVSGEEVW

SEQ ID NO: 35370 - protein, 61 aa, Homo sapiens
  MAP TO AL109799.4; EXPRESSED IN BONE MARROW, SIGNAL = 2.5; EXPRESSED IN LUNG, SIGNAL =   2; EXPRESSED IN FETAL LIVER, SIGNAL = 2.4; EXPRESSED IN ADULT LIVER, SIGNAL = 2.8; EXPRESSED IN BT474, SIGNAL = 2.5; EXPRESSED IN HBL100, SIGNAL = 5.4; EXPRESSED IN HELA, SIGNAL = 2.9; EXPRESSED IN HEART, SIGNAL = 2.6; EXPRESSED IN BRAIN, SIGNAL = 5.2; EXPRESSED IN PLACENTA, SIGNAL = 2.8; EST_HUMAN HIT: BE785762.1, EVALUE 2.00e-17
EKHSSKNSERAQKSEPREGMKLPKARTAYSGGAEDLERDLKKEKPKHEHKSSSRREAREEK

SEQ ID NO: 35371 - protein, 58 aa, Homo sapiens
  MAP TO AL049593.4; EXPRESSED IN FETAL LIVER, SIGNAL = 6.7; EXPRESSED IN BT474, SIGNAL = 3.3; EXPRESSED IN HBL100, SIGNAL = 4.3; EXPRESSED IN HELA, SIGNAL = 5.6; EXPRESSED IN HEART, SIGNAL = 5.4; EXPRESSED IN PLACENTA, SIGNAL =   6; EXPRESSED IN BONE MARROW, SIGNAL = 6.2; EXPRESSED IN LUNG, SIGNAL =   4; EXPRESSED IN ADULT LIVER, SIGNAL =   6; EXPRESSED IN BRAIN, SIGNAL = 6.1; EST_HUMAN HIT: AI638208.1, EVALUE 2.00e-07; SWISSPROT HIT: P40035, EVALUE 2.60e+00
LEAGNSKTMAPEDLASGEGSSPASKMIPFCCVLTWQKGKKSKAGSLKPFYKGTIPIHG

SEQ ID NO: 35372 - protein, 17 aa, Homo sapiens
  MAP TO AL049593.4; EXPRESSED IN FETAL LIVER, SIGNAL = 6.7; EXPRESSED IN BT474, SIGNAL = 3.3; EXPRESSED IN HBL100, SIGNAL = 4.3; EXPRESSED IN HELA, SIGNAL = 5.6; EXPRESSED IN HEART, SIGNAL = 5.4; EXPRESSED IN PLACENTA, SIGNAL =   6; EXPRESSED IN BONE MARROW, SIGNAL = 6.2; EXPRESSED IN LUNG, SIGNAL =   4; EXPRESSED IN ADULT LIVER, SIGNAL =   6; EXPRESSED IN BRAIN, SIGNAL = 6.1; EST_HUMAN HIT: AW082110.1, EVALUE 7.60e-02
SGGWEFQDHGTRRFGVW

SEQ ID NO: 35373 - protein, 70 aa, Homo sapiens
  MAP TO AL117343.1; EXPRESSED IN FETAL LIVER, SIGNAL = 6.7; EXPRESSED IN ADULT LIVER, SIGNAL = 6.2; EXPRESSED IN BT474, SIGNAL = 3.4; EXPRESSED IN HBL100, SIGNAL = 4.7; EXPRESSED IN HELA, SIGNAL = 7.3; EXPRESSED IN HEART, SIGNAL = 5.9; EXPRESSED IN PLACENTA, SIGNAL = 6.5; EXPRESSED IN LUNG, SIGNAL = 4.7; EXPRESSED IN BRAIN, SIGNAL = 6.9; EXPRESSED IN BONE MARROW, SIGNAL = 5.7; EST_HUMAN HIT: BE695397.1, EVALUE 5.00e-15
PKLHPGLPENRFGLGTPEKNTKAEPKAEAGSRSRSSSSTPTSPKPLLQSPKPSLAARPVIPQKPRTASRP

SEQ ID NO: 35374 - protein, 59 aa, Homo sapiens
  MAP TO AL117343.1; EXPRESSED IN FETAL LIVER, SIGNAL = 6.7; EXPRESSED IN ADULT LIVER, SIGNAL = 6.2; EXPRESSED IN BT474, SIGNAL = 3.4; EXPRESSED IN HBL100, SIGNAL = 4.7; EXPRESSED IN HELA, SIGNAL = 7.3; EXPRESSED IN HEART, SIGNAL = 5.9; EXPRESSED IN PLACENTA, SIGNAL = 6.5; EXPRESSED IN LUNG, SIGNAL = 4.7; EXPRESSED IN BRAIN, SIGNAL = 6.9; EXPRESSED IN BONE MARROW, SIGNAL = 5.7; EST_HUMAN HIT: BE695397.1, EVALUE 3.00e-28; SWISSPROT HIT: P32805, EVALUE 3.00e-01
CLNCTQVFQRTALVWEHQKRIPKQNPKRKQAPGLGAHPAHLRARSPSCSPPNPVWQHGP

SEQ ID NO: 35375 - protein, 72 aa, Homo sapiens
  MAP TO AL049698.2; EXPRESSED IN ADULT LIVER, SIGNAL = 1.6; EXPRESSED IN HBL100, SIGNAL =   1; EXPRESSED IN HELA, SIGNAL = 1.4; EXPRESSED IN HEART, SIGNAL = 0.9; EXPRESSED IN PLACENTA, SIGNAL = 1.8; EXPRESSED IN BRAIN, SIGNAL = 0.92; EXPRESSED IN LUNG, SIGNAL = 2.6; EXPRESSED IN BT474, SIGNAL =   2; EST_HUMAN HIT: BE897400.1, EVALUE 1.00e-04; SWISSPROT HIT: P55196, EVALUE 8.00e-37
MDGVVTVTPRSMDAETYVEGQRISETTMLQSGMKVQFGASHVFKFVDPSQDHALAKRSVDGGLMVKGPRHKP

SEQ ID NO: 35376 - protein, 42 aa, Homo sapiens
  MAP TO AL049698.2; EXPRESSED IN ADULT LIVER, SIGNAL = 1.6; EXPRESSED IN HBL100, SIGNAL =   1; EXPRESSED IN HELA, SIGNAL = 1.4; EXPRESSED IN HEART, SIGNAL = 0.9; EXPRESSED IN PLACENTA, SIGNAL = 1.8; EXPRESSED IN BRAIN, SIGNAL = 0.92; EXPRESSED IN LUNG, SIGNAL = 2.6; EXPRESSED IN BT474, SIGNAL =   2; EST_HUMAN HIT: R16397.1, EVALUE 4.10e+00; SWISSPROT HIT: P25567, EVALUE 8.00e+00
GWSGHCDAQKYGRRNLRGRPAHLRNHHAAEWHESAVWGVPCI

SEQ ID NO: 35377 - protein, 50 aa, Homo sapiens
  MAP TO AL121572.4; EXPRESSED IN BONE MARROW, SIGNAL = 1.2; EXPRESSED IN LUNG, SIGNAL = 2.1; EXPRESSED IN ADULT LIVER, SIGNAL = 2.6; EXPRESSED IN HELA, SIGNAL = 2.2; EXPRESSED IN PLACENTA, SIGNAL = 8.6; EXPRESSED IN HEART, SIGNAL = 1.3; EXPRESSED IN BRAIN, SIGNAL = 0.92; EST_HUMAN HIT: AA426511.1, EVALUE 7.00e-13; SWISSPROT HIT: P52490, EVALUE 6.00e+00
PQMQSMAKIYHGPLDRPASPCSDVDDIEGTASEEISTARPLLHPNLAGSN

SEQ ID NO: 35378 - protein, 32 aa, Homo sapiens [sequence omitted]

SEQ ID NO: 35379 - protein, 58 aa, Homo sapiens
  MAP TO AP000122.1; EXPRESSED IN ADULT LIVER, SIGNAL = 1.7; EXPRESSED IN PLACENTA, SIGNAL = 3.1; EXPRESSED IN HBL100, SIGNAL = 4.1; EXPRESSED IN HELA, SIGNAL = 1.7; EXPRESSED IN BONE MARROW, SIGNAL = 1.7; EXPRESSED IN BT474, SIGNAL = 1.5; EXPRESSED IN FETAL LIVER, SIGNAL = 2.3; EXPRESSED IN HEART, SIGNAL = 2.2; EXPRESSED IN BRAIN, SIGNAL =   2; EXPRESSED IN LUNG, SIGNAL = 2.4; EST_HUMAN HIT: BE895008.1, EVALUE 3.00e-27; SWISSPROT HIT: P53805, EVALUE 2.00e-28
AKFESLFRTYDKDITFQYFKSFKRVRINFSNPFSAADARLQLHKTEFLGKEMKLYFAQ

SEQ ID NO: 35380 - protein, 64 aa, Homo sapiens
  MAP TO AP000181.1; EXPRESSED IN PLACENTA, SIGNAL = 1.4; EXPRESSED IN HBL100, SIGNAL = 0.92; EXPRESSED IN HEART, SIGNAL =   1; EXPRESSED IN BRAIN, SIGNAL = 1.1; EXPRESSED IN FETAL LIVER, SIGNAL = 1.5; EXPRESSED IN ADULT LIVER, SIGNAL =   1; EXPRESSED IN HELA, SIGNAL =  28; SWISSPROT HIT: O43426, EVALUE 7.00e-32; EST_HUMAN HIT: AV732718.1, EVALUE 4.00e-27
DVAVDTVKTGMGGATGNKGAVAIRMLFHTTSLCFVCSHFAAGQSQVKERNEDFIEIARKLSFPM

SEQ ID NO: 35381 - protein, 372 aa, Homo sapiens
  MAP TO AC007721.7; EXPRESSED IN HEART, SIGNAL = 1.7; EXPRESSED IN LUNG, SIGNAL = 1.3; EXPRESSED IN BRAIN, SIGNAL = 2.4; EXPRESSED IN FETAL LIVER, SIGNAL = 2.1; EXPRESSED IN ADULT LIVER, SIGNAL = 2.1; EXPRESSED IN PLACENTA, SIGNAL = 2.1; EXPRESSED IN HELA, SIGNAL = 1.9; EXPRESSED IN BONE MARROW, SIGNAL =   2; EXPRESSED IN BT474, SIGNAL = 1.3; EXPRESSED IN HBL100, SIGNAL = 1.5; SWISSPROT HIT: P09815, EVALUE 5.00e-06; EST_HUMAN HIT: AV760531.1, EVALUE 6.00e-04
FLCVQILDVGSFFNGEHACDSKWKKARQPSPGHLPLLEAASVEMPVCLGRGLLEGVSVEMPVCLGRGLLEGTSVEMSVCLGCGLLEGVSVEMPVCLGHGLLEGTSVEMSVCLGCGLLEGVSVEMPVCLGHGLLEGTSVEMSVCLGRGLLEGVSVEMPVCLGHGLLEGTSVEMPVCLGRGLLEGVSVEMPVCLGRGLLEGTSVEMPVCLGRGLLEGVSVEMPVCLGRGLLEGTSVEMPVCLGRGLPEGVSVEMPVCLGRGLLEGVSVEMPVCLGRGLLEGTSAEMSVCLGRGLPEGVSVEMSVCLGRGLLEGASAEMPVCLGRGLLEGTSVEMPMCLGRGLLEGVSVEMPVCLGRGLLEGTSVEMPCAWGVAS

SEQ ID NO: 35382 - protein, 179 aa, Homo sapiens
  MAP TO AC006509.15; EXPRESSED IN HBL100, SIGNAL = 4.5; EXPRESSED IN HELA, SIGNAL = 8.4; EXPRESSED IN HEART, SIGNAL = 3.1; EXPRESSED IN LUNG, SIGNAL = 3.3; EXPRESSED IN BRAIN, SIGNAL = 3.8; EXPRESSED IN BT474, SIGNAL = 6.5; EXPRESSED IN FETAL LIVER, SIGNAL = 3.8; EXPRESSED IN ADULT LIVER, SIGNAL = 3.7; EXPRESSED IN PLACENTA, SIGNAL = 4.6; EXPRESSED IN BONE MARROW, SIGNAL = 3.9; EST_HUMAN HIT: AW503421.1, EVALUE 8.00e-52; SWISSPROT HIT: P52701, EVALUE 1.00e-104
IMEEVADGFKSKILKQVISLQTKNPEGRFPDLTVELNRWDTAFDHEKARKTGLITPKAGFDSDYDQALADIRENEQSLLEYLEKQRNRIGCRTIVYWGIGRNRYQLEIPENFTTRNLPEEYELKSTKKGCKRYWTKTIEKKLANLINAEERRDVSLKDCMRRLFYNFDKNYKDWQSAVE

SEQ ID NO: 35383 - protein, 145 aa, Homo sapiens
  MAP TO NM_006894.1; EXPRESSED IN LUNG, SIGNAL = 7.2; EXPRESSED IN HEART, SIGNAL =   2; EST_HUMAN HIT: AI052149.1, EVALUE 1.00e-35; SWISSPROT HIT: Q99518, EVALUE 2.00e-63
PYPKNIKRVQDSSANDPSECFSSVCLRYIMKEPVLNDDVPSRLLCGAIKVKSTVKELTETSAIFEDGTVEENIDVIIFATGYSFSFPFLEDSLVKVENNMVSLYKYIFPAHLDKSTLACIGLIQPLGSIFPTAELQARWVTRVFK

SEQ ID NO: 35384 - protein, 81 aa, Homo sapiens
  MAP TO Z84718.2; EXPRESSED IN FETAL LIVER, SIGNAL = 0.98; EXPRESSED IN ADULT LIVER, SIGNAL = 1.3; EXPRESSED IN HBL100, SIGNAL = 2.1; EXPRESSED IN HELA, SIGNAL = 4.3; EXPRESSED IN HEART, SIGNAL = 0.99; EXPRESSED IN BRAIN, SIGNAL = 1.1; EXPRESSED IN BT474, SIGNAL = 2.8; EXPRESSED IN PLACENTA, SIGNAL = 1.3; EXPRESSED IN BONE MARROW, SIGNAL = 1.3; SWISSPROT HIT: P07543, EVALUE 5.00e+00; EST_HUMAN HIT: BE796467.1, EVALUE 2.00e-19
GRGGGELSQARQPKEGVVGPPAGAGRADHLEERVHSCPLPGPQLQGVLAGVTPLGAAAPASAEAQGGTCWCSQRGGGRCRE

SEQ ID NO: 35385 - protein, 499 aa, Homo sapiens
  MAP TO AP000406.1; EXPRESSED IN BONE MARROW, SIGNAL = 2.9; EXPRESSED IN BRAIN, SIGNAL = 1.3; EXPRESSED IN FETAL LIVER, SIGNAL = 1.3; EXPRESSED IN ADULT LIVER, SIGNAL = 2.6; EXPRESSED IN HBL100, SIGNAL = 3.6; EXPRESSED IN HELA, SIGNAL = 4.2; EXPRESSED IN HEART, SIGNAL = 1.2; EXPRESSED IN LUNG, SIGNAL = 4.3; EXPRESSED IN BT474, SIGNAL = 6.1; EXPRESSED IN PLACENTA, SIGNAL = 3.4; EST_HUMAN HIT: AW752708.1, EVALUE 1.00e-119; SWISSPROT HIT: P54654, EVALUE 2.40e-01
AVRKEIETHQGQEMLVRGTEGIKEYINLGMPLSCFPEGGQVVITFSQSKSKQKEDNHIFGRQDKASTECVKFYIHAIGIGKCKRRIVKCGKLHKKGRKLCVYAFKGETIKDALCKDGRFLSFLENDDWKLIENNDTILESTQPVDELEGRYFQVEVEKRMVPSAAASQNPESEKRNTCVLREQIVAQYPSLKRESEKIIENFKKKMKVKNGETLFELHRTTFGKVTKNSSSIKVVKLLVRLSDSVGYLFWDSATTGYATCFVFKGLFILTCRHVIDSIVGDGIEPSKWATIIGQCVRVTFGYEELKDKETNYFFVEPWFEIHNEELDYAVLKLKENGQQVPMELYNGITPVPLSGLIHIIGHPYGEKKQIDACAVIPQGQRAKKCQERVQSKKAESPEYVHMYTQRSFQKIVHNPDVITYDTEFFFGASGSPVFDSKGSLVAMHAAGFAYTYQNETRSIIEFGSTMESILLDIKQRHKPWYEEVFVNQQDVEMMSDEDL

SEQ ID NO: 35386 - protein, 282 aa, Homo sapiens
  MAP TO AC007666.12; EXPRESSED IN BT474, SIGNAL = 1.7; EXPRESSED IN HBL100, SIGNAL = 1.2; EXPRESSED IN BONE MARROW, SIGNAL = 1.5; EXPRESSED IN LUNG, SIGNAL = 0.99; EXPRESSED IN ADULT LIVER, SIGNAL = 2.1; EXPRESSED IN FETAL LIVER, SIGNAL = 2.5; EXPRESSED IN PLACENTA, SIGNAL = 1.9; EXPRESSED IN HEART, SIGNAL = 1.1; EXPRESSED IN BRAIN, SIGNAL = 2.3; SWISSPROT HIT: Q15427, EVALUE 2.00e-04; EST_HUMAN HIT: BE144286.1, EVALUE 3.00e-40
PPVGINSLRGPRLGTPEEKQMCGGLTHLSNMGPHPGSLQLGQISGPSQDGSMYAPAQFQPGFIPPRHGGAPARPPDFPESSEIPPSHMYRSYKYLNRVHSAVWNGNHGATNQGPLGPDEKPHLGPGPSHQPRTLGHVMDSRVMRPPVPPNQWTEQSGFLPHGVPSSGYMRPPCKSAGHRLQPPPVPAPSSLFGAPAQALRGVQGGDSMMDSPEMIAMQQLSSRVCPPGVPYHPHQPAHPRLPGPFPQVAHPMSVTVSAPKPALGNPGRAPENSEAQEPENDQ

SEQ ID NO: 35387 - protein, 287 aa, Homo sapiens
  MAP TO AC011460.1; EXPRESSED IN PLACENTA, SIGNAL = 6.5; EXPRESSED IN BONE MARROW, SIGNAL = 4.9; EXPRESSED IN BRAIN, SIGNAL = 6.4; EXPRESSED IN BT474, SIGNAL =  11; EXPRESSED IN FETAL LIVER, SIGNAL = 6.5; EXPRESSED IN HBL100, SIGNAL = 4.6; EXPRESSED IN HELA, SIGNAL = 4.8; EXPRESSED IN HEART, SIGNAL =   2; EXPRESSED IN LUNG, SIGNAL = 2.5; EXPRESSED IN ADULT LIVER, SIGNAL = 2.5; EST_HUMAN HIT: BF680352.1, EVALUE 1.00e-65; SWISSPROT HIT: P51523, EVALUE 2.00e-64
IRKIDDPLQHHLQNQSIQKSVKQCHEQNMFGNIVNQNKGHFLLKQDCDTFDLHEKPLKSNLSFENQKRSSGLKNSAEFNRDGKSLFHANHKQFYTEMKFPAIAKPINKSQFIKQQRTHNIENAHVCSECGKAFLKLSQFIDHQRVHTGEKPHVCSMCGKAFSRKSRLMDHQRTHTELKHYECTECDKTFLKKSQLNIHQKTHMGGKPYTCSQCGKAFIKKCRLIYHQRTHTGEKPHGCSVCGKAFSTKFSLTTHQKTHTGEKPYICSECGKGFIEKRRLTAHHRTHT

SEQ ID NO: 35388 - protein, 21 aa, Homo sapiens
  MAP TO AC011460.1; EXPRESSED IN PLACENTA, SIGNAL = 6.5; EXPRESSED IN BONE MARROW, SIGNAL = 4.9; EXPRESSED IN BRAIN, SIGNAL = 6.4; EXPRESSED IN BT474, SIGNAL =  11; EXPRESSED IN FETAL LIVER, SIGNAL = 6.5; EXPRESSED IN HBL100, SIGNAL = 4.6; EXPRESSED IN HELA, SIGNAL = 4.8; EXPRESSED IN HEART, SIGNAL =   2; EXPRESSED IN LUNG, SIGNAL = 2.5; EXPRESSED IN ADULT LIVER, SIGNAL = 2.5
KSGKLMILCSITCKIKVFRRV

SEQ ID NO: 35389 - protein, 25 aa, Homo sapiens
  MAP TO AC007318.2; EXPRESSED IN BRAIN, SIGNAL = 1.6; EXPRESSED IN BONE MARROW, SIGNAL = 1.5; EXPRESSED IN LUNG, SIGNAL = 1.4; EXPRESSED IN BT474, SIGNAL =   3; EXPRESSED IN FETAL LIVER, SIGNAL = 1.7; EXPRESSED IN ADULT LIVER, SIGNAL = 1.2; EXPRESSED IN HELA, SIGNAL = 2.5; EXPRESSED IN PLACENTA, SIGNAL = 3.4; EXPRESSED IN HBL100, SIGNAL =   2; EXPRESSED IN HEART, SIGNAL = 1.8; EST_HUMAN HIT: BE540905.1, EVALUE 2.80e-02
LLIISPFRMIHIQKATSAQLVWISK

SEQ ID NO: 35390 - protein, 35 aa, Homo sapiens
  MAP TO AC007388.3; EXPRESSED IN BRAIN, SIGNAL = 2.9; EXPRESSED IN BONE MARROW, SIGNAL = 3.2; EXPRESSED IN LUNG, SIGNAL = 2.2; EXPRESSED IN BT474, SIGNAL = 1.5; EXPRESSED IN ADULT LIVER, SIGNAL = 4.1; EXPRESSED IN FETAL LIVER, SIGNAL = 2.6; EXPRESSED IN HELA, SIGNAL =   3; EXPRESSED IN PLACENTA, SIGNAL = 3.6; EXPRESSED IN HBL100, SIGNAL = 2.2; EXPRESSED IN HEART, SIGNAL = 3.1; EST_HUMAN HIT: AV653405.1, EVALUE 5.00e-05
MAKRAQDMSQATAPEGTSHKPRQLPCGIKPAGAER

SEQ ID NO: 35391 - protein, 60 aa, Homo sapiens
  MAP TO AC007378.2; EXPRESSED IN HEART, SIGNAL = 0.93; EXPRESSED IN LUNG, SIGNAL = 1.4; EXPRESSED IN PLACENTA, SIGNAL = 6.2; EXPRESSED IN HBL100, SIGNAL = 1.5; EXPRESSED IN HELA, SIGNAL = 2.7; EST_HUMAN HIT: AI750734.1, EVALUE 1.00e-09; SWISSPROT HIT: P02452, EVALUE 2.00e-10
TKPACVFNNVEYYDGDMFRMDNCRFCRCQGGVAICFTAQCGEINCERYYVPEGECCPVCE

SEQ ID NO: 35392 - protein, 35 aa, Homo sapiens
  MAP TO AC007378.2; EXPRESSED IN HEART, SIGNAL = 0.93; EXPRESSED IN LUNG, SIGNAL = 1.4; EXPRESSED IN PLACENTA, SIGNAL = 6.2; EXPRESSED IN HBL100, SIGNAL = 1.5; EXPRESSED IN HELA, SIGNAL = 2.7; EST_HUMAN HIT: BE733148.1, EVALUE 5.70e+00
TMWNIMMETCFEWTTVGSVDAKGALPSASPPSVVR

SEQ ID NO: 35393 - protein, 39 aa, Homo sapiens
  MAP TO AC007721.7; EXPRESSED IN HBL100, SIGNAL = 1.2; EXPRESSED IN HELA, SIGNAL = 4.3; EXPRESSED IN HEART, SIGNAL = 1.6; EXPRESSED IN LUNG, SIGNAL = 1.2; EXPRESSED IN BRAIN, SIGNAL = 1.1; EXPRESSED IN BT474, SIGNAL =   3; EXPRESSED IN FETAL LIVER, SIGNAL = 1.9; EXPRESSED IN ADULT LIVER, SIGNAL = 1.2; EXPRESSED IN PLACENTA, SIGNAL = 1.8; EXPRESSED IN BONE MARROW, SIGNAL =   1; SWISSPROT HIT: Q13619, EVALUE 8.00e-06; EST_HUMAN HIT: AA705863.1, EVALUE 1.00e-04
MVQSKTIDGILLLIERERSGEAVDRSLLRSLLGMLSDLQ

SEQ ID NO: 35394 - protein, 38 aa, Homo sapiens
  MAP TO AC009477.2; EXPRESSED IN FETAL LIVER, SIGNAL = 7.1; EXPRESSED IN ADULT LIVER, SIGNAL = 5.8; EXPRESSED IN HBL100, SIGNAL = 5.6; EXPRESSED IN HELA, SIGNAL = 8.6; EXPRESSED IN HEART, SIGNAL = 7.7; EXPRESSED IN BRAIN, SIGNAL = 5.6; EXPRESSED IN LUNG, SIGNAL = 5.6; EXPRESSED IN BONE MARROW, SIGNAL = 6.1; EXPRESSED IN BT474, SIGNAL = 4.6; EXPRESSED IN PLACENTA, SIGNAL = 8.5
AVCADEVGSEEDLYDDLHSSSHHYSHPGGGGEQLAINE

SEQ ID NO: 35395 - protein, 38 aa, Homo sapiens
  MAP TO AC009477.2; EXPRESSED IN FETAL LIVER, SIGNAL = 7.1; EXPRESSED IN ADULT LIVER, SIGNAL = 5.8; EXPRESSED IN HBL100, SIGNAL = 5.6; EXPRESSED IN HELA, SIGNAL = 8.6; EXPRESSED IN HEART, SIGNAL = 7.7; EXPRESSED IN BRAIN, SIGNAL = 5.6; EXPRESSED IN LUNG, SIGNAL = 5.6; EXPRESSED IN BONE MARROW, SIGNAL = 6.1; EXPRESSED IN BT474, SIGNAL = 4.6; EXPRESSED IN PLACENTA, SIGNAL = 8.5
QLSALTKWGARRTCMMTCTAPATTTATLEGVGSSWLSM

SEQ ID NO: 35396 - protein, 86 aa, Homo sapiens
  MAP TO AC009483.2; EXPRESSED IN HBL100, SIGNAL =   2; EXPRESSED IN LUNG, SIGNAL = 1.4; EXPRESSED IN BRAIN, SIGNAL = 1.3; EXPRESSED IN ADULT LIVER, SIGNAL = 1.1; EXPRESSED IN PLACENTA, SIGNAL = 2.2; EXPRESSED IN HEART, SIGNAL =   1; EXPRESSED IN HELA, SIGNAL = 2.1; EXPRESSED IN BONE MARROW, SIGNAL = 1.1; EXPRESSED IN BT474, SIGNAL = 2.7; EST_HUMAN HIT: BE537058.1, EVALUE 3.00e-28; SWISSPROT HIT: Q01042, EVALUE 5.40e-02
NSKAEVGTEAEECDQEAMTEIAAEARSTIDTEERNTGGEDSHKAEGEEHHQEDQEVEIGVEGGETHGAQRQKKVKTETKKNTETKK

SEQ ID NO: 35397 - protein, 41 aa, Homo sapiens
  MAP TO AC009486.2; EXPRESSED IN BONE MARROW, SIGNAL = 1.5; EXPRESSED IN FETAL LIVER, SIGNAL = 3.5; EXPRESSED IN HBL100, SIGNAL =   1; EXPRESSED IN HELA, SIGNAL = 1.1; EXPRESSED IN HEART, SIGNAL = 1.5; EXPRESSED IN BRAIN, SIGNAL = 1.4; EXPRESSED IN ADULT LIVER, SIGNAL = 1.2; EXPRESSED IN BT474, SIGNAL = 0.98; EXPRESSED IN PLACENTA, SIGNAL = 1.5; EST_HUMAN HIT: BE298515.1, EVALUE 5.50e-01; SWISSPROT HIT: P51685, EVALUE 4.70e+00
NYLSRTGPKDDCGSQGSCGQNGKDESQIIVGKGMNFHRGNK

SEQ ID NO: 35398 - protein, 46 aa, Homo sapiens
  MAP TO AC009185.2; EXPRESSED IN BT474, SIGNAL =   2; EXPRESSED IN HBL100, SIGNAL = 1.2; EXPRESSED IN BONE MARROW, SIGNAL = 1.5; EXPRESSED IN LUNG, SIGNAL = 1.7; EXPRESSED IN FETAL LIVER, SIGNAL = 1.2; EXPRESSED IN ADULT LIVER, SIGNAL = 1.4; EXPRESSED IN PLACENTA, SIGNAL = 1.3; EXPRESSED IN HEART, SIGNAL = 1.2; EXPRESSED IN HELA, SIGNAL = 1.2; EXPRESSED IN BRAIN, SIGNAL =   2; SWISSPROT HIT: Q05053, EVALUE 9.10e-01; EST_HUMAN HIT: AI538157.1, EVALUE 3.00e-10
QNTETAAMTTHVTLEDALSNVDLLEELPLPDQQPCIEPPPSSIMYQ

SEQ ID NO: 35399 - protein, 25 aa, Homo sapiens
  MAP TO AC009226.2; EXPRESSED IN FETAL LIVER, SIGNAL = 1.4; EXPRESSED IN HBL100, SIGNAL =   1; EXPRESSED IN HELA, SIGNAL = 1.1; EXPRESSED IN HEART, SIGNAL = 1.4; EXPRESSED IN LUNG, SIGNAL = 0.95; EXPRESSED IN BONE MARROW, SIGNAL = 0.97; EXPRESSED IN ADULT LIVER, SIGNAL = 0.98; EXPRESSED IN PLACENTA, SIGNAL = 1.7; EXPRESSED IN BRAIN, SIGNAL = 1.2
IWRPARNSGWCECSKHKLKEVKEVE

SEQ ID NO: 35400 - protein, 20 aa, Homo sapiens
  MAP TO AC009226.2; EXPRESSED IN FETAL LIVER, SIGNAL = 1.4; EXPRESSED IN HBL100, SIGNAL =   1; EXPRESSED IN HELA, SIGNAL = 1.1; EXPRESSED IN HEART, SIGNAL = 1.4; EXPRESSED IN LUNG, SIGNAL = 0.95; EXPRESSED IN BONE MARROW, SIGNAL = 0.97; EXPRESSED IN ADULT LIVER, SIGNAL = 0.98; EXPRESSED IN PLACENTA, SIGNAL = 1.7; EXPRESSED IN BRAIN, SIGNAL = 1.2
FGDLLATLDGVNVQSTSLKR

SEQ ID NO: 35401 - protein, 51 aa, Homo sapiens
  MAP TO AC009303.1; EXPRESSED IN ADULT LIVER, SIGNAL = 1.2; EXPRESSED IN HEART, SIGNAL = 0.86; EXPRESSED IN BRAIN, SIGNAL = 1.2; EXPRESSED IN BONE MARROW, SIGNAL = 1.1; SWISSPROT HIT: Q01647, EVALUE 2.60e+00
MEERLYKAPEEVLFSSEGRGLPLINVHQANAEVGQGMGRKSVGSEAGGPRP

SEQ ID NO: 35402 - protein, 44 aa, Homo sapiens
  MAP TO AC008123.9; EXPRESSED IN ADULT LIVER, SIGNAL = 1.6; EXPRESSED IN BT474, SIGNAL = 5.6; EXPRESSED IN FETAL LIVER, SIGNAL =   1; EXPRESSED IN HBL100, SIGNAL = 4.3; EXPRESSED IN PLACENTA, SIGNAL = 2.3; EXPRESSED IN HELA, SIGNAL = 4.6; EXPRESSED IN HEART, SIGNAL = 1.4; EXPRESSED IN BRAIN, SIGNAL = 1.2; EXPRESSED IN BONE MARROW, SIGNAL = 1.7; EXPRESSED IN LUNG, SIGNAL = 4.6; SWISSPROT HIT: P13010, EVALUE 4.00e-19; EST_HUMAN HIT: C05268.1, EVALUE 5.00e-18
AQLNAVDALIDSMSLAKKDEKTDTLEDLFPTTKIPNPRFQRLFQ

SEQ ID NO: 35403 - protein, 50 aa, Homo sapiens
  MAP TO AC009487.1; EXPRESSED IN HELA, SIGNAL =   1; EXPRESSED IN HEART, SIGNAL = 0.88; EXPRESSED IN PLACENTA, SIGNAL = 1.2; EXPRESSED IN BONE MARROW, SIGNAL = 0.97; EXPRESSED IN BRAIN, SIGNAL = 1.1; EXPRESSED IN ADULT LIVER, SIGNAL =   1; EXPRESSED IN FETAL LIVER, SIGNAL =   1; SWISSPROT HIT: P33265, EVALUE 7.80e+00; EST_HUMAN HIT: BF218189.1, EVALUE 1.30e+00
MKKFGSCEIIKFRVSKSNPHWDFGSLLSATTISPPFVTLFVVNAVLAFLK

SEQ ID NO: 35404 - protein, 20 aa, Homo sapiens
  MAP TO AC008280.2; EXPRESSED IN PLACENTA, SIGNAL = 1.2; EXPRESSED IN BONE MARROW, SIGNAL = 0.91; EXPRESSED IN BRAIN, SIGNAL =   1; EXPRESSED IN FETAL LIVER, SIGNAL = 1.1; EXPRESSED IN HEART, SIGNAL =   1; EXPRESSED IN HELA, SIGNAL = 0.91; EXPRESSED IN HBL100, SIGNAL = 1.2; EXPRESSED IN ADULT LIVER, SIGNAL = 0.99; EST_HUMAN HIT: AA586401.1, EVALUE 9.90e-02
TGKCKLKPQGDTASHLLEWL

SEQ ID NO: 35405 - protein, 26 aa, Homo sapiens
  MAP TO AC010134.1; EXPRESSED IN BRAIN, SIGNAL =   1; EXPRESSED IN BONE MARROW, SIGNAL = 0.97; EXPRESSED IN ADULT LIVER, SIGNAL = 0.94; EXPRESSED IN HEART, SIGNAL = 0.91
EKIMGQSHSDTDTTSAHLISLTSTVA

SEQ ID NO: 35406 - protein, 20 aa, Homo sapiens
  MAP TO AC010134.1; EXPRESSED IN BRAIN, SIGNAL =   1; EXPRESSED IN BONE MARROW, SIGNAL = 0.97; EXPRESSED IN ADULT LIVER, SIGNAL = 0.94; EXPRESSED IN HEART, SIGNAL = 0.91
RKSWDSHTQTPTPLLLTSSA

SEQ ID NO: 35407 - protein, 55 aa, Homo sapiens
  MAP TO AC009953.2; EXPRESSED IN BT474, SIGNAL = 1.8; EXPRESSED IN HBL100, SIGNAL = 2.4; EXPRESSED IN BONE MARROW, SIGNAL = 4.4; EXPRESSED IN LUNG, SIGNAL = 2.4; EXPRESSED IN ADULT LIVER, SIGNAL = 3.7; EXPRESSED IN FETAL LIVER, SIGNAL = 4.4; EXPRESSED IN PLACENTA, SIGNAL = 3.6; EXPRESSED IN HEART, SIGNAL = 3.8; EXPRESSED IN HELA, SIGNAL = 3.9; EXPRESSED IN BRAIN, SIGNAL = 4.2; EST_HUMAN HIT: BF132308.1, EVALUE 2.20e+00
LRGSRTWPWLLARSFTFPSCYRRSKGKWICVKRDWGGGTLLYNNVLLLELNPVLP

SEQ ID NO: 35408 - protein, 21 aa, Homo sapiens
  MAP TO AC010723.1; EXPRESSED IN BT474, SIGNAL = 1.9; EXPRESSED IN FETAL LIVER, SIGNAL = 1.3; EXPRESSED IN ADULT LIVER, SIGNAL = 2.2; EXPRESSED IN HBL100, SIGNAL = 1.9; EXPRESSED IN HELA, SIGNAL =   2; EXPRESSED IN PLACENTA, SIGNAL = 2.4; EXPRESSED IN HEART, SIGNAL = 1.6; EXPRESSED IN BRAIN, SIGNAL = 1.7; EXPRESSED IN BONE MARROW, SIGNAL = 1.8; EXPRESSED IN LUNG, SIGNAL = 1.3; EST_HUMAN HIT: AW937471.1, EVALUE 2.00e-02
IEAIKLQMVLQMEIQMSSTHK

SEQ ID NO: 35409 - protein, 23 aa, Homo sapiens
  MAP TO AC010723.1; EXPRESSED IN BT474, SIGNAL = 1.9; EXPRESSED IN FETAL LIVER, SIGNAL = 1.3; EXPRESSED IN ADULT LIVER, SIGNAL = 2.2; EXPRESSED IN HBL100, SIGNAL = 1.9; EXPRESSED IN HELA, SIGNAL =   2; EXPRESSED IN PLACENTA, SIGNAL = 2.4; EXPRESSED IN HEART, SIGNAL = 1.6; EXPRESSED IN BRAIN, SIGNAL = 1.7; EXPRESSED IN BONE MARROW, SIGNAL = 1.8; EXPRESSED IN LUNG, SIGNAL = 1.3
LSNLFPPGLRPSSYRWSYKWKSK

SEQ ID NO: 35410 - protein, 24 aa, Homo sapiens
  MAP TO AC010739.2; EXPRESSED IN FETAL LIVER, SIGNAL = 5.5; EXPRESSED IN ADULT LIVER, SIGNAL = 1.3; EXPRESSED IN HBL100, SIGNAL = 1.1; EXPRESSED IN PLACENTA, SIGNAL = 2.1; EXPRESSED IN HELA, SIGNAL = 1.5; EXPRESSED IN HEART, SIGNAL = 1.3; EXPRESSED IN BRAIN, SIGNAL = 3.2; EXPRESSED IN BONE MARROW, SIGNAL = 2.4
LLWQKCVTNGLKRGDSKLHRLAPS

SEQ ID NO: 35411 - protein, 71 aa, Homo sapiens
  MAP TO AC010739.2; EXPRESSED IN FETAL LIVER, SIGNAL = 5.5; EXPRESSED IN ADULT LIVER, SIGNAL = 1.3; EXPRESSED IN HBL100, SIGNAL = 1.1; EXPRESSED IN PLACENTA, SIGNAL = 2.1; EXPRESSED IN HELA, SIGNAL = 1.5; EXPRESSED IN HEART, SIGNAL = 1.3; EXPRESSED IN BRAIN, SIGNAL = 3.2; EXPRESSED IN BONE MARROW, SIGNAL = 2.4; EST_HUMAN HIT: BF375412.1, EVALUE 1.40e+00
CSALACGVWSLPFSNHSSHTSARAVFQKSVTNHITSEMPLTHTTLLSKLEKWHLLLKLKGKNTHPCICVCM

SEQ ID NO: 35412 - protein, 106 aa, Homo sapiens
  MAP TO AC011376.1; EXPRESSED IN PLACENTA, SIGNAL = 1.7; EXPRESSED IN BRAIN, SIGNAL =   1; EXPRESSED IN BT474, SIGNAL = 1.1; EXPRESSED IN FETAL LIVER, SIGNAL = 0.91; EXPRESSED IN HBL100, SIGNAL = 1.8; EXPRESSED IN HELA, SIGNAL = 1.3; EXPRESSED IN HEART, SIGNAL = 0.86; EXPRESSED IN LUNG, SIGNAL = 1.9; EXPRESSED IN BONE MARROW, SIGNAL = 1.1; EST_HUMAN HIT: BE893653.1, EVALUE 1.00e-16; SWISSPROT HIT: Q9ZZY0, EVALUE 1.20e+00
EFRKEPVENMDDVIYYVNGTYRLLEFLVALCVVAYGVSETIFGEWTVMGSMIIFIHSYYNVWLRAQLGWKSFLLRRDAVNKIKSLPIATKEQLEKHNDICAICYQV

SEQ ID NO: 35413 - protein, 25 aa, Homo sapiens
  MAP TO AC011376.1; EXPRESSED IN PLACENTA, SIGNAL = 1.7; EXPRESSED IN BRAIN, SIGNAL =   1; EXPRESSED IN BT474, SIGNAL = 1.1; EXPRESSED IN FETAL LIVER, SIGNAL = 0.91; EXPRESSED IN HBL100, SIGNAL = 1.8; EXPRESSED IN HELA, SIGNAL = 1.3; EXPRESSED IN HEART, SIGNAL = 0.86; EXPRESSED IN LUNG, SIGNAL = 1.9; EXPRESSED IN BONE MARROW, SIGNAL = 1.1; EST_HUMAN HIT: BE146525.1, EVALUE 8.00e-06
LFMSYLWLRNSEKSQWKTWMMSSTM

SEQ ID NO: 35414 - protein, 30 aa, Homo sapiens
  MAP TO AC010978.1; EXPRESSED IN PLACENTA, SIGNAL = 2.8; EXPRESSED IN BONE MARROW, SIGNAL = 2.4; EXPRESSED IN BRAIN, SIGNAL = 2.5; EXPRESSED IN BT474, SIGNAL = 1.5; EXPRESSED IN FETAL LIVER, SIGNAL =   3; EXPRESSED IN HEART, SIGNAL = 2.8; EXPRESSED IN HELA, SIGNAL = 2.3; EXPRESSED IN HBL100, SIGNAL = 1.5; EXPRESSED IN LUNG, SIGNAL = 1.9; EXPRESSED IN ADULT LIVER, SIGNAL =   2; SWISSPROT HIT: Q07284, EVALUE 8.30e+00
STKEKDLVCPATRFSARTYLPTFTSTTATH

SEQ ID NO: 35415 - protein, 102 aa, Homo sapiens
  MAP TO AC011004.1; EXPRESSED IN ADULT LIVER, SIGNAL = 2.1; EXPRESSED IN BT474, SIGNAL = 1.1; EXPRESSED IN FETAL LIVER, SIGNAL = 1.6; EXPRESSED IN HBL100, SIGNAL = 1.2; EXPRESSED IN PLACENTA, SIGNAL =   2; EXPRESSED IN HELA, SIGNAL = 1.4; EXPRESSED IN HEART, SIGNAL = 1.6; EXPRESSED IN BRAIN, SIGNAL = 1.7; EXPRESSED IN BONE MARROW, SIGNAL = 1.8; EXPRESSED IN LUNG, SIGNAL = 1.1; EST_HUMAN HIT: AL045575.1, EVALUE 1.50e+00; SWISSPROT HIT: P13608, EVALUE 4.00e+00
TKGKGNKNHISMVTVTEPDIRCPNTRKGLPRQVLFTAAGESAARTQPLPSLHTGVGHEPVTQHCFIPRVLCTFPFSRQQLCGSHQSLHREKLPRLPPGSQKR

SEQ ID NO: 35416 - protein, 49 aa, Homo sapiens
  MAP TO AC011406.1; EXPRESSED IN BRAIN, SIGNAL = 5.9; EXPRESSED IN BONE MARROW, SIGNAL =   5; EXPRESSED IN LUNG, SIGNAL = 3.4; EXPRESSED IN BT474, SIGNAL = 5.6; EXPRESSED IN ADULT LIVER, SIGNAL = 9.1; EXPRESSED IN FETAL LIVER, SIGNAL =  11; EXPRESSED IN HBL100, SIGNAL = 3.3; EXPRESSED IN HELA, SIGNAL = 5.5; EXPRESSED IN PLACENTA, SIGNAL = 6.2; EXPRESSED IN HEART, SIGNAL =  14; SWISSPROT HIT: P16499, EVALUE 4.00e-13; EST_HUMAN HIT: AA056299.1, EVALUE 6.00e-12
EFSRFHEEITPMLDGITNNRKEWKALADEYDAKMKVQEEKKQKQQSAKS

SEQ ID NO: 35417 - protein, 45 aa, Homo sapiens
  MAP TO AC011406.1; EXPRESSED IN BRAIN, SIGNAL = 5.9; EXPRESSED IN BONE MARROW, SIGNAL =   5; EXPRESSED IN LUNG, SIGNAL = 3.4; EXPRESSED IN BT474, SIGNAL = 5.6; EXPRESSED IN ADULT LIVER, SIGNAL = 9.1; EXPRESSED IN FETAL LIVER, SIGNAL =  11; EXPRESSED IN HBL100, SIGNAL = 3.3; EXPRESSED IN HELA, SIGNAL = 5.5; EXPRESSED IN PLACENTA, SIGNAL = 6.2; EXPRESSED IN HEART, SIGNAL =  14; EST_HUMAN HIT: AA056299.1, EVALUE 8.00e-14; SWISSPROT HIT: P36115, EVALUE 7.90e+00
ALAPEAHTLSSRNSPVSTRRSPQCWTGSPTIARSGRRLLMSTMPR

SEQ ID NO: 35418 - protein, 19 aa, Homo sapiens
  MAP TO AC011073.1; EXPRESSED IN PLACENTA, SIGNAL = 7.2; EXPRESSED IN BRAIN, SIGNAL =   6; EXPRESSED IN BT474, SIGNAL =  10; EXPRESSED IN FETAL LIVER, SIGNAL = 3.7; EXPRESSED IN ADULT LIVER, SIGNAL = 2.7; EXPRESSED IN HEART, SIGNAL = 4.6; EXPRESSED IN HELA, SIGNAL =   7; EXPRESSED IN HBL100, SIGNAL = 8.2; EXPRESSED IN LUNG, SIGNAL = 3.7; EXPRESSED IN BONE MARROW, SIGNAL =   5
KAAATAAAAATGARAQAGK

SEQ ID NO: 35419 - protein, 78 aa, Homo sapiens
  MAP TO AC011073.1; EXPRESSED IN PLACENTA, SIGNAL = 7.2; EXPRESSED IN BRAIN, SIGNAL =   6; EXPRESSED IN BT474, SIGNAL =  10; EXPRESSED IN FETAL LIVER, SIGNAL = 3.7; EXPRESSED IN ADULT LIVER, SIGNAL = 2.7; EXPRESSED IN HEART, SIGNAL = 4.6; EXPRESSED IN HELA, SIGNAL =   7; EXPRESSED IN HBL100, SIGNAL = 8.2; EXPRESSED IN LUNG, SIGNAL = 3.7; EXPRESSED IN BONE MARROW, SIGNAL =   5; SWISSPROT HIT: Q06846, EVALUE 8.60e+00
LLVLGELSNTDNDINESVFIWGISDKAAQRKTISVDEGLFHLQQEKQQQQQQQQRLEPVHRLGRGKGRLRLPHVSSIL

SEQ ID NO: 35420 - protein, 47 aa, Homo sapiens
  MAP TO AC011084.1; EXPRESSED IN ADULT LIVER, SIGNAL = 0.93; EXPRESSED IN BT474, SIGNAL = 1.1; EXPRESSED IN PLACENTA, SIGNAL = 1.6; EXPRESSED IN HBL100, SIGNAL = 1.2; EXPRESSED IN HELA, SIGNAL = 1.1; EXPRESSED IN HEART, SIGNAL = 2.7; EXPRESSED IN LUNG, SIGNAL = 1.7; EST_HUMAN HIT: AA253280.1, EVALUE 1.00e-14; SWISSPROT HIT: P17082, EVALUE 1.00e-15
FEEIYKFQRQILRVKDRDEFPMILIGNKADLDHQRQVRRNFTVGKPI

SEQ ID NO: 35421 - protein, 61 aa, Homo sapiens
  MAP TO AC011460.1; EXPRESSED IN BONE MARROW, SIGNAL = 3.8; EXPRESSED IN ADULT LIVER, SIGNAL = 1.2; EXPRESSED IN BT474, SIGNAL =   8; EXPRESSED IN FETAL LIVER, SIGNAL = 2.4; EXPRESSED IN PLACENTA, SIGNAL = 1.9; EXPRESSED IN HBL100, SIGNAL = 3.3; EXPRESSED IN HELA, SIGNAL = 3.9; EXPRESSED IN HEART, SIGNAL = 2.3; EXPRESSED IN BRAIN, SIGNAL = 3.8; EST_HUMAN HIT: AU127827.1, EVALUE 1.00e-07; SWISSPROT HIT: O66809, EVALUE 3.40e+00
ISHALININELTQERNALSVIHVKKVLVISQNSLSIKELILERNPMDAANVRKASAISHSS

SEQ ID NO: 35422 - protein, 42 aa, Homo sapiens
  MAP TO AC011482.1; EXPRESSED IN HELA, SIGNAL = 1.6; EXPRESSED IN PLACENTA, SIGNAL = 3.1; EXPRESSED IN HBL100, SIGNAL = 2.4; EXPRESSED IN HEART, SIGNAL =   2; EXPRESSED IN BRAIN, SIGNAL = 2.2; EXPRESSED IN BONE MARROW, SIGNAL = 2.6; EXPRESSED IN LUNG, SIGNAL = 3.4; EXPRESSED IN BT474, SIGNAL = 4.4; EXPRESSED IN FETAL LIVER, SIGNAL = 1.7; EXPRESSED IN ADULT LIVER, SIGNAL = 1.7; EST_HUMAN HIT: BE252748.1, EVALUE 3.00e-16; SWISSPROT HIT: Q03938, EVALUE 5.00e-17
GPLTIRDVTVEFSLEEWHCLDTAQQNLYRDVMLENYRNLVFL

SEQ ID NO: 35423 - protein, 44 aa, Homo sapiens
  MAP TO AL109919.2; EXPRESSED IN ADULT LIVER, SIGNAL = 1.1; EXPRESSED IN FETAL LIVER, SIGNAL = 1.4; EXPRESSED IN PLACENTA, SIGNAL = 1.1; EXPRESSED IN HELA, SIGNAL =   1; EXPRESSED IN HBL100, SIGNAL =   1; EXPRESSED IN HEART, SIGNAL = 1.2; EXPRESSED IN LUNG, SIGNAL = 1.1; EXPRESSED IN BRAIN, SIGNAL = 3.7
MGHLNKEMDVNYLVVHLDCFRIIWVLLGNLRGSQEGIEQLWPLY

SEQ ID NO: 35424 - protein, 56 aa, Homo sapiens
  MAP TO AC011002.1; EXPRESSED IN BONE MARROW, SIGNAL =   9; EXPRESSED IN BRAIN, SIGNAL =  12; EXPRESSED IN ADULT LIVER, SIGNAL = 5.5; EXPRESSED IN BT474, SIGNAL = 1.9; EXPRESSED IN FETAL LIVER, SIGNAL =  10; EXPRESSED IN PLACENTA, SIGNAL = 9.5; EXPRESSED IN HELA, SIGNAL = 7.8; EXPRESSED IN HBL100, SIGNAL = 4.5; EXPRESSED IN HEART, SIGNAL =   8; EXPRESSED IN LUNG, SIGNAL =  17; EST_HUMAN HIT: AI138538.1, EVALUE 6.00e-04
RLRHLRSRTWQILCPMKTCFLIHIQPNFAITSQGRRCEGSFRGLTNSIHDGSILMI

SEQ ID NO: 35425 - protein, 53 aa, Homo sapiens
  MAP TO AC011079.1; EXPRESSED IN HEART, SIGNAL = 1.4; EST_HUMAN HIT: AW268611.1, EVALUE 2.00e-10; SWISSPROT HIT: O14967, EVALUE 2.00e-16
KKHKDTEYKKTDICIPQTKGVLEQEEKEEKAALEKPMDLEEEKKQNDGEMLEK

SEQ ID NO: 35426 - protein, 55 aa, Homo sapiens
  MAP TO AF188031.1; EXPRESSED IN PLACENTA, SIGNAL = 1.1; EXPRESSED IN HELA, SIGNAL = 1.6; EXPRESSED IN HEART, SIGNAL =   1; EXPRESSED IN BRAIN, SIGNAL = 1.6; EXPRESSED IN BONE MARROW, SIGNAL = 1.5; EXPRESSED IN FETAL LIVER, SIGNAL = 0.87; EXPRESSED IN ADULT LIVER, SIGNAL = 0.97; EXPRESSED IN BT474, SIGNAL = 0.99; EST_HUMAN HIT: AW467231.1, EVALUE 2.00e-12; SWISSPROT HIT: O88806, EVALUE 6.00e-17
MARAVRNFLKAQQVQAPVELYSDWLSVGHVDEFLTFVPTSDQKVRPLPPCLSHLC

SEQ ID NO: 35427 - protein, 77 aa, Homo sapiens
  MAP TO AL080245.13; EXPRESSED IN FETAL LIVER, SIGNAL = 3.4; EXPRESSED IN ADULT LIVER, SIGNAL = 2.3; EXPRESSED IN HELA, SIGNAL = 4.1; EXPRESSED IN BRAIN, SIGNAL = 4.2; EXPRESSED IN LUNG, SIGNAL = 2.4; EXPRESSED IN BONE MARROW, SIGNAL = 3.3; EXPRESSED IN BT474, SIGNAL = 1.9; EXPRESSED IN PLACENTA, SIGNAL = 3.6; EXPRESSED IN HEART, SIGNAL = 3.1; EXPRESSED IN HBL100, SIGNAL = 2.4; EST_HUMAN HIT: BF343550.1, EVALUE 2.20e+00; SWISSPROT HIT: P74892, EVALUE 5.80e+00
DIPDSLRQLQGTVQNEWTSVYMTVLFMSIQVVSCHFGIINNSTLNILVYRQLCAFWRHGFLAGELLGQGCVQCSTFQ

SEQ ID NO: 35428 - protein, 24 aa, Homo sapiens
  MAP TO AL109654.13; EXPRESSED IN HBL100, SIGNAL = 1.4; EXPRESSED IN HELA, SIGNAL = 1.1; EXPRESSED IN HEART, SIGNAL = 2.4; EXPRESSED IN LUNG, SIGNAL = 1.2; EXPRESSED IN BRAIN, SIGNAL = 2.2; EXPRESSED IN BT474, SIGNAL =   1; EXPRESSED IN ADULT LIVER, SIGNAL = 1.9; EXPRESSED IN FETAL LIVER, SIGNAL = 1.3; EXPRESSED IN PLACENTA, SIGNAL = 1.9; EXPRESSED IN BONE MARROW, SIGNAL = 1.7
KIRESSSEINNAGILIPNLQTSEL

SEQ ID NO: 35429 - protein, 33 aa, Homo sapiens
  MAP TO AL035653.12; EXPRESSED IN BRAIN, SIGNAL = 2.5; EXPRESSED IN BT474, SIGNAL = 1.2; EXPRESSED IN HBL100, SIGNAL = 1.8; EXPRESSED IN HELA, SIGNAL = 2.6; EXPRESSED IN LUNG, SIGNAL = 8.2; EXPRESSED IN BONE MARROW, SIGNAL = 2.3; EXPRESSED IN ADULT LIVER, SIGNAL = 2.7; EXPRESSED IN FETAL LIVER, SIGNAL = 2.9; EXPRESSED IN PLACENTA, SIGNAL = 3.2; EXPRESSED IN HEART, SIGNAL = 2.9; SWISSPROT HIT: P38252, EVALUE 4.80e+00
LSKVIQESGITSYEYLTKWKAAIPLSKGETQLA

SEQ ID NO: 35430 - protein, 43 aa, Homo sapiens [sequence omitted]

SEQ ID NO: 35431 - protein, 101 aa, Homo sapiens
  MAP TO AL078604.10; EXPRESSED IN ADULT LIVER, SIGNAL = 2.6; EXPRESSED IN BT474, SIGNAL =   1; EXPRESSED IN FETAL LIVER, SIGNAL = 3.2; EXPRESSED IN PLACENTA, SIGNAL = 3.3; EXPRESSED IN HBL100, SIGNAL =  25; EXPRESSED IN HELA, SIGNAL = 2.4; EXPRESSED IN HEART, SIGNAL = 3.9; EXPRESSED IN BONE MARROW, SIGNAL = 3.4; EXPRESSED IN LUNG, SIGNAL = 2.1; EXPRESSED IN BRAIN, SIGNAL =   2; EST_HUMAN HIT: BE644780.1, EVALUE 2.30e+00
PHDSFRAPALLEPSSALSTAVASLRRREERLEPEQRVGELGSLGERQHEPSDNHDFQPKSKQEQLQKTLQPSGGPHCSSLLLMVFWWKQWRKTEPLKAERT

SEQ ID NO: 35432 - protein, 43 aa, Homo sapiens
  MAP TO AL110503.1; EXPRESSED IN PLACENTA, SIGNAL = 1.3; EXPRESSED IN HEART, SIGNAL = 1.3; EXPRESSED IN BRAIN, SIGNAL = 1.7; EXPRESSED IN BONE MARROW, SIGNAL = 1.9; EXPRESSED IN LUNG, SIGNAL = 2.2; EXPRESSED IN BT474, SIGNAL = 0.96; EXPRESSED IN ADULT LIVER, SIGNAL = 1.6; EXPRESSED IN FETAL LIVER, SIGNAL = 1.3; EXPRESSED IN HBL100, SIGNAL = 1.3; EXPRESSED IN HELA, SIGNAL = 1.1; SWISSPROT HIT: Q17848, EVALUE 4.70e+00; EST_HUMAN HIT: AI905493.1, EVALUE 2.00e-05
SHAPWYLPNGMKTCTGSHKDLYMDVYSSFIDNYQNVETTNMSF

SEQ ID NO: 35433 - protein, 26 aa, Homo sapiens
  MAP TO AL110503.1; EXPRESSED IN PLACENTA, SIGNAL = 1.3; EXPRESSED IN HEART, SIGNAL = 1.3; EXPRESSED IN BRAIN, SIGNAL = 1.7; EXPRESSED IN BONE MARROW, SIGNAL = 1.9; EXPRESSED IN LUNG, SIGNAL = 2.2; EXPRESSED IN BT474, SIGNAL = 0.96; EXPRESSED IN ADULT LIVER, SIGNAL = 1.6; EXPRESSED IN FETAL LIVER, SIGNAL = 1.3; EXPRESSED IN HBL100, SIGNAL = 1.3; EXPRESSED IN HELA, SIGNAL = 1.1; EST_HUMAN HIT: AL043462.1, EVALUE 1.90e+00
QSCSLVFTQWYENLHRFTQRPIHGCL

SEQ ID NO: 35434 - protein, 56 aa, Homo sapiens [sequence omitted]

SEQ ID NO: 35435 - protein, 64 aa, Homo sapiens
  MAP TO AC011619.1; EXPRESSED IN ADULT LIVER, SIGNAL = 2.4; EXPRESSED IN BT474, SIGNAL = 1.7; EXPRESSED IN FETAL LIVER, SIGNAL = 4.4; EXPRESSED IN HELA, SIGNAL = 1.9; EXPRESSED IN PLACENTA, SIGNAL = 3.4; EXPRESSED IN HBL100, SIGNAL = 1.9; EXPRESSED IN HEART, SIGNAL = 2.6; EXPRESSED IN BONE MARROW, SIGNAL = 2.9; EXPRESSED IN BRAIN, SIGNAL = 2.7; EXPRESSED IN LUNG, SIGNAL = 1.5
QEERDEEEKEGGDEEEEEEGGEGGRREGGGRGEEGEGGGKQKKSKKKKEEEGKGGGKKRRQRGR

SEQ ID NO: 35436 - protein, 31 aa, Homo sapiens
  MAP TO AL078583.15; EXPRESSED IN BONE MARROW, SIGNAL = 2.6; EXPRESSED IN LUNG, SIGNAL = 2.3; EXPRESSED IN BRAIN, SIGNAL = 2.5; EXPRESSED IN ADULT LIVER, SIGNAL = 3.9; EXPRESSED IN BT474, SIGNAL = 1.9; EXPRESSED IN FETAL LIVER, SIGNAL = 2.7; EXPRESSED IN PLACENTA, SIGNAL = 5.1; EXPRESSED IN HELA, SIGNAL = 3.2; EXPRESSED IN HBL100, SIGNAL = 2.6; EXPRESSED IN HEART, SIGNAL = 3.6
LTVKLSKAGTRPVMSFVLGMLFMFFNPNNDT

SEQ ID NO: 35437 - protein, 52 aa, Homo sapiens
  MAP TO AL096712.14; EXPRESSED IN LUNG, SIGNAL = 2.2; EXPRESSED IN ADULT LIVER, SIGNAL = 0.93; EXPRESSED IN BT474, SIGNAL = 1.9; EXPRESSED IN FETAL LIVER, SIGNAL = 1.5; EXPRESSED IN HELA, SIGNAL = 1.7; EXPRESSED IN PLACENTA, SIGNAL = 1.8; EXPRESSED IN HBL100, SIGNAL = 1.7; EXPRESSED IN HEART, SIGNAL = 0.98; EXPRESSED IN BONE MARROW, SIGNAL = 1.1; EXPRESSED IN BRAIN, SIGNAL = 1.4; EST_HUMAN HIT: H55230.1, EVALUE 7.00e-11; SWISSPROT HIT: P47829, EVALUE 3.50e+00
NTERRKLTLQRKREEYFGFIEQYYDSRNEEHHQDTYRQVQSPPAASLLTSHI

SEQ ID NO: 35438 - protein, 27 aa, Homo sapiens
  MAP TO AL034372.14; EXPRESSED IN FETAL LIVER, SIGNAL = 1.9; EXPRESSED IN HELA, SIGNAL = 1.8; EXPRESSED IN HEART, SIGNAL = 2.6; EXPRESSED IN LUNG, SIGNAL =   1; EXPRESSED IN BRAIN, SIGNAL = 2.5; EXPRESSED IN BT474, SIGNAL =   2; EXPRESSED IN ADULT LIVER, SIGNAL = 1.5; EXPRESSED IN PLACENTA, SIGNAL = 2.2; EXPRESSED IN HBL100, SIGNAL = 1.6; EXPRESSED IN BONE MARROW, SIGNAL = 1.8; EST_HUMAN HIT: BF306907.1, EVALUE 3.00e-08; SWISSPROT HIT: P40123, EVALUE 2.00e-09
AVSRLESLSAESHRPPGNCGEVNGVIA

SEQ ID NO: 35439 - protein, 39 aa, Homo sapiens
  MAP TO AF186190.1; EXPRESSED IN BT474, SIGNAL = 5.2; EXPRESSED IN HEART, SIGNAL = 2.7; EXPRESSED IN LUNG, SIGNAL = 2.9; EXPRESSED IN BRAIN, SIGNAL = 3.6; EXPRESSED IN FETAL LIVER, SIGNAL =   2; EXPRESSED IN ADULT LIVER, SIGNAL = 2.1; EXPRESSED IN PLACENTA, SIGNAL = 4.8; EXPRESSED IN HELA, SIGNAL = 4.9; EXPRESSED IN HBL100, SIGNAL = 1.6; EXPRESSED IN BONE MARROW, SIGNAL = 2.7; SWISSPROT HIT: Q92597, EVALUE 6.00e-19; EST_HUMAN HIT: AU134522.1, EVALUE 8.00e-18
KTCYNPLFNYEDMQEITQHFAVCHVDAPGQQDGAASFPA

SEQ ID NO: 35440 - protein, 27 aa, Homo sapiens
  MAP TO AF186190.1; EXPRESSED IN BT474, SIGNAL = 5.2; EXPRESSED IN HEART, SIGNAL = 2.7; EXPRESSED IN LUNG, SIGNAL = 2.9; EXPRESSED IN BRAIN, SIGNAL = 3.6; EXPRESSED IN FETAL LIVER, SIGNAL =   2; EXPRESSED IN ADULT LIVER, SIGNAL = 2.1; EXPRESSED IN PLACENTA, SIGNAL = 4.8; EXPRESSED IN HELA, SIGNAL = 4.9; EXPRESSED IN HBL100, SIGNAL = 1.6; EXPRESSED IN BONE MARROW, SIGNAL = 2.7
TKPATTPSSTTRTCRRSPSTLPFATWT

SEQ ID NO: 35441 - protein, 45 aa, Homo sapiens
  MAP TO AP000474.1; EXPRESSED IN HBL100, SIGNAL = 2.5; EXPRESSED IN HEART, SIGNAL =   4; EXPRESSED IN LUNG, SIGNAL = 2.2; EXPRESSED IN FETAL LIVER, SIGNAL = 4.1; EXPRESSED IN ADULT LIVER, SIGNAL = 3.6; EXPRESSED IN PLACENTA, SIGNAL = 3.4; EXPRESSED IN HELA, SIGNAL = 3.2; EXPRESSED IN BRAIN, SIGNAL = 3.5; EXPRESSED IN BONE MARROW, SIGNAL = 4.4; EXPRESSED IN BT474, SIGNAL = 1.9; SWISSPROT HIT: P35421, EVALUE 1.20e+00; EST_HUMAN HIT: BF664210.1, EVALUE 4.00e+00
QLGHNPTGAPRDSQGICASQAAHHPQRSQSQNPENPSFKHLRHSQ

SEQ ID NO: 35442 - protein, 41 aa, Homo sapiens
  MAP TO AL035414.18; EXPRESSED IN BONE MARROW, SIGNAL = 1.8; EXPRESSED IN HBL100, SIGNAL = 1.3; EXPRESSED IN HELA, SIGNAL = 1.3; EXPRESSED IN HEART, SIGNAL = 2.4; EXPRESSED IN LUNG, SIGNAL =   2; EXPRESSED IN BRAIN, SIGNAL = 1.7; EXPRESSED IN BT474, SIGNAL = 1.3; EXPRESSED IN ADULT LIVER, SIGNAL = 1.2; EXPRESSED IN FETAL LIVER, SIGNAL = 1.8; EXPRESSED IN PLACENTA, SIGNAL = 1.6
KVQHTLPKPETYINITAARCFSPSNFQYHFKNTLALLLMQA

SEQ ID NO: 35443 - protein, 42 aa, Homo sapiens
  MAP TO AL080312.4; EXPRESSED IN BT474, SIGNAL = 4.8; EXPRESSED IN HBL100, SIGNAL = 2.2; EXPRESSED IN LUNG, SIGNAL = 1.7; EXPRESSED IN BRAIN, SIGNAL = 2.1; EXPRESSED IN ADULT LIVER, SIGNAL = 1.3; EXPRESSED IN FETAL LIVER, SIGNAL = 1.7; EXPRESSED IN PLACENTA, SIGNAL = 8.3; EXPRESSED IN HEART, SIGNAL = 2.5; EXPRESSED IN HELA, SIGNAL = 1.2; EXPRESSED IN BONE MARROW, SIGNAL = 2.4; EST_HUMAN HIT: BE870732.1, EVALUE 2.00e-17
AITSLETGLTELRAAITRSQGGWMMSSTSVATGWGPQRLRTP

SEQ ID NO: 35444 - protein, 33 aa, Homo sapiens
  MAP TO AL031963.11; EXPRESSED IN PLACENTA, SIGNAL =   2; EXPRESSED IN BONE MARROW, SIGNAL = 1.8; EXPRESSED IN FETAL LIVER, SIGNAL = 1.8; EXPRESSED IN HBL100, SIGNAL = 1.3; EXPRESSED IN HELA, SIGNAL = 1.5; EXPRESSED IN HEART, SIGNAL =   2; EXPRESSED IN BRAIN, SIGNAL = 1.8; EXPRESSED IN LUNG, SIGNAL = 1.1; EXPRESSED IN BT474, SIGNAL = 1.1; EXPRESSED IN ADULT LIVER, SIGNAL =   2
DNTGYPTAKEQPGDRDLGTSLIFGNVTKAAEGL

SEQ ID NO: 35445 - protein, 62 aa, Homo sapiens
  MAP TO AL121756.2; EXPRESSED IN BT474, SIGNAL = 1.3; EXPRESSED IN HBL100, SIGNAL = 1.1; EXPRESSED IN BONE MARROW, SIGNAL = 1.2; EXPRESSED IN ADULT LIVER, SIGNAL = 1.1; EXPRESSED IN FETAL LIVER, SIGNAL = 1.1; EXPRESSED IN PLACENTA, SIGNAL = 1.4; EXPRESSED IN HEART, SIGNAL = 1.2; EXPRESSED IN HELA, SIGNAL = 1.3; EXPRESSED IN BRAIN, SIGNAL = 1.1; EST_HUMAN HIT: AJ403124.1, EVALUE 7.00e-20
AVLFLLGKPIILPTDATPFVLPRHVGTEGSMATVGLSQQLFDSALLLLQKAGALNLDITGQL

SEQ ID NO: 35446 - protein, 39 aa, Homo sapiens
  MAP TO AL080286.16; EXPRESSED IN PLACENTA, SIGNAL = 3.7; EXPRESSED IN HEART, SIGNAL = 3.1; EXPRESSED IN BRAIN, SIGNAL = 3.3; EXPRESSED IN BT474, SIGNAL = 1.5; EXPRESSED IN HBL100, SIGNAL = 1.7; EXPRESSED IN HELA, SIGNAL =  11; EXPRESSED IN LUNG, SIGNAL = 2.1; EXPRESSED IN BONE MARROW, SIGNAL = 2.7; EXPRESSED IN ADULT LIVER, SIGNAL = 2.2; EXPRESSED IN FETAL LIVER, SIGNAL =   3; EST_HUMAN HIT: BE878260.1, EVALUE 4.20e+00
LVIIAVKLVLTVSHSGPCPVLMQMHQAHLVRQALLLFPW

SEQ ID NO: 35447 - protein, 26 aa, Homo sapiens
  MAP TO AL031661.16; EXPRESSED IN HELA, SIGNAL = 2.5; EXPRESSED IN HEART, SIGNAL = 2.1; EXPRESSED IN BRAIN, SIGNAL = 1.7; EXPRESSED IN BONE MARROW, SIGNAL = 1.7; EXPRESSED IN ADULT LIVER, SIGNAL = 1.2; EXPRESSED IN BT474, SIGNAL = 1.9; EXPRESSED IN FETAL LIVER, SIGNAL = 1.3; EXPRESSED IN PLACENTA, SIGNAL = 1.7; EXPRESSED IN HBL100, SIGNAL = 2.3
CCDDDDDDDDDDDRDAAADDPWGSPG

SEQ ID NO: 35448 - protein, 25 aa, Homo sapiens
  MAP TO AL109615.8; EXPRESSED IN BT474, SIGNAL = 3.8; EXPRESSED IN ADULT LIVER, SIGNAL = 1.4; EXPRESSED IN HELA, SIGNAL = 9.5; EXPRESSED IN PLACENTA, SIGNAL = 1.7; EXPRESSED IN HBL100, SIGNAL = 5.3; EXPRESSED IN HEART, SIGNAL = 1.4; EXPRESSED IN LUNG, SIGNAL = 2.1; EST_HUMAN HIT: BF063279.1, EVALUE 4.00e-07
KRVVLRTAPFTSPATRGLGSTHTKF

SEQ ID NO: 35449 - protein, 29 aa, Homo sapiens
  MAP TO AL096867.15; EXPRESSED IN BT474, SIGNAL = 2.5; EXPRESSED IN FETAL LIVER, SIGNAL = 5.3; EXPRESSED IN HEART, SIGNAL = 6.2; EXPRESSED IN LUNG, SIGNAL = 3.7; EXPRESSED IN BRAIN, SIGNAL = 4.5; EXPRESSED IN ADULT LIVER, SIGNAL = 4.9; EXPRESSED IN PLACENTA, SIGNAL = 6.3; EXPRESSED IN HELA, SIGNAL = 5.3; EXPRESSED IN HBL100, SIGNAL = 4.3; EXPRESSED IN BONE MARROW, SIGNAL = 5.8
LFHEIVLIQSHLQPPLLILVLLLFPTHPQ

SEQ ID NO: 35450 - protein, 36 aa, Homo sapiens
  MAP TO AL031428.9; EXPRESSED IN PLACENTA, SIGNAL = 1.3; EXPRESSED IN HBL100, SIGNAL = 1.9; EXPRESSED IN HEART, SIGNAL =   1; EXPRESSED IN BONE MARROW, SIGNAL = 0.93; EXPRESSED IN BRAIN, SIGNAL = 1.1; EXPRESSED IN ADULT LIVER, SIGNAL = 0.98; EXPRESSED IN BT474, SIGNAL = 1.3; EXPRESSED IN HELA, SIGNAL = 1.3; EST_HUMAN HIT: AI366683.1, EVALUE 4.00e-03
EKLEEEENLTRELKSEIERLQKRMAELEKLEEAFSR

SEQ ID NO: 35451 - protein, 56 aa, Homo sapiens
  MAP TO AC007318.2; EXPRESSED IN BONE MARROW, SIGNAL = 3.6; EXPRESSED IN FETAL LIVER, SIGNAL = 1.2; EXPRESSED IN HELA, SIGNAL =   6; EXPRESSED IN BRAIN, SIGNAL = 2.3; EXPRESSED IN LUNG, SIGNAL = 3.5; EXPRESSED IN BT474, SIGNAL =  10; EXPRESSED IN ADULT LIVER, SIGNAL = 1.3; EXPRESSED IN PLACENTA, SIGNAL = 3.9; EXPRESSED IN HEART, SIGNAL = 1.7; EXPRESSED IN HBL100, SIGNAL = 8.4; SWISSPROT HIT: O15142, EVALUE 2.00e-27; EST_HUMAN HIT: AA873440.1, EVALUE 2.00e-26
KFKIRIEDPPRRKHMVFLGGAVLADIMKDKDNFWMTRQEYQEKGVRVLEKLGVTVR

SEQ ID NO: 35452 - protein, 22 aa, Homo sapiens
  MAP TO AC007318.2; EXPRESSED IN BONE MARROW, SIGNAL = 3.6; EXPRESSED IN FETAL LIVER, SIGNAL = 1.2; EXPRESSED IN HELA, SIGNAL =   6; EXPRESSED IN BRAIN, SIGNAL = 2.3; EXPRESSED IN LUNG, SIGNAL = 3.5; EXPRESSED IN BT474, SIGNAL =  10; EXPRESSED IN ADULT LIVER, SIGNAL = 1.3; EXPRESSED IN PLACENTA, SIGNAL = 3.9; EXPRESSED IN HEART, SIGNAL = 1.7; EXPRESSED IN HBL100, SIGNAL = 8.4; EST_HUMAN HIT: BF666525.1, EVALUE 2.00e-06
NLRSALKTHPAESTWYSWVVQF

SEQ ID NO: 35453 - protein, 90 aa, Homo sapiens
  MAP TO AL050329.9; EXPRESSED IN ADULT LIVER, SIGNAL =   1; EXPRESSED IN BT474, SIGNAL = 1.2; EXPRESSED IN HBL100, SIGNAL =   1; EXPRESSED IN PLACENTA, SIGNAL = 0.94; EXPRESSED IN HELA, SIGNAL = 1.3; EXPRESSED IN HEART, SIGNAL = 1.1; EXPRESSED IN LUNG, SIGNAL = 0.9; EST_HUMAN HIT: AA744738.1, EVALUE 1.00e-48; SWISSPROT HIT: Q03309, EVALUE 1.90e-01
HGDCVGLSLSQAQQMGEEDKEYVCVKCCAEEDKKTEILDPDTLENQATVEFHSGDKTMECEKLGLSKHTTNDRTKYIDDTVKHKVKILKR

SEQ ID NO: 35454 - protein, 123 aa, Homo sapiens [sequence omitted]

SEQ ID NO: 35455 - protein, 21 aa, Homo sapiens
  MAP TO AL109808.2; EXPRESSED IN BONE MARROW, SIGNAL =  16; EXPRESSED IN HBL100, SIGNAL =  42; EXPRESSED IN HELA, SIGNAL =  78; EXPRESSED IN HEART, SIGNAL =  10; EXPRESSED IN BRAIN, SIGNAL = 7.6; EXPRESSED IN LUNG, SIGNAL =  31; EXPRESSED IN BT474, SIGNAL =  48; EXPRESSED IN ADULT LIVER, SIGNAL = 6.9; EXPRESSED IN FETAL LIVER, SIGNAL =  11; EXPRESSED IN PLACENTA, SIGNAL =  23; EST_HUMAN HIT: AA360434.1, EVALUE 2.00e-03
HGSWSQEASKAGSSSKALDAG

SEQ ID NO: 35456 - protein, 64 aa, Homo sapiens
  MAP TO AC008123.9; EXPRESSED IN BT474, SIGNAL =  55; EXPRESSED IN BONE MARROW, SIGNAL =   2; EXPRESSED IN LUNG, SIGNAL = 2.8; EXPRESSED IN ADULT LIVER, SIGNAL = 1.8; EXPRESSED IN FETAL LIVER, SIGNAL = 1.4; EXPRESSED IN PLACENTA, SIGNAL = 3.1; EXPRESSED IN HEART, SIGNAL = 1.6; EXPRESSED IN HELA, SIGNAL = 5.9; EXPRESSED IN HBL100, SIGNAL = 5.9; EXPRESSED IN BRAIN, SIGNAL = 1.3; SWISSPROT HIT: P13010, EVALUE 5.00e-33; EST_HUMAN HIT: AA449064.1, EVALUE 6.00e-32
CLLHRALHPREPLPPIQQHIWNMLNPPAEVTTKSQIPLSKIKTLFPLIEAKKKDQVTAQEIFQD

SEQ ID NO: 35457 - protein, 125 aa, Homo sapiens
  MAP TO AC010092.1; EXPRESSED IN PLACENTA, SIGNAL = 2.6; EXPRESSED IN HEART, SIGNAL = 1.4; EXPRESSED IN BRAIN, SIGNAL = 1.4; EXPRESSED IN BONE MARROW, SIGNAL = 1.2; EXPRESSED IN LUNG, SIGNAL = 9.7; EXPRESSED IN BT474, SIGNAL = 2e+02; EXPRESSED IN FETAL LIVER, SIGNAL = 1.1; EXPRESSED IN ADULT LIVER, SIGNAL = 1.3; EXPRESSED IN HBL100, SIGNAL = 3.7; EXPRESSED IN HELA, SIGNAL = 4.5; EST_HUMAN HIT: BE620090.1, EVALUE 2.00e-07
LGGCMIYAVFVLGLPPLPSMPPRNLPGIAPLPLPSEFLPSFPLVPESSSAASSGELLSSLPPTSNAPSDPATTTAKADAASSLTVDVTPPTAKAPTTVEDRVGDSTPVSEKPVSAAVDANASESP

SEQ ID NO: 35458 - protein, 72 aa, Homo sapiens
  MAP TO AC010140.1; EXPRESSED IN BT474, SIGNAL =   2; EXPRESSED IN BONE MARROW, SIGNAL = 2.5; EXPRESSED IN LUNG, SIGNAL = 4.1; EXPRESSED IN BRAIN, SIGNAL = 5.1; EXPRESSED IN ADULT LIVER, SIGNAL = 7.7; EXPRESSED IN FETAL LIVER, SIGNAL = 1.9; EXPRESSED IN PLACENTA, SIGNAL = 8.5; EXPRESSED IN HEART, SIGNAL = 2.4; EXPRESSED IN HELA, SIGNAL =  19; EXPRESSED IN HBL100, SIGNAL = 3.4; EST_HUMAN HIT: N66951.1, EVALUE 1.00e-16; SWISSPROT HIT: Q04584, EVALUE 7.00e+00
PSDLSPPPQTAPHQAELGPNSSSASAPPPNNPFITSPPHTWSSLQFHSVTSHPPPAQQFTLKKVAGAKAIVK

SEQ ID NO: 35459 - protein, 72 aa, Homo sapiens
  MAP TO AL049637.32; EXPRESSED IN PLACENTA, SIGNAL = 1.3; EXPRESSED IN BRAIN, SIGNAL = 1.1; EXPRESSED IN BT474, SIGNAL = 2.6; EXPRESSED IN HEART, SIGNAL = 0.99; EXPRESSED IN HELA, SIGNAL =   4; EXPRESSED IN HBL100, SIGNAL =   2; EXPRESSED IN LUNG, SIGNAL = 3.5; EXPRESSED IN BONE MARROW, SIGNAL = 0.91; EST_HUMAN HIT: AA862284.1, EVALUE 2.00e-35; SWISSPROT HIT: P54731, EVALUE 5.00e-36
AIRLSLEQALPPEPKEENAEPVSKLRIRTPSGEFLERRFLASNKLQIVFDFVASKGFPWDEYKLLSTFPRRD

SEQ ID NO: 35460 - protein, 30 aa, Homo sapiens
  MAP TO AL049629.13; EXPRESSED IN HBL100, SIGNAL = 5.4; EXPRESSED IN HELA, SIGNAL =  24; EXPRESSED IN PLACENTA, SIGNAL =  33; EXPRESSED IN HEART, SIGNAL = 7.2; EXPRESSED IN BRAIN, SIGNAL = 3.7; EXPRESSED IN BONE MARROW, SIGNAL = 2.5; EXPRESSED IN LUNG, SIGNAL = 8.9; EXPRESSED IN BT474, SIGNAL = 7.4; EXPRESSED IN ADULT LIVER, SIGNAL = 3.9; EXPRESSED IN FETAL LIVER, SIGNAL = 2.2; EST_HUMAN HIT: AA968816.1, EVALUE 4.00e-12
NFRDPVLPWRHAKCSICGCQSGTTRSLMQS

SEQ ID NO: 35461 - protein, 91 aa, Homo sapiens
  MAP TO AP000507.1; EXPRESSED IN PLACENTA, SIGNAL =  24; EXPRESSED IN HBL100, SIGNAL =  53; EXPRESSED IN HELA, SIGNAL =  47; EXPRESSED IN HEART, SIGNAL =  17; EXPRESSED IN BRAIN, SIGNAL = 5.7; EXPRESSED IN BONE MARROW, SIGNAL =  32; EXPRESSED IN LUNG, SIGNAL =  58; EXPRESSED IN ADULT LIVER, SIGNAL =  15; EXPRESSED IN BT474, SIGNAL =   8; EXPRESSED IN FETAL LIVER, SIGNAL =  11; EST_HUMAN HIT: AW820291.1, EVALUE 3.00e-52; SWISSPROT HIT: P30487, EVALUE 3.00e-53
PPKTHVTHHPISDHEATLRCWALGFYPAEITLTWQRDGEDQTQDTELVETRPAGDRTFQKWAAVVVPSGEEQRYTCHVQHEGLPKPLTLRW

SEQ ID NO: 35462 - protein, 213 aa, Homo sapiens
  MAP TO Z98200.8; EXPRESSED IN BT474, SIGNAL = 1.4e+02; EXPRESSED IN FETAL LIVER, SIGNAL =  20; EXPRESSED IN ADULT LIVER, SIGNAL =  18; EXPRESSED IN HELA, SIGNAL = 1e+02; EXPRESSED IN PLACENTA, SIGNAL =  40; EXPRESSED IN HBL100, SIGNAL =  55; EXPRESSED IN HEART, SIGNAL =  11; EXPRESSED IN BRAIN, SIGNAL =  12; EXPRESSED IN BONE MARROW, SIGNAL =  26; EXPRESSED IN LUNG, SIGNAL =  34; EST_HUMAN HIT: BE748899.1, EVALUE 1.00e-102; SWISSPROT HIT: P39023, EVALUE 1.00e-103
MRLLPLRQKKAHLMEIQVNGGTVAEKLDWVCERLEQQVNVNQVFGQDEMIDVIGVTKGKGYKGVTSRWHTKKLPCKTHRGLCKVACIGAWHPARVAFSVARAGEKGYRHRTEINKKIYKIGQGYLIKDGKLIKNNASTDSDLSDKSTNPLGGFVHYGEVTNDLVMLKGCVVGTKKRVLTLHESLLVQMKRQALEKIDLKFIDTTSKFGHGCFQ

SEQ ID NO: 35463 - protein, 39 aa, Homo sapiens
  MAP TO AC008015.4; EXPRESSED IN BONE MARROW, SIGNAL = 1.5; EXPRESSED IN BRAIN, SIGNAL = 1.4; EXPRESSED IN LUNG, SIGNAL = 1.1; EXPRESSED IN ADULT LIVER, SIGNAL = 1.3; EXPRESSED IN BT474, SIGNAL = 2.3; EXPRESSED IN FETAL LIVER, SIGNAL = 1.5; EXPRESSED IN HELA, SIGNAL = 1.7; EXPRESSED IN PLACENTA, SIGNAL = 1.5; EXPRESSED IN HBL100, SIGNAL = 1.8; EXPRESSED IN HEART, SIGNAL = 1.5; EST_HUMAN HIT: AI248057.1, EVALUE 4.00e-18; SWISSPROT HIT: P33955, EVALUE 8.10e+00
DDVGWDWDHLFTEVSSEVLTEWDPLQTEKEDPAGQARHT

SEQ ID NO: 35464 - protein, 72 aa, Homo sapiens
  MAP TO AL121760.1; EXPRESSED IN PLACENTA, SIGNAL = 8.8; EXPRESSED IN HBL100, SIGNAL = 3.2; EXPRESSED IN HELA, SIGNAL =  12; EXPRESSED IN HEART, SIGNAL = 3.8; EXPRESSED IN BRAIN, SIGNAL = 5.4; EXPRESSED IN BONE MARROW, SIGNAL = 6.3; EXPRESSED IN LUNG, SIGNAL = 6.3; EXPRESSED IN ADULT LIVER, SIGNAL =  10; EXPRESSED IN BT474, SIGNAL = 2.8; EXPRESSED IN FETAL LIVER, SIGNAL = 3.1; SWISSPROT HIT: P23255, EVALUE 6.70e+00; EST_HUMAN HIT: AW858792.1, EVALUE 1.00e-24
VPMLPLIPLEAALRNIVHYLSVPPPKNVCCPKTSILFYVIFPIDIRRQECQASEPKLSHHIPCDLHEYIQMA

SEQ ID NO: 35465 - protein, 137 aa, Homo sapiens
  MAP TO AL009030.4; EXPRESSED IN BT474, SIGNAL = 2.9; EXPRESSED IN ADULT LIVER, SIGNAL =  11; EXPRESSED IN FETAL LIVER, SIGNAL = 2.6; EXPRESSED IN HELA, SIGNAL = 7.5; EXPRESSED IN PLACENTA, SIGNAL = 5.6; EXPRESSED IN HBL100, SIGNAL = 4.5; EXPRESSED IN HEART, SIGNAL = 2.3; EXPRESSED IN BRAIN, SIGNAL = 3.6; EXPRESSED IN BONE MARROW, SIGNAL = 6.6; EXPRESSED IN LUNG, SIGNAL = 4.5; SWISSPROT HIT: P54728, EVALUE 2.20e-01; EST_HUMAN HIT: BF377897.1, EVALUE 2.00e-39
KAPTMDAQQDRPKSQDCLGLVAPLASAAEVPATAPVSGKKHRPPGPLFSSSDPLPANSSHSRDSAQVTSMIPAPFTAASRDAGMRRTRSAPAAAAAAPPPSTLNPTSGSLLNAVDGGPSHFLASATAAARAQRSEVR

SEQ ID NO: 35466 - protein, 26 aa, Homo sapiens
  MAP TO AL009030.4; EXPRESSED IN BT474, SIGNAL = 2.9; EXPRESSED IN ADULT LIVER, SIGNAL =  11; EXPRESSED IN FETAL LIVER, SIGNAL = 2.6; EXPRESSED IN HELA, SIGNAL = 7.5; EXPRESSED IN PLACENTA, SIGNAL = 5.6; EXPRESSED IN HBL100, SIGNAL = 4.5; EXPRESSED IN HEART, SIGNAL = 2.3; EXPRESSED IN BRAIN, SIGNAL = 3.6; EXPRESSED IN BONE MARROW, SIGNAL = 6.6; EXPRESSED IN LUNG, SIGNAL = 4.5; EST_HUMAN HIT: AW630166.1, EVALUE 1.00e-08
ISLLTSGHVLQLWLRPRNVRGLHPLH

SEQ ID NO: 35467 - protein, 31 aa, Homo sapiens
  MAP TO AC010874.1; EXPRESSED IN BONE MARROW, SIGNAL =  11; EXPRESSED IN LUNG, SIGNAL =  18; EXPRESSED IN BT474, SIGNAL =  47; EXPRESSED IN FETAL LIVER, SIGNAL = 5.6; EXPRESSED IN ADULT LIVER, SIGNAL = 7.3; EXPRESSED IN HELA, SIGNAL =  85; EXPRESSED IN PLACENTA, SIGNAL =  17; EXPRESSED IN HBL100, SIGNAL =  38; EXPRESSED IN HEART, SIGNAL = 7.5; EXPRESSED IN BRAIN, SIGNAL =   6; EST_HUMAN HIT: AI870476.1, EVALUE 7.00e-08
NRSITGDPCPSKRMMKFRLYEDTIKVNKLAK

SEQ ID NO: 35468 - protein, 74 aa, Homo sapiens
  MAP TO AL109806.7; EXPRESSED IN BONE MARROW, SIGNAL = 1.1; EXPRESSED IN BRAIN, SIGNAL = 1.3; EXPRESSED IN LUNG, SIGNAL =   2; EXPRESSED IN ADULT LIVER, SIGNAL = 1.1; EXPRESSED IN FETAL LIVER, SIGNAL = 1.2; EXPRESSED IN HELA, SIGNAL = 1.6; EXPRESSED IN PLACENTA, SIGNAL = 1.3; EXPRESSED IN HBL100, SIGNAL = 0.98; EXPRESSED IN HEART, SIGNAL = 0.98; SWISSPROT HIT: Q06430, EVALUE 6.00e-18; EST_HUMAN HIT: AI654230.1, EVALUE 3.00e-09
RYVEDICVYGPGDLPWLIQSPSLFANKFEPSTDPLVVTCLERRHRLQVLRQAEVPIEPHWHFQQQSHFNMRLNR

SEQ ID NO: 35469 - protein, 62 aa, Homo sapiens
  MAP TO AL109806.7; EXPRESSED IN BONE MARROW, SIGNAL = 1.1; EXPRESSED IN BRAIN, SIGNAL = 1.3; EXPRESSED IN LUNG, SIGNAL =   2; EXPRESSED IN ADULT LIVER, SIGNAL = 1.1; EXPRESSED IN FETAL LIVER, SIGNAL = 1.2; EXPRESSED IN HELA, SIGNAL = 1.6; EXPRESSED IN PLACENTA, SIGNAL = 1.3; EXPRESSED IN HBL100, SIGNAL = 0.98; EXPRESSED IN HEART, SIGNAL = 0.98
PLRRRHLRIRTRRPAVAHSVAFSVCQQIRTLDRPACGYLLRAAAQTSSAEAGRSSYRATLAF

SEQ ID NO: 35470 - protein, 24 aa, Homo sapiens
  MAP TO AC008014.5; EXPRESSED IN FETAL LIVER, SIGNAL = 1.3; EXPRESSED IN HELA, SIGNAL = 1.2; EXPRESSED IN HEART, SIGNAL = 1.3; EXPRESSED IN LUNG, SIGNAL = 3.5; EXPRESSED IN BRAIN, SIGNAL = 1.4; EXPRESSED IN BT474, SIGNAL = 1.3; EXPRESSED IN ADULT LIVER, SIGNAL = 1.6; EXPRESSED IN PLACENTA, SIGNAL = 1.8; EXPRESSED IN HBL100, SIGNAL = 1.5; EXPRESSED IN BONE MARROW, SIGNAL = 1.4; EST_HUMAN HIT: W86575.1, EVALUE 3.00e-06
SCMTEKVSVANSELQHQETRSSSH

SEQ ID NO: 35471 - protein, 45 aa, Homo sapiens
  MAP TO AC011481.1; EXPRESSED IN BONE MARROW, SIGNAL = 1.7; EXPRESSED IN HELA, SIGNAL = 5.5; EXPRESSED IN BRAIN, SIGNAL =   2; EXPRESSED IN LUNG, SIGNAL = 3.6; EXPRESSED IN BT474, SIGNAL = 7.2; EXPRESSED IN ADULT LIVER, SIGNAL = 3.1; EXPRESSED IN FETAL LIVER, SIGNAL =   2; EXPRESSED IN PLACENTA, SIGNAL = 4.1; EXPRESSED IN HEART, SIGNAL = 1.8; EXPRESSED IN HBL100, SIGNAL = 4.4; EST_HUMAN HIT: AU122531.1, EVALUE 5.00e-20; SWISSPROT HIT: P81418, EVALUE 3.50e+00
LSVLSAQEPRMCEFKCYPRCEASSGAPWSCRATCCHLFLDCTSPW

SEQ ID NO: 35472 - protein, 112 aa, Homo sapiens
  MAP TO AC007238.3; EXPRESSED IN BT474, SIGNAL = 5.6; EXPRESSED IN FETAL LIVER, SIGNAL = 1.5; EXPRESSED IN HEART, SIGNAL = 1.9; EXPRESSED IN LUNG, SIGNAL = 3.1; EXPRESSED IN BRAIN, SIGNAL = 2.6; EXPRESSED IN ADULT LIVER, SIGNAL =   2; EXPRESSED IN PLACENTA, SIGNAL = 4.6; EXPRESSED IN HELA, SIGNAL =  11; EXPRESSED IN HBL100, SIGNAL = 5.9; EXPRESSED IN BONE MARROW, SIGNAL = 2.9; SWISSPROT HIT: Q13123, EVALUE 2.00e-19; EST_HUMAN HIT: BE744628.1, EVALUE 2.00e-18
MEAQTILTTNDIVISKLTQLLSYLRQGTRNKKLKKKDKGKLEEKKPAEADRSIFEDIGDYTPSTIKTPWDKERERYRERERDQETETVTESESENEIRSENEIGNENEIGNE

SEQ ID NO: 35473 - protein, 114 aa, Homo sapiens
  MAP TO AL031681.13; EXPRESSED IN BONE MARROW, SIGNAL = 4.5; EXPRESSED IN FETAL LIVER, SIGNAL = 5.1; EXPRESSED IN HELA, SIGNAL = 8.5; EXPRESSED IN BRAIN, SIGNAL = 6.4; EXPRESSED IN LUNG, SIGNAL =  11; EXPRESSED IN BT474, SIGNAL = 2.5; EXPRESSED IN ADULT LIVER, SIGNAL = 6.7; EXPRESSED IN PLACENTA, SIGNAL = 7.6; EXPRESSED IN HEART, SIGNAL = 4.6; EXPRESSED IN HBL100, SIGNAL = 4.2; EST_HUMAN HIT: AA487833.1, EVALUE 6.00e-17
MVECHQLRQELAIFTSFVILHLLRAIWTYIRAGHRGYDGLAWAQRPDSCGIVDFVFVVLVVRESQPEVQSRLSFSLLPCVQGGKAEQKELASGVILSPFQVLALPLLYQNLGKT

SEQ ID NO: 35474 - protein, 38 aa, Homo sapiens
  MAP TO AL079333.7; EXPRESSED IN PLACENTA, SIGNAL = 3.1; EXPRESSED IN HBL100, SIGNAL = 2.4; EXPRESSED IN HEART, SIGNAL = 1.9; EXPRESSED IN FETAL LIVER, SIGNAL = 1.6; EXPRESSED IN ADULT LIVER, SIGNAL = 1.3; EXPRESSED IN HELA, SIGNAL =   4; EXPRESSED IN BRAIN, SIGNAL = 1.9; EXPRESSED IN LUNG, SIGNAL = 9.7; EXPRESSED IN BONE MARROW, SIGNAL = 1.3; EXPRESSED IN BT474, SIGNAL = 2.2; EST_HUMAN HIT: BF573437.1, EVALUE 4.00e-16
LVKKMRENHRTCQRPRKIALWRMYHRRQKEILNLPKKA

SEQ ID NO: 35475 - protein, 104 aa, Homo sapiens
  MAP TO AL079307.2; EXPRESSED IN BT474, SIGNAL =   3; EXPRESSED IN HEART, SIGNAL = 0.92; EXPRESSED IN LUNG, SIGNAL = 1.5; EXPRESSED IN BRAIN, SIGNAL = 1.5; EXPRESSED IN ADULT LIVER, SIGNAL = 1.9; EXPRESSED IN FETAL LIVER, SIGNAL = 0.94; EXPRESSED IN PLACENTA, SIGNAL = 1.7; EXPRESSED IN HELA, SIGNAL =  33; EXPRESSED IN HBL100, SIGNAL = 2.2; EXPRESSED IN BONE MARROW, SIGNAL = 1.6; EST_HUMAN HIT: AA042813.1, EVALUE 2.00e-48; SWISSPROT HIT: Q95157, EVALUE 2.00e-28
SSEDPERQPVLTGLFLSTCLVMALGNLLIILAISPDSHLHTPMYFFLSNLSLPDISFTSTTVPKMTVDIQSHSRVISYAGCLTQMSLFAIFGGMEDRHTPECDG

SEQ ID NO: 35476 - protein, 68 aa, Homo sapiens
  MAP TO AL079307.2; EXPRESSED IN BT474, SIGNAL =   3; EXPRESSED IN HEART, SIGNAL = 0.92; EXPRESSED IN LUNG, SIGNAL = 1.5; EXPRESSED IN BRAIN, SIGNAL = 1.5; EXPRESSED IN ADULT LIVER, SIGNAL = 1.9; EXPRESSED IN FETAL LIVER, SIGNAL = 0.94; EXPRESSED IN PLACENTA, SIGNAL = 1.7; EXPRESSED IN HELA, SIGNAL =  33; EXPRESSED IN HBL100, SIGNAL = 2.2; EXPRESSED IN BONE MARROW, SIGNAL = 1.6; EST_HUMAN HIT: AI138970.1, EVALUE 5.00e-08; SWISSPROT HIT: P18143, EVALUE 6.60e+00
LLLEAQRIQNGSRSSLGCSCPRAWSWRWGTCSSSWPSALTPTSTPPCTSSSPTCPCLTSVSPPPQSPR

SEQ ID NO: 35477 - protein, 64 aa, Homo sapiens
  MAP TO AC008063.1; EXPRESSED IN PLACENTA, SIGNAL = 3.8; EXPRESSED IN HBL100, SIGNAL = 1.1; EXPRESSED IN HEART, SIGNAL = 1.3; EXPRESSED IN BONE MARROW, SIGNAL = 1.1; EXPRESSED IN FETAL LIVER, SIGNAL = 1.2; EXPRESSED IN HELA, SIGNAL = 1.1; EXPRESSED IN BRAIN, SIGNAL = 0.95; EXPRESSED IN LUNG, SIGNAL = 0.89; EXPRESSED IN ADULT LIVER, SIGNAL = 1.3; SWISSPROT HIT: P27487, EVALUE 2.00e-32; EST_HUMAN HIT: AW971631.1, EVALUE 2.00e-31
YAGPCSQKADTVFRLNWATYLASTENIIVASFDGRGSGYQGDKIMHAINRRLGTFEVEDQIEAA

SEQ ID NO: 35478 - protein, 78 aa, Homo sapiens
  MAP TO AL121778.2; EXPRESSED IN PLACENTA, SIGNAL =  38; EXPRESSED IN HBL100, SIGNAL = 1.3e+02; EXPRESSED IN HEART, SIGNAL =  13; EXPRESSED IN FETAL LIVER, SIGNAL =  19; EXPRESSED IN ADULT LIVER, SIGNAL =  24; EXPRESSED IN HELA, SIGNAL = 1.5e+02; EXPRESSED IN BRAIN, SIGNAL = 8.8; EXPRESSED IN LUNG, SIGNAL =  25; EXPRESSED IN BONE MARROW, SIGNAL =  31; EXPRESSED IN BT474, SIGNAL = 1.7e+02; SWISSPROT HIT: O18789, EVALUE 9.00e-40; EST_HUMAN HIT: BE881869.1, EVALUE 6.00e-39
MAGIDDCYTSARGCTATLGNFAKATFDAISKTYSYLPPDLWKETVFTKSPYEEFTDHLIKTHTRVSAQRTQAPAVATT

SEQ ID NO: 35479 - protein, 17 aa, Homo sapiens
  MAP TO AC010149.1; EXPRESSED IN BT474, SIGNAL =  32; EXPRESSED IN HBL100, SIGNAL =  14; EXPRESSED IN HEART, SIGNAL = 3.4; EXPRESSED IN LUNG, SIGNAL = 7.9; EXPRESSED IN ADULT LIVER, SIGNAL =   5; EXPRESSED IN FETAL LIVER, SIGNAL = 7.8; EXPRESSED IN PLACENTA, SIGNAL = 7.1; EXPRESSED IN HELA, SIGNAL =  29; EXPRESSED IN BRAIN, SIGNAL =   6; EXPRESSED IN BONE MARROW, SIGNAL = 8.8; EST_HUMAN HIT: N24382.1, EVALUE 2.80e+00
RSIRRRTQMLQSSSQSF

SEQ ID NO: 35480 - protein, 82 aa, Homo sapiens
  MAP TO AL020996.3; EXPRESSED IN BONE MARROW, SIGNAL = 1.3; EXPRESSED IN BT474, SIGNAL = 3.4; EXPRESSED IN HBL100, SIGNAL = 1.3; EXPRESSED IN HEART, SIGNAL =   3; EXPRESSED IN LUNG, SIGNAL = 1.2; EXPRESSED IN BRAIN, SIGNAL = 1.5; EXPRESSED IN ADULT LIVER, SIGNAL = 1.6; EXPRESSED IN FETAL LIVER, SIGNAL = 1.1; EXPRESSED IN PLACENTA, SIGNAL = 2.9; EXPRESSED IN HELA, SIGNAL = 3.1; EST_HUMAN HIT: AW957699.1, EVALUE 2.00e-30; SWISSPROT HIT: Q10357, EVALUE 2.80e+00
SSFHSTTSFVISDITEETEVEVPELPSVPLLCSASPECCKPEHKAACSSSEEDDCVSLSKASSFADMMGILKDFHRMKQSQD

SEQ ID NO: 35481 - protein, 27 aa, Homo sapiens
  MAP TO AB020871.1; EXPRESSED IN BONE MARROW, SIGNAL = 3.8; EXPRESSED IN HBL100, SIGNAL = 2.8; EXPRESSED IN HELA, SIGNAL =  20; EXPRESSED IN HEART, SIGNAL = 3.2; EXPRESSED IN BRAIN, SIGNAL = 7.2; EXPRESSED IN LUNG, SIGNAL = 4.3; EXPRESSED IN BT474, SIGNAL = 2.8; EXPRESSED IN ADULT LIVER, SIGNAL = 9.8; EXPRESSED IN FETAL LIVER, SIGNAL = 3.6; EXPRESSED IN PLACENTA, SIGNAL =  12; EST_HUMAN HIT: AA948008.1, EVALUE 2.00e-05
LITLNLLMAVPPGLIATHQQRQSMLQH

SEQ ID NO: 35482 - protein, 55 aa, Homo sapiens
  MAP TO AL033383.24; EXPRESSED IN BT474, SIGNAL = 4.2; EXPRESSED IN PLACENTA, SIGNAL = 2.5; EXPRESSED IN FETAL LIVER, SIGNAL = 1.2; EXPRESSED IN ADULT LIVER, SIGNAL = 1.2; EXPRESSED IN HEART, SIGNAL = 1.1; EXPRESSED IN HELA, SIGNAL =   5; EXPRESSED IN HBL100, SIGNAL =   2; EXPRESSED IN BRAIN, SIGNAL = 1.3; EXPRESSED IN LUNG, SIGNAL = 1.1; EXPRESSED IN BONE MARROW, SIGNAL = 1.2; EST_HUMAN HIT: AU120988.1, EVALUE 2.00e-24; SWISSPROT HIT: Q61136, EVALUE 1.00e-25
EKVTVMSTINPTKDLLADLIGCQRLPEDQRKKVHQLKDLLDQILMLDPAKRISIN

SEQ ID NO: 35483 - protein, 116 aa, Homo sapiens
  MAP TO AC011004.1; EXPRESSED IN FETAL LIVER, SIGNAL = 1.2; EXPRESSED IN ADULT LIVER, SIGNAL =   2; EXPRESSED IN BT474, SIGNAL = 1.5; EXPRESSED IN PLACENTA, SIGNAL =   1; EXPRESSED IN HBL100, SIGNAL =   1; EXPRESSED IN HEART, SIGNAL = 1.3; EXPRESSED IN BONE MARROW, SIGNAL = 0.98; EXPRESSED IN BRAIN, SIGNAL = 1.1; EST_HUMAN HIT: AI393388.1, EVALUE 1.00e-44
LRPSGFSCFLLSITLPFATISGDTSTDPHGSGPPPPPTEPRVQVHDAKFRAQINQTNTFNMNMQTLCCDVRRGLTSYASACNRQDSTATNCKGEPMFICTGFAGKLLEVRPLTQAS

SEQ ID NO: 35484 - protein, 79 aa, Homo sapiens
  MAP TO AL109748.1; EXPRESSED IN BONE MARROW, SIGNAL = 3.4; EXPRESSED IN BT474, SIGNAL = 3.5; EXPRESSED IN HBL100, SIGNAL = 2.9; EXPRESSED IN BRAIN, SIGNAL = 3.4; EXPRESSED IN LUNG, SIGNAL = 1.2; EXPRESSED IN ADULT LIVER, SIGNAL = 2.5; EXPRESSED IN FETAL LIVER, SIGNAL = 2.9; EXPRESSED IN PLACENTA, SIGNAL = 3.1; EXPRESSED IN HEART, SIGNAL = 2.3; EXPRESSED IN HELA, SIGNAL = 4.2; EST_HUMAN HIT: BE410490.1, EVALUE 4.00e-32; SWISSPROT HIT: P24793, EVALUE 6.80e-01
LIRIIPPFVNTNIFARTKIDPSALVQKLELDVRSVTSIRRGAEAKTVLPKEKMKLRREQWLQKIEAIKLAEQKHREERR

SEQ ID NO: 35485 - protein, 57 aa, Homo sapiens
  MAP TO AL109748.1; EXPRESSED IN BONE MARROW, SIGNAL = 3.4; EXPRESSED IN BT474, SIGNAL = 3.5; EXPRESSED IN HBL100, SIGNAL = 2.9; EXPRESSED IN BRAIN, SIGNAL = 3.4; EXPRESSED IN LUNG, SIGNAL = 1.2; EXPRESSED IN ADULT LIVER, SIGNAL = 2.5; EXPRESSED IN FETAL LIVER, SIGNAL = 2.9; EXPRESSED IN PLACENTA, SIGNAL = 3.1; EXPRESSED IN HEART, SIGNAL = 2.3; EXPRESSED IN HELA, SIGNAL = 4.2; EST_HUMAN HIT: BE410490.1, EVALUE 4.80e-02
WLSRSTGRSGGRGPGWWWGTCTRSGMPCLSYWGLRLAAGARPAAGRATSPGPQSSAG

SEQ ID NO: 35486 - protein, 123 aa, Homo sapiens
  MAP TO AL080274.10; EXPRESSED IN PLACENTA, SIGNAL = 3.7; EXPRESSED IN FETAL LIVER, SIGNAL = 0.98; EXPRESSED IN HEART, SIGNAL = 2.6; EXPRESSED IN HELA, SIGNAL =  11; EXPRESSED IN HBL100, SIGNAL = 2.3; EXPRESSED IN BRAIN, SIGNAL = 2.3; EXPRESSED IN LUNG, SIGNAL = 1.5; EXPRESSED IN BT474, SIGNAL = 3.8; SWISSPROT HIT: Q9JWD6, EVALUE 8.50e-01; EST_HUMAN HIT: AW959703.1, EVALUE 4.00e-57
RCHRFQSCAYRSNQWRYRGRCDSIQFAVDKRVFIAGFGLYGSSCGSAEYSAKIELKRQGVVLGQNLSKYFSDGSSNTFPVWFEYPVQIEPDTFYTASVILDGNELSYFGQEGMTEVQCGKVTV

SEQ ID NO: 35487 - protein, 22 aa, Homo sapiens
  MAP TO AL080274.10; EXPRESSED IN PLACENTA, SIGNAL = 3.7; EXPRESSED IN FETAL LIVER, SIGNAL = 0.98; EXPRESSED IN HEART, SIGNAL = 2.6; EXPRESSED IN HELA, SIGNAL =  11; EXPRESSED IN HBL100, SIGNAL = 2.3; EXPRESSED IN BRAIN, SIGNAL = 2.3; EXPRESSED IN LUNG, SIGNAL = 1.5; EXPRESSED IN BT474, SIGNAL = 3.8; EST_HUMAN HIT: T98859.1, EVALUE 2.00e-04
LSMRPTTSSSGILQPKSLSFSL

SEQ ID NO: 35488 - protein, 64 aa, Homo sapiens
  MAP TO AL034379.8; EXPRESSED IN BT474, SIGNAL = 7.5; EXPRESSED IN PLACENTA, SIGNAL =   3; EXPRESSED IN BONE MARROW, SIGNAL = 2.3; EXPRESSED IN ADULT LIVER, SIGNAL = 1.2; EXPRESSED IN FETAL LIVER, SIGNAL = 2.7; EXPRESSED IN HEART, SIGNAL = 3.1; EXPRESSED IN HELA, SIGNAL = 4.2; EXPRESSED IN HBL100, SIGNAL = 5.2; EXPRESSED IN BRAIN, SIGNAL = 2.8; EXPRESSED IN LUNG, SIGNAL = 3.6; EST_HUMAN HIT: AA018334.1, EVALUE 3.00e-23; SWISSPROT HIT: Q03365, EVALUE 3.80e-01
LMMHLETCVLFPSGEPGSGTESDTSPDFHNQENEPSQEDPEDLDGSVQGVKPQKAASSTSSGSH

SEQ ID NO: 35489 - protein, 115 aa, Homo sapiens
  MAP TO AC006946.18; EXPRESSED IN BT474, SIGNAL = 2.3; EXPRESSED IN PLACENTA, SIGNAL = 4.6; EXPRESSED IN BONE MARROW, SIGNAL =   5; EXPRESSED IN BRAIN, SIGNAL = 5.7; EXPRESSED IN ADULT LIVER, SIGNAL = 3.9; EXPRESSED IN FETAL LIVER, SIGNAL = 4.9; EXPRESSED IN HEART, SIGNAL = 5.2; EXPRESSED IN HELA, SIGNAL = 6.4; EXPRESSED IN HBL100, SIGNAL = 2.7; EXPRESSED IN LUNG, SIGNAL = 3.1; SWISSPROT HIT: P54644, EVALUE 2.00e-08; EST_HUMAN HIT: BF316383.1, EVALUE 8.00e-39
AWRKRWFILRRGQTSSDPDVLEYYKNDGSKKPLRTINLNLCEQLDVDVTLNFNKKEIQKGYMFDIKTSERTFYLVAETREDMNEWVQSICQICGFRQEESTGMGAHTALSQEGLR

SEQ ID NO: 35490 - protein, 39 aa, Homo sapiens
  MAP TO AC007089.2; EXPRESSED IN PLACENTA, SIGNAL = 1.3; EXPRESSED IN HELA, SIGNAL = 1.3; EXPRESSED IN HEART, SIGNAL =   1; EXPRESSED IN BRAIN, SIGNAL = 1.5; EXPRESSED IN BT474, SIGNAL = 2.7; EXPRESSED IN HBL100, SIGNAL = 5.8; EXPRESSED IN LUNG, SIGNAL = 1.9; EXPRESSED IN BONE MARROW, SIGNAL = 1.4; EXPRESSED IN ADULT LIVER, SIGNAL = 1.3; EXPRESSED IN FETAL LIVER, SIGNAL = 1.1; SWISSPROT HIT: P07898, EVALUE 3.60e+00; EST_HUMAN HIT: BE384766.1, EVALUE 4.00e-12
MASMPAASLGFRPSSVHPATGVPEAEGAALPACAHPRCQ

SEQ ID NO: 35491 - protein, 44 aa, Homo sapiens
  MAP TO AC007218.2; EXPRESSED IN ADULT LIVER, SIGNAL = 2.6; EXPRESSED IN PLACENTA, SIGNAL = 3.9; EXPRESSED IN BRAIN, SIGNAL = 2.4; EXPRESSED IN FETAL LIVER, SIGNAL = 1.6; EXPRESSED IN BT474, SIGNAL =   1; EXPRESSED IN HEART, SIGNAL = 1.6; EXPRESSED IN HELA, SIGNAL = 5.1; EXPRESSED IN HBL100, SIGNAL =   2; EXPRESSED IN LUNG, SIGNAL = 2.7; EXPRESSED IN BONE MARROW, SIGNAL = 1.8; EST_HUMAN HIT: BF333236.1, EVALUE 2.00e-11; SWISSPROT HIT: Q92917, EVALUE 1.20e+00
ERERVFPVSQSHADNRRLHEPDLQEGIRAVPREDPPVELPGKFP

SEQ ID NO: 35492 - protein, 52 aa, Homo sapiens
  MAP TO AB020867.1; EXPRESSED IN BT474, SIGNAL = 2.2; EXPRESSED IN FETAL LIVER, SIGNAL = 1.2; EXPRESSED IN PLACENTA, SIGNAL = 1.5; EXPRESSED IN HBL100, SIGNAL = 1.8; EXPRESSED IN HELA, SIGNAL = 2.2; EXPRESSED IN HEART, SIGNAL = 1.1; EXPRESSED IN BRAIN, SIGNAL = 1.1; EXPRESSED IN BONE MARROW, SIGNAL = 1.3; EXPRESSED IN LUNG, SIGNAL = 1.6; EST_HUMAN HIT: BE163639.1, EVALUE 9.00e-20
NTVIHLDQALARMREYERMKTEAESNSNMRCICRIIEDGDGAGAGTTVNNLE

SEQ ID NO: 35493 - protein, 74 aa, Homo sapiens
  MAP TO AC007128.2; EXPRESSED IN BT474, SIGNAL = 2.6; EXPRESSED IN ADULT LIVER, SIGNAL =   5; EXPRESSED IN FETAL LIVER, SIGNAL =   3; EXPRESSED IN HELA, SIGNAL = 4.4; EXPRESSED IN PLACENTA, SIGNAL = 6.2; EXPRESSED IN HBL100, SIGNAL = 3.3; EXPRESSED IN HEART, SIGNAL = 3.5; EXPRESSED IN BRAIN, SIGNAL = 3.7; EXPRESSED IN BONE MARROW, SIGNAL = 4.5; EXPRESSED IN LUNG, SIGNAL = 5.1; SWISSPROT HIT: P51617, EVALUE 2.00e+00; EST_HUMAN HIT: BE622106.1, EVALUE 7.00e-25
AQHHMEDAKAGGLYPLKQQSELYLGPFSHGWSSWDAGHQVPRLHTARHPGPSPQNHFFLLGLWACDERGCCEDL

SEQ ID NO: 35494 - protein, 46 aa, Homo sapiens
  MAP TO AC007128.2; EXPRESSED IN BT474, SIGNAL = 2.6; EXPRESSED IN ADULT LIVER, SIGNAL =   5; EXPRESSED IN FETAL LIVER, SIGNAL =   3; EXPRESSED IN HELA, SIGNAL = 4.4; EXPRESSED IN PLACENTA, SIGNAL = 6.2; EXPRESSED IN HBL100, SIGNAL = 3.3; EXPRESSED IN HEART, SIGNAL = 3.5; EXPRESSED IN BRAIN, SIGNAL = 3.7; EXPRESSED IN BONE MARROW, SIGNAL = 4.5; EXPRESSED IN LUNG, SIGNAL = 5.1; EST_HUMAN HIT: BE622106.1, EVALUE 3.00e-15
QRSSQQPLSSQAQRPRRKKWFCGLGPGCLAVCSLGTWCPASQLLQP

SEQ ID NO: 35495 - protein, 30 aa, Homo sapiens
  MAP TO AC007528.5; EXPRESSED IN BONE MARROW, SIGNAL = 2.3; EXPRESSED IN HELA, SIGNAL = 2.6; EXPRESSED IN BRAIN, SIGNAL =   2; EXPRESSED IN LUNG, SIGNAL = 1.6; EXPRESSED IN BT474, SIGNAL = 2.9; EXPRESSED IN ADULT LIVER, SIGNAL = 3.7; EXPRESSED IN FETAL LIVER, SIGNAL = 2.3; EXPRESSED IN PLACENTA, SIGNAL = 3.8; EXPRESSED IN HEART, SIGNAL = 2.4; EXPRESSED IN HBL100, SIGNAL =   9; EST_HUMAN HIT: AW820740.1, EVALUE 6.00e-07
ALKGGASGVVFSSRWVRGLADFRSEAADLR

SEQ ID NO: 35496 - protein, 46 aa, Homo sapiens
  MAP TO AC002472.3; EXPRESSED IN HELA, SIGNAL = 4.9; EXPRESSED IN PLACENTA, SIGNAL =   6; EXPRESSED IN HBL100, SIGNAL =   5; EXPRESSED IN HEART, SIGNAL = 6.2; EXPRESSED IN BONE MARROW, SIGNAL = 3.6; EXPRESSED IN LUNG, SIGNAL = 3.5; EXPRESSED IN BRAIN, SIGNAL = 4.4; EXPRESSED IN ADULT LIVER, SIGNAL = 4.4; EXPRESSED IN BT474, SIGNAL = 3.6; EXPRESSED IN FETAL LIVER, SIGNAL = 3.7; EST_HUMAN HIT: AW451665.1, EVALUE 2.00e-16; SWISSPROT HIT: O15547, EVALUE 2.00e-17
LPHLTFPTPPRSNALETWDPTYFKHCRYEPQFSPYCPVFRIGDLVA

SEQ ID NO: 35497 - protein, 47 aa, Homo sapiens
  MAP TO AC009493.1; EXPRESSED IN HEART, SIGNAL = 1.3; EXPRESSED IN BONE MARROW, SIGNAL =   1; EXPRESSED IN FETAL LIVER, SIGNAL = 1.3; EXPRESSED IN ADULT LIVER, SIGNAL =   1; SWISSPROT HIT: Q07326, EVALUE 1.20e+00; EST_HUMAN HIT: BF343084.1, EVALUE 6.80e+00
ELVPCLCLDLAIGLSLAPPFLTRIGATGIWSSSFQIEAGLRPGDLFF

SEQ ID NO: 35498 - protein, 41 aa, Homo sapiens
  MAP TO AC009493.1; EXPRESSED IN HEART, SIGNAL = 1.3; EXPRESSED IN BONE MARROW, SIGNAL =   1; EXPRESSED IN FETAL LIVER, SIGNAL = 1.3; EXPRESSED IN ADULT LIVER, SIGNAL =   1; SWISSPROT HIT: P47806, EVALUE 3.10e-01; EST_HUMAN HIT: AW615626.1, EVALUE 4.20e-01
LPPTPRLGKKLTKKRSPGLRPASIWKLELQIPVAPIRVRKG

SEQ ID NO: 35499 - protein, 97 aa, Homo sapiens
  MAP TO AC009954.1; EXPRESSED IN BT474, SIGNAL =  47; EXPRESSED IN PLACENTA, SIGNAL =  53; EXPRESSED IN HBL100, SIGNAL =  69; EXPRESSED IN HEART, SIGNAL =  27; EXPRESSED IN FETAL LIVER, SIGNAL =  16; EXPRESSED IN ADULT LIVER, SIGNAL =  21; EXPRESSED IN HELA, SIGNAL =  45; EXPRESSED IN BRAIN, SIGNAL =  29; EXPRESSED IN LUNG, SIGNAL =  33; EXPRESSED IN BONE MARROW, SIGNAL =  21; EST_HUMAN HIT: BE260046.1, EVALUE 3.00e-14; SWISSPROT HIT: P53360, EVALUE 3.00e-15
GAMTPGIPIFSPMMPYGTGLTPQPIQNTNSLSILEEQQRQQQQQQQQQQQQQQQQQQQQQQQQQQQQQQQQQQAVAAAAVQQSTSQQATQGTSGQAP

SEQ ID NO: 35500 - protein, 46 aa, Homo sapiens
  MAP TO AF170802.1; EXPRESSED IN PLACENTA, SIGNAL = 2.9; EXPRESSED IN BONE MARROW, SIGNAL = 1.8; EXPRESSED IN HBL100, SIGNAL = 1.4; EXPRESSED IN HELA, SIGNAL = 1.8; EXPRESSED IN HEART, SIGNAL = 2.1; EXPRESSED IN BRAIN, SIGNAL = 1.5; EXPRESSED IN LUNG, SIGNAL = 1.4; EXPRESSED IN BT474, SIGNAL = 1.7; EXPRESSED IN ADULT LIVER, SIGNAL = 1.8; EXPRESSED IN FETAL LIVER, SIGNAL = 2.3; EST_HUMAN HIT: AL120608.1, EVALUE 3.00e-21; SWISSPROT HIT: P06766, EVALUE 2.00e-22
LIPKDQYYCGVLYFTGSDIFNKNMRAHALEKGFTINEYTIRPLGVT

SEQ ID NO: 35501 - protein, 62 aa, Homo sapiens
  MAP TO AC010088.2; EXPRESSED IN PLACENTA, SIGNAL = 1.9; EXPRESSED IN BONE MARROW, SIGNAL = 1.5; EXPRESSED IN HEART, SIGNAL = 1.1; EXPRESSED IN HELA, SIGNAL = 2.6; EXPRESSED IN HBL100, SIGNAL = 1.5; EXPRESSED IN LUNG, SIGNAL = 1.1; EXPRESSED IN ADULT LIVER, SIGNAL = 3.9; EXPRESSED IN BT474, SIGNAL = 1.1; EST_HUMAN HIT: H61604.1, EVALUE 4.00e-24; SWISSPROT HIT: P10272, EVALUE 2.00e-08
DGDPIKHDCQQIIVQTYATQDNLLEVPLGNPDLSLYTDGSSFVKNGIQRAGYAIVSDVTILK

SEQ ID NO: 35502 - protein, 32 aa, Homo sapiens
  MAP TO AF060568.1; EXPRESSED IN ADULT LIVER, SIGNAL = 1.1; EXPRESSED IN HEART, SIGNAL = 2.3; EXPRESSED IN LUNG, SIGNAL = 5.7; SWISSPROT HIT: Q00998, EVALUE 8.30e+00
ADAHPEALEVTVSKVHVEELPTVYFLHTPNSQ

SEQ ID NO: 35503 - protein, 105 aa, Homo sapiens
  MAP TO AF146367.1; EXPRESSED IN BRAIN, SIGNAL =   2; EXPRESSED IN BT474, SIGNAL = 3.9; EXPRESSED IN LUNG, SIGNAL = 2.7; EXPRESSED IN BONE MARROW, SIGNAL = 1.9; EXPRESSED IN ADULT LIVER, SIGNAL = 2.6; EXPRESSED IN FETAL LIVER, SIGNAL = 1.9; EXPRESSED IN PLACENTA, SIGNAL = 3.6; EXPRESSED IN HEART, SIGNAL = 2.4; EXPRESSED IN HELA, SIGNAL = 4.1; EXPRESSED IN HBL100, SIGNAL = 7.8; EST_HUMAN HIT: BE387771.1, EVALUE 4.00e-28
VTLTAKVCSFTPEAIETMNPPGGMNNSRRTTLRAVTLTAKVCSFTPEPVRPRTHQKEETLNTSEHQNEQTPDTLPLRTVTLTTRVRSFILDVSETKNPPIPDTKG

SEQ ID NO: 35504 - protein, 34 aa, Homo sapiens
  MAP TO AF146367.1; EXPRESSED IN BRAIN, SIGNAL =   2; EXPRESSED IN BT474, SIGNAL = 3.9; EXPRESSED IN LUNG, SIGNAL = 2.7; EXPRESSED IN BONE MARROW, SIGNAL = 1.9; EXPRESSED IN ADULT LIVER, SIGNAL = 2.6; EXPRESSED IN FETAL LIVER, SIGNAL = 1.9; EXPRESSED IN PLACENTA, SIGNAL = 3.6; EXPRESSED IN HEART, SIGNAL = 2.4; EXPRESSED IN HELA, SIGNAL = 4.1; EXPRESSED IN HBL100, SIGNAL = 7.8; EST_HUMAN HIT: BF030029.1, EVALUE 1.00e-09
GIGGFLVSLTSRMKLRTLVVSVTVLKGSVSGVCS

SEQ ID NO: 35505 - protein, 20 aa, Homo sapiens
  MAP TO AF146367.1; EXPRESSED IN BRAIN, SIGNAL =   2; EXPRESSED IN BT474, SIGNAL = 3.9; EXPRESSED IN LUNG, SIGNAL = 2.7; EXPRESSED IN BONE MARROW, SIGNAL = 1.9; EXPRESSED IN ADULT LIVER, SIGNAL = 2.6; EXPRESSED IN FETAL LIVER, SIGNAL = 1.9; EXPRESSED IN PLACENTA, SIGNAL = 3.6; EXPRESSED IN HEART, SIGNAL = 2.4; EXPRESSED IN HELA, SIGNAL = 4.1; EXPRESSED IN HBL100, SIGNAL = 7.8; EST_HUMAN HIT: AI820784.1, EVALUE 9.00e-06
WCVWSCSFLPVGSWSRWLQE

SEQ ID NO: 35506 - protein, 42 aa, Homo sapiens
  MAP TO AC009705.2; EXPRESSED IN PLACENTA, SIGNAL = 1.2; EXPRESSED IN HELA, SIGNAL = 1.9; EXPRESSED IN HEART, SIGNAL = 1.2; EXPRESSED IN BRAIN, SIGNAL = 1.1; EXPRESSED IN BT474, SIGNAL = 1.1; EXPRESSED IN HBL100, SIGNAL = 1.3; EXPRESSED IN LUNG, SIGNAL = 1.1; EXPRESSED IN BONE MARROW, SIGNAL = 0.95; EXPRESSED IN ADULT LIVER, SIGNAL = 2.2; EXPRESSED IN FETAL LIVER, SIGNAL = 1.1; EST_HUMAN HIT: AW405534.1, EVALUE 2.00e-05
METTHSFGNPSISVSTQQPPKKFAPVVAPKPKYNPYKQPGGE

SEQ ID NO: 35507 - protein, 54 aa, Homo sapiens
  MAP TO AC010104.1; EXPRESSED IN BONE MARROW, SIGNAL = 1.3; EXPRESSED IN ADULT LIVER, SIGNAL = 3.9; EXPRESSED IN BT474, SIGNAL = 1.1; EXPRESSED IN HBL100, SIGNAL = 1.1; EXPRESSED IN HELA, SIGNAL = 2.7; EXPRESSED IN HEART, SIGNAL = 0.93; EXPRESSED IN PLACENTA, SIGNAL = 1.8; EST_HUMAN HIT: H61604.1, EVALUE 2.00e-20; SWISSPROT HIT: P10272, EVALUE 2.00e-09
VGKPIEHDCQQIVAQTYATREDLLEVPLANPDLNLYTDGSSFVVNGIQRAGYAI

SEQ ID NO: 35508 - protein, 21 aa, Homo sapiens
  MAP TO AC010104.1; EXPRESSED IN BONE MARROW, SIGNAL = 1.3; EXPRESSED IN ADULT LIVER, SIGNAL = 3.9; EXPRESSED IN BT474, SIGNAL = 1.1; EXPRESSED IN HBL100, SIGNAL = 1.1; EXPRESSED IN HELA, SIGNAL = 2.7; EXPRESSED IN HEART, SIGNAL = 0.93; EXPRESSED IN PLACENTA, SIGNAL = 1.8; EST_HUMAN HIT: AW503208.1, EVALUE 1.00e-03
STMPLFSQRLGNQLSMTANKL

SEQ ID NO: 35509 - protein, 42 aa, Homo sapiens
  MAP TO AF186995.1; EXPRESSED IN PLACENTA, SIGNAL = 3.9; EXPRESSED IN HBL100, SIGNAL = 1.7; EXPRESSED IN HELA, SIGNAL = 2.6; EXPRESSED IN HEART, SIGNAL =   2; EXPRESSED IN BONE MARROW, SIGNAL = 1.9; EXPRESSED IN LUNG, SIGNAL = 1.2; EXPRESSED IN BRAIN, SIGNAL = 1.8; EXPRESSED IN ADULT LIVER, SIGNAL = 2.2; EXPRESSED IN BT474, SIGNAL = 1.6; EXPRESSED IN FETAL LIVER, SIGNAL = 1.2; EST_HUMAN HIT: AI681434.1, EVALUE 2.80e+00
EFCHPQLIVLFLLQWEARQAGTGQERASCLTRKVRRTSGDGH

SEQ ID NO: 35510 - protein, 23 aa, Homo sapiens
  MAP TO AC010153.2; EXPRESSED IN HBL100, SIGNAL = 5.1; EXPRESSED IN PLACENTA, SIGNAL = 6.2; EXPRESSED IN HELA, SIGNAL = 4.9; EXPRESSED IN HEART, SIGNAL = 6.3; EXPRESSED IN BRAIN, SIGNAL = 3.8; EXPRESSED IN BONE MARROW, SIGNAL =   5; EXPRESSED IN LUNG, SIGNAL = 3.7; EXPRESSED IN ADULT LIVER, SIGNAL = 5.1; EXPRESSED IN BT474, SIGNAL = 3.7; EXPRESSED IN FETAL LIVER, SIGNAL = 4.5
WIQCLEMIQLPKKIMYRWERTVM

SEQ ID NO: 35511 - protein, 60 aa, Homo sapiens
  MAP TO AJ239318.3; EXPRESSED IN BT474, SIGNAL = 3.3; EXPRESSED IN ADULT LIVER, SIGNAL = 2.4; EXPRESSED IN FETAL LIVER, SIGNAL = 1.4; EXPRESSED IN HBL100, SIGNAL = 2.4; EXPRESSED IN HELA, SIGNAL = 2.7; EXPRESSED IN PLACENTA, SIGNAL = 2.2; EXPRESSED IN HEART, SIGNAL = 1.5; EXPRESSED IN BRAIN, SIGNAL = 1.5; EXPRESSED IN BONE MARROW, SIGNAL = 1.5; EXPRESSED IN LUNG, SIGNAL = 0.96; EST_HUMAN HIT: AW962016.1, EVALUE 2.00e-20; SWISSPROT HIT: P41997, EVALUE 3.00e-05
FEFKVGHKAAETTCKLNNAFGPETANEHTVQWWFKTFCKGDKSLDEDHSGWPLEIDNDQF

SEQ ID NO: 35512 - protein, 101 aa, Homo sapiens [sequence omitted]

SEQ ID NO: 35513 - protein, 108 aa, Homo sapiens
  MAP TO AL096887.5; EXPRESSED IN PLACENTA, SIGNAL = 5.5; EXPRESSED IN HBL100, SIGNAL = 2.3; EXPRESSED IN HEART, SIGNAL =   2; EXPRESSED IN BONE MARROW, SIGNAL = 2.7; EXPRESSED IN HELA, SIGNAL = 4.4; EXPRESSED IN BRAIN, SIGNAL = 1.8; EXPRESSED IN LUNG, SIGNAL = 6.3; EXPRESSED IN BT474, SIGNAL = 1.8; EXPRESSED IN ADULT LIVER, SIGNAL = 5.2; EXPRESSED IN FETAL LIVER, SIGNAL = 1.2; SWISSPROT HIT: P19028, EVALUE 3.00e-06; EST_HUMAN HIT: AW340174.1, EVALUE 7.00e-34
RIHRPRNQGVEVEVAPLTITRSDTLAKFLLPVPTTFRSANLEVLLLEGGTLPPGDPTTIPLNWKLRLPRGHFGLPLPLSQQAKKGVSVLAGVTDLDYQDEFSLLLHNR

SEQ ID NO: 35514 - protein, 48 aa, Homo sapiens
  MAP TO AL034378.2; EXPRESSED IN BT474, SIGNAL = 1.3; EXPRESSED IN HBL100, SIGNAL = 1.3; EXPRESSED IN HEART, SIGNAL = 2.2; EXPRESSED IN LUNG, SIGNAL = 3.2; EXPRESSED IN ADULT LIVER, SIGNAL = 2.3; EXPRESSED IN FETAL LIVER, SIGNAL = 2.5; EXPRESSED IN PLACENTA, SIGNAL = 2.2; EXPRESSED IN HELA, SIGNAL = 2.1; EXPRESSED IN BRAIN, SIGNAL = 1.8; EXPRESSED IN BONE MARROW, SIGNAL =   2
IDDNITLHHSIREIPTRGILATSEAILGWNLHYLCSQVFAFKTKEELE

SEQ ID NO: 35515 - protein, 28 aa, Homo sapiens
  MAP TO AL096770.14; EXPRESSED IN BONE MARROW, SIGNAL = 1.4; EXPRESSED IN BRAIN, SIGNAL = 1.5; EXPRESSED IN BT474, SIGNAL = 2.6; EXPRESSED IN HBL100, SIGNAL = 1.9; EXPRESSED IN HEART, SIGNAL = 1.6; EXPRESSED IN LUNG, SIGNAL = 1.1; EXPRESSED IN ADULT LIVER, SIGNAL = 1.5; EXPRESSED IN FETAL LIVER, SIGNAL = 1.7; EXPRESSED IN PLACENTA, SIGNAL = 1.7; EXPRESSED IN HELA, SIGNAL = 1.9; EST_HUMAN HIT: BE535847.1, EVALUE 1.00e-04
RLLIFYSLAVEFCHMQALVNVAWNRFYF

SEQ ID NO: 35516 - protein, 88 aa, Homo sapiens
  MAP TO AL035448.28; EXPRESSED IN BONE MARROW, SIGNAL = 1.3; EXPRESSED IN BT474, SIGNAL = 1.8; EXPRESSED IN HBL100, SIGNAL = 1.9; EXPRESSED IN HEART, SIGNAL = 1.4; EXPRESSED IN BRAIN, SIGNAL =   2; EXPRESSED IN ADULT LIVER, SIGNAL = 1.2; EXPRESSED IN FETAL LIVER, SIGNAL = 1.1; EXPRESSED IN PLACENTA, SIGNAL = 2.6; EXPRESSED IN HELA, SIGNAL =  11; SWISSPROT HIT: Q05854, EVALUE 4.60e+00; EST_HUMAN HIT: AA903912.1, EVALUE 3.00e-08
TVKNRSKKSSKKANTSSSSSNSSKLPPVCYEIITLKTKKKKMAADIFPRKKPANSSSTSVQQYHQQNLSNNNLIPAPNWQGLYPTIRE

SEQ ID NO: 35517 - protein, 26 aa, Homo sapiens
  MAP TO AL109623.8; EXPRESSED IN ADULT LIVER, SIGNAL =   1; EXPRESSED IN BT474, SIGNAL =   1; EXPRESSED IN HEART, SIGNAL = 0.99; EXPRESSED IN PLACENTA, SIGNAL =   1; EXPRESSED IN BONE MARROW, SIGNAL = 1.2; EXPRESSED IN BRAIN, SIGNAL = 1.2; SWISSPROT HIT: Q92794, EVALUE 2.20e+00
FIIQHRAWRNDVRISPESLECRLTVL

SEQ ID NO: 35518 - protein, 72 aa, Homo sapiens
  MAP TO AP000344.1; EXPRESSED IN BONE MARROW, SIGNAL = 1.4; EXPRESSED IN BRAIN, SIGNAL = 0.9; EXPRESSED IN LUNG, SIGNAL = 1.6; EXPRESSED IN FETAL LIVER, SIGNAL = 2.1; EXPRESSED IN ADULT LIVER, SIGNAL = 1.1; EXPRESSED IN BT474, SIGNAL = 1.5; EXPRESSED IN HEART, SIGNAL = 1.1; EXPRESSED IN PLACENTA, SIGNAL = 1.8; EXPRESSED IN HBL100, SIGNAL =   1; EXPRESSED IN HELA, SIGNAL = 1.1; SWISSPROT HIT: Q64176, EVALUE 1.50e-02
HILPNYLHLVAGEYFHDKHSLTEIRDSLLDLLGDVFFVIPKLITAQYHRGESLSTPLQDDSPARLMAKEIHV

SEQ ID NO: 35519 - protein, 21 aa, Homo sapiens
  MAP TO AP000344.1; EXPRESSED IN BONE MARROW, SIGNAL = 1.4; EXPRESSED IN BRAIN, SIGNAL = 0.9; EXPRESSED IN LUNG, SIGNAL = 1.6; EXPRESSED IN FETAL LIVER, SIGNAL = 2.1; EXPRESSED IN ADULT LIVER, SIGNAL = 1.1; EXPRESSED IN BT474, SIGNAL = 1.5; EXPRESSED IN HEART, SIGNAL = 1.1; EXPRESSED IN PLACENTA, SIGNAL = 1.8; EXPRESSED IN HBL100, SIGNAL =   1; EXPRESSED IN HELA, SIGNAL = 1.1; EST_HUMAN HIT: AW812483.1, EVALUE 1.10e+00
STSCPIICTLWLVNTSMTSTP

SEQ ID NO: 35520 - protein, 272 aa, Homo sapiens
  MAP TO AC006466.3; EXPRESSED IN PLACENTA, SIGNAL = 0.97; EXPRESSED IN HELA, SIGNAL = 0.91; EXPRESSED IN BRAIN, SIGNAL = 1.2; EXPRESSED IN BONE MARROW, SIGNAL =   1; EXPRESSED IN FETAL LIVER, SIGNAL = 0.97; EXPRESSED IN ADULT LIVER, SIGNAL = 0.92; EXPRESSED IN HBL100, SIGNAL =   1; EXPRESSED IN HEART, SIGNAL =   1; EST_HUMAN HIT: BE266882.1, EVALUE 1.10e+00; SWISSPROT HIT: P11636, EVALUE 3.10e+00
ACCDDCGCVGYWRDWRCGSTDLPPPLKCLCLFLFWRSPVSPAYSPDAFWVPQSPSLMFGVGKEEEVISKTQGEQPLTFLTPLLTSDFSLSLFLSVSVWETETIGKRNLGEDRPLSFCPSSRSPASGDPRLRLLGLGWGWSKRLTGYQVLSSFLPPLSPTLAILEVGGHRKMHNTSTTSGPSQACLGGQDLPMEGLRNKLTHECSCIYVHMPRPEHVHQSMQILTSLTAKKPECTVSKRTEEQMMQHAGRIVKKSGEASRKRWHVSWTLGKEF

SEQ ID NO: 35521 - protein, 48 aa, Homo sapiens
  MAP TO AP000350.1; EXPRESSED IN PLACENTA, SIGNAL = 3.6; EXPRESSED IN BONE MARROW, SIGNAL = 2.6; EXPRESSED IN HEART, SIGNAL =   2; EXPRESSED IN HELA, SIGNAL = 2.9; EXPRESSED IN HBL100, SIGNAL = 4.3; EXPRESSED IN BRAIN, SIGNAL = 1.9; EXPRESSED IN LUNG, SIGNAL = 1.5; EXPRESSED IN BT474, SIGNAL = 3.7; EXPRESSED IN ADULT LIVER, SIGNAL = 1.8; EXPRESSED IN FETAL LIVER, SIGNAL = 2.1; EST_HUMAN HIT: BE265912.1, EVALUE 2.00e-20; SWISSPROT HIT: Q9Z0H3, EVALUE 3.00e-21
FSEILCDDLDLNPLTFVPAIASAIRQQIESYPTDSILEDQSDQRVIIK

SEQ ID NO: 35522 - protein, 49 aa, Homo sapiens
  MAP TO AP000512.1; EXPRESSED IN FETAL LIVER, SIGNAL = 0.89; EXPRESSED IN ADULT LIVER, SIGNAL = 1.1; EXPRESSED IN PLACENTA, SIGNAL = 1.2; EXPRESSED IN BT474, SIGNAL = 1.3; EXPRESSED IN HEART, SIGNAL = 1.3; EXPRESSED IN HELA, SIGNAL = 2.3; EXPRESSED IN HBL100, SIGNAL = 1.7; EXPRESSED IN BRAIN, SIGNAL =   1; EXPRESSED IN LUNG, SIGNAL = 0.97; EXPRESSED IN BONE MARROW, SIGNAL = 1.3; SWISSPROT HIT: O60231, EVALUE 4.00e-20; EST_HUMAN HIT: AI348131.1, EVALUE 3.00e-19
AAMLSVNNSIFYRPKDKVVHADNARVNFFLPGGDHLVLLNVYTQVTGLG

SEQ ID NO: 35523 - protein, 20 aa, Homo sapiens
  MAP TO AP000512.1; EXPRESSED IN FETAL LIVER, SIGNAL = 0.89; EXPRESSED IN ADULT LIVER, SIGNAL = 1.1; EXPRESSED IN PLACENTA, SIGNAL = 1.2; EXPRESSED IN BT474, SIGNAL = 1.3; EXPRESSED IN HEART, SIGNAL = 1.3; EXPRESSED IN HELA, SIGNAL = 2.3; EXPRESSED IN HBL100, SIGNAL = 1.7; EXPRESSED IN BRAIN, SIGNAL =   1; EXPRESSED IN LUNG, SIGNAL = 0.97; EXPRESSED IN BONE MARROW, SIGNAL = 1.3; EST_HUMAN HIT: AI281313.1, EVALUE 5.00e-06
CHALCQQLHLLPTKGQGRPC

SEQ ID NO: 35524 - protein, 211 aa, Homo sapiens
  MAP TO AL034550.12; EXPRESSED IN HEART, SIGNAL = 1.1; EXPRESSED IN PLACENTA, SIGNAL = 3.4; EXPRESSED IN HBL100, SIGNAL = 6.1; EXPRESSED IN HELA, SIGNAL =  17; EXPRESSED IN BRAIN, SIGNAL = 1.7; EXPRESSED IN BONE MARROW, SIGNAL = 2.3; EXPRESSED IN LUNG, SIGNAL = 6.6; EXPRESSED IN ADULT LIVER, SIGNAL = 1.9; EXPRESSED IN BT474, SIGNAL = 4.5; EXPRESSED IN FETAL LIVER, SIGNAL = 1.1; SWISSPROT HIT: Q90267, EVALUE 6.00e-03; EST_HUMAN HIT: BE895281.1, EVALUE 1.00e-99
FSCEDQKEVRAMSQDSNSNAAPGKSPGDLTTSRTPRFSSPNVISFGPEQTGRALGDQSNVTGQGKKLFGSGNVAATLQRPRPADPMPLPAEIPPVFPSGKLGPSTNSMSGGVQTPREDWAPKPHAFVGSVKNEKTFVGGPLKANAENRKATGHSPLELVGHLEGMPFVMDLPFWKLPREPGKGLSEPLEPSSLPSQLSIKQAFYGKLSKLQ

SEQ ID NO: 35525 - protein, 42 aa, Homo sapiens
  MAP TO AP000346.1; EXPRESSED IN BT474, SIGNAL =   1; EXPRESSED IN HBL100, SIGNAL = 0.98; EXPRESSED IN HEART, SIGNAL = 0.9; EXPRESSED IN PLACENTA, SIGNAL = 1.5; EXPRESSED IN HELA, SIGNAL = 1.9; EXPRESSED IN BRAIN, SIGNAL =   1; EXPRESSED IN LUNG, SIGNAL = 6.6; EXPRESSED IN ADULT LIVER, SIGNAL = 1.5; SWISSPROT HIT: P10265, EVALUE 1.00e-05; EST_HUMAN HIT: BE395061.1, EVALUE 1.00e-05
TTTPTENTTTSGSQPITTIQQLSRATAGSTAVDLCSTQMVFL

SEQ ID NO: 35526 - protein, 328 aa, Homo sapiens
  MAP TO AP000427.1; EXPRESSED IN HBL100, SIGNAL = 1.5; EXPRESSED IN HELA, SIGNAL = 2.3; EXPRESSED IN BRAIN, SIGNAL = 1.9; EXPRESSED IN LUNG, SIGNAL = 1.9; EXPRESSED IN HEART, SIGNAL = 2.2; EXPRESSED IN PLACENTA, SIGNAL = 2.8; EXPRESSED IN BONE MARROW, SIGNAL = 2.3; EXPRESSED IN ADULT LIVER, SIGNAL = 2.3; EXPRESSED IN BT474, SIGNAL = 1.1; EXPRESSED IN FETAL LIVER, SIGNAL = 2.2; EST_HUMAN HIT: AI742861.1, EVALUE 7.40e-01; SWISSPROT HIT: P51805, EVALUE 1.70e+00
VTIGSYPCVVEESSEDSITCHIDPQNSMDVGIRETVTLTVYNLGTAINTLSNEFDRRFVLLPNIDLVLPNAGSTTGMTSVTIKGSGFAVSSAGVKVLMGHFPCKVLSVNYTAIECETSPAAQQLVDVDLLIHGVPAQCQGNCTFSYLESITPYITGVFPNSVIGSVKVLIEGEGLGTVLEDIAVFIGNQQFRAIEVNENNITALVTPLPVGHHSVSVVVGSKGLALGNLTVSSPPVASLSPTSGSIGGGTTLVITGNGFYPGNTTVTIGDEPCQIISINPNEVYCRTPAGTTGMVDVKIFVNTIAYPPLLFTYALEDTPFLRGIIPSR

SEQ ID NO: 35527 - protein, 159 aa, Homo sapiens; identical to SEQ ID NO: 34061
  MAP TO AP000512.1; EXPRESSED IN BRAIN, SIGNAL = 1.3; EXPRESSED IN BONE MARROW, SIGNAL = 1.6; EXPRESSED IN LUNG, SIGNAL = 1.7; EXPRESSED IN ADULT LIVER, SIGNAL = 1.3; EXPRESSED IN HEART, SIGNAL = 0.87; EXPRESSED IN BT474, SIGNAL = 2.4; EXPRESSED IN HELA, SIGNAL = 6.4; EXPRESSED IN PLACENTA, SIGNAL = 1.5; EXPRESSED IN HBL100, SIGNAL = 2.4; SWISSPROT HIT: Q92599, EVALUE 1.10e+00; EST_HUMAN HIT: BE905563.1, EVALUE 6.00e-26

SEQ ID NO: 35528 - protein, 117 aa, Homo sapiens
  MAP TO AP000512.1; EXPRESSED IN BRAIN, SIGNAL = 1.3; EXPRESSED IN BONE MARROW, SIGNAL = 1.6; EXPRESSED IN LUNG, SIGNAL = 1.7; EXPRESSED IN ADULT LIVER, SIGNAL = 1.3; EXPRESSED IN HEART, SIGNAL = 0.87; EXPRESSED IN BT474, SIGNAL = 2.4; EXPRESSED IN HELA, SIGNAL = 6.4; EXPRESSED IN PLACENTA, SIGNAL = 1.5; EXPRESSED IN HBL100, SIGNAL = 2.4; SWISSPROT HIT: O31550, EVALUE 7.10e-02; EST_HUMAN HIT: AW503937.1, EVALUE 1.00e-51
RSQTTTERDSDTDVEEEELPVENREAVLKDHTKIRALVRAHSEKDQPPFGDSDDSVEADKSSPGIHLERSQASTTVDINTQVEKEVPPGSAIIHIKKHQVSVEGTNQTDVKAVGGPA

SEQ ID NO: 35529 - protein, 128 aa, Homo sapiens
  MAP TO AP000511.1; EXPRESSED IN ADULT LIVER, SIGNAL =   2; EXPRESSED IN BT474, SIGNAL = 1.4; EXPRESSED IN FETAL LIVER, SIGNAL = 2.1; EXPRESSED IN HELA, SIGNAL = 1.5; EXPRESSED IN PLACENTA, SIGNAL =   2; EXPRESSED IN HBL100, SIGNAL = 1.4; EXPRESSED IN HEART, SIGNAL = 2.2; EXPRESSED IN BRAIN, SIGNAL = 1.9; EXPRESSED IN BONE MARROW, SIGNAL = 2.1; EXPRESSED IN LUNG, SIGNAL = 1.2; EST_HUMAN HIT: AI766668.1, EVALUE 4.60e+00; SWISSPROT HIT: P28968, EVALUE 1.40e-02
TRTTGTRLTASSSVTMAPGMDFTASAASHTVPGIVLNTSGLGTSTMGASSTTSAHGVRTTTGSTREPTSSTFQETGPVSMGTNTVSMSHTPTNVIKPSGYLQPWAIILISLAAVVAAVGLSVGLSFCL

SEQ ID NO: 35530 - protein, 187 aa, Homo sapiens
  MAP TO AC007919.18; EXPRESSED IN HELA, SIGNAL = 3.5; EXPRESSED IN PLACENTA, SIGNAL = 1.8; EXPRESSED IN HBL100, SIGNAL = 3.6; EXPRESSED IN BRAIN, SIGNAL = 2.3; EXPRESSED IN LUNG, SIGNAL = 1.1; EXPRESSED IN HEART, SIGNAL = 1.4; EXPRESSED IN BONE MARROW, SIGNAL = 1.5; EXPRESSED IN ADULT LIVER, SIGNAL =   1; EXPRESSED IN BT474, SIGNAL = 2.9; EXPRESSED IN FETAL LIVER, SIGNAL = 1.3; EST_HUMAN HIT: BE154994.1, EVALUE 2.00e-64; SWISSPROT HIT: P22760, EVALUE 5.00e-39
FTQDASLKNKLKLQALIYPVLQALDFNTPSYQQNVNTPILPRYVMVKYWVDYFKGNYDFVQAMIVNNHTSLDVEEAAAVRARLNWTSLLPASFTKNYKPVVQTTGNARIVQELPQLLDARSAPLIADQAVLQLLPKTYILTCEHDVLRDDGIMYAKRLESAGVEVTLDHFEDGFHGCMIFTSWPTNF

SEQ ID NO: 35531 - protein, 36 aa, Homo sapiens
  MAP TO AP000550.1; EXPRESSED IN BT474, SIGNAL =   3; EXPRESSED IN HELA, SIGNAL = 1.4; EXPRESSED IN PLACENTA, SIGNAL = 2.5; EXPRESSED IN HEART, SIGNAL = 0.85; EXPRESSED IN HBL100, SIGNAL = 2.4; EST_HUMAN HIT: BE171984.1, EVALUE 2.00e-06
FTCLRRQSERCRSSAPWTLPSPMPSTPSASAEGRSS

SEQ ID NO: 35532 - protein, 54 aa, Homo sapiens
  MAP TO AC007848.11; EXPRESSED IN PLACENTA, SIGNAL = 2.6; EXPRESSED IN HBL100, SIGNAL = 1.4; EXPRESSED IN HEART, SIGNAL = 2.4; EXPRESSED IN LUNG, SIGNAL = 1.8; EXPRESSED IN BRAIN, SIGNAL = 2.1; EXPRESSED IN BONE MARROW, SIGNAL = 2.8; EXPRESSED IN ADULT LIVER, SIGNAL = 2.3; EXPRESSED IN FETAL LIVER, SIGNAL = 2.1; EXPRESSED IN BT474, SIGNAL = 1.4; EXPRESSED IN HELA, SIGNAL = 1.9
ERLKGKLSGQTPALTQPWEEMLLWPPRTTGTLMTETSLTLDLLSLHPITSIVVV

SEQ ID NO: 35533 - protein, 55 aa, Homo sapiens
  MAP TO AC007898.1; EXPRESSED IN BT474, SIGNAL = 1.8; EXPRESSED IN HELA, SIGNAL = 1.7; EXPRESSED IN PLACENTA, SIGNAL = 2.3; EXPRESSED IN HBL100, SIGNAL = 1.9; EXPRESSED IN LUNG, SIGNAL = 1.8; EXPRESSED IN BRAIN, SIGNAL = 2.3; EXPRESSED IN HEART, SIGNAL =   2; EXPRESSED IN BONE MARROW, SIGNAL = 2.2; EXPRESSED IN ADULT LIVER, SIGNAL = 1.9; EXPRESSED IN FETAL LIVER, SIGNAL = 1.8; EST_HUMAN HIT: BE881838.1, EVALUE 6.30e+00
MFALAAWKESLTFTQSSGNLHVVITTIFADHIKGFKVLGNTMYGVIKLTEYETNI

SEQ ID NO: 35534 - protein, 31 aa, Homo sapiens
  MAP TO AC006205.7; EXPRESSED IN BONE MARROW, SIGNAL = 7.4; EXPRESSED IN FETAL LIVER, SIGNAL = 6.8; EXPRESSED IN ADULT LIVER, SIGNAL = 6.3; EXPRESSED IN BT474, SIGNAL = 4.5; EXPRESSED IN HELA, SIGNAL = 6.5; EXPRESSED IN HBL100, SIGNAL = 8.8; EXPRESSED IN BRAIN, SIGNAL = 5.7; EXPRESSED IN PLACENTA, SIGNAL =   9; EXPRESSED IN HEART, SIGNAL = 5.2; EXPRESSED IN LUNG, SIGNAL = 5.1
RRRRSSSSNSSSITNLSGKGANYLSNKLQIA

SEQ ID NO: 35535 - protein, 36 aa, Homo sapiens
  MAP TO AC008012.8; EXPRESSED IN BT474, SIGNAL = 1.1; EXPRESSED IN HELA, SIGNAL = 2.3; EXPRESSED IN PLACENTA, SIGNAL = 4.1; EXPRESSED IN HBL100, SIGNAL = 1.5; EXPRESSED IN LUNG, SIGNAL = 1.6; EXPRESSED IN BRAIN, SIGNAL = 2.4; EXPRESSED IN BONE MARROW, SIGNAL = 2.4; EXPRESSED IN ADULT LIVER, SIGNAL = 2.4; EXPRESSED IN HEART, SIGNAL = 2.3; EXPRESSED IN FETAL LIVER, SIGNAL = 5.5; EST_HUMAN HIT: AA984672.1, EVALUE 5.00e+00
VKHKSSWQMGRMPPVPAMATTSDTKDLNVRRKSQGR

SEQ ID NO: 35536 - protein, 130 aa, Homo sapiens
  MAP TO AC006391.7; EXPRESSED IN FETAL LIVER, SIGNAL = 1.7; EXPRESSED IN ADULT LIVER, SIGNAL = 1.8; EXPRESSED IN BT474, SIGNAL = 1.1; EXPRESSED IN HELA, SIGNAL = 1.4; EXPRESSED IN PLACENTA, SIGNAL = 1.6; EXPRESSED IN HBL100, SIGNAL = 1.6; EXPRESSED IN BRAIN, SIGNAL = 2.2; EXPRESSED IN HEART, SIGNAL = 1.2; EXPRESSED IN BONE MARROW, SIGNAL = 3.1
KVLIEGRQESQSQRGRWVGGSTEREKRRIGRKEGRREGRKERRRRRRRRRRRRRRRRRKRKRRRRRRKKKKKKEEEEEEEEGKKKKEGKMKEKEGKGKEKEKRKRKKKKKEEEEEEESGKRRRRCRGEGG

SEQ ID NO: 35537 - protein, 64 aa, Homo sapiens
  MAP TO AC004834.2; EXPRESSED IN BT474, SIGNAL = 1.7; EXPRESSED IN HBL100, SIGNAL =   2; EXPRESSED IN HELA, SIGNAL =   1; EXPRESSED IN HEART, SIGNAL = 1.9; EXPRESSED IN LUNG, SIGNAL = 3.9; EXPRESSED IN BRAIN, SIGNAL = 1.1; EXPRESSED IN ADULT LIVER, SIGNAL = 1.2; EXPRESSED IN FETAL LIVER, SIGNAL = 1.1; SWISSPROT HIT: P05661, EVALUE 7.00e-22; EST_HUMAN HIT: AA330001.1, EVALUE 6.00e-15
KNHQRAIESLQASLEAEAKGRAEALRLKKKMETDLNEMEIQLDHANKNNSELVKTLKRLQQQIK

SEQ ID NO: 35538 - protein, 33 aa, Homo sapiens
  MAP TO AC007922.1; EXPRESSED IN PLACENTA, SIGNAL = 5.5; EXPRESSED IN BONE MARROW, SIGNAL = 4.4; EXPRESSED IN LUNG, SIGNAL = 3.4; EXPRESSED IN FETAL LIVER, SIGNAL = 3.8; EXPRESSED IN ADULT LIVER, SIGNAL = 5.6; EXPRESSED IN BT474, SIGNAL = 6.1; EXPRESSED IN HBL100, SIGNAL =  16; EXPRESSED IN HELA, SIGNAL = 5.7; EXPRESSED IN HEART, SIGNAL = 4.1; EXPRESSED IN BRAIN, SIGNAL = 3.3; EST_HUMAN HIT: BE395424.1, EVALUE 1.00e-09; SWISSPROT HIT: P49844, EVALUE 4.80e+00
  unsure 33
GGASGVVCSSRWARGLPGFRSEAADLRSECYSX

SEQ ID NO: 35539 - protein, 55 aa, Homo sapiens
  MAP TO AC006452.2; EXPRESSED IN HBL100, SIGNAL = 1.1; EXPRESSED IN HEART, SIGNAL = 1.1; EXPRESSED IN PLACENTA, SIGNAL = 1.6; EXPRESSED IN BONE MARROW, SIGNAL = 1.1; EXPRESSED IN BRAIN, SIGNAL = 1.5; EXPRESSED IN ADULT LIVER, SIGNAL = 1.9; EXPRESSED IN BT474, SIGNAL = 3.3; SWISSPROT HIT: P37398, EVALUE 4.50e+00; EST_HUMAN HIT: BE781192.1, EVALUE 1.00e-25
LRFQNDPLSVLKQVKKLEQALKDGSAGLDPQLPGTCYSPHCPPDKAEAGSTLPEN

SEQ ID NO: 35540 - protein, 39 aa, Homo sapiens
  MAP TO AC009310.1; EXPRESSED IN PLACENTA, SIGNAL = 1.3; EXPRESSED IN BONE MARROW, SIGNAL =   1; EXPRESSED IN BRAIN, SIGNAL = 0.96; EXPRESSED IN ADULT LIVER, SIGNAL = 1.2; EXPRESSED IN FETAL LIVER, SIGNAL = 1.1; EXPRESSED IN HELA, SIGNAL = 0.95; EXPRESSED IN HEART, SIGNAL =   1
VEDSFYTPGKQFGRRILNAIASKRESTHLSDAAAIVLEL

SEQ ID NO: 35541 - protein, 23 aa, Homo sapiens
  MAP TO AC009413.1; EXPRESSED IN PLACENTA, SIGNAL = 4.9; EXPRESSED IN BONE MARROW, SIGNAL = 3.1; EXPRESSED IN LUNG, SIGNAL = 3.6; EXPRESSED IN BRAIN, SIGNAL = 2.3; EXPRESSED IN BT474, SIGNAL = 1.7; EXPRESSED IN FETAL LIVER, SIGNAL = 2.4; EXPRESSED IN HEART, SIGNAL = 3.2; EXPRESSED IN HELA, SIGNAL = 2.5; EXPRESSED IN HBL100, SIGNAL = 2.6; EXPRESSED IN ADULT LIVER, SIGNAL = 4.2
AHSANETEVWDETDEEDGAAHVW

SEQ ID NO: 35542 - protein, 29 aa, Homo sapiens
  MAP TO AC009440.1; EXPRESSED IN HELA, SIGNAL = 1.5; EXPRESSED IN PLACENTA, SIGNAL = 2.1; EXPRESSED IN HBL100, SIGNAL = 1.3; EXPRESSED IN HEART, SIGNAL = 1.9; EXPRESSED IN BONE MARROW, SIGNAL = 2.2; EXPRESSED IN BRAIN, SIGNAL = 1.8; EXPRESSED IN LUNG, SIGNAL = 1.4; EXPRESSED IN ADULT LIVER, SIGNAL = 2.1; EXPRESSED IN BT474, SIGNAL = 1.1; EXPRESSED IN FETAL LIVER, SIGNAL =   2
KDSYPSFLICEQNRKASVNRYMLTSNNLL

SEQ ID NO: 35543 - protein, 41 aa, Homo sapiens
  MAP TO AC009415.1; EXPRESSED IN LUNG, SIGNAL = 1.3; EXPRESSED IN BRAIN, SIGNAL = 1.2; EXPRESSED IN ADULT LIVER, SIGNAL = 1.6; EXPRESSED IN PLACENTA, SIGNAL = 1.5; EXPRESSED IN HBL100, SIGNAL = 0.99; EXPRESSED IN HELA, SIGNAL =   2; EXPRESSED IN BONE MARROW, SIGNAL = 1.5; EXPRESSED IN BT474, SIGNAL =   1; EXPRESSED IN FETAL LIVER, SIGNAL = 1.2; EXPRESSED IN HEART, SIGNAL = 1.1; EST_HUMAN HIT: AW995263.1, EVALUE 3.00e-06
SHISVSSGLLSGALFSLFGEVMFSWMVLMLVDVLWCLSIEE

SEQ ID NO: 35544 - protein, 30 aa, Homo sapiens
  MAP TO AC009476.2; EXPRESSED IN FETAL LIVER, SIGNAL =  14; EXPRESSED IN ADULT LIVER, SIGNAL = 3.8; EXPRESSED IN HELA, SIGNAL = 4.1; EXPRESSED IN BONE MARROW, SIGNAL = 6.1; EXPRESSED IN LUNG, SIGNAL = 2.1; EXPRESSED IN BRAIN, SIGNAL = 7.5; EXPRESSED IN BT474, SIGNAL = 1.5; EXPRESSED IN PLACENTA, SIGNAL =   7; EXPRESSED IN HEART, SIGNAL = 3.2; EXPRESSED IN HBL100, SIGNAL = 2.8
VLDLVFSEGGIVLSFRNLERMVLILETHVS

SEQ ID NO: 35545 - protein, 107 aa, Homo sapiens
  MAP TO AC010106.1; EXPRESSED IN FETAL LIVER, SIGNAL =   1; EXPRESSED IN HBL100, SIGNAL = 1.1; EXPRESSED IN HELA, SIGNAL = 1.5; EXPRESSED IN HEART, SIGNAL = 0.93; EXPRESSED IN BONE MARROW, SIGNAL = 1.6; EXPRESSED IN ADULT LIVER, SIGNAL = 1.9; EXPRESSED IN PLACENTA, SIGNAL = 1.9; EXPRESSED IN BRAIN, SIGNAL = 1.5; SWISSPROT HIT: P19028, EVALUE 2.00e-05; EST_HUMAN HIT: AW340174.1, EVALUE 1.00e-31
NHGSRNQGVELEVATLTITPSDPLTTYLLPVSVTLCSAGLEVLVSEGGMLPPGNIAMIQLNWKLRLPPGHFALLLPLHQQPKKGGTVLAGMIDSDYQDSISLLLCNR

SEQ ID NO: 35546 - protein, 23 aa, Homo sapiens [sequence omitted]

SEQ ID NO: 35547 - protein, 33 aa, Homo sapiens; identical to SEQ ID NO: 34438
  MAP TO AC010092.1; EXPRESSED IN PLACENTA, SIGNAL = 1.5; EXPRESSED IN BONE MARROW, SIGNAL = 1.5; EXPRESSED IN LUNG, SIGNAL = 1.1; EXPRESSED IN BRAIN, SIGNAL = 1.6; EXPRESSED IN FETAL LIVER, SIGNAL = 2.6; EXPRESSED IN BT474, SIGNAL = 1.2; EXPRESSED IN HEART, SIGNAL = 1.5; EXPRESSED IN HELA, SIGNAL = 1.4; EXPRESSED IN HBL100, SIGNAL = 1.1; EXPRESSED IN ADULT LIVER, SIGNAL = 1.5; EST_HUMAN HIT: BE614823.1, EVALUE 8.80e-01; SWISSPROT HIT: Q11131, EVALUE 9.50e-01

SEQ ID NO: 35548 - protein, 72 aa, Homo sapiens
  MAP TO AC010102.1; EXPRESSED IN BRAIN, SIGNAL = 2.9; EXPRESSED IN BONE MARROW, SIGNAL =   3; EXPRESSED IN LUNG, SIGNAL = 1.1; EXPRESSED IN BT474, SIGNAL = 2.1; EXPRESSED IN ADULT LIVER, SIGNAL = 2.3; EXPRESSED IN FETAL LIVER, SIGNAL =   2; EXPRESSED IN HELA, SIGNAL =   2; EXPRESSED IN PLACENTA, SIGNAL = 2.5; EXPRESSED IN HBL100, SIGNAL = 4.8; EXPRESSED IN HEART, SIGNAL = 2.3
GEEEEGERRRRTKRRRRKRRRKGEGGRKRRRRRRRKGKREGGRRRRRKRRARRKRKGRRRRRMGSRRGRRKR

SEQ ID NO: 35549 - protein, 22 aa, Homo sapiens
  MAP TO AC010898.1; EXPRESSED IN PLACENTA, SIGNAL = 1.2; EXPRESSED IN HEART, SIGNAL = 1.1; EXPRESSED IN ADULT LIVER, SIGNAL = 0.98
VILSHSGQSQNMLRCLLKPKGI

SEQ ID NO: 35550 - protein, 86 aa, Homo sapiens
  MAP TO AC010903.1; EXPRESSED IN ADULT LIVER, SIGNAL = 4.9; EXPRESSED IN BT474, SIGNAL = 1.8; EXPRESSED IN FETAL LIVER, SIGNAL = 1.6; EXPRESSED IN PLACENTA, SIGNAL = 5.3; EXPRESSED IN HELA, SIGNAL = 4.3; EXPRESSED IN HBL100, SIGNAL = 2.1; EXPRESSED IN HEART, SIGNAL = 1.9; EXPRESSED IN BONE MARROW, SIGNAL = 1.8; EXPRESSED IN LUNG, SIGNAL = 1.4; EXPRESSED IN BRAIN, SIGNAL = 1.8; SWISSPROT HIT: P19028, EVALUE 1.00e-06; EST_HUMAN HIT: BF508546.1, EVALUE 3.00e-30
DTTAKFLLHVPAALHSAGVDVLVPEGGMLPPGGTTTIPLNWKLRLPPGHFGLLIPLSQQAKKRVTVLAGVIDLDCQDEISLLLYNR

SEQ ID NO: 35551 - protein, 34 aa, Homo sapiens
  MAP TO AC010966.1; EXPRESSED IN HEART, SIGNAL = 4.6; EXPRESSED IN BRAIN, SIGNAL = 3.4; EXPRESSED IN BONE MARROW, SIGNAL = 3.3; EXPRESSED IN LUNG, SIGNAL = 2.7; EXPRESSED IN BT474, SIGNAL = 2.8; EXPRESSED IN ADULT LIVER, SIGNAL = 4.2; EXPRESSED IN FETAL LIVER, SIGNAL = 4.6; EXPRESSED IN HELA, SIGNAL = 4.2; EXPRESSED IN PLACENTA, SIGNAL = 4.9; EXPRESSED IN HBL100, SIGNAL = 3.9; EST_HUMAN HIT: BE731155.1, EVALUE 6.00e-08
  unsure 20
TVLTQEAIITVKGISLGSYXGKFNGQYDIIQCKE

SEQ ID NO: 35552 - protein, 60 aa, Homo sapiens
  MAP TO AL080313.13; EXPRESSED IN FETAL LIVER, SIGNAL = 1.2; EXPRESSED IN HEART, SIGNAL = 1.1; EXPRESSED IN BONE MARROW, SIGNAL = 0.95; EXPRESSED IN BRAIN, SIGNAL = 0.96; EST_HUMAN HIT: AA398099.1, EVALUE 2.00e-25; SWISSPROT HIT: Q50315, EVALUE 2.00e+00
NGIGCTSGPDPSPAEELPREEQAFLPSPLVSSYRTLKPTQDCVENCFPFEDANKNKIIST

SEQ ID NO: 35553 - protein, 75 aa, Homo sapiens
  MAP TO AC011348.1; EXPRESSED IN BONE MARROW, SIGNAL = 1.2; EXPRESSED IN BRAIN, SIGNAL = 1.2; EXPRESSED IN FETAL LIVER, SIGNAL = 1.1; EXPRESSED IN ADULT LIVER, SIGNAL = 0.98; EXPRESSED IN HEART, SIGNAL =   1; EST_HUMAN HIT: BE177385.1, EVALUE 2.70e-01; SWISSPROT HIT: P37631, EVALUE 5.40e+00
GKCGFDCSIQSGATTGLGCYFLGAHGNVFFGLRALVLLVGPEDKGFLLEDSGPVQGTAQVNPTRPAIKETGKGHP

SEQ ID NO: 35554 - protein, 59 aa, Homo sapiens; identical to SEQ ID NO: 34642
  MAP TO AC011343.1; EXPRESSED IN PLACENTA, SIGNAL = 1.1; EXPRESSED IN BONE MARROW, SIGNAL = 2.6; EXPRESSED IN FETAL LIVER, SIGNAL = 1.7; EXPRESSED IN ADULT LIVER, SIGNAL = 1.8; EXPRESSED IN HBL100, SIGNAL = 0.94; EXPRESSED IN HELA, SIGNAL = 1.2; EXPRESSED IN HEART, SIGNAL = 1.1; EXPRESSED IN BRAIN, SIGNAL = 1.8; EST_HUMAN HIT: AV746822.1, EVALUE 2.00e-06; SWISSPROT HIT: P34056, EVALUE 1.70e-01

SEQ ID NO: 35555 - protein, 75 aa, Homo sapiens
  MAP TO AL109953.6; EXPRESSED IN BONE MARROW, SIGNAL = 1.9; EXPRESSED IN LUNG, SIGNAL = 1.5; EXPRESSED IN ADULT LIVER, SIGNAL = 2.5; EXPRESSED IN BT474, SIGNAL = 3.5; EXPRESSED IN FETAL LIVER, SIGNAL =  21; EXPRESSED IN PLACENTA, SIGNAL = 2.2; EXPRESSED IN HBL100, SIGNAL = 3.7; EXPRESSED IN HELA, SIGNAL = 3.4; EXPRESSED IN HEART, SIGNAL =   2; EXPRESSED IN BRAIN, SIGNAL = 2.4; EST_HUMAN HIT: AI817324.1, EVALUE 4.00e-22; SWISSPROT HIT: P51578, EVALUE 2.50e+00
TQKIQDIEAKQNIEEKMVAPSYTSFSIYRPITKEKSSLRWAGKKFEEIPTAHIRASYNNTQIQVISATNQPLAHT

SEQ ID NO: 35556 - protein, 93 aa, Homo sapiens
  MAP TO AL117192.1; EXPRESSED IN HEART, SIGNAL = 5.1; EXPRESSED IN LUNG, SIGNAL = 4.8; EXPRESSED IN BRAIN, SIGNAL = 5.1; EXPRESSED IN ADULT LIVER, SIGNAL = 4.1; EXPRESSED IN PLACENTA, SIGNAL = 6.8; EXPRESSED IN HBL100, SIGNAL = 5.8; EXPRESSED IN HELA, SIGNAL = 6.3; EXPRESSED IN BONE MARROW, SIGNAL = 6.4; EXPRESSED IN BT474, SIGNAL = 4.2; EXPRESSED IN FETAL LIVER, SIGNAL = 4.5; EST_HUMAN HIT: BE407642.1, EVALUE 2.50e-02; SWISSPROT HIT: P34682, EVALUE 2.60e+00
RALPTPTCSPPGAPPWARVAPSWKAWSPASRASVQWKDQEVAAENCIPSGGGIPHAPPQPLGKIKQPVGAHFSLGNSCRAKAPTTSIPQEASS

SEQ ID NO: 35557 - protein, 56 aa, Homo sapiens
  MAP TO AL121766.1; EXPRESSED IN BONE MARROW, SIGNAL = 1.3; EXPRESSED IN LUNG, SIGNAL = 4.8; EXPRESSED IN FETAL LIVER, SIGNAL =   1; EXPRESSED IN ADULT LIVER, SIGNAL = 1.6; EXPRESSED IN HBL100, SIGNAL = 0.92; EXPRESSED IN PLACENTA, SIGNAL = 1.1; EXPRESSED IN HEART, SIGNAL = 1.1; EXPRESSED IN BRAIN, SIGNAL = 1.1; EST_HUMAN HIT: AV732114.1, EVALUE 6.00e-05; SWISSPROT HIT: P07202, EVALUE 2.00e+00
VLDPSFESTTVTPGSWMFLLAFFPSWTLCRSCLLWFECVPHSSCVGNLMTNATVVR

SEQ ID NO: 35558 - protein, 20 aa, Homo sapiens
  MAP TO AL121766.1; EXPRESSED IN BONE MARROW, SIGNAL = 1.3; EXPRESSED IN LUNG, SIGNAL = 4.8; EXPRESSED IN FETAL LIVER, SIGNAL =   1; EXPRESSED IN ADULT LIVER, SIGNAL = 1.6; EXPRESSED IN HBL100, SIGNAL = 0.92; EXPRESSED IN PLACENTA, SIGNAL = 1.1; EXPRESSED IN HEART, SIGNAL = 1.1; EXPRESSED IN BRAIN, SIGNAL = 1.1
NFCTESMMGRMPAETSNFQG

SEQ ID NO: 35559 - protein, 54 aa, Homo sapiens
  MAP TO AF191252.1; EXPRESSED IN PLACENTA, SIGNAL = 3.3; EXPRESSED IN BONE MARROW, SIGNAL = 3.1; EXPRESSED IN BRAIN, SIGNAL = 1.8; EXPRESSED IN FETAL LIVER, SIGNAL = 2.3; EXPRESSED IN ADULT LIVER, SIGNAL = 2.5; EXPRESSED IN HEART, SIGNAL = 2.7; EXPRESSED IN HELA, SIGNAL =   2; EXPRESSED IN HBL100, SIGNAL =   2; EXPRESSED IN LUNG, SIGNAL = 2.2; EST_HUMAN HIT: BF063211.1, EVALUE 2.00e-25
RLGLPMLPAILKRRLETSLTLVTVEGLPIRLAKRCSLLSKHCIGQQWVHVWNYS

SEQ ID NO: 35560 - protein, 51 aa, Homo sapiens
  MAP TO AF191252.1; EXPRESSED IN PLACENTA, SIGNAL = 3.3; EXPRESSED IN BONE MARROW, SIGNAL = 3.1; EXPRESSED IN BRAIN, SIGNAL = 1.8; EXPRESSED IN FETAL LIVER, SIGNAL = 2.3; EXPRESSED IN ADULT LIVER, SIGNAL = 2.5; EXPRESSED IN HEART, SIGNAL = 2.7; EXPRESSED IN HELA, SIGNAL =   2; EXPRESSED IN HBL100, SIGNAL =   2; EXPRESSED IN LUNG, SIGNAL = 2.2; EST_HUMAN HIT: BF063211.1, EVALUE 1.00e-23; SWISSPROT HIT: Q12558, EVALUE 1.50e+00
SPYVASYSEKAPRDVPDAGHGRRAANTLGQEVLPAEQALHWTAVGACVELL

SEQ ID NO: 35561 - protein, 39 aa, Homo sapiens
  MAP TO AL035448.28; EXPRESSED IN LUNG, SIGNAL = 1.3; EXPRESSED IN BRAIN, SIGNAL = 1.2; EXPRESSED IN BT474, SIGNAL = 1.2; EXPRESSED IN FETAL LIVER, SIGNAL = 0.88; EXPRESSED IN PLACENTA, SIGNAL = 1.2; EXPRESSED IN HELA, SIGNAL = 3.9; EXPRESSED IN HBL100, SIGNAL = 2.1; EXPRESSED IN HEART, SIGNAL = 0.89; EST_HUMAN HIT: H09247.1, EVALUE 3.00e-15; SWISSPROT HIT: O43791, EVALUE 8.20e-02
YVLAVGSSVFHAMFYGELAEDKDEIRIPDVEPAAFLAML

SEQ ID NO: 35562 - protein, 108 aa, Homo sapiens
  MAP TO Z97832.10; EXPRESSED IN BONE MARROW, SIGNAL =   4; EXPRESSED IN FETAL LIVER, SIGNAL = 3.8; EXPRESSED IN HELA, SIGNAL = 4.5; EXPRESSED IN BRAIN, SIGNAL =   4; EXPRESSED IN LUNG, SIGNAL = 2.4; EXPRESSED IN BT474, SIGNAL = 3.1; EXPRESSED IN ADULT LIVER, SIGNAL = 4.3; EXPRESSED IN PLACENTA, SIGNAL = 4.3; EXPRESSED IN HEART, SIGNAL = 4.2; EXPRESSED IN HBL100, SIGNAL = 3.3; EST_HUMAN HIT: BE280697.1, EVALUE 7.00e-20
LWEPDRALPGVGAGNTTCCSYQAFLLLLQVEYLLKKVLSSMSLEVSLGELEELLAQEAQVAQTTGGLSVWQFLELFNSGRCLRGVGRDTLSMAIHEVYQELIQDVLKQ

SEQ ID NO: 35563 - protein, 36 aa, Homo sapiens
  MAP TO Z97832.10; EXPRESSED IN BONE MARROW, SIGNAL =   4; EXPRESSED IN FETAL LIVER, SIGNAL = 3.8; EXPRESSED IN HELA, SIGNAL = 4.5; EXPRESSED IN BRAIN, SIGNAL =   4; EXPRESSED IN LUNG, SIGNAL = 2.4; EXPRESSED IN BT474, SIGNAL = 3.1; EXPRESSED IN ADULT LIVER, SIGNAL = 4.3; EXPRESSED IN PLACENTA, SIGNAL = 4.3; EXPRESSED IN HEART, SIGNAL = 4.2; EXPRESSED IN HBL100, SIGNAL = 3.3; SWISSPROT HIT: Q61473, EVALUE 1.20e+00; EST_HUMAN HIT: BE731159.1, EVALUE 4.00e-04
CWQHHLLQLPGLPSPAPGGIPAEKGTQQHELGGELG

SEQ ID NO: 35564 - protein, 176 aa, Homo sapiens
  MAP TO AL049713.19; EXPRESSED IN HBL100, SIGNAL = 2.3; EXPRESSED IN HEART, SIGNAL = 2.5; EXPRESSED IN LUNG, SIGNAL = 3.4; EXPRESSED IN FETAL LIVER, SIGNAL = 2.1; EXPRESSED IN ADULT LIVER, SIGNAL = 2.5; EXPRESSED IN PLACENTA, SIGNAL = 2.7; EXPRESSED IN HELA, SIGNAL = 3.2; EXPRESSED IN BRAIN, SIGNAL = 1.9; EXPRESSED IN BONE MARROW, SIGNAL = 2.1; EXPRESSED IN BT474, SIGNAL = 2.3; EST_HUMAN HIT: AI076404.1, EVALUE 6.00e-59; SWISSPROT HIT: P47035, EVALUE 1.20e+00
EKMRQKIKEVEEKQPEVKTGFIASFLDFLKSGPKQQFSTLAVRMPNRTRRPGTQMVRTFCPPPLPKPSSTTPTPLVSETGGNSPSDKVDNELKNLEHLSSFSSDEDDPGYSQDAYKSVSTPLTTLDATSDKKKKTGKVLQFRFIIITFFYFSSYSPHFKLFSLKAGLQVHFQDKMY

SEQ ID NO: 35565 - protein, 51 aa, Homo sapiens
  MAP TO AC005948.6; EXPRESSED IN BONE MARROW, SIGNAL = 7.8; EXPRESSED IN HBL100, SIGNAL =  31; EXPRESSED IN HELA, SIGNAL =  11; EXPRESSED IN HEART, SIGNAL = 5.1; EXPRESSED IN LUNG, SIGNAL = 5.4; EXPRESSED IN BRAIN, SIGNAL = 6.7; EXPRESSED IN BT474, SIGNAL =  15; EXPRESSED IN ADULT LIVER, SIGNAL =  13; EXPRESSED IN FETAL LIVER, SIGNAL = 4.1; EXPRESSED IN PLACENTA, SIGNAL =  11; EST_HUMAN HIT: M78590.1, EVALUE 3.00e-17; SWISSPROT HIT: P34400, EVALUE 7.80e+00
MKPWTLAVSVTALKMARLEFVPSDVRMCSEFLPSGGVRGLAGSGVKLQTFQ

SEQ ID NO: 35566 - protein, 235 aa, Homo sapiens
  MAP TO AL096678.8; EXPRESSED IN BRAIN, SIGNAL = 2.3; EXPRESSED IN BONE MARROW, SIGNAL = 1.4; EXPRESSED IN LUNG, SIGNAL = 1.5; EXPRESSED IN BT474, SIGNAL = 3.6; EXPRESSED IN FETAL LIVER, SIGNAL = 1.8; EXPRESSED IN ADULT LIVER, SIGNAL = 1.9; EXPRESSED IN HBL100, SIGNAL = 3.8; EXPRESSED IN HELA, SIGNAL = 3.6; EXPRESSED IN PLACENTA, SIGNAL =   3; EXPRESSED IN HEART, SIGNAL = 2.2; EST_HUMAN HIT: AA429001.1, EVALUE 6.00e-58; SWISSPROT HIT: P97609, EVALUE 3.30e+00
LLRQRMDRLDNLTCHLLKKQAFRPQLPAYESLVQEIHHYVTSIAKAPAVQDLLTRLLQALHIDGPRSAQVAQSLLKEEASWQQSHHQFRKRLSEEYTFYPDAVSPLQASILQLQHGMRLVASELHTSLHSSMVGADRLGTLATALLAFPSVGPTFPTYYAHADTLCSVKSEEVLRGLGKLILKRSGGKELEGKGQKACPTREQLLMNALLYLRSHVLCKGELDQRALQLFRHVCQ

SEQ ID NO: 35567 - protein, 21 aa, Homo sapiens
  MAP TO AL096678.8; EXPRESSED IN BRAIN, SIGNAL = 2.3; EXPRESSED IN BONE MARROW, SIGNAL = 1.4; EXPRESSED IN LUNG, SIGNAL = 1.5; EXPRESSED IN BT474, SIGNAL = 3.6; EXPRESSED IN FETAL LIVER, SIGNAL = 1.8; EXPRESSED IN ADULT LIVER, SIGNAL = 1.9; EXPRESSED IN HBL100, SIGNAL = 3.8; EXPRESSED IN HELA, SIGNAL = 3.6; EXPRESSED IN PLACENTA, SIGNAL =   3; EXPRESSED IN HEART, SIGNAL = 2.2; EST_HUMAN HIT: AA429001.1, EVALUE 3.00e-06
IGGPHLPDLLCSCRHFVLGEV

SEQ ID NO: 35568 - protein, 69 aa, Homo sapiens
  MAP TO AC005095.2; EXPRESSED IN PLACENTA, SIGNAL = 1.9; EXPRESSED IN BRAIN, SIGNAL = 1.1; EXPRESSED IN FETAL LIVER, SIGNAL =   1; EXPRESSED IN HEART, SIGNAL = 1.6; EXPRESSED IN HELA, SIGNAL = 2.3; EXPRESSED IN HBL100, SIGNAL = 2.2; EXPRESSED IN LUNG, SIGNAL = 1.2; EXPRESSED IN BONE MARROW, SIGNAL = 0.93; EXPRESSED IN ADULT LIVER, SIGNAL = 0.99; EXPRESSED IN BT474, SIGNAL = 4.9; EST_HUMAN HIT: BF508520.1, EVALUE 5.00e-35; SWISSPROT HIT: P20488, EVALUE 2.00e-08
LNEASFQPPPGVNICDVNWKDYVLIGDYSSSAQFYVTFAVFVFLYCIAALLLYVGYTSLYLDSRKLPMI

SEQ ID NO: 35569 - protein, 116 aa, Homo sapiens
  MAP TO AL008723.8; EXPRESSED IN PLACENTA, SIGNAL = 1.8; EXPRESSED IN BRAIN, SIGNAL = 1.8; EXPRESSED IN BT474, SIGNAL =   3; EXPRESSED IN FETAL LIVER, SIGNAL = 3.6; EXPRESSED IN HEART, SIGNAL = 2.2; EXPRESSED IN HELA, SIGNAL = 3.2; EXPRESSED IN HBL100, SIGNAL = 3.7; EXPRESSED IN LUNG, SIGNAL = 1.5; EXPRESSED IN BONE MARROW, SIGNAL = 2.2; EXPRESSED IN ADULT LIVER, SIGNAL = 1.1; SWISSPROT HIT: Q62158, EVALUE 8.00e-24; EST_HUMAN HIT: BF347039.1, EVALUE 2.00e-57
DMTLDANTANNFLLISDDLRSVRSGRIRQNRQDLAERFDVSVCILGSPRFTCGRHCWEVDVGTSTEWDLGVCRESVHRKGRIQLTTELGFWTVSLRDGGRLSATTVPLTFLFVDRK

SEQ ID NO: 35570 - protein, 69 aa, Homo sapiens
  MAP TO AL096700.6; EXPRESSED IN BRAIN, SIGNAL = 1.9; EXPRESSED IN BONE MARROW, SIGNAL = 1.9; EXPRESSED IN LUNG, SIGNAL = 0.94; EXPRESSED IN ADULT LIVER, SIGNAL = 1.8; EXPRESSED IN BT474, SIGNAL = 1.1; EXPRESSED IN FETAL LIVER, SIGNAL = 1.9; EXPRESSED IN HBL100, SIGNAL = 1.2; EXPRESSED IN PLACENTA, SIGNAL = 1.8; EXPRESSED IN HELA, SIGNAL = 1.8; EXPRESSED IN HEART, SIGNAL = 1.9; EST_HUMAN HIT: D44816.1, EVALUE 5.00e-35; SWISSPROT HIT: P40421, EVALUE 7.00e-04
LISVEEFRAMWKLFSSHYNVHIDDSQVNKLANIMDLNKDGSIDFNEFLKAFYVVHRYEDLMKPDVTNLG

SEQ ID NO: 35571 - protein, 53 aa, Homo sapiens
  MAP TO AC011506.1; EXPRESSED IN HELA, SIGNAL = 8.6; EXPRESSED IN PLACENTA, SIGNAL = 7.3; EXPRESSED IN HBL100, SIGNAL = 6.1; EXPRESSED IN HEART, SIGNAL = 7.1; EXPRESSED IN BRAIN, SIGNAL = 6.4; EXPRESSED IN BONE MARROW, SIGNAL = 7.5; EXPRESSED IN LUNG, SIGNAL = 7.5; EXPRESSED IN BT474, SIGNAL = 4.2; EXPRESSED IN ADULT LIVER, SIGNAL = 7.6; EXPRESSED IN FETAL LIVER, SIGNAL = 7.6; EST_HUMAN HIT: AA081735.1, EVALUE 9.00e-07
MVTLIHLDVHFLLPLPPLRQKDQPLPFLLLVSLLIVKMTRMKTLIMIHFHLMK

SEQ ID NO: 35572 - protein, 63 aa, Homo sapiens
  MAP TO AC010724.1; EXPRESSED IN BONE MARROW, SIGNAL = 1.4; EXPRESSED IN LUNG, SIGNAL = 1.6; EXPRESSED IN BRAIN, SIGNAL = 1.9; EXPRESSED IN ADULT LIVER, SIGNAL = 1.5; EXPRESSED IN BT474, SIGNAL = 4.1; EXPRESSED IN FETAL LIVER, SIGNAL = 1.3; EXPRESSED IN PLACENTA, SIGNAL = 1.9; EXPRESSED IN HELA, SIGNAL = 4.5; EXPRESSED IN HBL100, SIGNAL = 3.4; EXPRESSED IN HEART, SIGNAL = 1.3; EST_HUMAN HIT: AI950528.1, EVALUE 2.00e-30; SWISSPROT HIT: Q08379, EVALUE 1.00e-18
VAFFNSAGANAQEEQRVCCQPLAHPVASSQKKPEVAAPAPESGGESVFGETHRALQGAMEKLQ

SEQ ID NO: 35573 - protein, 34 aa, Homo sapiens
  MAP TO AC010724.1; EXPRESSED IN BONE MARROW, SIGNAL = 1.4; EXPRESSED IN LUNG, SIGNAL = 1.6; EXPRESSED IN BRAIN, SIGNAL = 1.9; EXPRESSED IN ADULT LIVER, SIGNAL = 1.5; EXPRESSED IN BT474, SIGNAL = 4.1; EXPRESSED IN FETAL LIVER, SIGNAL = 1.3; EXPRESSED IN PLACENTA, SIGNAL = 1.9; EXPRESSED IN HELA, SIGNAL = 4.5; EXPRESSED IN HBL100, SIGNAL = 3.4; EXPRESSED IN HEART, SIGNAL = 1.3; EST_HUMAN HIT: AI950528.1, EVALUE 4.00e-16
WHFSTPLEPMPRRNKGCAASPWLTQWPRPRKSQR

SEQ ID NO: 35574 - protein, 35 aa, Homo sapiens
  MAP TO AL034423.15; EXPRESSED IN PLACENTA, SIGNAL =   3; EXPRESSED IN HBL100, SIGNAL = 4.5; EXPRESSED IN HELA, SIGNAL = 7.3; EXPRESSED IN HEART, SIGNAL = 1.3; EXPRESSED IN BRAIN, SIGNAL = 2.3; EXPRESSED IN BONE MARROW, SIGNAL = 2.1; EXPRESSED IN LUNG, SIGNAL = 3.7; EXPRESSED IN ADULT LIVER, SIGNAL = 2.3; EXPRESSED IN BT474, SIGNAL = 7.7; EXPRESSED IN FETAL LIVER, SIGNAL = 1.6; EST_HUMAN HIT: AU142099.1, EVALUE 2.00e-13; SWISSPROT HIT: P53152, EVALUE 7.20e-01
NSYSIKVVLQELRRLMMSKENMKLPQPPEGQCYSN

SEQ ID NO: 35575 - protein, 111 aa, Homo sapiens
  MAP TO AL035685.13; EXPRESSED IN FETAL LIVER, SIGNAL = 3.1; EXPRESSED IN HEART, SIGNAL = 1.2; EXPRESSED IN BRAIN, SIGNAL = 1.5; EXPRESSED IN BONE MARROW, SIGNAL = 1.1; EXPRESSED IN LUNG, SIGNAL = 2.6; EXPRESSED IN BT474, SIGNAL =   1; EXPRESSED IN ADULT LIVER, SIGNAL = 2.7; EST_HUMAN HIT: AA625212.1, EVALUE 1.00e-13; SWISSPROT HIT: Q14721, EVALUE 5.00e-60
MYHDPLRNRGSAAAAVAGLECATLLDKAVLSPESSIYTTASAKTPPRSPEKHTAIAFNFEAGVHQYIDADTDDEGQLLYSVDSSPPKSLPGSTSPKFSTGTRSEKNHFESS

SEQ ID NO: 35576 - protein, 64 aa, Homo sapiens
  MAP TO NM_006894.1; EXPRESSED IN BONE MARROW, SIGNAL = 1.6; EXPRESSED IN HELA, SIGNAL = 1.8; EXPRESSED IN LUNG, SIGNAL = 1.2; EXPRESSED IN BRAIN, SIGNAL = 1.4; EXPRESSED IN BT474, SIGNAL = 1.2; EXPRESSED IN ADULT LIVER, SIGNAL =   7; EXPRESSED IN FETAL LIVER, SIGNAL = 1.6; EXPRESSED IN PLACENTA, SIGNAL = 2.3; EXPRESSED IN HEART, SIGNAL =   2; EXPRESSED IN HBL100, SIGNAL =   1; EST_HUMAN HIT: AI052149.1, EVALUE 8.00e-30; SWISSPROT HIT: P31513, EVALUE 1.00e-30
YSFAYPFLDESIIKSRNNEIILFKGVFPPLLEKSTIAVIGFVQSLGAAIPTVDLQSRWAAQVIK

SEQ ID NO: 35577 - protein, 50 aa, Homo sapiens
  MAP TO AL033383.24; EXPRESSED IN PLACENTA, SIGNAL = 1.1; EXPRESSED IN HELA, SIGNAL = 3.2; EXPRESSED IN HBL100, SIGNAL = 2.6; EXPRESSED IN HEART, SIGNAL = 1.5; EXPRESSED IN ADULT LIVER, SIGNAL = 2.4; EXPRESSED IN BT474, SIGNAL = 6.4; EXPRESSED IN FETAL LIVER, SIGNAL = 2.4; EST_HUMAN HIT: BE888742.1, EVALUE 2.00e-21; SWISSPROT HIT: O75521, EVALUE 2.00e-22
LSPSLESSSQVEPGTDRKSTGFETLVVTSEDGITKIMFNRPKKKNAINTE

SEQ ID NO: 35578 - protein, 52 aa, Homo sapiens
  MAP TO AC009945.1; EXPRESSED IN PLACENTA, SIGNAL =  16; EXPRESSED IN HBL100, SIGNAL =  54; EXPRESSED IN HEART, SIGNAL =  10; EXPRESSED IN FETAL LIVER, SIGNAL =  11; EXPRESSED IN ADULT LIVER, SIGNAL = 8.3; EXPRESSED IN HELA, SIGNAL =  45; EXPRESSED IN BRAIN, SIGNAL =  12; EXPRESSED IN LUNG, SIGNAL =  33; EXPRESSED IN BONE MARROW, SIGNAL = 7.9; EXPRESSED IN BT474, SIGNAL =  89; SWISSPROT HIT: P08109, EVALUE 5.00e-22; EST_HUMAN HIT: BF212199.1, EVALUE 7.00e-21
VYEGERAMSKDNNLLGKFEFTGIPPEPQGVPQIEVTFDIDANGILSVSAVDK

SEQ ID NO: 35579 - protein, 23 aa, Homo sapiens
  MAP TO AC009945.1; EXPRESSED IN PLACENTA, SIGNAL =  16; EXPRESSED IN HBL100, SIGNAL =  54; EXPRESSED IN HEART, SIGNAL =  10; EXPRESSED IN FETAL LIVER, SIGNAL =  11; EXPRESSED IN ADULT LIVER, SIGNAL = 8.3; EXPRESSED IN HELA, SIGNAL =  45; EXPRESSED IN BRAIN, SIGNAL =  12; EXPRESSED IN LUNG, SIGNAL =  33; EXPRESSED IN BONE MARROW, SIGNAL = 7.9; EXPRESSED IN BT474, SIGNAL =  89; EST_HUMAN HIT: N84162.1, EVALUE 2.00e-04
PVLLSTAETLRIPLASMSKVTSI

SEQ ID NO: 35580 - protein, 64 aa, Homo sapiens; identical to SEQ ID NO: 34711
  MAP TO AP000351.2; EXPRESSED IN HBL100, SIGNAL =  10; EXPRESSED IN HEART, SIGNAL = 8.4; EXPRESSED IN LUNG, SIGNAL =   5; EXPRESSED IN FETAL LIVER, SIGNAL = 3.4; EXPRESSED IN ADULT LIVER, SIGNAL = 4.3; EXPRESSED IN PLACENTA, SIGNAL = 3.6; EXPRESSED IN HELA, SIGNAL = 7.3; EXPRESSED IN BRAIN, SIGNAL = 2.9; EXPRESSED IN BONE MARROW, SIGNAL = 3.9; EXPRESSED IN BT474, SIGNAL =  12; SWISSPROT HIT: P30711, EVALUE 5.00e-33; EST_HUMAN HIT: BF343733.1, EVALUE 6.00e-32

SEQ ID NO: 35581 - protein, 25 aa, Homo sapiens
  MAP TO AC009963.2; EXPRESSED IN BONE MARROW, SIGNAL = 3.3; EXPRESSED IN HELA, SIGNAL =  20; EXPRESSED IN HEART, SIGNAL = 2.2; EXPRESSED IN LUNG, SIGNAL = 5.1; EXPRESSED IN BRAIN, SIGNAL = 2.1; EXPRESSED IN BT474, SIGNAL =  22; EXPRESSED IN ADULT LIVER, SIGNAL = 2.5; EXPRESSED IN FETAL LIVER, SIGNAL =   3; EXPRESSED IN PLACENTA, SIGNAL = 5.1; EXPRESSED IN HBL100, SIGNAL =  21; EST_HUMAN HIT: AA337760.1, EVALUE 2.00e-05
RGSSNSTKAKPRGFLATHTLWSGPY

SEQ ID NO: 35582 - protein, 148 aa, Homo sapiens
  MAP TO AP000501.1; EXPRESSED IN BONE MARROW, SIGNAL = 1.8; EXPRESSED IN FETAL LIVER, SIGNAL = 1.2; EXPRESSED IN HELA, SIGNAL =   4; EXPRESSED IN BRAIN, SIGNAL = 1.2; EXPRESSED IN LUNG, SIGNAL = 6.3; EXPRESSED IN BT474, SIGNAL = 2.9; EXPRESSED IN ADULT LIVER, SIGNAL = 2.3; EXPRESSED IN PLACENTA, SIGNAL = 2.4; EXPRESSED IN HEART, SIGNAL =   1; EXPRESSED IN HBL100, SIGNAL = 2.8; EST_HUMAN HIT: AI347926.1, EVALUE 2.00e-29
KSKPGKKDKERGEIEVDIQFMRNNMTASMFDLSMKDKSRNPFGKLKDKIKGKNKDSGSDTASAIIPSTTPSVDSDDESVVKDKKKKSKIKTLLSKSNLQKTPLSQSMSVLPTSKPEKVLLRPGDFQSQWDEDDNEDESSSASDGEFLP

SEQ ID NO: 35583 - protein, 77 aa, Homo sapiens
  MAP TO AC011297.1; EXPRESSED IN BT474, SIGNAL = 1.5; EXPRESSED IN HBL100, SIGNAL = 0.98; EXPRESSED IN HEART, SIGNAL = 0.88; EXPRESSED IN LUNG, SIGNAL = 1.6; EXPRESSED IN ADULT LIVER, SIGNAL = 2.8; EXPRESSED IN PLACENTA, SIGNAL = 1.3; EXPRESSED IN HELA, SIGNAL = 3.6; EXPRESSED IN BRAIN, SIGNAL = 1.5; EXPRESSED IN BONE MARROW, SIGNAL = 1.2; EST_HUMAN HIT: AI817415.1, EVALUE 3.00e-29; SWISSPROT HIT: O47430, EVALUE 4.50e-01
NCVSFFSWAQVGGSAFLVDGNFICSFDITIFFTWRGDDARLQVFCLYGGTFICISDGFIVELQMSSGYPNRKLIFFW

SEQ ID NO: 35584 - protein, 81 aa, Homo sapiens
  MAP TO AL096700.6; EXPRESSED IN BT474, SIGNAL =  11; EXPRESSED IN HBL100, SIGNAL =  16; EXPRESSED IN HEART, SIGNAL =  10; EXPRESSED IN LUNG, SIGNAL = 9.1; EXPRESSED IN BRAIN, SIGNAL = 4.7; EXPRESSED IN ADULT LIVER, SIGNAL = 5.7; EXPRESSED IN FETAL LIVER, SIGNAL = 5.9; EXPRESSED IN PLACENTA, SIGNAL = 5.5; EXPRESSED IN HELA, SIGNAL = 8.5; EXPRESSED IN BONE MARROW, SIGNAL = 5.2; EST_HUMAN HIT: AW134983.1, EVALUE 8.00e-41; SWISSPROT HIT: P46019, EVALUE 1.00e-32
MTPHEIKFAVHVESVLNRVPQPEYRQLLVEAIMVLTLLSDTEMTSIGGIIHVDQIVQMASQLFLQDQVGVPGSWVGWHLSL

SEQ ID NO: 35585 - protein, 80 aa, Homo sapiens
  MAP TO AL050336.7; EXPRESSED IN BONE MARROW, SIGNAL = 2.1; EXPRESSED IN HBL100, SIGNAL = 1.8; EXPRESSED IN HELA, SIGNAL = 2.1; EXPRESSED IN HEART, SIGNAL = 2.7; EXPRESSED IN BRAIN, SIGNAL = 1.9; EXPRESSED IN LUNG, SIGNAL = 1.6; EXPRESSED IN BT474, SIGNAL = 1.9; EXPRESSED IN ADULT LIVER, SIGNAL = 2.4; EXPRESSED IN FETAL LIVER, SIGNAL = 2.9; EXPRESSED IN PLACENTA, SIGNAL = 2.6; EST_HUMAN HIT: AI625542.1, EVALUE 7.00e-42; SWISSPROT HIT: P75856, EVALUE 4.20e+00
SQCKFLLPEESSHQAQRATLLVHYNLIKVMFNCFPPAWLQAYITKAFRETVTFTAVHSAPMTTYFREGPRLQRETGAFAA

SEQ ID NO: 35586 - protein, 40 aa, Homo sapiens
  MAP TO AL034384.1; EXPRESSED IN BONE MARROW, SIGNAL = 1.3; EXPRESSED IN HBL100, SIGNAL = 1.3; EXPRESSED IN HELA, SIGNAL = 2.1; EXPRESSED IN BRAIN, SIGNAL = 1.1; EXPRESSED IN LUNG, SIGNAL = 4.4; EXPRESSED IN BT474, SIGNAL =   1; EXPRESSED IN ADULT LIVER, SIGNAL = 1.4; EXPRESSED IN FETAL LIVER, SIGNAL = 1.5; EXPRESSED IN PLACENTA, SIGNAL = 1.5; EXPRESSED IN HEART, SIGNAL = 1.8; SWISSPROT HIT: P80440, EVALUE 2.70e+00
ATILNSTALEHSILSGMIQHQLRKFCWMVMLTEILFLTKS

SEQ ID NO: 35587 - protein, 91 aa, Homo sapiens
  MAP TO AL121716.1; EXPRESSED IN BT474, SIGNAL = 8.3; EXPRESSED IN BONE MARROW, SIGNAL = 2.6; EXPRESSED IN LUNG, SIGNAL = 1.7; EXPRESSED IN BRAIN, SIGNAL = 1.1; EXPRESSED IN ADULT LIVER, SIGNAL = 1.4; EXPRESSED IN FETAL LIVER, SIGNAL = 2.8; EXPRESSED IN PLACENTA, SIGNAL = 2.2; EXPRESSED IN HEART, SIGNAL = 2.3; EXPRESSED IN HELA, SIGNAL = 4.7; EXPRESSED IN HBL100, SIGNAL = 8.7; EST_HUMAN HIT: BE707627.1, EVALUE 6.00e-07; SWISSPROT HIT: Q9Y3R5, EVALUE 2.00e-09
CEHVQPPQWLQTLMNACSQASDFSVQSVAISLVMDLVGLTQSVAMVTGENINSVEPAQPLSPNQGRVAVVIRPPLTQGNLRYIAEKTEFFK

SEQ ID NO: 35588 - protein, 35 aa, Homo sapiens
  MAP TO AL109801.5; EXPRESSED IN BRAIN, SIGNAL = 2.8; EXPRESSED IN BT474, SIGNAL =  17; EXPRESSED IN HBL100, SIGNAL =  20; EXPRESSED IN LUNG, SIGNAL = 4.3; EXPRESSED IN BONE MARROW, SIGNAL = 6.1; EXPRESSED IN ADULT LIVER, SIGNAL = 3.6; EXPRESSED IN FETAL LIVER, SIGNAL = 5.2; EXPRESSED IN PLACENTA, SIGNAL = 6.3; EXPRESSED IN HEART, SIGNAL =   3; EXPRESSED IN HELA, SIGNAL =  44; SWISSPROT HIT: P09896, EVALUE 3.00e-16; EST_HUMAN HIT: BF381674.1, EVALUE 4.00e-15
VNVPKTRRTFCKKCGKHQPHKVTQYKKGKDSLYAQ

SEQ ID NO: 35589 - protein, 108 aa, Homo sapiens
  MAP TO AC009962.1; EXPRESSED IN BONE MARROW, SIGNAL = 1.8; EXPRESSED IN LUNG, SIGNAL = 1.7; EXPRESSED IN BRAIN, SIGNAL = 1.9; EXPRESSED IN ADULT LIVER, SIGNAL = 2.4; EXPRESSED IN BT474, SIGNAL = 2.3; EXPRESSED IN FETAL LIVER, SIGNAL = 1.7; EXPRESSED IN PLACENTA, SIGNAL = 3.8; EXPRESSED IN HBL100, SIGNAL = 3.5; EXPRESSED IN HELA, SIGNAL = 7.7; EXPRESSED IN HEART, SIGNAL = 1.8; EST_HUMAN HIT: AA281174.1, EVALUE 6.00e-56; SWISSPROT HIT: P28290, EVALUE 3.00e-55
SGPSHANRRTGVPSTASVGKSKTPLVARKKVFRASVALTPTAPSRTGSVQTPPDLESSEEVDAAEGAPEVVGPKSEVEEGHGKLPSMPAAEEMHKNVEQDELQQVIRE

SEQ ID NO: 35590 - protein, 24 aa, Homo sapiens
  MAP TO AC009962.1; EXPRESSED IN BONE MARROW, SIGNAL = 1.8; EXPRESSED IN LUNG, SIGNAL = 1.7; EXPRESSED IN BRAIN, SIGNAL = 1.9; EXPRESSED IN ADULT LIVER, SIGNAL = 2.4; EXPRESSED IN BT474, SIGNAL = 2.3; EXPRESSED IN FETAL LIVER, SIGNAL = 1.7; EXPRESSED IN PLACENTA, SIGNAL = 3.8; EXPRESSED IN HBL100, SIGNAL = 3.5; EXPRESSED IN HELA, SIGNAL = 7.7; EXPRESSED IN HEART, SIGNAL = 1.8
LVPLMLTEELEYLLLPQWANPKPH

SEQ ID NO: 35591 - protein, 66 aa, Homo sapiens
  MAP TO AC007115.1; EXPRESSED IN BT474, SIGNAL = 1.1; EXPRESSED IN FETAL LIVER, SIGNAL = 1.9; EXPRESSED IN ADULT LIVER, SIGNAL = 3.1; EXPRESSED IN HEART, SIGNAL = 7.4; EXPRESSED IN PLACENTA, SIGNAL =  12; EXPRESSED IN LUNG, SIGNAL = 7.4; EST_HUMAN HIT: AA358927.1, EVALUE 3.00e-34; SWISSPROT HIT: P07585, EVALUE 3.00e-35
IILLLLAQVSWAGPFQQRGLFDFMLEDEASGIGPEVPDDRDFEPSLGPVCPFRCQCHLRVVQCSDL

SEQ ID NO: 35592 - protein, 24 aa, Homo sapiens
  MAP TO AC007115.1; EXPRESSED IN BT474, SIGNAL = 1.1; EXPRESSED IN FETAL LIVER, SIGNAL = 1.9; EXPRESSED IN ADULT LIVER, SIGNAL = 3.1; EXPRESSED IN HEART, SIGNAL = 7.4; EXPRESSED IN PLACENTA, SIGNAL =  12; EXPRESSED IN LUNG, SIGNAL = 7.4; EST_HUMAN HIT: BE163050.1, EVALUE 1.00e-07
SSSFCLHKFPGLDRFNREAYLTLC

SEQ ID NO: 35593 - protein, 52 aa, Homo sapiens
  MAP TO AC008080.1; EXPRESSED IN BT474, SIGNAL = 2.3; EXPRESSED IN FETAL LIVER, SIGNAL = 1.5; EXPRESSED IN HEART, SIGNAL = 1.5; EXPRESSED IN LUNG, SIGNAL = 1.4; EXPRESSED IN BRAIN, SIGNAL = 2.1; EXPRESSED IN ADULT LIVER, SIGNAL = 1.5; EXPRESSED IN PLACENTA, SIGNAL = 1.6; EXPRESSED IN HELA, SIGNAL = 1.9; EXPRESSED IN HBL100, SIGNAL = 1.6; EXPRESSED IN BONE MARROW, SIGNAL = 1.6; EST_HUMAN HIT: AA230303.1, EVALUE 1.00e-18; SWISSPROT HIT: P19158, EVALUE 4.00e-01
NYSCAWSLCFESLSDTIRVSGAKEDGIHYSAVSTDVNLKQQHAYLGKRNVVL

SEQ ID NO: 35594 - protein, 108 aa, Homo sapiens
  MAP TO AC008173.1; EXPRESSED IN BONE MARROW, SIGNAL = 1.7; EXPRESSED IN HELA, SIGNAL = 5.3; EXPRESSED IN BRAIN, SIGNAL = 1.5; EXPRESSED IN LUNG, SIGNAL = 3.2; EXPRESSED IN BT474, SIGNAL = 1.5; EXPRESSED IN ADULT LIVER, SIGNAL = 4.8; EXPRESSED IN FETAL LIVER, SIGNAL = 1.1; EXPRESSED IN PLACENTA, SIGNAL = 4.1; EXPRESSED IN HEART, SIGNAL = 1.2; EXPRESSED IN HBL100, SIGNAL = 2.1; EST_HUMAN HIT: AA971603.1, EVALUE 2.00e-29; SWISSPROT HIT: P33459, EVALUE 2.00e-03
MIHGSRNQGEEVEVAPLTINPTNPLRKFLLPVPATLHSAGLEVLVPEGGTLPPGDTTTNPLNWKLRLPPGHFGLLLHLRQKTKKGVTVLDGVIDPDYQDEISLLLHNR

SEQ ID NO: 35595 - protein, 27 aa, Homo sapiens
  MAP TO AC009474.1; EXPRESSED IN BONE MARROW, SIGNAL = 2.4; EXPRESSED IN BT474, SIGNAL = 1.4; EXPRESSED IN HBL100, SIGNAL = 2.1; EXPRESSED IN BRAIN, SIGNAL = 2.1; EXPRESSED IN LUNG, SIGNAL = 1.8; EXPRESSED IN ADULT LIVER, SIGNAL = 4.3; EXPRESSED IN FETAL LIVER, SIGNAL = 1.9; EXPRESSED IN PLACENTA, SIGNAL = 3.2; EXPRESSED IN HEART, SIGNAL = 1.5; EXPRESSED IN HELA, SIGNAL = 3.5; EST_HUMAN HIT: BF035327.1, EVALUE 7.00e-03
LINQPLPALKFSSAVSSPLSAFTELKR

SEQ ID NO: 35596 - protein, 36 aa, Homo sapiens
  MAP TO AL008582.11; EXPRESSED IN PLACENTA, SIGNAL =   1; EXPRESSED IN FETAL LIVER, SIGNAL = 1.1; EXPRESSED IN HEART, SIGNAL =   1; EXPRESSED IN HELA, SIGNAL = 3.5; EXPRESSED IN HBL100, SIGNAL = 3.5; EXPRESSED IN BRAIN, SIGNAL = 0.91; EXPRESSED IN ADULT LIVER, SIGNAL = 1.1; EXPRESSED IN BT474, SIGNAL = 2.4; EST_HUMAN HIT: AI086725.1, EVALUE 2.00e-07
TDCEATPSEKHVLAAALVAAVLEEPLVCGGKLSEQE

SEQ ID NO: 35597 - protein, 28 aa, Homo sapiens
  MAP TO AL008582.11; EXPRESSED IN PLACENTA, SIGNAL =   1; EXPRESSED IN FETAL LIVER, SIGNAL = 1.1; EXPRESSED IN HEART, SIGNAL =   1; EXPRESSED IN HELA, SIGNAL = 3.5; EXPRESSED IN HBL100, SIGNAL = 3.5; EXPRESSED IN BRAIN, SIGNAL = 0.91; EXPRESSED IN ADULT LIVER, SIGNAL = 1.1; EXPRESSED IN BT474, SIGNAL = 2.4; EST_HUMAN HIT: AI623538.1, EVALUE 4.00e-09
LLLEELTVKRRPVKNMFLQQLWWQLSLR

SEQ ID NO: 35598 - protein, 57 aa, Homo sapiens
  MAP TO AC010684.1; EXPRESSED IN BT474, SIGNAL = 5.5; EXPRESSED IN PLACENTA, SIGNAL = 1.1; EXPRESSED IN BONE MARROW, SIGNAL = 1.3; EXPRESSED IN ADULT LIVER, SIGNAL = 1.2; EXPRESSED IN FETAL LIVER, SIGNAL = 1.6; EXPRESSED IN HEART, SIGNAL =   1; EXPRESSED IN HELA, SIGNAL =   6; EXPRESSED IN HBL100, SIGNAL = 5.1; EXPRESSED IN BRAIN, SIGNAL = 1.3; EXPRESSED IN LUNG, SIGNAL = 1.9; EST_HUMAN HIT: BE080106.1, EVALUE 1.00e-31; SWISSPROT HIT: P25358, EVALUE 6.00e-04
IIRVLWWYYFSKLIEFMDTFFFILRKNNHQITVLHVYHHASMLNIWWFVMNWVPCGH

SEQ ID NO: 35599 - protein, 55 aa, Homo sapiens
  MAP TO AC010891.1; EXPRESSED IN ADULT LIVER, SIGNAL =   1; EXPRESSED IN HEART, SIGNAL =   1; EXPRESSED IN PLACENTA, SIGNAL = 1.4; EXPRESSED IN BRAIN, SIGNAL = 1.2; EXPRESSED IN BONE MARROW, SIGNAL = 1.3; EXPRESSED IN FETAL LIVER, SIGNAL =   1
DHETICGFHREDRREDTADTSPRRSPFPPRCRCFLQGNGDIYCDARQSSQSDQVR

SEQ ID NO: 35600 - protein, 258 aa, Homo sapiens
  MAP TO AC010680.2; EXPRESSED IN HEART, SIGNAL = 4.3; EXPRESSED IN LUNG, SIGNAL = 1.2; EST_HUMAN HIT: BF701545.1, EVALUE 2.00e-06; SWISSPROT HIT: P11799, EVALUE 2.00e-06
MCMYLVTSAKSVTEEVTIIIEDVDPQMANLKMELRDALCAIIYEEIDILTAEGPRIQQGAKTSLQEEMDSFSGSQKVEPITEPEVESKYLISTEEVSYFNVQSRVKYLDATPVTKGVASAVVSDEKQDESLKPSEEKEESSSESGTEEVATVKIQEAEGGLIKEDGPMIHTPLVDTVSEEGDIVHLTTSITNAKEVNWYFENKLVPSDEKFKCLQDQNTYTLVIDKVNTEDHQGEYVCEALNDSGKTATSAKLTVVKR

SEQ ID NO: 35601 - protein, 17 aa, Homo sapiens
  MAP TO AC010680.2; EXPRESSED IN HEART, SIGNAL = 4.3; EXPRESSED IN LUNG, SIGNAL = 1.2
HLKKSRYCSKKSILTTW

SEQ ID NO: 35602 - protein, 25 aa, Homo sapiens
  MAP TO AC010722.1; EXPRESSED IN HBL100, SIGNAL = 1.5; EXPRESSED IN HELA, SIGNAL = 2.5; EXPRESSED IN HEART, SIGNAL = 2.2; EXPRESSED IN ADULT LIVER, SIGNAL = 2.9; EXPRESSED IN PLACENTA, SIGNAL = 2.2; EXPRESSED IN BRAIN, SIGNAL = 1.9; EXPRESSED IN LUNG, SIGNAL = 1.5; EXPRESSED IN BONE MARROW, SIGNAL = 2.5; EXPRESSED IN FETAL LIVER, SIGNAL = 2.1; EXPRESSED IN BT474, SIGNAL = 0.98; EST_HUMAN HIT: AA601366.1, EVALUE 1.00e-04
NSKKFKIMWRRNSKFYQRNLTKRLK

SEQ ID NO: 35603 - protein, 50 aa, Homo sapiens
  MAP TO AC011302.1; EXPRESSED IN BRAIN, SIGNAL = 2.7; EXPRESSED IN BONE MARROW, SIGNAL = 3.3; EXPRESSED IN LUNG, SIGNAL = 2.7; EXPRESSED IN BT474, SIGNAL = 3.1; EXPRESSED IN FETAL LIVER, SIGNAL = 3.3; EXPRESSED IN ADULT LIVER, SIGNAL = 3.8; EXPRESSED IN HELA, SIGNAL = 2.5; EXPRESSED IN PLACENTA, SIGNAL = 3.1; EXPRESSED IN HBL100, SIGNAL = 2.6; EXPRESSED IN HEART, SIGNAL =   4
VTPVEDFVVVLLLVFNLGRFHHHIHLEHHAVITNLISSYTQVISGVFVCH

SEQ ID NO: 35604 - protein, 34 aa, Homo sapiens [sequence omitted]

SEQ ID NO: 35605 - protein, 46 aa, Homo sapiens
  MAP TO AL109855.6; EXPRESSED IN HELA, SIGNAL =   1; EXPRESSED IN PLACENTA, SIGNAL = 3.1; EXPRESSED IN HBL100, SIGNAL = 2.4; EXPRESSED IN HEART, SIGNAL = 1.5; EXPRESSED IN BONE MARROW, SIGNAL = 1.1; EXPRESSED IN LUNG, SIGNAL = 1.8; EXPRESSED IN BRAIN, SIGNAL = 1.3; EXPRESSED IN FETAL LIVER, SIGNAL = 1.5; EXPRESSED IN ADULT LIVER, SIGNAL = 1.7; EST_HUMAN HIT: BE272452.1, EVALUE 4.00e-11; SWISSPROT HIT: P21397, EVALUE 5.00e-12
NEHVDYVDVGGAYVGPTQNRILRLSKELGIETYKVNVSERLVQYVK

SEQ ID NO: 35606 - protein, 58 aa, Homo sapiens
  MAP TO AL121748.1; EXPRESSED IN BT474, SIGNAL = 1.1; EXPRESSED IN HBL100, SIGNAL = 1.8; EXPRESSED IN HEART, SIGNAL = 2.3; EXPRESSED IN LUNG, SIGNAL = 3.4; EXPRESSED IN ADULT LIVER, SIGNAL = 2.7; EXPRESSED IN FETAL LIVER, SIGNAL = 3.1; EXPRESSED IN PLACENTA, SIGNAL = 2.6; EXPRESSED IN HELA, SIGNAL = 2.2; EXPRESSED IN BRAIN, SIGNAL = 2.7; EXPRESSED IN BONE MARROW, SIGNAL = 2.8; EST_HUMAN HIT: AI050922.1, EVALUE 1.00e-10; SWISSPROT HIT: P39188, EVALUE 2.00e-09
TGSHYVAQAGLELLGSSDPPGLASQVAGTRGVHHAAWLKTYISETPVVSRTEHSAWHK

SEQ ID NO: 35607 - protein, 118 aa, Homo sapiens
  MAP TO AL049634.8; EXPRESSED IN PLACENTA, SIGNAL =   3; EXPRESSED IN HELA, SIGNAL = 2.4; EXPRESSED IN HEART, SIGNAL = 2.9; EXPRESSED IN BRAIN, SIGNAL = 3.2; EXPRESSED IN BT474, SIGNAL = 1.8; EXPRESSED IN HBL100, SIGNAL = 2.3; EXPRESSED IN LUNG, SIGNAL = 2.6; EXPRESSED IN BONE MARROW, SIGNAL = 3.8; EXPRESSED IN ADULT LIVER, SIGNAL = 3.1; EXPRESSED IN FETAL LIVER, SIGNAL = 2.8; EST_HUMAN HIT: AI357578.1, EVALUE 9.00e-54; SWISSPROT HIT: P06311, EVALUE 7.00e-05
VAGEDELQVIQPEKSVSVAAGESATLRCAMTSLIPVGPIMWFRGAGAGRELIYNQKEGHFPRVTTVSELTKRNNLDFSISISNITPADAGTYYCVKFRKGSPDDVEFKSGAGTELSVR

SEQ ID NO: 35608 - protein, 62 aa, Homo sapiens
  MAP TO AL117672.1; EXPRESSED IN HBL100, SIGNAL = 0.97; EXPRESSED IN HELA, SIGNAL = 1.1; EXPRESSED IN PLACENTA, SIGNAL = 1.2; EXPRESSED IN HEART, SIGNAL = 1.7; EXPRESSED IN BRAIN, SIGNAL = 1.7; EXPRESSED IN BONE MARROW, SIGNAL = 1.2; EXPRESSED IN LUNG, SIGNAL = 0.94; EXPRESSED IN BT474, SIGNAL = 1.8; EXPRESSED IN FETAL LIVER, SIGNAL = 1.2; EXPRESSED IN ADULT LIVER, SIGNAL = 1.4; EST_HUMAN HIT: BF237701.1, EVALUE 5.90e+00; SWISSPROT HIT: Q56310, EVALUE 4.40e+00
LSDEESSMPLAGMKKYADEKSERASSSEKNESHSATKSALIQKLMQDIQHQDNYEAIWEKIE

SEQ ID NO: 35609 - protein, 42 aa, Homo sapiens
  MAP TO AP000122.1; EXPRESSED IN ADULT LIVER, SIGNAL = 2.8; EXPRESSED IN PLACENTA, SIGNAL = 2.7; EXPRESSED IN BRAIN, SIGNAL = 2.1; EXPRESSED IN FETAL LIVER, SIGNAL = 2.3; EXPRESSED IN BT474, SIGNAL = 1.4; EXPRESSED IN HEART, SIGNAL = 2.5; EXPRESSED IN HELA, SIGNAL = 2.3; EXPRESSED IN HBL100, SIGNAL = 1.9; EXPRESSED IN LUNG, SIGNAL = 1.9; EXPRESSED IN BONE MARROW, SIGNAL = 3.2; EST_HUMAN HIT: AI538087.1, EVALUE 2.80e+00
MVAAEVVNTEDPKMKNYGGKLRKVVLSHSQSGAGDPPVQAKT

SEQ ID NO: 35610 - protein, 90 aa, Homo sapiens
  MAP TO AP000313.1; EXPRESSED IN PLACENTA, SIGNAL = 4.5; EXPRESSED IN HBL100, SIGNAL = 3.4; EXPRESSED IN HELA, SIGNAL = 4.1; EXPRESSED IN HEART, SIGNAL = 3.8; EXPRESSED IN BONE MARROW, SIGNAL = 4.3; EXPRESSED IN LUNG, SIGNAL = 3.8; EXPRESSED IN BRAIN, SIGNAL = 4.8; EXPRESSED IN ADULT LIVER, SIGNAL = 4.5; EXPRESSED IN BT474, SIGNAL = 2.8; EXPRESSED IN FETAL LIVER, SIGNAL = 6.6; EST_HUMAN HIT: BE222239.1, EVALUE 1.00e-05; SWISSPROT HIT: P37246, EVALUE 2.70e+00
GKCGHTDAGDVHAQRKDPAEERGLRRNQPCCHLDLGLCIFRTMRKYMLFKRLGLWPLLWSPEQISAPARRKRPPGKSMSSRVRLPLPFIN

SEQ ID NO: 35611 - protein, 81 aa, Homo sapiens
  MAP TO NM_007104.1; EXPRESSED IN BONE MARROW, SIGNAL = 1.9; EXPRESSED IN LUNG, SIGNAL = 1.7; EXPRESSED IN PLACENTA, SIGNAL = 3.6; EXPRESSED IN BRAIN, SIGNAL = 2.4; EXPRESSED IN ADULT LIVER, SIGNAL = 2.7; EXPRESSED IN FETAL LIVER, SIGNAL = 1.9; EXPRESSED IN BT474, SIGNAL =   3; EXPRESSED IN HEART, SIGNAL = 1.8; EXPRESSED IN HELA, SIGNAL = 3.9; EXPRESSED IN HBL100, SIGNAL =   4; EST_HUMAN HIT: AU131142.1, EVALUE 5.00e-39; SWISSPROT HIT: Q03181, EVALUE 6.00e-40
VTLLKYGVHEAIFAMLASIVNKDGLLVANGSGFVTREFLRSLRKPFSDIIEPKFEFAVKFNALELDDSDLALFIAAIILCG

SEQ ID NO: 35612 - protein, 1325 aa, Homo sapiens
  MAP TO AP000511.1; EXPRESSED IN BT474, SIGNAL =   1; EXPRESSED IN FETAL LIVER, SIGNAL = 0.98; EXPRESSED IN HBL100, SIGNAL = 2.4; EXPRESSED IN HEART, SIGNAL = 0.98; EXPRESSED IN BRAIN, SIGNAL = 1.5; EXPRESSED IN BONE MARROW, SIGNAL = 1.2; EXPRESSED IN LUNG, SIGNAL = 1.5; EXPRESSED IN ADULT LIVER, SIGNAL = 1.1; EST_HUMAN HIT: AW867076.1, EVALUE 1.00e-103; EST_HUMAN HIT: AW867076.1, EVALUE 1.00e-103; SWISSPROT HIT: Q02817, EVALUE 5.00e-63
ATTFQEYQKTGELSTSDHIFPLTPGLVYSIPFDHIVLHSGQRPPELPKSTEIHEQKRHCNTTRHSKPTDKPTGNSKTIDHKSSTDNHEAPPTSEENSSNQGKDPMIRNQRSVDPADSTTTHKESAGKKHITPAPKSKINCRKSTTGKSTVTRKSDKTGRPLEKSMSTLDKTSTSSHKTTTSFHNSGNSQTKQKSTSFPEKITAASKTTYKTTGTPEESEKTEDSRTTVASDKLLTKTTKNIQETISANELTQSLAEPTEHGGRTANENNTPSPAEPTENRERTANENTTLSPAEPTENRERTANENTAPFPAGPTENREMTANENTTLFPAEPTEHGERTANENTTPSPAEPTEHGERTANENTTPSPAEPTEHGERTPFANDKTTSSSAESTEHGERTPLANENTTPSPAEPTENRERTANENTTPSPAGPTENRETTANEKTTLSPVEPTENRETTANEKTTPSPAEPTENGQRTPFANEKTTSSSAEPTEHGERTPLANENTTPSPAEPTENRERTANEKTTPSPAEPTENGDRTPLANEKTTPSLAEPTENGQRTPFANEKTTSSSAEPTEHEERTPLANENTTPSPAEPTENRERTANENTTPSPAGPTENREMTANEKTTLFPAEPTENRERTANEKTTSSPAEPTENGQRTPFANEKTTSSPAEPTEHGERTPLANENTTLSPAEPTENRERTANEKTTPFPAEPTENRERTANENTTPSPAQPTENGDRTPLANEKTTPSLAEPTENGKRTPFANEKTTSSSAEPTEHAERTPLANENTTSSPAEPTENRERTANEKTTQFPAEPTENRESTANEKTTPFPAEPTENREWTANENTTLSPAEPTEHEEMTPLANEKTTLSPAEPTENGERTPFTNEKTTPSSAEPTEHGERTPLANEITTPSRAEPTEHGERIANEKATPSPAKPTEHGETTVNEDTTPSSAEPTENGERTPLANENTTTSPTESTEHGERTANEKTTPSPAEPTEHGERTPSANEKTIPSPAKPTEHEEMTPSANENTTPSPVKPTEHGEKTTLANEKITLSPEGPTEHGAKTTSANEKITPSLAKPTEHGERTTSPNDKITSSAAESTEHRDRATSANVITPAPAEPIKHAKRTTLAHEKMTQVTEKSTEHPEKTTSTTEKTTRTPEKPTLYSEKTICTKGKNTPVPEKPTENLGNTTLTTETIKAPVKSTENPEKTAAVTKTIKPSVKVTGDKSLTTTSSHLNKTEVTHQVPTGSFTLITSRTKLSSITSEATGNESHPYLNKDGSQKGIHAGQMGENDSFPAWAIVIVVLVAVILLLVFLGLIFLVRDRCAPQ

SEQ ID NO: 35613 - protein, 175 aa, Homo sapiens
  MAP TO AL050329.9; EXPRESSED IN BRAIN, SIGNAL =   3; EXPRESSED IN BONE MARROW, SIGNAL = 3.7; EXPRESSED IN LUNG, SIGNAL =   6; EXPRESSED IN BT474, SIGNAL = 6.5; EXPRESSED IN FETAL LIVER, SIGNAL = 5.1; EXPRESSED IN ADULT LIVER, SIGNAL = 3.8; EXPRESSED IN HELA, SIGNAL =  18; EXPRESSED IN PLACENTA, SIGNAL =   4; EXPRESSED IN HBL100, SIGNAL =   5; EXPRESSED IN HEART, SIGNAL =   2; EST_HUMAN HIT: AI925684.1, EVALUE 3.00e-71; SWISSPROT HIT: P41512, EVALUE 3.90e-02
QPQRMMGPLSQASRYIGPQNFYQVKDIRRPERRHSDPWGRQDQQQLDRPFNRGKGDRQRFYSDSHHLKRERHEKEWEQESERHRRRDRSQDKDRDRKSREEGHKDKERARLSHGDRGTDGKASRDSRNVDKKPDKPKSEDYEKDKEREKSKHREGEKDRDRYHKDRDHTDRTKSK

SEQ ID NO: 35614 - protein, 62 aa, Homo sapiens
  MAP TO Z98044.10; EXPRESSED IN PLACENTA, SIGNAL = 1.4; EXPRESSED IN HBL100, SIGNAL =   2; EXPRESSED IN HEART, SIGNAL = 1.4; EXPRESSED IN BONE MARROW, SIGNAL = 2.3; EXPRESSED IN BRAIN, SIGNAL =   2; EXPRESSED IN LUNG, SIGNAL = 2.6; EXPRESSED IN ADULT LIVER, SIGNAL = 2.4; EXPRESSED IN BT474, SIGNAL = 1.5; EXPRESSED IN FETAL LIVER, SIGNAL = 1.7; EXPRESSED IN HELA, SIGNAL = 1.6; SWISSPROT HIT: O95479, EVALUE 7.00e-30; EST_HUMAN HIT: AW503925.1, EVALUE 6.00e-29
MELPHNVSSAEAVLRHKLQVFQALRGLQRGSAVVGQYQSYSEQVRRELQKPDSFHSLTPTFA

SEQ ID NO: 35615 - protein, 31 aa, Homo sapiens
  MAP TO Z98044.10; EXPRESSED IN PLACENTA, SIGNAL = 1.4; EXPRESSED IN HBL100, SIGNAL =   2; EXPRESSED IN HEART, SIGNAL = 1.4; EXPRESSED IN BONE MARROW, SIGNAL = 2.3; EXPRESSED IN BRAIN, SIGNAL =   2; EXPRESSED IN LUNG, SIGNAL = 2.6; EXPRESSED IN ADULT LIVER, SIGNAL = 2.4; EXPRESSED IN BT474, SIGNAL = 1.5; EXPRESSED IN FETAL LIVER, SIGNAL = 1.7; EXPRESSED IN HELA, SIGNAL = 1.6; EST_HUMAN HIT: AW503925.1, EVALUE 1.40e-02
LDPPHFSTSLHQAAPASMRSTVSFATSSRTI

SEQ ID NO: 35616 - protein, 266 aa, Homo sapiens
  MAP TO AF162757.1; EXPRESSED IN BONE MARROW, SIGNAL =  13; EXPRESSED IN FETAL LIVER, SIGNAL =  10; EXPRESSED IN HELA, SIGNAL =  16; EXPRESSED IN HEART, SIGNAL = 7.6; EXPRESSED IN BRAIN, SIGNAL =   8; EXPRESSED IN LUNG, SIGNAL = 6.3; EXPRESSED IN BT474, SIGNAL =  19; EXPRESSED IN ADULT LIVER, SIGNAL = 7.6; EXPRESSED IN PLACENTA, SIGNAL =  11; EXPRESSED IN HBL100, SIGNAL =  21; SWISSPROT HIT: P49321, EVALUE 1.00e-91; EST_HUMAN HIT: AU118082.1, EVALUE 8.00e-66
ALFHSLVCHLKGTMATESTATAAIAAELVSANKIEDVPAPSTSADKVERIENGVLGNTLDGVHVEEEEGEKTEDESLVENNDSIDEEARKELREQVYDSMGEKEEAKKTEDKSFAKPETDKEQDCEMEKGGREDMDISESAEEPQEKVDLTLGWLTEISEGAKGGGAPEGPNEAEVTSGKPEQEVPDVEEEKSVSETDVQKECREKGGWEKHREVIVSIEEKPKEVSEEQPVVILEKQGTAVEVAAESLDPTVKPVDVGGDEPEEK

SEQ ID NO: 35617 - protein, 60 aa, Homo sapiens
  MAP TO AF162757.1; EXPRESSED IN BONE MARROW, SIGNAL =  13; EXPRESSED IN FETAL LIVER, SIGNAL =  10; EXPRESSED IN HELA, SIGNAL =  16; EXPRESSED IN HEART, SIGNAL = 7.6; EXPRESSED IN BRAIN, SIGNAL =   8; EXPRESSED IN LUNG, SIGNAL = 6.3; EXPRESSED IN BT474, SIGNAL =  19; EXPRESSED IN ADULT LIVER, SIGNAL = 7.6; EXPRESSED IN PLACENTA, SIGNAL =  11; EXPRESSED IN HBL100, SIGNAL =  21; SWISSPROT HIT: P17502, EVALUE 3.90e-01; EST_HUMAN HIT: BE730659.1, EVALUE 7.00e-28
RRLGEAQRGNCEHRGEAKRSFRRAACGDSRKAGHCSGGSSRVFRPNSQASRCGWGRARGE

SEQ ID NO: 35618 - protein, 47 aa, Homo sapiens
  MAP TO AF162757.1; EXPRESSED IN BONE MARROW, SIGNAL =  13; EXPRESSED IN FETAL LIVER, SIGNAL =  10; EXPRESSED IN HELA, SIGNAL =  16; EXPRESSED IN HEART, SIGNAL = 7.6; EXPRESSED IN BRAIN, SIGNAL =   8; EXPRESSED IN LUNG, SIGNAL = 6.3; EXPRESSED IN BT474, SIGNAL =  19; EXPRESSED IN ADULT LIVER, SIGNAL = 7.6; EXPRESSED IN PLACENTA, SIGNAL =  11; EXPRESSED IN HBL100, SIGNAL =  21; SWISSPROT HIT: Q61554, EVALUE 7.90e+00; EST_HUMAN HIT: BF686812.1, EVALUE 3.00e-18
VSLWHPILPVFLTGSIPFTGLPPQGNDGHGVHSHCRHRCGAGFCQQN

SEQ ID NO: 35619 - protein, 49 aa, Homo sapiens
  MAP TO Z98752.9; EXPRESSED IN BT474, SIGNAL = 1.3; EXPRESSED IN HBL100, SIGNAL = 1.2; EXPRESSED IN HEART, SIGNAL = 0.92; EXPRESSED IN ADULT LIVER, SIGNAL = 1.5; EXPRESSED IN FETAL LIVER, SIGNAL = 1.1; EXPRESSED IN HELA, SIGNAL =   1; EXPRESSED IN BRAIN, SIGNAL =   2; EXPRESSED IN BONE MARROW, SIGNAL = 1.9; SWISSPROT HIT: Q03376, EVALUE 6.00e+00; EST_HUMAN HIT: BE394474.1, EVALUE 2.00e-13
DHPQNPPEDPNQDPPEDDSTCQCQACGPHQAAGPDLGSSNDGCPQLFQE

SEQ ID NO: 35620 - protein, 112 aa, Homo sapiens
  MAP TO AC007028.2; EXPRESSED IN BT474, SIGNAL = 2.9; EXPRESSED IN PLACENTA, SIGNAL = 1.8; EXPRESSED IN ADULT LIVER, SIGNAL = 1.7; EXPRESSED IN FETAL LIVER, SIGNAL =   2; EXPRESSED IN HEART, SIGNAL = 1.7; EXPRESSED IN HELA, SIGNAL =   2; EXPRESSED IN HBL100, SIGNAL = 3.8; EXPRESSED IN BRAIN, SIGNAL =   3; EXPRESSED IN LUNG, SIGNAL = 0.98; EXPRESSED IN BONE MARROW, SIGNAL = 2.7; EST_HUMAN HIT: AW471357.1, EVALUE 1.00e-04; SWISSPROT HIT: Q89814, EVALUE 5.90e+00
FMVPGALPRLCSKIRAGAKSRKKPRSGSRHFGACKSRGLFLGTPRVQGRLRLQPAVCGAGLLPASWSERPVSSAAVWVAAATPGEGRAPSCSLTSKSTESEPTALIRAAGAA

SEQ ID NO: 35621 - protein, 58 aa, Homo sapiens
  MAP TO AC007089.2; EXPRESSED IN PLACENTA, SIGNAL = 2.6; EXPRESSED IN HBL100, SIGNAL =   2; EXPRESSED IN HELA, SIGNAL = 2.3; EXPRESSED IN HEART, SIGNAL = 2.9; EXPRESSED IN BONE MARROW, SIGNAL = 2.5; EXPRESSED IN LUNG, SIGNAL = 1.6; EXPRESSED IN BRAIN, SIGNAL = 3.3; EXPRESSED IN ADULT LIVER, SIGNAL =   3; EXPRESSED IN BT474, SIGNAL = 1.5; EXPRESSED IN FETAL LIVER, SIGNAL = 2.8; EST_HUMAN HIT: BF129244.1, EVALUE 1.20e+00
EPLSVLLEVLLQELLGMVVGFIWQLACDPPNLSGTKGMAVSADPGPETCVPASRKEVT

SEQ ID NO: 35622 - protein, 47 aa, Homo sapiens
  MAP TO AC007283.3; EXPRESSED IN HBL100, SIGNAL = 6.3; EXPRESSED IN HELA, SIGNAL = 7.6; EXPRESSED IN HEART, SIGNAL = 8.8; EXPRESSED IN LUNG, SIGNAL = 4.9; EXPRESSED IN ADULT LIVER, SIGNAL = 6.9; EXPRESSED IN PLACENTA, SIGNAL = 7.1; EXPRESSED IN BRAIN, SIGNAL =  10; EXPRESSED IN BONE MARROW, SIGNAL = 9.4; EXPRESSED IN FETAL LIVER, SIGNAL = 7.4; EXPRESSED IN BT474, SIGNAL = 3.7; SWISSPROT HIT: O64214, EVALUE 2.70e+00
MNKSKQDNGSFLVEVIFQVRLNDKKETDTGRFGNREQVQSKMQGLRA

SEQ ID NO: 35623 - protein, 68 aa, Homo sapiens
  MAP TO AC007375.4; EXPRESSED IN ADULT LIVER, SIGNAL =   3; EXPRESSED IN BT474, SIGNAL = 2.4; EXPRESSED IN FETAL LIVER, SIGNAL = 7.3; EXPRESSED IN PLACENTA, SIGNAL = 4.5; EXPRESSED IN HBL100, SIGNAL =   2; EXPRESSED IN HELA, SIGNAL = 2.2; EXPRESSED IN HEART, SIGNAL = 2.9; EXPRESSED IN BRAIN, SIGNAL = 4.5; EXPRESSED IN BONE MARROW, SIGNAL = 3.1; EXPRESSED IN LUNG, SIGNAL = 1.9; EST_HUMAN HIT: BE262761.1, EVALUE 3.70e-02; SWISSPROT HIT: P30098, EVALUE 1.30e+00
IYIVFQYHLIIFVLIICIPSLGIILPINYTGSVLGRQSSAGPGAAAGPERQPGKPVRAGVEGLDIYFN

SEQ ID NO: 35624 - protein, 62 aa, Homo sapiens
  MAP TO AC007375.4; EXPRESSED IN ADULT LIVER, SIGNAL =   3; EXPRESSED IN BT474, SIGNAL = 2.4; EXPRESSED IN FETAL LIVER, SIGNAL = 7.3; EXPRESSED IN PLACENTA, SIGNAL = 4.5; EXPRESSED IN HBL100, SIGNAL =   2; EXPRESSED IN HELA, SIGNAL = 2.2; EXPRESSED IN HEART, SIGNAL = 2.9; EXPRESSED IN BRAIN, SIGNAL = 4.5; EXPRESSED IN BONE MARROW, SIGNAL = 3.1; EXPRESSED IN LUNG, SIGNAL = 1.9; SWISSPROT HIT: P40395, EVALUE 7.50e+00
STSCSSTTSSSLCSSSVSPPWASFCPSTILDLFWVGKAQLALGQQLDLRGSQASQSGLGLRV

SEQ ID NO: 35625 - protein, 63 aa, Homo sapiens
  MAP TO AC007378.2; EXPRESSED IN BRAIN, SIGNAL = 1.4; EXPRESSED IN BONE MARROW, SIGNAL =   1; EXPRESSED IN LUNG, SIGNAL = 1.5; EXPRESSED IN BT474, SIGNAL = 1.1; EXPRESSED IN FETAL LIVER, SIGNAL = 0.89; EXPRESSED IN ADULT LIVER, SIGNAL =   2; EXPRESSED IN HELA, SIGNAL =  11; EXPRESSED IN PLACENTA, SIGNAL = 9.7; EXPRESSED IN HBL100, SIGNAL = 3.6; EXPRESSED IN HEART, SIGNAL = 1.2; EST_HUMAN HIT: BF334221.1, EVALUE 5.00e-36; SWISSPROT HIT: P35442, EVALUE 2.00e-12
LSTPSICHAPGGEYFVEGETWNIDSCTQCTCHSGRVLCETEVCPPLLCQNPSRTQDSCCPQCT

SEQ ID NO: 35626 - protein, 64 aa, Homo sapiens
  MAP TO AC007378.2; EXPRESSED IN BRAIN, SIGNAL = 1.4; EXPRESSED IN BONE MARROW, SIGNAL =   1; EXPRESSED IN LUNG, SIGNAL = 1.5; EXPRESSED IN BT474, SIGNAL = 1.1; EXPRESSED IN FETAL LIVER, SIGNAL = 0.89; EXPRESSED IN ADULT LIVER, SIGNAL =   2; EXPRESSED IN HELA, SIGNAL =  11; EXPRESSED IN PLACENTA, SIGNAL = 9.7; EXPRESSED IN HBL100, SIGNAL = 3.6; EXPRESSED IN HEART, SIGNAL = 1.2; EST_HUMAN HIT: BF334221.1, EVALUE 5.00e-33; SWISSPROT HIT: P34132, EVALUE 2.50e+00
SSVLPPFATPLEENTLWKEKRGTLTPVLSAPATADGCCVRQRCAHRCSARTPHAPRIPAAHSVQ

SEQ ID NO: 35627 - protein, 23 aa, Homo sapiens
  MAP TO AC007599.1; EXPRESSED IN BT474, SIGNAL = 0.96; EXPRESSED IN FETAL LIVER, SIGNAL = 1.1; EXPRESSED IN PLACENTA, SIGNAL = 1.5; EXPRESSED IN HELA, SIGNAL = 1.6; EXPRESSED IN HBL100, SIGNAL = 1.2; EXPRESSED IN HEART, SIGNAL = 1.2; EXPRESSED IN BONE MARROW, SIGNAL = 1.6; EXPRESSED IN BRAIN, SIGNAL = 1.3; EXPRESSED IN ADULT LIVER, SIGNAL = 2.2; EST_HUMAN HIT: AI884398.1, EVALUE 1.90e+00
LLQSTGLIPLGSCYQAGSHACQG

SEQ ID NO: 35628 - protein, 51 aa, Homo sapiens
  MAP TO AC007721.7; EXPRESSED IN HELA, SIGNAL =  11; EXPRESSED IN PLACENTA, SIGNAL = 1.7; EXPRESSED IN HBL100, SIGNAL = 1.5; EXPRESSED IN HEART, SIGNAL = 1.7; EXPRESSED IN BONE MARROW, SIGNAL = 1.6; EXPRESSED IN BRAIN, SIGNAL = 1.2; EXPRESSED IN LUNG, SIGNAL = 1.2; EXPRESSED IN ADULT LIVER, SIGNAL = 1.6; EXPRESSED IN BT474, SIGNAL = 4.3; EXPRESSED IN FETAL LIVER, SIGNAL = 1.7; EST_HUMAN HIT: BF086814.1, EVALUE 9.00e-23; SWISSPROT HIT: Q13619, EVALUE 7.00e-24
TLQSLACGKARVLIKSPKGKEVEDGDKFIFNGEFKHKLFRIKINQIQMKET

SEQ ID NO: 35629 - protein, 42 aa, Homo sapiens
  MAP TO AC009492.1; EXPRESSED IN PLACENTA, SIGNAL = 1.5; EXPRESSED IN HBL100, SIGNAL = 1.4; EXPRESSED IN BONE MARROW, SIGNAL = 1.7; EXPRESSED IN FETAL LIVER, SIGNAL = 1.3; EXPRESSED IN HELA, SIGNAL = 2.4; EXPRESSED IN HEART, SIGNAL =   1; EXPRESSED IN BRAIN, SIGNAL = 2.6; EXPRESSED IN LUNG, SIGNAL = 5.3; EXPRESSED IN BT474, SIGNAL = 0.98; EXPRESSED IN ADULT LIVER, SIGNAL =   2
VGDDEDGVDGEDDDGGDDGDGDDDDDDNGDDDGGDDDDDVGD

SEQ ID NO: 35630 - protein, 52 aa, Homo sapiens
  MAP TO AC009185.2; EXPRESSED IN PLACENTA, SIGNAL = 2.6; EXPRESSED IN HBL100, SIGNAL = 5.1; EXPRESSED IN HEART, SIGNAL = 2.2; EXPRESSED IN BONE MARROW, SIGNAL = 2.5; EXPRESSED IN FETAL LIVER, SIGNAL = 2.5; EXPRESSED IN HELA, SIGNAL = 4.3; EXPRESSED IN BRAIN, SIGNAL = 2.1; EXPRESSED IN LUNG, SIGNAL = 2.9; EXPRESSED IN BT474, SIGNAL =  19; EXPRESSED IN ADULT LIVER, SIGNAL = 1.8; EST_HUMAN HIT: AA354109.1, EVALUE 8.00e-25; SWISSPROT HIT: Q08881, EVALUE 2.00e-26
VLMWEVFSEGKIPYENRSNSEVVEDISTGFRLYKPRLASTHVYQIMNHCWKE

SEQ ID NO: 35631 - protein, 54 aa, Homo sapiens
  MAP TO AC009294.6; EXPRESSED IN PLACENTA, SIGNAL = 0.93; EXPRESSED IN HEART, SIGNAL =   1; EXPRESSED IN LUNG, SIGNAL = 7.1; EXPRESSED IN BRAIN, SIGNAL = 1.1; EXPRESSED IN BONE MARROW, SIGNAL = 1.1; EXPRESSED IN FETAL LIVER, SIGNAL = 1.1; SWISSPROT HIT: P54678, EVALUE 5.90e+00
HQWIGFTLVNSDESLFALVARIVKATHVARLCSIEHHRHRGWVDGVALDLLKKE

SEQ ID NO: 35632 - protein, 17 aa, Homo sapiens
  MAP TO AC009294.6; EXPRESSED IN PLACENTA, SIGNAL = 0.93; EXPRESSED IN HEART, SIGNAL =   1; EXPRESSED IN LUNG, SIGNAL = 7.1; EXPRESSED IN BRAIN, SIGNAL = 1.1; EXPRESSED IN BONE MARROW, SIGNAL = 1.1; EXPRESSED IN FETAL LIVER, SIGNAL = 1.1
SFFSRSRATPSTQPLCL

SEQ ID NO: 35633 - protein, 55 aa, Homo sapiens
  MAP TO AC008123.9; EXPRESSED IN BT474, SIGNAL =   8; EXPRESSED IN ADULT LIVER, SIGNAL = 5.2; EXPRESSED IN HEART, SIGNAL =   3; EXPRESSED IN PLACENTA, SIGNAL = 5.2; EXPRESSED IN BONE MARROW, SIGNAL =   4; EXPRESSED IN FETAL LIVER, SIGNAL = 3.4; EXPRESSED IN HELA, SIGNAL =  13; EXPRESSED IN HBL100, SIGNAL =  10; EXPRESSED IN BRAIN, SIGNAL = 3.8; EXPRESSED IN LUNG, SIGNAL = 4.5; SWISSPROT HIT: P04929, EVALUE 1.90e-02; EST_HUMAN HIT: BE902222.1, EVALUE 8.00e-07
HCNHHILHHYPHTRHCGFHILVHHLHSPHYCCRQAHHHCCPPSPPHPLYPPLHPP

SEQ ID NO: 35634 - protein, 77 aa, Homo sapiens
  MAP TO AC010165.1; EXPRESSED IN HBL100, SIGNAL = 3.2; EXPRESSED IN HELA, SIGNAL =   2; EXPRESSED IN BRAIN, SIGNAL = 4.8; EXPRESSED IN LUNG, SIGNAL = 4.4; EXPRESSED IN HEART, SIGNAL = 2.9; EXPRESSED IN PLACENTA, SIGNAL = 2.6; EXPRESSED IN BONE MARROW, SIGNAL = 2.6; EXPRESSED IN ADULT LIVER, SIGNAL = 1.5; EXPRESSED IN BT474, SIGNAL = 2.8; EXPRESSED IN FETAL LIVER, SIGNAL = 2.2
GYLTFWLPLATLEGEEEEEKEEEGGGGGGEEEEEEEEEEEEEEEEEEGGGGGGGGGGEGGGGGGTFLGYTKYTNTKI

SEQ ID NO: 35635 - protein, 44 aa, Homo sapiens
  MAP TO AC009946.1; EXPRESSED IN BONE MARROW, SIGNAL = 2.2; EXPRESSED IN LUNG, SIGNAL = 3.8; EXPRESSED IN ADULT LIVER, SIGNAL = 1.5; EXPRESSED IN FETAL LIVER, SIGNAL = 1.7; EXPRESSED IN BT474, SIGNAL =   1; EXPRESSED IN HELA, SIGNAL = 0.96; EXPRESSED IN PLACENTA, SIGNAL = 2.9; EXPRESSED IN HEART, SIGNAL = 1.3; EXPRESSED IN HBL100, SIGNAL =   1; EXPRESSED IN BRAIN, SIGNAL = 1.8; EST_HUMAN HIT: AI522172.1, EVALUE 1.10e+00; SWISSPROT HIT: P50746, EVALUE 2.10e+00
MEAEKSKIKVPADLESDEDTLLCRQLSSHSTLIQWIAEHEDASC

SEQ ID NO: 35636 - protein, 22 aa, Homo sapiens
  MAP TO AC009946.1; EXPRESSED IN BONE MARROW, SIGNAL = 2.2; EXPRESSED IN LUNG, SIGNAL = 3.8; EXPRESSED IN ADULT LIVER, SIGNAL = 1.5; EXPRESSED IN FETAL LIVER, SIGNAL = 1.7; EXPRESSED IN BT474, SIGNAL =   1; EXPRESSED IN HELA, SIGNAL = 0.96; EXPRESSED IN PLACENTA, SIGNAL = 2.9; EXPRESSED IN HEART, SIGNAL = 1.3; EXPRESSED IN HBL100, SIGNAL =   1; EXPRESSED IN BRAIN, SIGNAL = 1.8; EST_HUMAN HIT: AW452898.1, EVALUE 5.00e-03
SNNIYFSQLWRLRSPRSRCQLI

SEQ ID NO: 35637 - protein, 40 aa, Homo sapiens
  MAP TO AC010135.1; EXPRESSED IN BT474, SIGNAL = 1.8; EXPRESSED IN FETAL LIVER, SIGNAL = 3.3; EXPRESSED IN HELA, SIGNAL =   5; EXPRESSED IN PLACENTA, SIGNAL = 3.7; EXPRESSED IN HBL100, SIGNAL = 2.2; EXPRESSED IN BRAIN, SIGNAL = 3.6; EXPRESSED IN LUNG, SIGNAL = 2.2; EXPRESSED IN HEART, SIGNAL = 3.3; EXPRESSED IN BONE MARROW, SIGNAL = 3.9; EXPRESSED IN ADULT LIVER, SIGNAL = 5.5
MATYCHQELLILLERASQNCLRQLLVEDNLKLMGVDLTSS

SEQ ID NO: 35638 - protein, 150 aa, Homo sapiens
  MAP TO AC010141.1; EXPRESSED IN ADULT LIVER, SIGNAL = 0.94; EXPRESSED IN FETAL LIVER, SIGNAL = 0.93; EXPRESSED IN HEART, SIGNAL = 0.94; EXPRESSED IN LUNG, SIGNAL = 1.3; EXPRESSED IN BRAIN, SIGNAL = 1.1; EST_HUMAN HIT: AA704457.1, EVALUE 5.00e-08; SWISSPROT HIT: P10263, EVALUE 9.00e-08
TMNVKDWDKIGPDLKGAQQEGHDSPFSTWSVWSAIKTALEPFHTEKEEEKFQGDIKKFNNQESDNQHSQPSQSSLKKGEKWEGVHTNLQKLMKETVPPTAPLEEGAEQPPPPQPYEFLERETETWLATPIVSRPTIDYGKGKLQQPNSQL

SEQ ID NO: 35639 - protein, 45 aa, Homo sapiens
  MAP TO AC009884.2; EXPRESSED IN HBL100, SIGNAL = 1.3e+02; EXPRESSED IN HEART, SIGNAL = 0.85; EXPRESSED IN LUNG, SIGNAL = 0.93; EXPRESSED IN BRAIN, SIGNAL = 1.4; EXPRESSED IN BONE MARROW, SIGNAL = 1.6; EXPRESSED IN ADULT LIVER, SIGNAL = 1.4; EXPRESSED IN FETAL LIVER, SIGNAL = 1.3; EXPRESSED IN HELA, SIGNAL =   1
AAIPAPGPRAPSSGSPASGLCSACPYCTGLRATHLNSGSATVRSK

SEQ ID NO: 35640 - protein, 28 aa, Homo sapiens
  MAP TO AC010680.2; EXPRESSED IN HEART, SIGNAL = 2.3
CLKLLKKLSQKRKFPRHQSKNQKPPQLQ

SEQ ID NO: 35641 - protein, 67 aa, Homo sapiens
  MAP TO AC011406.1; EXPRESSED IN BONE MARROW, SIGNAL = 1.2; EXPRESSED IN FETAL LIVER, SIGNAL = 1.3; EXPRESSED IN HBL100, SIGNAL = 0.94; EXPRESSED IN HEART, SIGNAL =   1; EST_HUMAN HIT: W29086.1, EVALUE 4.00e-10; SWISSPROT HIT: P16499, EVALUE 1.00e-16
QTQDGDRAGQEVGTQKHFMFPNHLTLFLIQQAELPDADKYEINKFHFSDLPLTELELVKCGIQMYYE

SEQ ID NO: 35642 - protein, 35 aa, Homo sapiens
  MAP TO AC011406.1; EXPRESSED IN BONE MARROW, SIGNAL = 1.2; EXPRESSED IN FETAL LIVER, SIGNAL = 1.3; EXPRESSED IN HBL100, SIGNAL = 0.94; EXPRESSED IN HEART, SIGNAL =   1; EST_HUMAN HIT: AW003605.1, EVALUE 1.30e+00
ACSPSLCSDPSSRPRMGTGLDRRWAPRNTSCFLIT

SEQ ID NO: 35643 - protein, 29 aa, Homo sapiens
  MAP TO AC011416.1; EXPRESSED IN HBL100, SIGNAL = 0.98; EXPRESSED IN PLACENTA, SIGNAL = 1.1; EXPRESSED IN LUNG, SIGNAL = 2.2; EXPRESSED IN BRAIN, SIGNAL = 1.3; EXPRESSED IN BONE MARROW, SIGNAL = 0.99; EXPRESSED IN FETAL LIVER, SIGNAL = 0.96; EXPRESSED IN ADULT LIVER, SIGNAL = 1.1; EXPRESSED IN BT474, SIGNAL = 1.4; EXPRESSED IN HEART, SIGNAL = 0.96
PNTPGDTEKTKEEREAEEQERSNVHTIPP

SEQ ID NO: 35644 - protein, 42 aa, Homo sapiens
  MAP TO AC011460.1; EXPRESSED IN FETAL LIVER, SIGNAL = 2.8; EXPRESSED IN BT474, SIGNAL = 2.5; EXPRESSED IN HBL100, SIGNAL = 1.3; EXPRESSED IN HELA, SIGNAL = 1.4; EXPRESSED IN HEART, SIGNAL = 0.98; EXPRESSED IN PLACENTA, SIGNAL = 1.2; EXPRESSED IN LUNG, SIGNAL = 1.1; EXPRESSED IN BRAIN, SIGNAL = 1.1; EXPRESSED IN BONE MARROW, SIGNAL = 1.2; SWISSPROT HIT: Q61967, EVALUE 2.00e-10; EST_HUMAN HIT: AU135269.1, EVALUE 2.00e-17
ESITLEDVAVDFTWEEWQLLGAAQKDLYRDVMLENYSNLVAV

SEQ ID NO: 35645 - protein, 50 aa, Homo sapiens
  MAP TO AC011192.1; EXPRESSED IN HEART, SIGNAL = 1.4; EXPRESSED IN PLACENTA, SIGNAL = 1.6; EXPRESSED IN BRAIN, SIGNAL = 1.2; EXPRESSED IN BONE MARROW, SIGNAL = 1.1; EXPRESSED IN LUNG, SIGNAL = 7.5; EXPRESSED IN FETAL LIVER, SIGNAL = 9.7; EXPRESSED IN ADULT LIVER, SIGNAL = 0.91
VGLWAVLVLVPVDICFIKSGTIFVIIVNLPLARSVLAEGMHLRYVRRMEC

SEQ ID NO: 35646 - protein, 68 aa, Homo sapiens
  MAP TO AC011201.1; EXPRESSED IN FETAL LIVER, SIGNAL = 3.3; EXPRESSED IN BT474, SIGNAL = 2.5; EXPRESSED IN HBL100, SIGNAL = 4.7; EXPRESSED IN HELA, SIGNAL = 3.4; EXPRESSED IN HEART, SIGNAL = 3.6; EXPRESSED IN PLACENTA, SIGNAL = 4.2; EXPRESSED IN LUNG, SIGNAL = 7.2; EXPRESSED IN BONE MARROW, SIGNAL =   7; EXPRESSED IN ADULT LIVER, SIGNAL = 4.1; EXPRESSED IN BRAIN, SIGNAL = 3.4
SNPAAHSSLLLCKRGKRLKNKLDPGKFFKNASFRVSSHAMQCHLERMALLTAPALTPAHQSYPTLGPG

SEQ ID NO: 35647 - protein, 38 aa, Homo sapiens
  MAP TO AL096869.1; EXPRESSED IN ADULT LIVER, SIGNAL = 1.1; EXPRESSED IN BT474, SIGNAL = 1.4; EXPRESSED IN FETAL LIVER, SIGNAL =   1; EXPRESSED IN PLACENTA, SIGNAL = 1.1; EXPRESSED IN HBL100, SIGNAL = 1.3; EXPRESSED IN HELA, SIGNAL = 1.1; EXPRESSED IN HEART, SIGNAL = 2.8; EXPRESSED IN BRAIN, SIGNAL =   3; EXPRESSED IN BONE MARROW, SIGNAL = 0.95; EST_HUMAN HIT: AA348335.1, EVALUE 1.00e-16
LLFSKVKLQSLCRGPDEALLTCKHMLQIWKSCYNLTNP

SEQ ID NO: 35648 - protein, 74 aa, Homo sapiens [sequence omitted]

SEQ ID NO: 35649 - protein, 53 aa, Homo sapiens
  MAP TO AL096869.1; EXPRESSED IN ADULT LIVER, SIGNAL = 7.3; EXPRESSED IN BT474, SIGNAL = 4.1; EXPRESSED IN FETAL LIVER, SIGNAL = 8.3; EXPRESSED IN PLACENTA, SIGNAL = 9.4; EXPRESSED IN HELA, SIGNAL = 8.2; EXPRESSED IN HBL100, SIGNAL = 5.7; EXPRESSED IN HEART, SIGNAL = 8.1; EXPRESSED IN LUNG, SIGNAL = 4.8; EXPRESSED IN BONE MARROW, SIGNAL = 6.6; EXPRESSED IN BRAIN, SIGNAL = 8.4; SWISSPROT HIT: Q58208, EVALUE 2.60e+00; EST_HUMAN HIT: BE618392.1, EVALUE 3.00e-17
IPEALGYVRQALQLQGDDANSLHLLALLLSAQKHYHDALNIIDMALSEYPENF

SEQ ID NO: 35650 - protein, 26 aa, Homo sapiens
  MAP TO AL096869.1; EXPRESSED IN ADULT LIVER, SIGNAL = 7.3; EXPRESSED IN BT474, SIGNAL = 4.1; EXPRESSED IN FETAL LIVER, SIGNAL = 8.3; EXPRESSED IN PLACENTA, SIGNAL = 9.4; EXPRESSED IN HELA, SIGNAL = 8.2; EXPRESSED IN HBL100, SIGNAL = 5.7; EXPRESSED IN HEART, SIGNAL = 8.1; EXPRESSED IN LUNG, SIGNAL = 4.8; EXPRESSED IN BONE MARROW, SIGNAL = 6.6; EXPRESSED IN BRAIN, SIGNAL = 8.4; EST_HUMAN HIT: BE618392.1, EVALUE 6.00e-09
SFKVTMPTPCTSLPSCCQHRSITMTL

SEQ ID NO: 35651 - protein, 26 aa, Homo sapiens
  MAP TO AL050317.9; EXPRESSED IN HELA, SIGNAL = 2.3; EXPRESSED IN HEART, SIGNAL = 3.3; EXPRESSED IN LUNG, SIGNAL = 3.3; EXPRESSED IN BRAIN, SIGNAL = 2.5; EXPRESSED IN BT474, SIGNAL = 1.4; EXPRESSED IN ADULT LIVER, SIGNAL = 2.3; EXPRESSED IN PLACENTA, SIGNAL = 2.6; EXPRESSED IN HBL100, SIGNAL = 1.8; EXPRESSED IN BONE MARROW, SIGNAL = 2.9; EXPRESSED IN FETAL LIVER, SIGNAL = 3.8
PPQPLGALGDKRNDNDDLTEPLLRPK

SEQ ID NO: 35652 - protein, 57 aa, Homo sapiens
  MAP TO AL035407.15; EXPRESSED IN HEART, SIGNAL = 2.9; EXPRESSED IN LUNG, SIGNAL = 2.4; EXPRESSED IN BRAIN, SIGNAL = 3.3; EXPRESSED IN FETAL LIVER, SIGNAL = 2.5; EXPRESSED IN ADULT LIVER, SIGNAL = 3.2; EXPRESSED IN PLACENTA, SIGNAL = 2.6; EXPRESSED IN HELA, SIGNAL = 2.3; EXPRESSED IN HBL100, SIGNAL = 1.8; EXPRESSED IN BONE MARROW, SIGNAL = 2.9; EXPRESSED IN BT474, SIGNAL = 1.4; EST_HUMAN HIT: BE874512.1, EVALUE 3.60e+00; SWISSPROT HIT: P24430, EVALUE 2.60e+00
GSAPVRKAASASNTLKDDHSEKKYLEGLLHHQTFHHMQKEFEKIEFSWLIIGQYSLE

SEQ ID NO: 35653 - protein, 57 aa, Homo sapiens
  MAP TO AL035661.16; EXPRESSED IN FETAL LIVER, SIGNAL =  22; EXPRESSED IN ADULT LIVER, SIGNAL = 7.2; EXPRESSED IN HELA, SIGNAL = 3.6; EXPRESSED IN BRAIN, SIGNAL = 8.3; EXPRESSED IN LUNG, SIGNAL = 3.4; EXPRESSED IN BONE MARROW, SIGNAL = 5.8; EXPRESSED IN BT474, SIGNAL = 3.4; EXPRESSED IN PLACENTA, SIGNAL =  18; EXPRESSED IN HEART, SIGNAL = 4.8; EXPRESSED IN HBL100, SIGNAL = 3.1; SWISSPROT HIT: P36333, EVALUE 6.00e-08; EST_HUMAN HIT: AA776574.1, EVALUE 4.00e-21
CKVVITFNQGLRGGRVVELKKIVDEAVKHCPTVQHVLVAHRTDNKVHMGDLDVPLEQ

SEQ ID NO: 35654 - protein, 53 aa, Homo sapiens
  MAP TO AJ239326.3; EXPRESSED IN HEART, SIGNAL = 0.84; EXPRESSED IN BRAIN, SIGNAL = 1.6; EXPRESSED IN BT474, SIGNAL = 1.3; SWISSPROT HIT: P20103, EVALUE 5.90e+00
INEPVGFLVLNMQKNIISKYSSSPFITKLPSPAFILTLGVRLSQEAKAAGGGA

SEQ ID NO: 35655 - protein, 33 aa, Homo sapiens
  MAP TO AL035448.28; EXPRESSED IN BT474, SIGNAL =   1; EXPRESSED IN HBL100, SIGNAL = 1.7; EXPRESSED IN BRAIN, SIGNAL = 0.97; EXPRESSED IN FETAL LIVER, SIGNAL = 0.92; EXPRESSED IN ADULT LIVER, SIGNAL = 0.93; EXPRESSED IN PLACENTA, SIGNAL = 1.5; EXPRESSED IN HEART, SIGNAL = 1.1; EXPRESSED IN HELA, SIGNAL = 0.99; EXPRESSED IN BONE MARROW, SIGNAL =   1
TMVSLAPALTLPGSFIELQNLRLLKICRIRISG

SEQ ID NO: 35656 - protein, 46 aa, Homo sapiens [sequence omitted]

SEQ ID NO: 35657 - protein, 60 aa, Homo sapiens
  MAP TO AL079341.9; EXPRESSED IN BT474, SIGNAL =   2; EXPRESSED IN FETAL LIVER, SIGNAL = 2.6; EXPRESSED IN PLACENTA, SIGNAL = 2.5; EXPRESSED IN HBL100, SIGNAL = 1.6; EXPRESSED IN HELA, SIGNAL = 2.4; EXPRESSED IN HEART, SIGNAL = 2.8; EXPRESSED IN BONE MARROW, SIGNAL =   2; EXPRESSED IN LUNG, SIGNAL = 2.4; EXPRESSED IN BRAIN, SIGNAL = 2.6; EXPRESSED IN ADULT LIVER, SIGNAL = 2.5; SWISSPROT HIT: Q60325, EVALUE 2.60e+00
NNDYRLFHKMSNSHPLRPFTAVGEIDHVHILSEHIGALLIGEEYGDVTFVVEKKRFPAHR

SEQ ID NO: 35658 - protein, 39 aa, Homo sapiens
  MAP TO AL096703.14; EXPRESSED IN ADULT LIVER, SIGNAL = 0.91; EXPRESSED IN BT474, SIGNAL =   1; EXPRESSED IN FETAL LIVER, SIGNAL = 1.1; EXPRESSED IN PLACENTA, SIGNAL = 0.98; EXPRESSED IN HEART, SIGNAL = 1.1; EXPRESSED IN BRAIN, SIGNAL = 1.1; EXPRESSED IN BONE MARROW, SIGNAL = 0.91; EXPRESSED IN LUNG, SIGNAL = 1.6; EST_HUMAN HIT: AA725605.1, EVALUE 6.40e+00; SWISSPROT HIT: Q04713, EVALUE 2.70e+00
CCHGMNRRPGYTDLYNIRFPKRGRPTCGPHLRAFGAIRE

SEQ ID NO: 35659 - protein, 80 aa, Homo sapiens
  MAP TO AL034429.1; EXPRESSED IN ADULT LIVER, SIGNAL = 5.5; EXPRESSED IN PLACENTA, SIGNAL = 7.2; EXPRESSED IN BONE MARROW, SIGNAL = 8.2; EXPRESSED IN LUNG, SIGNAL = 8.8; EXPRESSED IN BRAIN, SIGNAL = 6.3; EXPRESSED IN FETAL LIVER, SIGNAL = 5.6; EXPRESSED IN BT474, SIGNAL = 2.8; EXPRESSED IN HEART, SIGNAL = 6.2; EXPRESSED IN HELA, SIGNAL = 5.3; EXPRESSED IN HBL100, SIGNAL = 4.2
SVSKKPTNQKKKNQEEEKKEEEEEEEKEEKKEKEKEKEEEKEKKEEKEKKKEGRGGGGGGRKRRKEEGGRALFMYARPTS

SEQ ID NO: 35660 - protein, 57 aa, Homo sapiens
  MAP TO AL109653.9; EXPRESSED IN HELA, SIGNAL = 4.4; EXPRESSED IN LUNG, SIGNAL = 2.3; EXPRESSED IN BRAIN, SIGNAL = 4.2; EXPRESSED IN BT474, SIGNAL = 2.8; EXPRESSED IN ADULT LIVER, SIGNAL = 6.4; EXPRESSED IN FETAL LIVER, SIGNAL =   3; EXPRESSED IN PLACENTA, SIGNAL = 5.2; EXPRESSED IN HEART, SIGNAL = 3.3; EXPRESSED IN HBL100, SIGNAL = 3.4; EXPRESSED IN BONE MARROW, SIGNAL = 3.6; EST_HUMAN HIT: AV712805.1, EVALUE 9.00e-18
PNNFLISICDHLSLDFIVHITISILVKAIQQVSRNFQTFPHLLVFCALQTVPTSACY

SEQ ID NO: 35661 - protein, 53 aa, Homo sapiens
  MAP TO AL109653.9; EXPRESSED IN HELA, SIGNAL = 4.4; EXPRESSED IN LUNG, SIGNAL = 2.3; EXPRESSED IN BRAIN, SIGNAL = 4.2; EXPRESSED IN BT474, SIGNAL = 2.8; EXPRESSED IN ADULT LIVER, SIGNAL = 6.4; EXPRESSED IN FETAL LIVER, SIGNAL =   3; EXPRESSED IN PLACENTA, SIGNAL = 5.2; EXPRESSED IN HEART, SIGNAL = 3.3; EXPRESSED IN HBL100, SIGNAL = 3.4; EXPRESSED IN BONE MARROW, SIGNAL = 3.6; EST_HUMAN HIT: H51794.1, EVALUE 3.00e-19; SWISSPROT HIT: O00566, EVALUE 5.20e-01
GWNSLEGTEDKKMWESLEIPGDLLNGFDQNADSDMDNEVQAEVVTDGDEEIVG

SEQ ID NO: 35662 - protein, 33 aa, Homo sapiens
  MAP TO AL110502.1; EXPRESSED IN HELA, SIGNAL =  32; EXPRESSED IN HEART, SIGNAL = 6.4; EXPRESSED IN LUNG, SIGNAL = 9.4; EXPRESSED IN BRAIN, SIGNAL = 3.6; EXPRESSED IN BT474, SIGNAL =  24; EXPRESSED IN ADULT LIVER, SIGNAL = 3.4; EXPRESSED IN FETAL LIVER, SIGNAL = 5.9; EXPRESSED IN PLACENTA, SIGNAL = 6.4; EXPRESSED IN HBL100, SIGNAL =  18; EXPRESSED IN BONE MARROW, SIGNAL = 5.3; EST_HUMAN HIT: AA988544.1, EVALUE 9.00e-08; SWISSPROT HIT: P29316, EVALUE 1.00e-08
AMKKIEDNNTLVDVKINKYQIKQVVKKLYDTDV

SEQ ID NO: 35663 - protein, 65 aa, Homo sapiens
  MAP TO AL078645.18; EXPRESSED IN LUNG, SIGNAL = 5.5; EXPRESSED IN FETAL LIVER, SIGNAL = 2.1; EXPRESSED IN ADULT LIVER, SIGNAL = 2.2; EXPRESSED IN PLACENTA, SIGNAL = 1.6; EXPRESSED IN HEART, SIGNAL = 2.5; EXPRESSED IN HELA, SIGNAL = 2.1; EXPRESSED IN HBL100, SIGNAL = 1.7; EXPRESSED IN BRAIN, SIGNAL =   2; EXPRESSED IN BONE MARROW, SIGNAL = 3.2; EXPRESSED IN BT474, SIGNAL = 1.4
EEEKKRKKKEEEEEEEEEEEEEEEEEEEEEDDDDNTNSPTPDAYQVNPDVPCPSEVKRSTTLERE

SEQ ID NO: 35664 - protein, 45 aa, Homo sapiens
  MAP TO AC009640.2; EXPRESSED IN BT474, SIGNAL = 8.1; EXPRESSED IN BONE MARROW, SIGNAL = 1.9; EXPRESSED IN LUNG, SIGNAL = 3.3; EXPRESSED IN FETAL LIVER, SIGNAL =   2; EXPRESSED IN ADULT LIVER, SIGNAL = 3.8; EXPRESSED IN PLACENTA, SIGNAL = 2.8; EXPRESSED IN HEART, SIGNAL = 2.1; EXPRESSED IN HELA, SIGNAL =  13; EXPRESSED IN HBL100, SIGNAL = 9.6; EXPRESSED IN BRAIN, SIGNAL = 2.5; EST_HUMAN HIT: AI193012.1, EVALUE 1.00e-14
MRTRVMFSCCMRRQYTLRVLMPTLGSSGKNTNILSVGSSLWATSA

SEQ ID NO: 35665 - protein, 38 aa, Homo sapiens
  MAP TO AC009640.2; EXPRESSED IN BT474, SIGNAL = 8.1; EXPRESSED IN BONE MARROW, SIGNAL = 1.9; EXPRESSED IN LUNG, SIGNAL = 3.3; EXPRESSED IN FETAL LIVER, SIGNAL =   2; EXPRESSED IN ADULT LIVER, SIGNAL = 3.8; EXPRESSED IN PLACENTA, SIGNAL = 2.8; EXPRESSED IN HEART, SIGNAL = 2.1; EXPRESSED IN HELA, SIGNAL =  13; EXPRESSED IN HBL100, SIGNAL = 9.6; EXPRESSED IN BRAIN, SIGNAL = 2.5; EST_HUMAN HIT: W46556.1, EVALUE 7.30e+00
LPAHAAGEHHAGPHHGAAGHDALRQVVPGPHGSQVHPG

SEQ ID NO: 35666 - protein, 91 aa, Homo sapiens
  MAP TO AC011121.1; EXPRESSED IN HEART, SIGNAL = 1.3; EXPRESSED IN LUNG, SIGNAL = 1.6; EXPRESSED IN BRAIN, SIGNAL = 1.1; EXPRESSED IN ADULT LIVER, SIGNAL = 1.6; EXPRESSED IN PLACENTA, SIGNAL = 1.1; EXPRESSED IN HELA, SIGNAL = 1.8; EXPRESSED IN HBL100, SIGNAL = 0.99; EXPRESSED IN BONE MARROW, SIGNAL = 1.1; EXPRESSED IN FETAL LIVER, SIGNAL = 4.3; EST_HUMAN HIT: AU119582.1, EVALUE 6.00e-48; SWISSPROT HIT: Q01030, EVALUE 6.00e-03
AVGPRRRRDGSTCSTKYSAKTRKKSREPIRRIPAGTDTERRTPQKSMTSSPPLIASWVPTAKNSLVIRWLWLNLRRKPQTIQNISYQKRNR

SEQ ID NO: 35667 - protein, 85 aa, Homo sapiens
  MAP TO AL121753.1; EXPRESSED IN BT474, SIGNAL =   3; EXPRESSED IN HELA, SIGNAL =   1; EXPRESSED IN HEART, SIGNAL =   1; EXPRESSED IN ADULT LIVER, SIGNAL = 1.3; EST_HUMAN HIT: BE619018.1, EVALUE 2.30e+00; SWISSPROT HIT: P78985, EVALUE 8.20e-02
VVLSKHNSEIPVPVAARDSHQMGHQWPVTNTSDIPSRAKLHSWENLRLRVGVIMVGEWENRRKLVWKTLMSMKVRISFKVTGLKQ

SEQ ID NO: 35668 - protein, 34 aa, Homo sapiens [sequence omitted]

SEQ ID NO: 35669 - protein, 117 aa, Homo sapiens
  MAP TO AL117352.3; EXPRESSED IN HELA, SIGNAL = 1.7; EXPRESSED IN HEART, SIGNAL = 0.98; EXPRESSED IN FETAL LIVER, SIGNAL = 1.3; EXPRESSED IN BT474, SIGNAL =   1; EST_HUMAN HIT: AW303998.1, EVALUE 8.00e-53
CWVNLSYTVVAFTKQTMGFLEEALKLYFPELHMVLLESLVEIILVAVQHVDYSLRCEQDPEKKAFIRQNASFLYETVLPVVEKRFEEGVGKPAKQLQDLRNASRLIRVNPESTTSVV

SEQ ID NO: 35670 - protein, 62 aa, Homo sapiens
  MAP TO AC011242.1; EXPRESSED IN PLACENTA, SIGNAL = 0.99; EXPRESSED IN BRAIN, SIGNAL =   1; EXPRESSED IN BT474, SIGNAL = 1.5; EXPRESSED IN FETAL LIVER, SIGNAL = 2.6; EXPRESSED IN HEART, SIGNAL = 1.1; EXPRESSED IN HELA, SIGNAL = 1.7; EXPRESSED IN HBL100, SIGNAL = 1.2; EXPRESSED IN LUNG, SIGNAL = 1.9; EST_HUMAN HIT: BF031024.1, EVALUE 3.00e-30; SWISSPROT HIT: Q45358, EVALUE 1.20e+00
TFSLVLVLDLSKPNDLWPTMENLLQATKSHVDKVIMKLGKTNAKAVSEMRQKIWNNMPKDHP

SEQ ID NO: 35671 - protein, 30 aa, Homo sapiens
  MAP TO AC011242.1; EXPRESSED IN PLACENTA, SIGNAL = 0.99; EXPRESSED IN BRAIN, SIGNAL =   1; EXPRESSED IN BT474, SIGNAL = 1.5; EXPRESSED IN FETAL LIVER, SIGNAL = 2.6; EXPRESSED IN HEART, SIGNAL = 1.1; EXPRESSED IN HELA, SIGNAL = 1.7; EXPRESSED IN HBL100, SIGNAL = 1.2; EXPRESSED IN LUNG, SIGNAL = 1.9; EST_HUMAN HIT: AV711639.1, EVALUE 8.00e-12
RFLLFSFWIFQNLMISGPPWKISCKPQKAM

SEQ ID NO: 35672 - protein, 47 aa, Homo sapiens
  MAP TO AC007308.13; EXPRESSED IN PLACENTA, SIGNAL = 4.4; EXPRESSED IN BONE MARROW, SIGNAL = 5.1; EXPRESSED IN BRAIN, SIGNAL = 5.9; EXPRESSED IN FETAL LIVER, SIGNAL = 3.1; EXPRESSED IN BT474, SIGNAL = 2.1; EXPRESSED IN HEART, SIGNAL = 3.7; EXPRESSED IN HELA, SIGNAL = 5.1; EXPRESSED IN HBL100, SIGNAL = 3.6; EXPRESSED IN LUNG, SIGNAL = 4.7; EXPRESSED IN ADULT LIVER, SIGNAL = 2.7; EST_HUMAN HIT: AA150357.1, EVALUE 5.00e-19; SWISSPROT HIT: O95721, EVALUE 4.00e-20
ELSMGLGRLKDIALGMQTEIEEQDDILDRLTTKVDKLDVNIKSTERK

SEQ ID NO: 35673 - protein, 35 aa, Homo sapiens
  MAP TO AC008173.1; EXPRESSED IN ADULT LIVER, SIGNAL = 4.7; EXPRESSED IN BT474, SIGNAL = 2.5; EXPRESSED IN FETAL LIVER, SIGNAL = 1.7; EXPRESSED IN PLACENTA, SIGNAL =   3; EXPRESSED IN HBL100, SIGNAL = 2.1; EXPRESSED IN HELA, SIGNAL = 4.8; EXPRESSED IN HEART, SIGNAL = 2.2; EXPRESSED IN BONE MARROW, SIGNAL = 2.4; EXPRESSED IN LUNG, SIGNAL = 6.3; EXPRESSED IN BRAIN, SIGNAL = 2.1; EST_HUMAN HIT: AA702794.1, EVALUE 3.00e-11; SWISSPROT HIT: P12036, EVALUE 4.20e-01
FHTGDEEEQEYSEVTEDVTEHVYLPAKAKVAKEEE

SEQ ID NO: 35674 - protein, 27 aa, Homo sapiens
  MAP TO AL109984.5; EXPRESSED IN HBL100, SIGNAL = 4.9; EXPRESSED IN HELA, SIGNAL =  24; EXPRESSED IN PLACENTA, SIGNAL = 3.6; EXPRESSED IN HEART, SIGNAL = 2.2; EXPRESSED IN BRAIN, SIGNAL = 2.2; EXPRESSED IN BONE MARROW, SIGNAL = 3.3; EXPRESSED IN LUNG, SIGNAL =  12; EXPRESSED IN BT474, SIGNAL =  14; EXPRESSED IN ADULT LIVER, SIGNAL = 4.1; EXPRESSED IN FETAL LIVER, SIGNAL = 2.4; EST_HUMAN HIT: BF376430.1, EVALUE 6.00e-07; SWISSPROT HIT: P30040, EVALUE 4.00e-08
DGKKEELQKSLNILTAFQKKGAENEEL

SEQ ID NO: 35675 - protein, 59 aa, Homo sapiens
  MAP TO AC008115.3; EXPRESSED IN ADULT LIVER, SIGNAL = 1.2; EXPRESSED IN PLACENTA, SIGNAL = 1.5; EXPRESSED IN BONE MARROW, SIGNAL = 1.4; EXPRESSED IN BRAIN, SIGNAL = 2.2; EXPRESSED IN FETAL LIVER, SIGNAL = 1.2; EXPRESSED IN BT474, SIGNAL = 1.5; EXPRESSED IN HEART, SIGNAL = 1.3; EXPRESSED IN HELA, SIGNAL = 1.1; EXPRESSED IN HBL100, SIGNAL = 1.6; EXPRESSED IN LUNG, SIGNAL = 1.6; EST_HUMAN HIT: AW452113.1, EVALUE 6.00e-29; SWISSPROT HIT: O08327, EVALUE 3.40e+00
RIDDGVEPVYADGEENVDLDTWSEILKISHNLARCTTQRPPSSGELEQDERRAGNADEK

SEQ ID NO: 35676 - protein, 58 aa, Homo sapiens
  MAP TO AC008115.3; EXPRESSED IN ADULT LIVER, SIGNAL = 1.2; EXPRESSED IN PLACENTA, SIGNAL = 1.5; EXPRESSED IN BONE MARROW, SIGNAL = 1.4; EXPRESSED IN BRAIN, SIGNAL = 2.2; EXPRESSED IN FETAL LIVER, SIGNAL = 1.2; EXPRESSED IN BT474, SIGNAL = 1.5; EXPRESSED IN HEART, SIGNAL = 1.3; EXPRESSED IN HELA, SIGNAL = 1.1; EXPRESSED IN HBL100, SIGNAL = 1.6; EXPRESSED IN LUNG, SIGNAL = 1.6; SWISSPROT HIT: Q15760, EVALUE 8.00e-29; EST_HUMAN HIT: AW452113.1, EVALUE 7.00e-28
LISVASTPFVLLQFTTGRWTLGSATCKVVRYFQYLTPGVQIYVLLSICIDRFYTIVYP

SEQ ID NO: 35677 - protein, 46 aa, Homo sapiens
  MAP TO AL035553.10; EXPRESSED IN BT474, SIGNAL = 7.2; EXPRESSED IN FETAL LIVER, SIGNAL = 0.89; EXPRESSED IN ADULT LIVER, SIGNAL = 0.91; EXPRESSED IN PLACENTA, SIGNAL = 1.2; EXPRESSED IN HEART, SIGNAL = 0.99; EXPRESSED IN BRAIN, SIGNAL =  27; EXPRESSED IN BONE MARROW, SIGNAL = 0.91; SWISSPROT HIT: P47789, EVALUE 4.00e-21; EST_HUMAN HIT: H10581.1, EVALUE 5.00e-20
GALLLAEGFYTTGAVRQIFGDYKTTICGKGLSATVTGGQKGRGSRG

SEQ ID NO: 35678 - protein, 74 aa, Homo sapiens
  MAP TO AL049597.17; EXPRESSED IN LUNG, SIGNAL =  11; EXPRESSED IN ADULT LIVER, SIGNAL =  14; EXPRESSED IN BT474, SIGNAL =  65; EXPRESSED IN FETAL LIVER, SIGNAL = 7.5; EXPRESSED IN HELA, SIGNAL = 1.1e+02; EXPRESSED IN PLACENTA, SIGNAL =  12; EXPRESSED IN HBL100, SIGNAL =  12; EXPRESSED IN HEART, SIGNAL = 7.2; EXPRESSED IN BONE MARROW, SIGNAL = 9.4; EXPRESSED IN BRAIN, SIGNAL =   5; SWISSPROT HIT: P24049, EVALUE 2.00e-23; EST_HUMAN HIT: AW085865.1, EVALUE 7.00e-23
SLVIEYIQVNKAPKMLRRTYRAHGRINSYMSSPWHIEMILTEKEQIVPKPEKEVAQKKKISQKKLKKQKLMARK

SEQ ID NO: 35679 - protein, 17 aa, Homo sapiens
  MAP TO AC009944.2; EXPRESSED IN FETAL LIVER, SIGNAL = 4.5; EXPRESSED IN HELA, SIGNAL =  38; EXPRESSED IN PLACENTA, SIGNAL = 5.3; EXPRESSED IN HBL100, SIGNAL =  18; EXPRESSED IN HEART, SIGNAL = 6.4; EXPRESSED IN BRAIN, SIGNAL = 6.1; EXPRESSED IN BONE MARROW, SIGNAL = 2.9; EXPRESSED IN LUNG, SIGNAL =  11; EXPRESSED IN BT474, SIGNAL =  24; EXPRESSED IN ADULT LIVER, SIGNAL = 4.2
CSSLIRLPLTFFRTRGK

SEQ ID NO: 35680 - protein, 49 aa, Homo sapiens
  MAP TO AL109935.13; EXPRESSED IN HBL100, SIGNAL = 8.7; EXPRESSED IN HEART, SIGNAL =   4; EXPRESSED IN LUNG, SIGNAL = 7.2; EXPRESSED IN BONE MARROW, SIGNAL = 6.4; EXPRESSED IN BRAIN, SIGNAL = 1.7; EXPRESSED IN ADULT LIVER, SIGNAL = 3.3; EXPRESSED IN BT474, SIGNAL = 1.9; EXPRESSED IN FETAL LIVER, SIGNAL = 2.6; EXPRESSED IN PLACENTA, SIGNAL = 3.5; EXPRESSED IN HELA, SIGNAL = 7.1; SWISSPROT HIT: O94666, EVALUE 7.80e+00; EST_HUMAN HIT: AL046038.2, EVALUE 5.00e-22
VEQLERLKQELPELKSCLCPTVSRFVPSSLCGESDIHVDANGIDNVENA

SEQ ID NO: 35681 - protein, 43 aa, Homo sapiens
  MAP TO AL096702.3; EXPRESSED IN BONE MARROW, SIGNAL = 1.4; EXPRESSED IN BT474, SIGNAL = 2.2; EXPRESSED IN FETAL LIVER, SIGNAL = 0.95; EXPRESSED IN ADULT LIVER, SIGNAL = 1.4; EXPRESSED IN HELA, SIGNAL =   4; EXPRESSED IN PLACENTA, SIGNAL = 1.4; EXPRESSED IN HBL100, SIGNAL = 2.3; EXPRESSED IN HEART, SIGNAL = 1.2; EXPRESSED IN BRAIN, SIGNAL = 1.3; SWISSPROT HIT: Q9Y295, EVALUE 1.00e-20; EST_HUMAN HIT: AA325103.1, EVALUE 2.00e-19
QISIEELDIIYKVPHCVPISAHHRWNFDDLLEKIWDYLKLVRM

SEQ ID NO: 35682 - protein, 55 aa, Homo sapiens
  MAP TO AP000553.1; EXPRESSED IN BT474, SIGNAL = 3.3; EXPRESSED IN FETAL LIVER, SIGNAL = 1.4; EXPRESSED IN HEART, SIGNAL =   2; EXPRESSED IN LUNG, SIGNAL = 1.9; EXPRESSED IN BRAIN, SIGNAL = 1.1; EXPRESSED IN ADULT LIVER, SIGNAL = 1.4; EXPRESSED IN PLACENTA, SIGNAL = 1.6; EXPRESSED IN HELA, SIGNAL = 7.8; EXPRESSED IN HBL100, SIGNAL =   5; EXPRESSED IN BONE MARROW, SIGNAL = 0.99; EST_HUMAN HIT: BE176937.1, EVALUE 3.00e-16; SWISSPROT HIT: P51966, EVALUE 6.00e-17
GAFRIEINFPAEYPFKPPKITFKTKIYHPNIDEKGQVCLPVISAENWKPATKTDQ

SEQ ID NO: 35683 - protein, 40 aa, Homo sapiens
  MAP TO AP000553.1; EXPRESSED IN BT474, SIGNAL = 3.3; EXPRESSED IN FETAL LIVER, SIGNAL = 1.4; EXPRESSED IN HEART, SIGNAL =   2; EXPRESSED IN LUNG, SIGNAL = 1.9; EXPRESSED IN BRAIN, SIGNAL = 1.1; EXPRESSED IN ADULT LIVER, SIGNAL = 1.4; EXPRESSED IN PLACENTA, SIGNAL = 1.6; EXPRESSED IN HELA, SIGNAL = 7.8; EXPRESSED IN HBL100, SIGNAL =   5; EXPRESSED IN BONE MARROW, SIGNAL = 0.99; EST_HUMAN HIT: BF675360.1, EVALUE 3.00e-16; SWISSPROT HIT: P22518, EVALUE 9.30e-01
EPSESKSTFQQSTHSNHRRSHLKQRSITQTSTKRGRSVCQ

SEQ ID NO: 35684 - protein, 30 aa, Homo sapiens
  MAP TO AC006346.1; EXPRESSED IN FETAL LIVER, SIGNAL = 1.1; EXPRESSED IN HELA, SIGNAL = 2.1; EXPRESSED IN HEART, SIGNAL = 2.8; EXPRESSED IN LUNG, SIGNAL = 2.2; EXPRESSED IN BRAIN, SIGNAL =   1; EXPRESSED IN BT474, SIGNAL = 2.8; EXPRESSED IN HBL100, SIGNAL = 1.7; EXPRESSED IN BONE MARROW, SIGNAL =   1
LPCPSLSPLKMYTCAKCVPTFLCLRAPVRC

SEQ ID NO: 35685 - protein, 74 aa, Homo sapiens
  MAP TO AB020871.1; EXPRESSED IN HBL100, SIGNAL = 1.1; EXPRESSED IN HEART, SIGNAL = 1.1; EXPRESSED IN BONE MARROW, SIGNAL =   1; EXPRESSED IN LUNG, SIGNAL = 4.7; EXPRESSED IN BRAIN, SIGNAL = 1.3; EXPRESSED IN FETAL LIVER, SIGNAL = 1.1
IVTIIIKTKSSGKEEEEKEEEEEEKEKEEEEKEEEEEKEEKEKNNFLCLFSTMYLELDVQYFNSIKTFIVASIF

SEQ ID NO: 35686 - protein, 79 aa, Homo sapiens
  MAP TO AC007218.2; EXPRESSED IN BT474, SIGNAL = 5.9; EXPRESSED IN HBL100, SIGNAL = 5.5; EXPRESSED IN HEART, SIGNAL = 5.6; EXPRESSED IN LUNG, SIGNAL = 5.1; EXPRESSED IN FETAL LIVER, SIGNAL = 8.3; EXPRESSED IN ADULT LIVER, SIGNAL = 5.8; EXPRESSED IN PLACENTA, SIGNAL =   6; EXPRESSED IN HELA, SIGNAL = 4.9; EXPRESSED IN BRAIN, SIGNAL = 4.5; EXPRESSED IN BONE MARROW, SIGNAL = 5.4; SWISSPROT HIT: Q00959, EVALUE 1.00e-42; EST_HUMAN HIT: AW893633.1, EVALUE 8.00e-42
EMEELETLWLTGICHNEKNEVMSSQLDIDNMAGVFYMLAAAMALSLITFIWEHLFYWKLRFCFTGVCSDRPGLLFSISR

SEQ ID NO: 35687 - protein, 64 aa, Homo sapiens
  MAP TO AC007318.2; EXPRESSED IN BONE MARROW, SIGNAL = 2.4; EXPRESSED IN HBL100, SIGNAL =   6; EXPRESSED IN HELA, SIGNAL = 7.2; EXPRESSED IN HEART, SIGNAL = 1.5; EXPRESSED IN BRAIN, SIGNAL = 1.7; EXPRESSED IN LUNG, SIGNAL = 8.3; EXPRESSED IN BT474, SIGNAL = 7.5; EXPRESSED IN ADULT LIVER, SIGNAL = 1.7; EXPRESSED IN FETAL LIVER, SIGNAL = 1.3; EXPRESSED IN PLACENTA, SIGNAL =   2; SWISSPROT HIT: O15142, EVALUE 1.00e-34; EST_HUMAN HIT: AU131915.1, EVALUE 2.00e-33
SELRSMLEVNYPMENGIVRNWDDMKHLWDYTFGPEKLNIDTRNCKILLTEPPMNPTKNREKIVE

SEQ ID NO: 35688 - protein, 61 aa, Homo sapiens
  MAP TO AC007458.13; EXPRESSED IN PLACENTA, SIGNAL = 1.4; EXPRESSED IN FETAL LIVER, SIGNAL = 0.87; EXPRESSED IN ADULT LIVER, SIGNAL =   1; EXPRESSED IN HEART, SIGNAL = 1.1; EXPRESSED IN HELA, SIGNAL = 0.99; EXPRESSED IN BRAIN, SIGNAL = 1.3; EXPRESSED IN LUNG, SIGNAL = 9.6; EXPRESSED IN BT474, SIGNAL =   1; EST_HUMAN HIT: T29780.1, EVALUE 1.00e-24; SWISSPROT HIT: P01579, EVALUE 1.00e-29
ESDRKIMQSQIVSFYFKLFKNFKDDQSIQKSVETIKEDMNVKFFNSNKKKRDDFEKLTNYS

SEQ ID NO: 35689 - protein, 67 aa, Homo sapiens
  MAP TO AC000026.3; EXPRESSED IN BT474, SIGNAL = 2.1; EXPRESSED IN LUNG, SIGNAL = 3.5; EXPRESSED IN ADULT LIVER, SIGNAL = 2.1; EXPRESSED IN FETAL LIVER, SIGNAL = 1.4; EXPRESSED IN PLACENTA, SIGNAL = 2.4; EXPRESSED IN HEART, SIGNAL = 1.9; EXPRESSED IN HELA, SIGNAL = 3.9; EXPRESSED IN HBL100, SIGNAL = 2.7; EXPRESSED IN BRAIN, SIGNAL = 1.7; EXPRESSED IN BONE MARROW, SIGNAL = 1.6; EST_HUMAN HIT: BE253600.1, EVALUE 3.00e-28; SWISSPROT HIT: Q10567, EVALUE 4.00e-29
EWTDPSICERVTPRLSHANSAVVLSAVKVLMKFMEMLSKDLDYYGTLLKKLAPPLVTLLSAEPELQY

SEQ ID NO: 35690 - protein, 176 aa, Homo sapiens
  MAP TO AC006391.7; EXPRESSED IN PLACENTA, SIGNAL =   2; EXPRESSED IN BONE MARROW, SIGNAL = 2.2; EXPRESSED IN FETAL LIVER, SIGNAL = 1.9; EXPRESSED IN HEART, SIGNAL = 2.5; EXPRESSED IN HELA, SIGNAL = 1.6; EXPRESSED IN HBL100, SIGNAL = 1.6; EXPRESSED IN BRAIN, SIGNAL = 2.1; EXPRESSED IN LUNG, SIGNAL = 3.5; EXPRESSED IN BT474, SIGNAL = 1.6; EXPRESSED IN ADULT LIVER, SIGNAL = 1.8; EST_HUMAN HIT: AW271780.1, EVALUE 7.00e-07; SWISSPROT HIT: P32238, EVALUE 2.00e-75
RKPSTTSSGKYEDSDGCYLQKTRPPRKLELRQLSTGSSSRANRIRSNSSAANLMAKKRVIRMLIVIVVLFFLCWMPIFSANAWRAYDTASAERRLSGTPISFILLLSYTSSCVNPIIYCFMNKRFRLGFMATFPCCPNPGPPGARGEVGEEEEGGTTGASLSRFSYSHMSASVPPQ

SEQ ID NO: 35691 - protein, 53 aa, Homo sapiens
  MAP TO AC006391.7; EXPRESSED IN PLACENTA, SIGNAL =   2; EXPRESSED IN BONE MARROW, SIGNAL = 2.2; EXPRESSED IN FETAL LIVER, SIGNAL = 1.9; EXPRESSED IN HEART, SIGNAL = 2.5; EXPRESSED IN HELA, SIGNAL = 1.6; EXPRESSED IN HBL100, SIGNAL = 1.6; EXPRESSED IN BRAIN, SIGNAL = 2.1; EXPRESSED IN LUNG, SIGNAL = 3.5; EXPRESSED IN BT474, SIGNAL = 1.6; EXPRESSED IN ADULT LIVER, SIGNAL = 1.8
KGNLAPPAAANMRTAMGVTCKRPGPRGSWSSGSCPPAAAAGPTASGVTAPQPT

SEQ ID NO: 35692 - protein, 31 aa, Homo sapiens
  MAP TO AC007158.5; EXPRESSED IN BT474, SIGNAL = 3.5; EXPRESSED IN PLACENTA, SIGNAL = 4.6; EXPRESSED IN BONE MARROW, SIGNAL = 5.7; EXPRESSED IN BRAIN, SIGNAL =   4; EXPRESSED IN ADULT LIVER, SIGNAL = 5.9; EXPRESSED IN FETAL LIVER, SIGNAL = 3.5; EXPRESSED IN HEART, SIGNAL = 4.4; EXPRESSED IN HELA, SIGNAL = 4.8; EXPRESSED IN HBL100, SIGNAL =   4; EXPRESSED IN LUNG, SIGNAL = 3.3; EST_HUMAN HIT: AA309209.1, EVALUE 4.00e-07
WNFDLERDDSEYLAEEISKCQSIQEETKHKS

SEQ ID NO: 35693 - protein, 51 aa, Homo sapiens
  MAP TO AC007241.2; EXPRESSED IN BRAIN, SIGNAL =  14; EXPRESSED IN BT474, SIGNAL =  25; EXPRESSED IN HBL100, SIGNAL =  26; EXPRESSED IN LUNG, SIGNAL =   5; EXPRESSED IN BONE MARROW, SIGNAL =  11; EXPRESSED IN ADULT LIVER, SIGNAL = 6.2; EXPRESSED IN FETAL LIVER, SIGNAL = 9.7; EXPRESSED IN PLACENTA, SIGNAL = 7.7; EXPRESSED IN HEART, SIGNAL = 8.8; EXPRESSED IN HELA, SIGNAL =  20; SWISSPROT HIT: P35394, EVALUE 1.00e-18; EST_HUMAN HIT: AA307850.1, EVALUE 2.00e-17
IVIQEIFKHVSEEITAMFKCKVFLHWYTGEGLDEMEFTEAESNMNDLVSEN

SEQ ID NO: 35694 - protein, 44 aa, Homo sapiens
  MAP TO AC007241.2; EXPRESSED IN BRAIN, SIGNAL =  14; EXPRESSED IN BT474, SIGNAL =  25; EXPRESSED IN HBL100, SIGNAL =  26; EXPRESSED IN LUNG, SIGNAL =   5; EXPRESSED IN BONE MARROW, SIGNAL =  11; EXPRESSED IN ADULT LIVER, SIGNAL = 6.2; EXPRESSED IN FETAL LIVER, SIGNAL = 9.7; EXPRESSED IN PLACENTA, SIGNAL = 7.7; EXPRESSED IN HEART, SIGNAL = 8.8; EXPRESSED IN HELA, SIGNAL =  20; EST_HUMAN HIT: AI433261.1, EVALUE 5.00e-03
ALLSRKSSSMSQKRLQQCSSARSSSTGTRARAWMRWSSLRLRAT

SEQ ID NO: 35695 - protein, 30 aa, Homo sapiens
  MAP TO AC007425.16; EXPRESSED IN ADULT LIVER, SIGNAL = 1.6; EXPRESSED IN PLACENTA, SIGNAL =   1; EXPRESSED IN LUNG, SIGNAL =   2; EXPRESSED IN BRAIN, SIGNAL = 1.4; EXPRESSED IN BT474, SIGNAL = 0.97; EXPRESSED IN FETAL LIVER, SIGNAL =   1; EXPRESSED IN HEART, SIGNAL = 1.2; EXPRESSED IN HELA, SIGNAL = 1.2; EXPRESSED IN HBL100, SIGNAL = 1.1; EXPRESSED IN BONE MARROW, SIGNAL = 1.7; EST_HUMAN HIT: AA132338.1, EVALUE 7.80e+00
AGENPQTAPRVTPPAPCRICSLVFIVLAQG

SEQ ID NO: 35696 - protein, 49 aa, Homo sapiens
  MAP TO AB026898.1; EXPRESSED IN ADULT LIVER, SIGNAL = 1.9; EXPRESSED IN PLACENTA, SIGNAL = 1.2; EXPRESSED IN BONE MARROW, SIGNAL = 1.7; EXPRESSED IN BRAIN, SIGNAL = 1.3; EXPRESSED IN FETAL LIVER, SIGNAL = 0.99; EXPRESSED IN BT474, SIGNAL = 1.3; EXPRESSED IN HEART, SIGNAL = 1.2; EXPRESSED IN HELA, SIGNAL = 2.8; EXPRESSED IN HBL100, SIGNAL = 1.3; EXPRESSED IN LUNG, SIGNAL = 0.88; SWISSPROT HIT: P50448, EVALUE 4.00e-01; EST_HUMAN HIT: AW503792.1, EVALUE 1.00e-21
LFPTTDPVGTLLQVPEQISAHLPQPAGQIATQPTQVSLPPTAEPAKTAQ

SEQ ID NO: 35697 - protein, 34 aa, Homo sapiens
  MAP TO AC007628.3; EXPRESSED IN HBL100, SIGNAL = 1.6; EXPRESSED IN HELA, SIGNAL = 1.6; EXPRESSED IN PLACENTA, SIGNAL = 1.9; EXPRESSED IN HEART, SIGNAL = 1.6; EXPRESSED IN BRAIN, SIGNAL = 2.7; EXPRESSED IN BONE MARROW, SIGNAL = 2.8; EXPRESSED IN LUNG, SIGNAL = 1.2; EXPRESSED IN BT474, SIGNAL = 1.4; EXPRESSED IN ADULT LIVER, SIGNAL = 1.9; EXPRESSED IN FETAL LIVER, SIGNAL =   2
LAHGASRTFGIHLGNPLRVPDHLCKGHAIVHPQE

SEQ ID NO: 35698 - protein, 47 aa, Homo sapiens
  MAP TO AC009488.1; EXPRESSED IN PLACENTA, SIGNAL = 2.6; EXPRESSED IN BRAIN, SIGNAL = 2.2; EXPRESSED IN ADULT LIVER, SIGNAL = 2.2; EXPRESSED IN FETAL LIVER, SIGNAL = 2.4; EXPRESSED IN BT474, SIGNAL = 1.3; EXPRESSED IN HEART, SIGNAL = 2.6; EXPRESSED IN HELA, SIGNAL = 2.5; EXPRESSED IN HBL100, SIGNAL = 1.9; EXPRESSED IN LUNG, SIGNAL = 3.6; EXPRESSED IN BONE MARROW, SIGNAL = 2.3; EST_HUMAN HIT: BE561041.1, EVALUE 2.00e-01; SWISSPROT HIT: P06333, EVALUE 7.00e-01
GWSHHGHPCSHTDFWGHTCLHSAHSRADKCSPQRRQRGLWRPHTGHP

SEQ ID NO: 35699 - protein, 30 aa, Homo sapiens
  MAP TO AC009488.1; EXPRESSED IN PLACENTA, SIGNAL = 2.6; EXPRESSED IN BRAIN, SIGNAL = 2.2; EXPRESSED IN ADULT LIVER, SIGNAL = 2.2; EXPRESSED IN FETAL LIVER, SIGNAL = 2.4; EXPRESSED IN BT474, SIGNAL = 1.3; EXPRESSED IN HEART, SIGNAL = 2.6; EXPRESSED IN HELA, SIGNAL = 2.5; EXPRESSED IN HBL100, SIGNAL = 1.9; EXPRESSED IN LUNG, SIGNAL = 3.6; EXPRESSED IN BONE MARROW, SIGNAL = 2.3; EST_HUMAN HIT: BF194996.1, EVALUE 4.50e+00
PPAGTWMAGVRAPKSPLPALRAAFVSPAMC

SEQ ID NO: 35700 - protein, 100 aa, Homo sapiens
  MAP TO AC009892.1; EXPRESSED IN BONE MARROW, SIGNAL = 3.4; EXPRESSED IN BRAIN, SIGNAL = 1.9; EXPRESSED IN LUNG, SIGNAL = 3.4; EXPRESSED IN ADULT LIVER, SIGNAL = 2.3; EXPRESSED IN BT474, SIGNAL =   1; EXPRESSED IN FETAL LIVER, SIGNAL = 3.2; EXPRESSED IN HELA, SIGNAL = 2.3; EXPRESSED IN PLACENTA, SIGNAL = 2.4; EXPRESSED IN HBL100, SIGNAL = 1.3; EXPRESSED IN HEART, SIGNAL = 2.3; SWISSPROT HIT: P43626, EVALUE 2.00e-11; EST_HUMAN HIT: AU120189.1, EVALUE 2.00e-25
QFYDRPSLSVQPVPTVAPGKNVTLLCQSRGQFHTFLLTKEGAGHPPLHLRSEHQAQQNQAEFRMGPVTSAHVGTYRCYSSLSSNPYLLSLPSDPLELVVS

SEQ ID NO: 35701 - protein, 38 aa, Homo sapiens
  MAP TO AF159227.2; EXPRESSED IN HBL100, SIGNAL =   1; EXPRESSED IN HEART, SIGNAL = 1.4; EXPRESSED IN BONE MARROW, SIGNAL = 1.1; EXPRESSED IN BRAIN, SIGNAL = 1.1; EXPRESSED IN ADULT LIVER, SIGNAL = 1.5; EXPRESSED IN FETAL LIVER, SIGNAL = 1.2; EXPRESSED IN PLACENTA, SIGNAL = 1.3; EXPRESSED IN HELA, SIGNAL = 1.5
VSSEFGKVDGTADVTIPCDSCYDLTDFIVLGLDVFRVT

SEQ ID NO: 35702 - protein, 17 aa, Homo sapiens
  MAP TO AF159227.2; EXPRESSED IN HBL100, SIGNAL =   1; EXPRESSED IN HEART, SIGNAL = 1.4; EXPRESSED IN BONE MARROW, SIGNAL = 1.1; EXPRESSED IN BRAIN, SIGNAL = 1.1; EXPRESSED IN ADULT LIVER, SIGNAL = 1.5; EXPRESSED IN FETAL LIVER, SIGNAL = 1.2; EXPRESSED IN PLACENTA, SIGNAL = 1.3; EXPRESSED IN HELA, SIGNAL = 1.5
VFRIRQSRWDCRRYHSL

SEQ ID NO: 35703 - protein, 62 aa, Homo sapiens
  MAP TO AF060568.1; EXPRESSED IN PLACENTA, SIGNAL = 1.8; EXPRESSED IN HELA, SIGNAL = 1.7; EXPRESSED IN HBL100, SIGNAL = 1.6; EXPRESSED IN HEART, SIGNAL = 2.2; EXPRESSED IN LUNG, SIGNAL = 4.3; EXPRESSED IN BONE MARROW, SIGNAL = 1.7; EXPRESSED IN BRAIN, SIGNAL = 1.3; EXPRESSED IN ADULT LIVER, SIGNAL = 1.9; EXPRESSED IN BT474, SIGNAL = 1.1; EXPRESSED IN FETAL LIVER, SIGNAL = 1.9; EST_HUMAN HIT: AI937150.1, EVALUE 4.00e-31; SWISSPROT HIT: Q05516, EVALUE 4.00e-31
DHPYECEFCGSCFRDESTLKSHKRIHTGEKPYECNGCGKKFSLKHQLETHYRVHTGTEGQGG

SEQ ID NO: 35704 - protein, 255 aa, Homo sapiens
  MAP TO AF165423.1; EXPRESSED IN PLACENTA, SIGNAL = 0.96; EXPRESSED IN HBL100, SIGNAL = 0.95; EXPRESSED IN HEART, SIGNAL = 0.98; EXPRESSED IN BRAIN, SIGNAL = 1.2; EXPRESSED IN BONE MARROW, SIGNAL = 1.1; EXPRESSED IN BT474, SIGNAL = 1.5; EXPRESSED IN ADULT LIVER, SIGNAL = 1.5; EXPRESSED IN HELA, SIGNAL = 2.4; EST_HUMAN HIT: BF345274.1, EVALUE 5.00e-42; SWISSPROT HIT: P35894, EVALUE 8.00e-62
VSKTQRATESHRCLRIPPPGTLRGSRTAAVLALLSLSLSMYLVTVLRNLLSILAVRSDSPLHTPIYFFLSNLCWADIGFTSATVPKMIVDMQSHSRVISHAGCLTQMSFLVLFACIEGMLLTVMAYDCFVAICHPLHYPVIVNPHLCVFFVLVSFFLSLLDSQLHSWIVLQFTIIKNVEISNFVCDPSQLLKFACSDSIINSIFIYFHSTMFGFLPISGILLSYYKIIPSILRISSSDGKYKAFSTCGSHLAVVC

SEQ ID NO: 35705 - protein, 71 aa, Homo sapiens
  MAP TO AL078621.19; EXPRESSED IN HELA, SIGNAL = 0.91; EXPRESSED IN HEART, SIGNAL = 0.94; EXPRESSED IN LUNG, SIGNAL = 2.7; EST_HUMAN HIT: BF125501.1, EVALUE 1.70e+00; SWISSPROT HIT: P11992, EVALUE 2.20e-01
VKKSGTRERWRRHLTTLPVLLTDSWRDFSWMACILQGLKYSLFLWVFPRSCISVPLPTPLYQQPRNRKEDW

SEQ ID NO: 35706 - protein, 39 aa, Homo sapiens
  MAP TO AL034422.18; EXPRESSED IN BT474, SIGNAL = 3.2; EXPRESSED IN ADULT LIVER, SIGNAL = 1.5; EXPRESSED IN PLACENTA, SIGNAL = 4.6; EXPRESSED IN BRAIN, SIGNAL = 0.99; EXPRESSED IN FETAL LIVER, SIGNAL = 1.9; EXPRESSED IN HEART, SIGNAL = 1.8; EXPRESSED IN HELA, SIGNAL = 9.2; EXPRESSED IN HBL100, SIGNAL = 4.1; EXPRESSED IN LUNG, SIGNAL = 7.3; EXPRESSED IN BONE MARROW, SIGNAL = 1.2; EST_HUMAN HIT: AW606944.1, EVALUE 8.00e-14; SWISSPROT HIT: P04844, EVALUE 6.00e-15
LQVTNVLSQPLTQATVKLEHAKSVASRATVLQKTSFTPV

SEQ ID NO: 35707 - protein, 69 aa, Homo sapiens
  MAP TO AL035553.10; EXPRESSED IN LUNG, SIGNAL = 1.4; EXPRESSED IN BT474, SIGNAL = 4.7; EXPRESSED IN HEART, SIGNAL = 0.96; EXPRESSED IN BRAIN, SIGNAL =  26; EST_HUMAN HIT: AV726753.1, EVALUE 1.00e-28; SWISSPROT HIT: P06905, EVALUE 1.00e-29
FVGITYALTVVWLLVFACSAVPVYIYFNTWTTCQSIAFPSKTSASIGSLCADARMYGELGYGCFGSPTH

SEQ ID NO: 35708 - protein, 19 aa, Homo sapiens
  MAP TO AL096887.5; EXPRESSED IN BONE MARROW, SIGNAL =   4; EXPRESSED IN LUNG, SIGNAL = 2.6; EXPRESSED IN BRAIN, SIGNAL = 4.1; EXPRESSED IN ADULT LIVER, SIGNAL = 3.9; EXPRESSED IN BT474, SIGNAL = 2.2; EXPRESSED IN FETAL LIVER, SIGNAL = 3.8; EXPRESSED IN PLACENTA, SIGNAL = 4.4; EXPRESSED IN HBL100, SIGNAL = 2.8; EXPRESSED IN HELA, SIGNAL = 3.3; EXPRESSED IN HEART, SIGNAL = 3.5
RGGKRGDDSASRKGVTERV

SEQ ID NO: 35709 - protein, 70 aa, Homo sapiens
  MAP TO AL033378.6; EXPRESSED IN HBL100, SIGNAL =   2; EXPRESSED IN HELA, SIGNAL = 2.5; EXPRESSED IN HEART, SIGNAL = 4.5; EXPRESSED IN ADULT LIVER, SIGNAL = 2.9; EXPRESSED IN PLACENTA, SIGNAL = 3.1; EXPRESSED IN BRAIN, SIGNAL = 2.8; EXPRESSED IN LUNG, SIGNAL = 3.3; EXPRESSED IN BONE MARROW, SIGNAL =   3; EXPRESSED IN FETAL LIVER, SIGNAL = 2.8; EXPRESSED IN BT474, SIGNAL = 2.1; SWISSPROT HIT: P29355, EVALUE 2.10e-01; EST_HUMAN HIT: AA323135.1, EVALUE 1.00e-14
KGDIIDIISKPPMGTWMGLLNNKVGTFKFIYVDVLSEDEEKPKRPTRRRRKGRPPQPKSVEDLLDRINLK

SEQ ID NO: 35710 - protein, 70 aa, Homo sapiens
  MAP TO AL034380.21; EXPRESSED IN BT474, SIGNAL = 1.7; EXPRESSED IN ADULT LIVER, SIGNAL = 1.4; EXPRESSED IN HELA, SIGNAL = 2.2; EXPRESSED IN PLACENTA, SIGNAL = 0.98; EXPRESSED IN HBL100, SIGNAL = 1.3; EXPRESSED IN HEART, SIGNAL = 0.85; EXPRESSED IN BONE MARROW, SIGNAL = 1.3; EST_HUMAN HIT: AW075970.1, EVALUE 2.00e-34; SWISSPROT HIT: Q03214, EVALUE 8.50e-01
KSSSSTTTNEKITKLYELGGEPERKMWVDRYLAFTEEKAMGMTNLPAVGRKPLDLYRLYVSVKEIGGLTQ

SEQ ID NO: 35711 - protein, 141 aa, Homo sapiens
  MAP TO AL034485.5; EXPRESSED IN BONE MARROW, SIGNAL = 2.9; EXPRESSED IN BRAIN, SIGNAL = 1.8; EXPRESSED IN LUNG, SIGNAL =   1; EXPRESSED IN ADULT LIVER, SIGNAL = 1.7; EXPRESSED IN BT474, SIGNAL = 4.3; EXPRESSED IN FETAL LIVER, SIGNAL = 1.7; EXPRESSED IN HELA, SIGNAL =  28; EXPRESSED IN PLACENTA, SIGNAL = 1.9; EXPRESSED IN HBL100, SIGNAL = 4.4; EXPRESSED IN HEART, SIGNAL = 1.4; EST_HUMAN HIT: AI932318.1, EVALUE 1.00e-20; SWISSPROT HIT: P35069, EVALUE 3.00e-22
MAEASSETTSEEGQSIQEPKEANSTKAQKQKRRGCRGSRRRHANRRGDSFGDSFTPYFPRVLKQVHQGLSLSQEAVSVMDSMIHDILDRIATEAGQLAHYTKRVTITSRDIQMAVRLLLPGKMGKLAEAQGTNAALRYTKS

SEQ ID NO: 35712 - protein, 22 aa, Homo sapiens
  MAP TO AL034485.5; EXPRESSED IN BONE MARROW, SIGNAL = 2.9; EXPRESSED IN BRAIN, SIGNAL = 1.8; EXPRESSED IN LUNG, SIGNAL =   1; EXPRESSED IN ADULT LIVER, SIGNAL = 1.7; EXPRESSED IN BT474, SIGNAL = 4.3; EXPRESSED IN FETAL LIVER, SIGNAL = 1.7; EXPRESSED IN HELA, SIGNAL =  28; EXPRESSED IN PLACENTA, SIGNAL = 1.9; EXPRESSED IN HBL100, SIGNAL = 4.4; EXPRESSED IN HEART, SIGNAL = 1.4
EAGSPGPQPFPGGRECHGFYDP

SEQ ID NO: 35713 - protein, 92 aa, Homo sapiens
  MAP TO AL096771.8; EXPRESSED IN BT474, SIGNAL = 2.4; EXPRESSED IN ADULT LIVER, SIGNAL = 4.1; EXPRESSED IN FETAL LIVER, SIGNAL = 3.1; EXPRESSED IN HELA, SIGNAL = 4.9; EXPRESSED IN PLACENTA, SIGNAL = 3.6; EXPRESSED IN HBL100, SIGNAL =   7; EXPRESSED IN HEART, SIGNAL = 3.9; EXPRESSED IN BRAIN, SIGNAL = 4.5; EXPRESSED IN BONE MARROW, SIGNAL = 3.4; EXPRESSED IN LUNG, SIGNAL =   2; SWISSPROT HIT: Q99715, EVALUE 9.00e-49; EST_HUMAN HIT: AU137153.1, EVALUE 5.00e-07
RGSPQDLVTKDITDTSIGAYWTSAPGMVRGYRVSWKSLYDDVDTGEKNLPEDAIHTMIENLQPETKYRISVFATYSSGEGEPLTGDATTECR

SEQ ID NO: 35714 - protein, 33 aa, Homo sapiens
  MAP TO AL096862.14; EXPRESSED IN PLACENTA, SIGNAL =   2; EXPRESSED IN HBL100, SIGNAL = 1.3; EXPRESSED IN HEART, SIGNAL = 1.5; EXPRESSED IN BONE MARROW, SIGNAL = 1.9; EXPRESSED IN BRAIN, SIGNAL = 1.3; EXPRESSED IN ADULT LIVER, SIGNAL = 1.5; EXPRESSED IN FETAL LIVER, SIGNAL = 1.4; EXPRESSED IN HELA, SIGNAL = 2.2
QQCHLNSCRNGSLKQTAGPHNMSQTELLWPQIG

SEQ ID NO: 35715 - protein, 75 aa, Homo sapiens
  MAP TO AP000513.1; EXPRESSED IN BT474, SIGNAL = 1.4; EXPRESSED IN PLACENTA, SIGNAL = 2.2; EXPRESSED IN HBL100, SIGNAL = 1.9; EXPRESSED IN HEART, SIGNAL = 2.6; EXPRESSED IN FETAL LIVER, SIGNAL = 1.6; EXPRESSED IN ADULT LIVER, SIGNAL = 2.4; EXPRESSED IN HELA, SIGNAL = 2.3; EXPRESSED IN BRAIN, SIGNAL =   2; EXPRESSED IN LUNG, SIGNAL =  12; EXPRESSED IN BONE MARROW, SIGNAL = 2.4; SWISSPROT HIT: P40908, EVALUE 2.60e+00; EST_HUMAN HIT: AU131967.1, EVALUE 4.00e-12
VNNFVIFEGFFAHQHRKFLHFVGHVVGVRERKELDSWSCRPLTEGPRRFLPHRAPCSLSEGNSTLSCCCSRSHAR

SEQ ID NO: 35716 - protein, 187 aa, Homo sapiens
  MAP TO Z92542.2; EXPRESSED IN BT474, SIGNAL = 1.1; EXPRESSED IN HEART, SIGNAL = 0.87; EXPRESSED IN LUNG, SIGNAL = 9.9; EXPRESSED IN BONE MARROW, SIGNAL = 1.3; EXPRESSED IN BRAIN, SIGNAL = 1.2; SWISSPROT HIT: O76039, EVALUE 1.00e-104; EST_HUMAN HIT: BE831003.1, EVALUE 3.00e-59
NQAGKSTALQSHHRSNSKDIQNLSVGLPRADEGLPANESFLNGNLAGASLSPLHTKTYQASSQPGSTSKDLTNNNIPHLLSPKEAKSKTEFDFNIDPKPSEGPGTKYLKSNSRSQQNRHSFMESSQSKAGTLQPNEKQSRHSYIDTIPQSSRSPSYRTKAKSHGALSDSKSVSNLSEARAQIAEPST

SEQ ID NO: 35717 - protein, 112 aa, Homo sapiens
  MAP TO Z92542.2; EXPRESSED IN BT474, SIGNAL = 1.1; EXPRESSED IN HEART, SIGNAL = 0.87; EXPRESSED IN LUNG, SIGNAL = 9.9; EXPRESSED IN BONE MARROW, SIGNAL = 1.3; EXPRESSED IN BRAIN, SIGNAL = 1.2; EST_HUMAN HIT: BE831003.1, EVALUE 1.00e-36
TPKPTKQAASLGLPAKISPTTTYHTFLAQKKPSQKQSLILILTQSLQKAQGQSTSSQTADLSRTATHSWKALKAKLGHCSPMKSRVGIAILTQFPSPLGVPPTGPRPKAMGH

SEQ ID NO: 35718 - protein, 58 aa, Homo sapiens
  MAP TO AP000521.1; EXPRESSED IN BONE MARROW, SIGNAL = 9.5; EXPRESSED IN BT474, SIGNAL = 1.5; EXPRESSED IN HBL100, SIGNAL =  13; EXPRESSED IN HEART, SIGNAL = 4.2; EXPRESSED IN BRAIN, SIGNAL = 1.7; EXPRESSED IN LUNG, SIGNAL =  11; EXPRESSED IN ADULT LIVER, SIGNAL =   4; EXPRESSED IN FETAL LIVER, SIGNAL = 2.7; EXPRESSED IN PLACENTA, SIGNAL = 3.1; EXPRESSED IN HELA, SIGNAL =  12
PSRSPPFLELSSQPIIPVVGIIAGLVLLVAVFTVAVVAAVMWRNKIPGRKGVSSEFPS

SEQ ID NO: 35719 - protein, 59 aa, Homo sapiens
  MAP TO AP000351.2; EXPRESSED IN BONE MARROW, SIGNAL = 3.4; EXPRESSED IN BRAIN, SIGNAL = 3.3; EXPRESSED IN BT474, SIGNAL = 1.8; EXPRESSED IN LUNG, SIGNAL = 3.1; EXPRESSED IN ADULT LIVER, SIGNAL = 3.9; EXPRESSED IN FETAL LIVER, SIGNAL = 4.2; EXPRESSED IN PLACENTA, SIGNAL = 3.6; EXPRESSED IN HEART, SIGNAL =  17; EXPRESSED IN HELA, SIGNAL = 3.7; EXPRESSED IN HBL100, SIGNAL = 2.8; EST_HUMAN HIT: H55341.1, EVALUE 2.00e-25; SWISSPROT HIT: P20135, EVALUE 1.00e-12
LLIPKITGEEVSAEKMEHAVEEVKNSLQLFEEYFLQDKMFITGNQISLADLVAVVEMMQ

SEQ ID NO: 35720 - protein, 386 aa, Homo sapiens
  MAP TO AP000511.1; EXPRESSED IN BT474, SIGNAL = 1.7; EXPRESSED IN ADULT LIVER, SIGNAL = 2.3; EXPRESSED IN PLACENTA, SIGNAL = 1.7; EXPRESSED IN BRAIN, SIGNAL = 2.4; EXPRESSED IN FETAL LIVER, SIGNAL = 1.8; EXPRESSED IN HEART, SIGNAL = 2.1; EXPRESSED IN HELA, SIGNAL = 1.5; EXPRESSED IN HBL100, SIGNAL = 1.5; EXPRESSED IN BONE MARROW, SIGNAL = 2.7; SWISSPROT HIT: P28968, EVALUE 2.00e-05
SSTASEITMSSAAIPVSSTAYETIRFSTAVSEPVTASILALESTLAFTTVSNTTTSSTVTPVPTTASTSGSKNTTACEATMSETTIAAITASEDTTVSTQTSVIAAESVPHTATKTPTDTTTASVSATVPKNNTPSVITSTPSTAPNTASKTMTTASKTATTSTITSLPTTVFTTTSKITAGSEIPTASTTDSATTAISTKASGTTVESAPSTAPPTPAETTTASVPTTTSTTGSENTGHHTVSSVPTTVFATASESSTGSETTRASTSATEVTTAMTTAMTTGSETAVVSTKAPVTTTQSGFSTATVMPAKTTTASVSTTASTTLYQNTIDSVTKSVPTMDSTIASKSTTLSKIVSVPTAVFIKAPETTTGSEITLASIITSGTT

SEQ ID NO: 35721 - protein, 181 aa, Homo sapiens
  MAP TO AL121652.1; EXPRESSED IN PLACENTA, SIGNAL =  28; EXPRESSED IN HELA, SIGNAL = 1.3e+02; EXPRESSED IN HEART, SIGNAL = 2.3; EXPRESSED IN BRAIN, SIGNAL =   3; EXPRESSED IN BT474, SIGNAL =  38; EXPRESSED IN HBL100, SIGNAL =  17; EXPRESSED IN LUNG, SIGNAL =   6; EXPRESSED IN BONE MARROW, SIGNAL = 3.7; EXPRESSED IN ADULT LIVER, SIGNAL =  13; EXPRESSED IN FETAL LIVER, SIGNAL = 4.2; EST_HUMAN HIT: BF569144.1, EVALUE 5.00e-66; SWISSPROT HIT: P05783, EVALUE 5.00e-64
DFAKIMADIWAQYDEVAQKNREELDNNRSQQIEESTTVVTTQSTEVGAAKAMLTELTRTVQFLEINLDSMRNLKASLENSLREVVARYALQMEQLNGILLHLESELAQTWAEGQCQAQEYQALLNIKVKLEAAIATYRRLLEDGKDFNLGDTLDCSNSMQTIQKTTTRQIDPPDSGWQSGV

SEQ ID NO: 35722 - protein, 55 aa, Homo sapiens
  MAP TO AC004019.11; EXPRESSED IN LUNG, SIGNAL = 4.9; EXPRESSED IN ADULT LIVER, SIGNAL = 4.1; EXPRESSED IN PLACENTA, SIGNAL =   5; EXPRESSED IN BRAIN, SIGNAL = 7.6; EXPRESSED IN BONE MARROW, SIGNAL =   6; EXPRESSED IN FETAL LIVER, SIGNAL = 6.6; EXPRESSED IN BT474, SIGNAL =  19; EXPRESSED IN HEART, SIGNAL =  17; EXPRESSED IN HELA, SIGNAL =  12; EXPRESSED IN HBL100, SIGNAL =  26; EST_HUMAN HIT: AW844840.1, EVALUE 4.90e-02; SWISSPROT HIT: O29663, EVALUE 2.00e+00
RHKVGLCDSTYRKCPEWANPYRHKVGLCDSTYRKCQEWAKSIQAQSSVVSRGWGK

SEQ ID NO: 35723 - protein, 44 aa, Homo sapiens
  MAP TO AC004019.11; EXPRESSED IN LUNG, SIGNAL = 4.9; EXPRESSED IN ADULT LIVER, SIGNAL = 4.1; EXPRESSED IN PLACENTA, SIGNAL =   5; EXPRESSED IN BRAIN, SIGNAL = 7.6; EXPRESSED IN BONE MARROW, SIGNAL =   6; EXPRESSED IN FETAL LIVER, SIGNAL = 6.6; EXPRESSED IN BT474, SIGNAL =  19; EXPRESSED IN HEART, SIGNAL =  17; EXPRESSED IN HELA, SIGNAL =  12; EXPRESSED IN HBL100, SIGNAL =  26; EST_HUMAN HIT: AW168734.1, EVALUE 3.10e-01; SWISSPROT HIT: P24170, EVALUE 9.20e-01
TGTKWGCVIPLTGNVQSGQIHTGTKWGCVIPLTGNVKSGQNPYR

SEQ ID NO: 35724 - protein, 26 aa, Homo sapiens
  MAP TO AC004902.2; EXPRESSED IN HELA, SIGNAL = 1.8; EXPRESSED IN HEART, SIGNAL = 0.96; EXPRESSED IN BRAIN, SIGNAL = 0.95; EXPRESSED IN LUNG, SIGNAL = 0.99; EXPRESSED IN FETAL LIVER, SIGNAL = 1.1; EST_HUMAN HIT: AA174078.1, EVALUE 6.00e-03
ALPTGDIVIDIVTYLCTDHPGDVTLV

SEQ ID NO: 35725 - protein, 55 aa, Homo sapiens
  MAP TO AC007749.2; EXPRESSED IN BT474, SIGNAL = 1.4; EXPRESSED IN ADULT LIVER, SIGNAL = 2.5; EXPRESSED IN FETAL LIVER, SIGNAL = 2.4; EXPRESSED IN HBL100, SIGNAL = 2.1; EXPRESSED IN HELA, SIGNAL = 2.1; EXPRESSED IN PLACENTA, SIGNAL =   3; EXPRESSED IN HEART, SIGNAL = 2.9; EXPRESSED IN BRAIN, SIGNAL =   2; EXPRESSED IN BONE MARROW, SIGNAL = 2.2; EXPRESSED IN LUNG, SIGNAL = 4.8; SWISSPROT HIT: P54394, EVALUE 7.70e+00
YYVPGTLLGTEKTAGENIILALKEFIFRWEGEDKAHIKKSMYTIIVSRAIKTNRA

SEQ ID NO: 35726 - protein, 43 aa, Homo sapiens
  MAP TO AC007749.2; EXPRESSED IN BT474, SIGNAL = 1.4; EXPRESSED IN ADULT LIVER, SIGNAL = 2.5; EXPRESSED IN FETAL LIVER, SIGNAL = 2.4; EXPRESSED IN HBL100, SIGNAL = 2.1; EXPRESSED IN HELA, SIGNAL = 2.1; EXPRESSED IN PLACENTA, SIGNAL =   3; EXPRESSED IN HEART, SIGNAL = 2.9; EXPRESSED IN BRAIN, SIGNAL =   2; EXPRESSED IN BONE MARROW, SIGNAL = 2.2; EXPRESSED IN LUNG, SIGNAL = 4.8
TTCQALFLVLRKQQGKISSLLSRSLYSDGRGKIKHTLRNPCTL

SEQ ID NO: 35727 - protein, 73 aa, Homo sapiens
  MAP TO AC007898.1; EXPRESSED IN ADULT LIVER, SIGNAL = 1.4; EXPRESSED IN FETAL LIVER, SIGNAL = 1.4; EXPRESSED IN PLACENTA, SIGNAL =   1; EXPRESSED IN HEART, SIGNAL = 0.97; EXPRESSED IN LUNG, SIGNAL = 1.3; EXPRESSED IN BONE MARROW, SIGNAL = 1.1; EXPRESSED IN BRAIN, SIGNAL = 1.4; EST_HUMAN HIT: BE968257.1, EVALUE 1.30e-01; SWISSPROT HIT: P30706, EVALUE 1.60e-01
  unsure 24
SCYQDSCVSGERKLWVSHCRGRDXPIADSPLKSPAPLRSQTKNKLKTHYERKQCLTPRPLMGKPRSFCFCLFK

SEQ ID NO: 35728 - protein, 36 aa, Homo sapiens
  MAP TO AC009474.1; EXPRESSED IN PLACENTA, SIGNAL = 2.2; EXPRESSED IN HBL100, SIGNAL = 1.7; EXPRESSED IN HELA, SIGNAL = 1.9; EXPRESSED IN HEART, SIGNAL = 2.1; EXPRESSED IN BT474, SIGNAL = 2.1; EXPRESSED IN BRAIN, SIGNAL = 2.1; EXPRESSED IN LUNG, SIGNAL = 1.6; EXPRESSED IN BONE MARROW, SIGNAL = 2.3; EXPRESSED IN ADULT LIVER, SIGNAL =   2; EXPRESSED IN FETAL LIVER, SIGNAL = 2.5; SWISSPROT HIT: P11369, EVALUE 3.20e-01; EST_HUMAN HIT: BE152102.1, EVALUE 6.00e-07
SMLLQRTLMQLEAIILSKLMQKQKIKYHMFSLISGS

SEQ ID NO: 35729 - protein, 90 aa, Homo sapiens
  MAP TO AC010850.2; EXPRESSED IN PLACENTA, SIGNAL = 4.2; EXPRESSED IN HBL100, SIGNAL = 2.5; EXPRESSED IN HEART, SIGNAL = 2.7; EXPRESSED IN BONE MARROW, SIGNAL = 2.1; EXPRESSED IN HELA, SIGNAL = 2.9; EXPRESSED IN BRAIN, SIGNAL = 3.3; EXPRESSED IN LUNG, SIGNAL = 3.6; EXPRESSED IN BT474, SIGNAL = 4.5; EXPRESSED IN ADULT LIVER, SIGNAL = 2.9; EXPRESSED IN FETAL LIVER, SIGNAL = 2.9; EST_HUMAN HIT: AW466922.1, EVALUE 4.00e-39; SWISSPROT HIT: P50520, EVALUE 2.40e+00
RQSKHRRFQNTLVVLHKSGLLEITLKTKELIRQNQATQVELDQLKEQTQLFIEATKSRAPQAWAKLQASLTPGSSNTGSDLEAFSDHPAI

SEQ ID NO: 35730 - protein, 112 aa, Homo sapiens
  MAP TO AC010754.1; EXPRESSED IN BONE MARROW, SIGNAL =   3; EXPRESSED IN BRAIN, SIGNAL =   3; EXPRESSED IN BT474, SIGNAL = 2.1; EXPRESSED IN HBL100, SIGNAL = 2.1; EXPRESSED IN HEART, SIGNAL = 3.4; EXPRESSED IN LUNG, SIGNAL =   3; EXPRESSED IN ADULT LIVER, SIGNAL = 3.3; EXPRESSED IN FETAL LIVER, SIGNAL = 2.9; EXPRESSED IN PLACENTA, SIGNAL =   3; EXPRESSED IN HELA, SIGNAL = 5.9; EST_HUMAN HIT: AW501010.1, EVALUE 5.00e-52; SWISSPROT HIT: P36114, EVALUE 5.50e-01
  unsure 107
YIKGGWILRKAWKIYNKCYLDINALQELYQKKLTEESLTSDAANDNHIVAEGVSEESLNRLKGAVSFGYGLFHLCISMVPPNLLKIINLLGFSWRPPTGAFFTDVCXAKVRT

SEQ ID NO: 35731 - protein, 62 aa, Homo sapiens
  MAP TO AC010966.1; EXPRESSED IN LUNG, SIGNAL = 9.7; EXPRESSED IN BT474, SIGNAL = 4.2; EXPRESSED IN PLACENTA, SIGNAL =  13; EXPRESSED IN BRAIN, SIGNAL =  12; EXPRESSED IN BONE MARROW, SIGNAL =  13; EXPRESSED IN ADULT LIVER, SIGNAL =  10; EXPRESSED IN FETAL LIVER, SIGNAL =  15; EXPRESSED IN HEART, SIGNAL = 9.8; EXPRESSED IN HELA, SIGNAL = 8.5; EXPRESSED IN HBL100, SIGNAL = 5.9; SWISSPROT HIT: P14866, EVALUE 1.10e+00; EST_HUMAN HIT: BF304825.1, EVALUE 5.20e-01
  unsure 15
VHGPFGGFHSTLHPXGHGPSNTVLDDMLLHCPPYSLEFCEGRDHVHLIHHRTDSEKGSKSST

SEQ ID NO: 35732 - protein, 33 aa, Homo sapiens
  MAP TO AL109658.1; EXPRESSED IN FETAL LIVER, SIGNAL =   1; EXPRESSED IN BT474, SIGNAL = 1.9; EXPRESSED IN HBL100, SIGNAL = 1.3; EXPRESSED IN PLACENTA, SIGNAL = 1.1; EXPRESSED IN HELA, SIGNAL = 1.4; EXPRESSED IN HEART, SIGNAL = 1.4; EXPRESSED IN LUNG, SIGNAL = 4.7; EST_HUMAN HIT: R08951.1, EVALUE 2.00e-13
TGELGYGGPSGRGLCEAQRSLQSLHWRGSETGQ

SEQ ID NO: 35733 - protein, 32 aa, Homo sapiens
  MAP TO AL109658.1; EXPRESSED IN FETAL LIVER, SIGNAL =   1; EXPRESSED IN BT474, SIGNAL = 1.9; EXPRESSED IN HBL100, SIGNAL = 1.3; EXPRESSED IN PLACENTA, SIGNAL = 1.1; EXPRESSED IN HELA, SIGNAL = 1.4; EXPRESSED IN HEART, SIGNAL = 1.4; EXPRESSED IN LUNG, SIGNAL = 4.7; SWISSPROT HIT: Q06644, EVALUE 6.30e+00; EST_HUMAN HIT: BF082247.1, EVALUE 4.00e-12
QVNLDMEDHRDEDFVKPKGAFKAFTGEGQKLG

SEQ ID NO: 35734 - protein, 17 aa, Homo sapiens
  MAP TO AC011282.1; EXPRESSED IN FETAL LIVER, SIGNAL = 1.6; EXPRESSED IN ADULT LIVER, SIGNAL = 1.7; EXPRESSED IN PLACENTA, SIGNAL = 1.9; EXPRESSED IN HEART, SIGNAL = 1.9; EXPRESSED IN BRAIN, SIGNAL = 1.4; EXPRESSED IN BT474, SIGNAL = 1.1; EXPRESSED IN HELA, SIGNAL = 1.4; EXPRESSED IN HBL100, SIGNAL = 1.1; EXPRESSED IN LUNG, SIGNAL = 1.4; EXPRESSED IN BONE MARROW, SIGNAL = 1.5; EST_HUMAN HIT: AA344605.1, EVALUE 2.50e-01
RKTHYQRRNSSWLQKFA

SEQ ID NO: 35735 - protein, 149 aa, Homo sapiens
  MAP TO AL109752.4; EXPRESSED IN ADULT LIVER, SIGNAL = 1.1; EXPRESSED IN BT474, SIGNAL = 1.1; EXPRESSED IN FETAL LIVER, SIGNAL = 0.97; EXPRESSED IN HBL100, SIGNAL =   1; EXPRESSED IN HEART, SIGNAL = 0.93; EXPRESSED IN BRAIN, SIGNAL = 1.1; EXPRESSED IN LUNG, SIGNAL = 2.7; SWISSPROT HIT: Q60698, EVALUE 1.00e-04; EST_HUMAN HIT: BF685404.1, EVALUE 1.00e-42
SGAGVPGGLFRAEPLYSTPREPPRLTPNMINSFVVNNHSNSAGGGGRGNTNTNECRMVDMHGMKVASFLMDGQELICLPQVFDLFLKHLVGGLHTVYTKLKRLDISPVVCTVEQVRILRGLGAIQPGVNRCKLITRKDFETLFTDCTNA

SEQ ID NO: 35736 - protein, 84 aa, Homo sapiens
  MAP TO AC011301.1; EXPRESSED IN PLACENTA, SIGNAL = 1.1; EXPRESSED IN HBL100, SIGNAL =   1; EXPRESSED IN HEART, SIGNAL = 1.4; EXPRESSED IN BRAIN, SIGNAL = 1.2; EXPRESSED IN BONE MARROW, SIGNAL = 1.4; EXPRESSED IN BT474, SIGNAL =   1; EXPRESSED IN ADULT LIVER, SIGNAL = 1.6; EXPRESSED IN FETAL LIVER, SIGNAL = 1.2; EST_HUMAN HIT: AA306508.1, EVALUE 2.40e+00
NYVPELADDGTKPQMLLRPLPKPFLLRRLPVSSQLAPNCTACPLHALSQAAVNLFFSKTCLRLVLPMLKKGQQLSIQLDQRGLP

SEQ ID NO: 35737 - protein, 17 aa, Homo sapiens
  MAP TO AC011301.1; EXPRESSED IN PLACENTA, SIGNAL = 1.1; EXPRESSED IN HBL100, SIGNAL =   1; EXPRESSED IN HEART, SIGNAL = 1.4; EXPRESSED IN BRAIN, SIGNAL = 1.2; EXPRESSED IN BONE MARROW, SIGNAL = 1.4; EXPRESSED IN BT474, SIGNAL =   1; EXPRESSED IN ADULT LIVER, SIGNAL = 1.6; EXPRESSED IN FETAL LIVER, SIGNAL = 1.2
TIMFPNWLTMGLSHRCC

SEQ ID NO: 35738 - protein, 69 aa, Homo sapiens
  MAP TO AL049652.13; EXPRESSED IN PLACENTA, SIGNAL =   1; EXPRESSED IN HBL100, SIGNAL = 1.7; EXPRESSED IN HELA, SIGNAL = 3.1; EXPRESSED IN BONE MARROW, SIGNAL =   2; EXPRESSED IN BT474, SIGNAL = 1.7; EXPRESSED IN HEART, SIGNAL = 0.89; EXPRESSED IN BRAIN, SIGNAL = 1.7; EXPRESSED IN LUNG, SIGNAL = 3.3; EXPRESSED IN ADULT LIVER, SIGNAL = 1.1; EXPRESSED IN FETAL LIVER, SIGNAL =   1; EST_HUMAN HIT: BE253201.1, EVALUE 7.00e-26; SWISSPROT HIT: P53914, EVALUE 7.00e-12
LSREELEALFLPYDLKRLEMYSRNMVDYHLIMDMIPAISRIYFLNQLGDLALSAAQSVCYLLLAWRRSE

SEQ ID NO: 35739 - protein, 77 aa, Homo sapiens [sequence omitted]

SEQ ID NO: 35740 - protein, 96 aa, Homo sapiens
  MAP TO AL117186.1; EXPRESSED IN LUNG, SIGNAL = 2.6; EXPRESSED IN BRAIN, SIGNAL = 2.3; EXPRESSED IN BT474, SIGNAL = 1.6; EXPRESSED IN ADULT LIVER, SIGNAL = 2.8; EXPRESSED IN HEART, SIGNAL = 2.5; EXPRESSED IN PLACENTA, SIGNAL = 2.3; EXPRESSED IN BONE MARROW, SIGNAL = 4.3; EXPRESSED IN FETAL LIVER, SIGNAL = 2.8; EXPRESSED IN HELA, SIGNAL = 1.6; EXPRESSED IN HBL100, SIGNAL = 2.1; SWISSPROT HIT: O83983, EVALUE 3.50e+00; EST_HUMAN HIT: BF343371.1, EVALUE 8.80e+00
LSRRHFGHLVLVPAPLPQVEFPGHMARGALSPLTLWPCVILQANLLQEEEGSHEDFSQLLRNFGQWLQVENSKLVRIIAMRTSTAEDLRTRKSKLQ

SEQ ID NO: 35741 - protein, 33 aa, Homo sapiens
  MAP TO AL079351.1; EXPRESSED IN FETAL LIVER, SIGNAL = 0.97; EXPRESSED IN ADULT LIVER, SIGNAL = 1.1; EXPRESSED IN HEART, SIGNAL =   1; EXPRESSED IN PLACENTA, SIGNAL =   1; EXPRESSED IN BRAIN, SIGNAL = 1.1; EXPRESSED IN BONE MARROW, SIGNAL = 1.2; EXPRESSED IN LUNG, SIGNAL = 3.6
FVTSPPSSTPQSGPPAALSGRVAPEEADVLPAH

SEQ ID NO: 35742 - protein, 27 aa, Homo sapiens
  MAP TO AL035691.17; EXPRESSED IN FETAL LIVER, SIGNAL = 2.6; EXPRESSED IN ADULT LIVER, SIGNAL = 1.6; EXPRESSED IN PLACENTA, SIGNAL = 1.8; EXPRESSED IN HELA, SIGNAL = 1.1; EXPRESSED IN BT474, SIGNAL =   1; EXPRESSED IN HEART, SIGNAL = 1.3; EXPRESSED IN HBL100, SIGNAL = 1.1; EXPRESSED IN BRAIN, SIGNAL = 2.4; EXPRESSED IN LUNG, SIGNAL = 2.5; EXPRESSED IN BONE MARROW, SIGNAL = 2.1
TGTSLEKVRIESQVKMYEHFVDDSLDP

SEQ ID NO: 35743 - protein, 72 aa, Homo sapiens
  MAP TO AF186193.1; EXPRESSED IN ADULT LIVER, SIGNAL = 5.1; EXPRESSED IN BT474, SIGNAL =  23; EXPRESSED IN FETAL LIVER, SIGNAL = 5.5; EXPRESSED IN HBL100, SIGNAL =  20; EXPRESSED IN HEART, SIGNAL =  11; EXPRESSED IN PLACENTA, SIGNAL = 7.4; EXPRESSED IN HELA, SIGNAL =  22; EXPRESSED IN BRAIN, SIGNAL = 5.2; EXPRESSED IN BONE MARROW, SIGNAL = 8.1; EXPRESSED IN LUNG, SIGNAL = 7.1; EST_HUMAN HIT: BE741141.1, EVALUE 2.00e-35; SWISSPROT HIT: P25120, EVALUE 2.00e-36
QLNIGNVLPVGTMPEGTIVCCLEEKPGDRGKLARASGNYATVISHNPETKKTRVKLPSGSKKVISSANRAVV

SEQ ID NO: 35744 - protein, 46 aa, Homo sapiens
  MAP TO AF186193.1; EXPRESSED IN ADULT LIVER, SIGNAL = 5.1; EXPRESSED IN BT474, SIGNAL =  23; EXPRESSED IN FETAL LIVER, SIGNAL = 5.5; EXPRESSED IN HBL100, SIGNAL =  20; EXPRESSED IN HEART, SIGNAL =  11; EXPRESSED IN PLACENTA, SIGNAL = 7.4; EXPRESSED IN HELA, SIGNAL =  22; EXPRESSED IN BRAIN, SIGNAL = 5.2; EXPRESSED IN BONE MARROW, SIGNAL = 8.1; EXPRESSED IN LUNG, SIGNAL = 7.1; EST_HUMAN HIT: BF683360.1, EVALUE 2.00e-13; SWISSPROT HIT: P27302, EVALUE 6.00e+00
SLWAPCLRVQSCAAWRRSLETVASWPGHQGTMPPLSPTTLRPRRPV

SEQ ID NO: 35745 - protein, 26 aa, Homo sapiens
  MAP TO AL050342.29; EXPRESSED IN BONE MARROW, SIGNAL = 5.4; EXPRESSED IN LUNG, SIGNAL = 1.3; EXPRESSED IN ADULT LIVER, SIGNAL = 2.4; EXPRESSED IN BT474, SIGNAL = 2.3; EXPRESSED IN FETAL LIVER, SIGNAL = 2.3; EXPRESSED IN PLACENTA, SIGNAL = 2.4; EXPRESSED IN HBL100, SIGNAL = 2.4; EXPRESSED IN HEART, SIGNAL = 2.4; EXPRESSED IN HELA, SIGNAL = 2.5; EXPRESSED IN BRAIN, SIGNAL = 4.5
LLLIRTSVIELGLTLIQCDLILPLAQ

SEQ ID NO: 35746 - protein, 30 aa, Homo sapiens
  MAP TO AP000403.1; EXPRESSED IN HEART, SIGNAL = 2.2; EXPRESSED IN PLACENTA, SIGNAL = 2.7; EXPRESSED IN HBL100, SIGNAL = 1.2; EXPRESSED IN BRAIN, SIGNAL = 1.4; EXPRESSED IN BONE MARROW, SIGNAL = 1.2; EXPRESSED IN LUNG, SIGNAL = 2.2; EXPRESSED IN ADULT LIVER, SIGNAL = 1.8; EXPRESSED IN FETAL LIVER, SIGNAL = 1.1; EXPRESSED IN HELA, SIGNAL = 1.3
KNKNKDILIHREKTLENALLPEDGSFFRPE

SEQ ID NO: 35747 - protein, 56 aa, Homo sapiens
  MAP TO AL035705.14; EXPRESSED IN HEART, SIGNAL = 2.1; EXPRESSED IN BRAIN, SIGNAL = 0.91; EXPRESSED IN LUNG, SIGNAL = 8.7; EXPRESSED IN FETAL LIVER, SIGNAL = 1.5; EXPRESSED IN HELA, SIGNAL = 1.8; EST_HUMAN HIT: AA826292.1, EVALUE 2.00e-27; SWISSPROT HIT: Q09137, EVALUE 2.00e-28
LKPHPERMPPLIADSPKARCPLDALNTTKPKSLAVKKAKWHLGIRSQSKPYDIMAE

SEQ ID NO: 35748 - protein, 74 aa, Homo sapiens
  MAP TO AL035705.14; EXPRESSED IN HEART, SIGNAL = 2.1; EXPRESSED IN BRAIN, SIGNAL = 0.91; EXPRESSED IN LUNG, SIGNAL = 8.7; EXPRESSED IN FETAL LIVER, SIGNAL = 1.5; EXPRESSED IN HELA, SIGNAL = 1.8; SWISSPROT HIT: Q09137, EVALUE 8.00e-40; EST_HUMAN HIT: BE677760.1, EVALUE 1.00e-29
EHEWFKQDLPSYLFPEDPSYDANVIDDEAVKEVCEKFECTESEVMNSLYSGDPQDQLAVAYHLIIDNRRIMNQA

SEQ ID NO: 35749 - protein, 65 aa, Homo sapiens
  MAP TO AL110504.1; EXPRESSED IN LUNG, SIGNAL = 1.4; EXPRESSED IN BRAIN, SIGNAL = 2.3; EXPRESSED IN BONE MARROW, SIGNAL =   2; EXPRESSED IN ADULT LIVER, SIGNAL = 2.3; EXPRESSED IN BT474, SIGNAL = 3.7; EXPRESSED IN FETAL LIVER, SIGNAL = 1.7; EXPRESSED IN HELA, SIGNAL = 4.4; EXPRESSED IN PLACENTA, SIGNAL = 1.7; EXPRESSED IN HEART, SIGNAL = 1.6; EXPRESSED IN HBL100, SIGNAL = 2.9
LQQPPSLQPTPQVPQVQQSQPSQSSEPSQPQQKDPQQPAQQQQPAQQPKKPSPQPSSPRQVKRAV

SEQ ID NO: 35750 - protein, 37 aa, Homo sapiens
  MAP TO AL035705.14; EXPRESSED IN PLACENTA, SIGNAL = 3.2; EXPRESSED IN HBL100, SIGNAL = 1.9; EXPRESSED IN HEART, SIGNAL = 3.1; EXPRESSED IN LUNG, SIGNAL = 7.8; EXPRESSED IN BRAIN, SIGNAL = 2.5; EXPRESSED IN BONE MARROW, SIGNAL = 2.1; EXPRESSED IN ADULT LIVER, SIGNAL = 3.3; EXPRESSED IN BT474, SIGNAL = 1.3; EXPRESSED IN FETAL LIVER, SIGNAL = 2.7; EXPRESSED IN HELA, SIGNAL = 2.4
SLTMESQVKSSRVMQLDQQHQGLTWSAWIQSTASQLS

SEQ ID NO: 35751 - protein, 26 aa, Homo sapiens
  MAP TO AL033532.12; EXPRESSED IN FETAL LIVER, SIGNAL =   1; EXPRESSED IN HEART, SIGNAL = 1.1; EXPRESSED IN LUNG, SIGNAL = 4.8; EXPRESSED IN BONE MARROW, SIGNAL = 0.99; EXPRESSED IN ADULT LIVER, SIGNAL = 1.3
VESEKRGAEEGKLCCDEYDDAVSSAA

SEQ ID NO: 35752 - protein, 59 aa, Homo sapiens
  MAP TO AL033532.12; EXPRESSED IN FETAL LIVER, SIGNAL =   1; EXPRESSED IN HEART, SIGNAL = 1.1; EXPRESSED IN LUNG, SIGNAL = 4.8; EXPRESSED IN BONE MARROW, SIGNAL = 0.99; EXPRESSED IN ADULT LIVER, SIGNAL = 1.3; SWISSPROT HIT: P16382, EVALUE 3.00e-01; EST_HUMAN HIT: BF526334.1, EVALUE 1.10e-01
CAVMNMMMQSAQLLVRIGATTSSSAHLSPSPIHPVPFSSTPRANTAATLTCIPFPMITP

SEQ ID NO: 35753 - protein, 74 aa, Homo sapiens
  MAP TO AL031658.10; EXPRESSED IN PLACENTA, SIGNAL = 1.2; EXPRESSED IN HBL100, SIGNAL = 1.2; EXPRESSED IN HEART, SIGNAL = 1.4; EXPRESSED IN LUNG, SIGNAL = 3.5; EXPRESSED IN BRAIN, SIGNAL = 1.8; EXPRESSED IN BONE MARROW, SIGNAL = 2.2; EXPRESSED IN FETAL LIVER, SIGNAL = 1.5; EXPRESSED IN ADULT LIVER, SIGNAL = 1.4; EXPRESSED IN BT474, SIGNAL = 1.2; EXPRESSED IN HELA, SIGNAL = 1.3; EST_HUMAN HIT: BE781542.1, EVALUE 1.00e-13; SWISSPROT HIT: P17953, EVALUE 1.70e+00
LTRKNYMVKNLKRFRKQLEREAGKLEAAKCDFFPKTFEMPCEYHLFVEEFRKNPGITWIMKPVSAQCQGLGGRE

SEQ ID NO: 35754 - protein, 30 aa, Homo sapiens
  MAP TO AF172274.1; EXPRESSED IN BT474, SIGNAL = 4.8; EXPRESSED IN HBL100, SIGNAL = 3.1; EXPRESSED IN HELA, SIGNAL =  15; EXPRESSED IN PLACENTA, SIGNAL = 1.5; EXPRESSED IN HEART, SIGNAL = 1.8; EXPRESSED IN LUNG, SIGNAL = 1.1; EXPRESSED IN BRAIN, SIGNAL =   2; EXPRESSED IN BONE MARROW, SIGNAL =   2; EXPRESSED IN ADULT LIVER, SIGNAL = 1.5; EXPRESSED IN FETAL LIVER, SIGNAL = 1.1; EST_HUMAN HIT: BE207575.1, EVALUE 8.00e-07
TVGMRSLWESLQRQLQPERAQKDPHRGEAL

SEQ ID NO: 35755 - protein, 30 aa, Homo sapiens
  MAP TO AL079307.2; EXPRESSED IN BONE MARROW, SIGNAL = 1.9; EXPRESSED IN FETAL LIVER, SIGNAL = 2.7; EXPRESSED IN ADULT LIVER, SIGNAL = 1.4; EXPRESSED IN HELA, SIGNAL = 0.91; EXPRESSED IN HEART, SIGNAL = 0.87; EXPRESSED IN PLACENTA, SIGNAL = 0.97; EXPRESSED IN BRAIN, SIGNAL = 1.3
KLVETGPAVFDRYPLFEEKWLDLLSKEVRK

SEQ ID NO: 35756 - protein, 87 aa, Homo sapiens
  MAP TO AP000181.1; EXPRESSED IN LUNG, SIGNAL = 3.7; EXPRESSED IN ADULT LIVER, SIGNAL = 1.4; EXPRESSED IN BT474, SIGNAL = 2.1; EXPRESSED IN PLACENTA, SIGNAL = 0.96; EXPRESSED IN HBL100, SIGNAL = 1.5; EXPRESSED IN HELA, SIGNAL = 3.2; EXPRESSED IN HEART, SIGNAL = 1.1; EXPRESSED IN BRAIN, SIGNAL = 0.99; EST_HUMAN HIT: AA042813.1, EVALUE 8.00e-41; SWISSPROT HIT: Q95157, EVALUE 7.00e-21
CLVTVLWNLLSILAVSPDSHLHTPMHFFLCNLSLPDIGFTSTTVPKMIVDIQSHSRVISYAGCLTQMSLSAIFGGMEERHAPECDGL

SEQ ID NO: 35757 - protein, 119 aa, Homo sapiens
  MAP TO AC011082.1; EXPRESSED IN HELA, SIGNAL =   4; EXPRESSED IN PLACENTA, SIGNAL = 2.2; EXPRESSED IN HBL100, SIGNAL = 1.5; EXPRESSED IN HEART, SIGNAL = 1.6; EXPRESSED IN BONE MARROW, SIGNAL = 1.1; EXPRESSED IN LUNG, SIGNAL = 3.4; EXPRESSED IN BT474, SIGNAL =   1; EXPRESSED IN ADULT LIVER, SIGNAL = 3.1; SWISSPROT HIT: P48628, EVALUE 1.30e+00; EST_HUMAN HIT: AA403053.1, EVALUE 2.00e-34
GPPVNVGAYGVQVINGFLAQVQLTVGPVGSQTDSVVVSPVPECIIVIDILSSWQNPHIDSLTGSMRAIMVGKAKWKPLELSLPRKIVNQKQYRIPGGIVEISATVKSLKDAGAVIPTTF

SEQ ID NO: 35758 - protein, 50 aa, Homo sapiens
  MAP TO AL034422.18; EXPRESSED IN BT474, SIGNAL = 2.7; EXPRESSED IN ADULT LIVER, SIGNAL = 1.3; EXPRESSED IN HELA, SIGNAL = 1.2; EXPRESSED IN BONE MARROW, SIGNAL = 1.1; EXPRESSED IN LUNG, SIGNAL = 1.6; EXPRESSED IN BRAIN, SIGNAL = 0.97; EXPRESSED IN FETAL LIVER, SIGNAL = 0.9; EXPRESSED IN HEART, SIGNAL = 0.87; EXPRESSED IN HBL100, SIGNAL = 1.2; EXPRESSED IN PLACENTA, SIGNAL = 4.2; SWISSPROT HIT: Q09472, EVALUE 7.80e+00; EST_HUMAN HIT: BF032364.1, EVALUE 5.10e+00
DSGTLTWGTAFEQSLKNLRLEGSQRKLQKNLNPKGQRKNKTDPILGQKRS

SEQ ID NO: 35759 - protein, 82 aa, Homo sapiens
  MAP TO AL080317.11; EXPRESSED IN FETAL LIVER, SIGNAL = 1.8; EXPRESSED IN ADULT LIVER, SIGNAL =   2; EXPRESSED IN HELA, SIGNAL = 3.2; EXPRESSED IN BRAIN, SIGNAL = 1.1; EXPRESSED IN LUNG, SIGNAL = 7.6; EXPRESSED IN BONE MARROW, SIGNAL = 1.3; EXPRESSED IN BT474, SIGNAL = 1.7; EXPRESSED IN PLACENTA, SIGNAL = 2.8; EXPRESSED IN HEART, SIGNAL = 2.4; EXPRESSED IN HBL100, SIGNAL = 1.3; EST_HUMAN HIT: AW958271.1, EVALUE 2.00e-42; SWISSPROT HIT: O60673, EVALUE 3.00e-43
KMLTYDRRSEPQVGERVPYVIIYGTPGVPLIQLVRRPVEVLQDPTLRLNATYYITKQILPPLARIFSLIGIDVFSWYHELPR

SEQ ID NO: 35760 - protein, 44 aa, Homo sapiens
  MAP TO AC007671.5; EXPRESSED IN FETAL LIVER, SIGNAL = 1.4; EXPRESSED IN ADULT LIVER, SIGNAL =   1; EXPRESSED IN HELA, SIGNAL = 1.7; EXPRESSED IN BRAIN, SIGNAL = 1.2; EXPRESSED IN BONE MARROW, SIGNAL = 1.2; EXPRESSED IN BT474, SIGNAL = 2.1; EXPRESSED IN HEART, SIGNAL = 0.99; EXPRESSED IN HBL100, SIGNAL = 1.1; SWISSPROT HIT: P38144, EVALUE 6.10e+00; EST_HUMAN HIT: BE729942.1, EVALUE 2.00e-20
REVTEPLNLNPAKRPRRQDWDGELYENGSFYFAKRHLIEMGYLQ

SEQ ID NO: 35761 - protein, 202 aa, Homo sapiens
  MAP TO AL080243.21; EXPRESSED IN BONE MARROW, SIGNAL =  12; EXPRESSED IN FETAL LIVER, SIGNAL = 9.7; EXPRESSED IN HBL100, SIGNAL =  28; EXPRESSED IN HELA, SIGNAL =  70; EXPRESSED IN HEART, SIGNAL =  16; EXPRESSED IN BRAIN, SIGNAL = 5.2; EXPRESSED IN LUNG, SIGNAL =  25; EXPRESSED IN BT474, SIGNAL =  55; EXPRESSED IN ADULT LIVER, SIGNAL =  15; EXPRESSED IN PLACENTA, SIGNAL = 7.3; SWISSPROT HIT: P29314, EVALUE 7.00e-90; EST_HUMAN HIT: BF346875.1, EVALUE 1.00e-92
RRRVRGANMPVARSWVCRKTYVTPRRSFEKSRLDQELKLIEEYGLRNKREVWRVKFTLAKIRKAARELLTLDQKDPRRLFEGNALLWRLVCIGVLDEGKMKLDYILGLKIEDFLERRLQTQVFKLGLAKSIHHARVLIRQRHFRVRKQVVNIPSFIVRLDSQKHIDFSLCSPYGGGRPGRVKRKNAKKGQGGAGAGDHKEED

SEQ ID NO: 35762 - protein, 95 aa, Homo sapiens
  MAP TO AC004955.2; EXPRESSED IN BONE MARROW, SIGNAL = 1.4; EXPRESSED IN HBL100, SIGNAL = 1.3; EXPRESSED IN HELA, SIGNAL = 2.6; EXPRESSED IN LUNG, SIGNAL = 1.9; EXPRESSED IN BRAIN, SIGNAL = 1.5; EXPRESSED IN BT474, SIGNAL = 2.1; EXPRESSED IN ADULT LIVER, SIGNAL = 1.8; EXPRESSED IN FETAL LIVER, SIGNAL = 1.3; EXPRESSED IN PLACENTA, SIGNAL = 1.4; EXPRESSED IN HEART, SIGNAL = 1.8; SWISSPROT HIT: Q00798, EVALUE 1.10e+00; EST_HUMAN HIT: BE815957.1, EVALUE 2.00e-51
CVQWVDDAKLNQLRREGIRYARIQLYDNDIYFIPRNVVHQFKTVSAVCSLAWHIRLKLYHSEEDTSQNTATHETGTSSDSTSSVLGPHTDNMICA

SEQ ID NO: 35763 - protein, 27 aa, Homo sapiens
  MAP TO AL033531.7; EXPRESSED IN PLACENTA, SIGNAL = 1.3; EXPRESSED IN BRAIN, SIGNAL = 1.8; EXPRESSED IN FETAL LIVER, SIGNAL = 1.1; EXPRESSED IN HBL100, SIGNAL = 1.8; EXPRESSED IN HELA, SIGNAL =  11; EXPRESSED IN HEART, SIGNAL = 2.5; EXPRESSED IN LUNG, SIGNAL = 0.9; EXPRESSED IN BONE MARROW, SIGNAL = 1.2; EXPRESSED IN ADULT LIVER, SIGNAL = 2.6; EXPRESSED IN BT474, SIGNAL = 2.7; EST_HUMAN HIT: AV696698.1, EVALUE 1.00e-11; SWISSPROT HIT: P10758, EVALUE 2.20e+00
MGNNRKWHWNSGNQQFCTGSVGRCCLL

SEQ ID NO: 35764 - protein, 86 aa, Homo sapiens
  MAP TO AL121577.1; EXPRESSED IN BT474, SIGNAL = 1.2; EXPRESSED IN BONE MARROW, SIGNAL = 2.3; EXPRESSED IN LUNG, SIGNAL = 1.6; EXPRESSED IN BRAIN, SIGNAL = 1.8; EXPRESSED IN ADULT LIVER, SIGNAL = 2.4; EXPRESSED IN FETAL LIVER, SIGNAL = 1.5; EXPRESSED IN PLACENTA, SIGNAL = 2.2; EXPRESSED IN HEART, SIGNAL = 2.2; EXPRESSED IN HELA, SIGNAL =   2; EXPRESSED IN HBL100, SIGNAL = 3.3; EST_HUMAN HIT: AI697050.1, EVALUE 6.00e-43; SWISSPROT HIT: P51811, EVALUE 1.00e-43
FEVFCIYFQSGNNEEPYVSITKKRQMPKNGLSEEIEKEVGQAEGKLITHRSAFSRASVIQAFLGSAPQLTLQLYISVMQQDVTVGR

SEQ ID NO: 35765 - protein, 63 aa, Homo sapiens
  MAP TO AP000553.1; EXPRESSED IN BRAIN, SIGNAL =   2; EXPRESSED IN BT474, SIGNAL = 1.4; EXPRESSED IN HBL100, SIGNAL = 1.7; EXPRESSED IN HELA, SIGNAL = 1.6; EXPRESSED IN BONE MARROW, SIGNAL = 2.2; EXPRESSED IN ADULT LIVER, SIGNAL = 2.4; EXPRESSED IN FETAL LIVER, SIGNAL = 1.8; EXPRESSED IN PLACENTA, SIGNAL =   2; EXPRESSED IN HEART, SIGNAL =   2; EST_HUMAN HIT: BE780971.1, EVALUE 8.90e-01; SWISSPROT HIT: P05892, EVALUE 1.90e+00
ATGRAPSFPGGTTPAWPVTRGLQRVRHTGFSFRPNRRARVSPNSRARGWEEEPSASSVLTPAP

SEQ ID NO: 35766 - protein, 38 aa, Homo sapiens
  MAP TO AP000519.1; EXPRESSED IN ADULT LIVER, SIGNAL =  26; EXPRESSED IN BT474, SIGNAL = 9.5; EXPRESSED IN FETAL LIVER, SIGNAL =  10; EXPRESSED IN PLACENTA, SIGNAL =  20; EXPRESSED IN HBL100, SIGNAL =  64; EXPRESSED IN HELA, SIGNAL =  79; EXPRESSED IN HEART, SIGNAL =  33; EXPRESSED IN BONE MARROW, SIGNAL =  52; EXPRESSED IN LUNG, SIGNAL =  87; EXPRESSED IN BRAIN, SIGNAL =   9; EST_HUMAN HIT: BF344916.1, EVALUE 1.50e-02; SWISSPROT HIT: P16188, EVALUE 1.00e-03
LSSQPTIPIVGIIAGLVLLGAVITGAVVAAVMWRRKSS

SEQ ID NO: 35767 - protein, 39 aa, Homo sapiens
  MAP TO AP000514.1; EXPRESSED IN PLACENTA, SIGNAL = 1.1; EXPRESSED IN BRAIN, SIGNAL = 1.3; EXPRESSED IN FETAL LIVER, SIGNAL = 0.89; EXPRESSED IN BT474, SIGNAL = 1.6; EXPRESSED IN HEART, SIGNAL =   2; EXPRESSED IN HELA, SIGNAL = 2.4; EXPRESSED IN HBL100, SIGNAL =   1; EXPRESSED IN LUNG, SIGNAL = 0.93; EXPRESSED IN ADULT LIVER, SIGNAL = 0.91; EST_HUMAN HIT: AA261957.1, EVALUE 6.00e-10; SWISSPROT HIT: P53590, EVALUE 8.00e-06
GLVLIGSLHSGANIEDVAAETPEAIIKVPIDIVEGIKEE

SEQ ID NO: 35768 - protein, 131 aa, Homo sapiens
  MAP TO AC007981.24; EXPRESSED IN HELA, SIGNAL = 6.8; EXPRESSED IN PLACENTA, SIGNAL = 2.4; EXPRESSED IN HBL100, SIGNAL = 2.4; EXPRESSED IN HEART, SIGNAL =   2; EXPRESSED IN BRAIN, SIGNAL =   2; EXPRESSED IN BONE MARROW, SIGNAL = 3.6; EXPRESSED IN LUNG, SIGNAL = 7.9; EXPRESSED IN BT474, SIGNAL = 1.5; EXPRESSED IN FETAL LIVER, SIGNAL = 3.1; EXPRESSED IN ADULT LIVER, SIGNAL = 8.6; EST_HUMAN HIT: AL042278.1, EVALUE 4.00e-54; SWISSPROT HIT: P52591, EVALUE 1.00e-08
LCPGKIVLRALKESGAGMPEQDKDPRVQENPGDQRRVPEVTGDAPSAFRPLRDNRGLSPFVPGPGPLQTDLHAQRSEIRYNQTSQISWTSSCTNRNAISSSYSSTGGLPGLKRRRGPASSHCQLTLSSSKT

SEQ ID NO: 35769 - protein, 89 aa, Homo sapiens
  MAP TO AC009948.2; EXPRESSED IN ADULT LIVER, SIGNAL = 1.2; EXPRESSED IN BT474, SIGNAL = 5.5; EXPRESSED IN FETAL LIVER, SIGNAL = 3.6; EXPRESSED IN HBL100, SIGNAL = 0.91; EXPRESSED IN HEART, SIGNAL =  56; SWISSPROT HIT: P16419, EVALUE 6.00e-09; EST_HUMAN HIT: AA764782.1, EVALUE 9.00e-47
PSDISIDEGKVLTVACAFTGEPTPEVTWSCGGRKIHSQEQGRFHIENTDDLTTLIIMDVQKQDGGLYTLSLGNEFGSDSATVNIHIRSI

SEQ ID NO: 35770 - protein, 94 aa, Homo sapiens
  MAP TO AP000427.1; EXPRESSED IN LUNG, SIGNAL = 0.89; EXPRESSED IN BRAIN, SIGNAL =   2; EXPRESSED IN ADULT LIVER, SIGNAL = 1.8; EXPRESSED IN BT474, SIGNAL = 3.2; EXPRESSED IN FETAL LIVER, SIGNAL = 1.2; EXPRESSED IN HELA, SIGNAL = 2.2; EXPRESSED IN HEART, SIGNAL = 1.1; EST_HUMAN HIT: R50877.1, EVALUE 3.00e-33; SWISSPROT HIT: P35579, EVALUE 2.00e-03
ESEIVELKSQLARMREDWIEEECHRVEAQLALKEARKEIKQLKQVIETMRSSLADKDKGIQKYFVDINIQNKKLESLLQSMEMAHSGSLRDELC

SEQ ID NO: 35771 - protein, 112 aa, Homo sapiens
  MAP TO AC008040.7; EXPRESSED IN HEART, SIGNAL = 3.2; EXPRESSED IN BRAIN, SIGNAL = 2.2; EXPRESSED IN BONE MARROW, SIGNAL = 2.5; EXPRESSED IN LUNG, SIGNAL = 3.8; EXPRESSED IN ADULT LIVER, SIGNAL = 4.1; EXPRESSED IN BT474, SIGNAL =  11; EXPRESSED IN FETAL LIVER, SIGNAL =   3; EXPRESSED IN PLACENTA, SIGNAL = 3.1; EXPRESSED IN HBL100, SIGNAL =   3; EXPRESSED IN HELA, SIGNAL = 8.8; EST_HUMAN HIT: AW601763.1, EVALUE 4.00e-28
ADVGFIDSFRPLYTHEYKGPKADLKKDEKSETKKQQKSDSEEKSDSEKKEDEEGKVGPGNHGTEGSGGERHSDTDSDRREDDRSQHSSGNGNDFEMITKEELEQQTDGDCEE

SEQ ID NO: 35772 - protein, 78 aa, Homo sapiens
  MAP TO AL034343.17; EXPRESSED IN HELA, SIGNAL = 1.2; EXPRESSED IN PLACENTA, SIGNAL = 1.7; EXPRESSED IN HBL100, SIGNAL = 1.4; EXPRESSED IN HEART, SIGNAL = 1.3; EXPRESSED IN BRAIN, SIGNAL = 2.2; EXPRESSED IN BONE MARROW, SIGNAL = 1.8; EXPRESSED IN BT474, SIGNAL = 1.3; EXPRESSED IN ADULT LIVER, SIGNAL = 1.8; EXPRESSED IN FETAL LIVER, SIGNAL = 1.6; EST_HUMAN HIT: AI275406.1, EVALUE 1.00e-05; SWISSPROT HIT: Q16552, EVALUE 4.00e-25
VTWDPNRYPSEVVQAQCRNLGCINAQGKEDISMNSVPIQQETLVVRRKHQGCSVSFQLEKVLVTVGCTCVTPVIHHVQ

SEQ ID NO: 35773 - protein, 50 aa, Homo sapiens
  MAP TO AL079341.9; EXPRESSED IN BT474, SIGNAL = 6.4; EXPRESSED IN FETAL LIVER, SIGNAL = 6.4; EXPRESSED IN ADULT LIVER, SIGNAL = 3.7; EXPRESSED IN HELA, SIGNAL =  17; EXPRESSED IN PLACENTA, SIGNAL = 3.9; EXPRESSED IN HBL100, SIGNAL = 4.1; EXPRESSED IN HEART, SIGNAL = 3.9; EXPRESSED IN BRAIN, SIGNAL = 3.1; EXPRESSED IN BONE MARROW, SIGNAL = 1.6; EXPRESSED IN LUNG, SIGNAL = 4.4; EST_HUMAN HIT: BE540156.1, EVALUE 9.00e-08
LLYMVVAVAELLVGELLLRRRRQCCQMFLNSLLQEHWVALKPDHLLSQMP

SEQ ID NO: 35774 - protein, 36 aa, Homo sapiens
  MAP TO AP000470.1; EXPRESSED IN HBL100, SIGNAL = 1.4; EXPRESSED IN HEART, SIGNAL = 1.2; EXPRESSED IN LUNG, SIGNAL = 5.3; EXPRESSED IN BONE MARROW, SIGNAL = 2.2; EXPRESSED IN BRAIN, SIGNAL = 1.2; EXPRESSED IN ADULT LIVER, SIGNAL = 3.9; EXPRESSED IN FETAL LIVER, SIGNAL =   1; EXPRESSED IN PLACENTA, SIGNAL = 1.6; EXPRESSED IN HELA, SIGNAL = 2.4; EST_HUMAN HIT: AA722296.1, EVALUE 4.00e-03; SWISSPROT HIT: P55859, EVALUE 6.20e+00
PSSNTEDYNSTRNFSKDTEPNHNSLLVFPLPNPVRD

SEQ ID NO: 35775 - protein, 43 aa, Homo sapiens
  MAP TO AC004913.2; EXPRESSED IN PLACENTA, SIGNAL =   1; EXPRESSED IN HBL100, SIGNAL = 1.2; EXPRESSED IN HELA, SIGNAL = 3.9; EXPRESSED IN HEART, SIGNAL =   1; EXPRESSED IN LUNG, SIGNAL = 3.1; EXPRESSED IN BONE MARROW, SIGNAL = 0.94; EXPRESSED IN ADULT LIVER, SIGNAL = 1.3; EXPRESSED IN BT474, SIGNAL = 1.3; EST_HUMAN HIT: AI400966.1, EVALUE 1.00e-18; SWISSPROT HIT: P38351, EVALUE 1.60e+00
QNPPKKQAGSKFHARPRFEPVHFVASSSKDERQEDPYGPQTKE

SEQ ID NO: 35776 - protein, 24 aa, Homo sapiens
  MAP TO AC004913.2; EXPRESSED IN PLACENTA, SIGNAL =   1; EXPRESSED IN HBL100, SIGNAL = 1.2; EXPRESSED IN HELA, SIGNAL = 3.9; EXPRESSED IN HEART, SIGNAL =   1; EXPRESSED IN LUNG, SIGNAL = 3.1; EXPRESSED IN BONE MARROW, SIGNAL = 0.94; EXPRESSED IN ADULT LIVER, SIGNAL = 1.3; EXPRESSED IN BT474, SIGNAL = 1.3; EST_HUMAN HIT: AI400966.1, EVALUE 1.00e-05
VKILLKSKPVPNSMRDLVLSLYIL

SEQ ID NO: 35777 - protein, 174 aa, Homo sapiens
  MAP TO AL035458.32; EXPRESSED IN FETAL LIVER, SIGNAL = 1.3; EXPRESSED IN HELA, SIGNAL =  15; EXPRESSED IN HEART, SIGNAL = 1.6; EXPRESSED IN LUNG, SIGNAL = 2.8; EXPRESSED IN BRAIN, SIGNAL = 1.4; EXPRESSED IN BT474, SIGNAL =  11; EXPRESSED IN ADULT LIVER, SIGNAL = 1.5; EXPRESSED IN PLACENTA, SIGNAL = 1.7; EXPRESSED IN HBL100, SIGNAL = 2.2; EXPRESSED IN BONE MARROW, SIGNAL = 1.5; EST_HUMAN HIT: BE886490.1, EVALUE 7.00e-90; SWISSPROT HIT: P33418, EVALUE 5.90e-01
ALMRNLLTPLMEKFKILLENLMLAQDEERQASLADCLNHAVGFASRTSKAFSNKQTVKQCGCSEVYLDCLQTFLLALSCPLQKGILRSGVCTFLHRMIICLEEEVFPFIPSASEHILKDCEAKDLQEFIPLINQITAKFKVQVSPFLQQMFMPLLHAIFEVLLWPAEENDQSAA

SEQ ID NO: 35778 - protein, 72 aa, Homo sapiens
  MAP TO AC010854.1; EXPRESSED IN BONE MARROW, SIGNAL = 1.1; EXPRESSED IN LUNG, SIGNAL =  10; EXPRESSED IN BRAIN, SIGNAL = 5.2; EXPRESSED IN ADULT LIVER, SIGNAL =   1; EXPRESSED IN BT474, SIGNAL = 1.2; EXPRESSED IN HEART, SIGNAL = 0.84; SWISSPROT HIT: P32181, EVALUE 2.80e+00; EST_HUMAN HIT: N51694.1, EVALUE 7.00e-44
HQLGWNRKAFTGRHGSHLPLLWTQHCNHGAVLWPYQRWPHQPCSDCGHGVHQEDQHRQVCLLHRSPVPGGHH

SEQ ID NO: 35779 - protein, 69 aa, Homo sapiens
  MAP TO AL121716.1; EXPRESSED IN HBL100, SIGNAL = 1.5; EXPRESSED IN HEART, SIGNAL = 1.6; EXPRESSED IN LUNG, SIGNAL = 0.93; EXPRESSED IN FETAL LIVER, SIGNAL = 1.5; EXPRESSED IN ADULT LIVER, SIGNAL = 1.6; EXPRESSED IN PLACENTA, SIGNAL =   2; EXPRESSED IN HELA, SIGNAL = 2.2; EXPRESSED IN BRAIN, SIGNAL = 1.3; EXPRESSED IN BONE MARROW, SIGNAL = 2.2; EXPRESSED IN BT474, SIGNAL = 3.4; SWISSPROT HIT: P43313, EVALUE 3.00e+00; EST_HUMAN HIT: BF222312.1, EVALUE 2.00e-08
NKKTILIERHLPIQITLNKVFMAKHTFHWNKGCEFSSFLPQDKEEDFKTVILEGLEMAKHQVRVAVSCL

SEQ ID NO: 35780 - protein, 44 aa, Homo sapiens
  MAP TO AC007728.1; EXPRESSED IN BT474, SIGNAL = 4.9; EXPRESSED IN HEART, SIGNAL =   3; EXPRESSED IN LUNG, SIGNAL = 2.7; EXPRESSED IN BRAIN, SIGNAL = 2.1; EXPRESSED IN FETAL LIVER, SIGNAL = 1.2; EXPRESSED IN ADULT LIVER, SIGNAL = 4.9; EXPRESSED IN PLACENTA, SIGNAL = 2.4; EXPRESSED IN HELA, SIGNAL = 8.7; EXPRESSED IN HBL100, SIGNAL = 2.9; EXPRESSED IN BONE MARROW, SIGNAL = 3.1; EST_HUMAN HIT: AI675772.1, EVALUE 2.00e-12; SWISSPROT HIT: P42960, EVALUE 4.60e+00
IKIHASGFNKLLESIFCILLVVEAFFLQKVVKILEEMVVSWLEV

SEQ ID NO: 35781 - protein, 22 aa, Homo sapiens
  MAP TO AC007728.1; EXPRESSED IN BT474, SIGNAL = 4.9; EXPRESSED IN HEART, SIGNAL =   3; EXPRESSED IN LUNG, SIGNAL = 2.7; EXPRESSED IN BRAIN, SIGNAL = 2.1; EXPRESSED IN FETAL LIVER, SIGNAL = 1.2; EXPRESSED IN ADULT LIVER, SIGNAL = 4.9; EXPRESSED IN PLACENTA, SIGNAL = 2.4; EXPRESSED IN HELA, SIGNAL = 8.7; EXPRESSED IN HBL100, SIGNAL = 2.9; EXPRESSED IN BONE MARROW, SIGNAL = 3.1; EST_HUMAN HIT: AI720877.1, EVALUE 1.00e-04; SWISSPROT HIT: P31702, EVALUE 8.50e+00
QLSAGKMLPQPGGCRKCFPRVC

SEQ ID NO: 35782 - protein, 20 aa, Homo sapiens
  MAP TO AL121658.1; EXPRESSED IN BT474, SIGNAL = 2.9; EXPRESSED IN ADULT LIVER, SIGNAL = 1.3; EXPRESSED IN HELA, SIGNAL = 3.3; EXPRESSED IN HBL100, SIGNAL =   2; EXPRESSED IN HEART, SIGNAL = 1.5; EXPRESSED IN LUNG, SIGNAL =   1; EXPRESSED IN BONE MARROW, SIGNAL = 0.95; EST_HUMAN HIT: BE386406.1, EVALUE 2.00e-03
VELDRQGFVYVFINQEKEVN

SEQ ID NO: 35783 - protein, 54 aa, Homo sapiens
  MAP TO AL035413.19; EXPRESSED IN HBL100, SIGNAL = 4.1; EXPRESSED IN HEART, SIGNAL = 4.4; EXPRESSED IN LUNG, SIGNAL = 3.2; EXPRESSED IN FETAL LIVER, SIGNAL = 4.8; EXPRESSED IN ADULT LIVER, SIGNAL = 6.5; EXPRESSED IN PLACENTA, SIGNAL =  13; EXPRESSED IN HELA, SIGNAL = 5.8; EXPRESSED IN BRAIN, SIGNAL = 5.2; EXPRESSED IN BONE MARROW, SIGNAL = 6.2; EXPRESSED IN BT474, SIGNAL =   3; EST_HUMAN HIT: AI804747.1, EVALUE 3.00e-27
MVWKKLGSRNFSSCPSGSIQWIWDVLGECAQDGWDEASVGLGLISILCFAASTF

SEQ ID NO: 35784 - protein, 80 aa, Homo sapiens
  MAP TO AL035413.19; EXPRESSED IN HBL100, SIGNAL = 4.1; EXPRESSED IN HEART, SIGNAL = 4.4; EXPRESSED IN LUNG, SIGNAL = 3.2; EXPRESSED IN FETAL LIVER, SIGNAL = 4.8; EXPRESSED IN ADULT LIVER, SIGNAL = 6.5; EXPRESSED IN PLACENTA, SIGNAL =  13; EXPRESSED IN HELA, SIGNAL = 5.8; EXPRESSED IN BRAIN, SIGNAL = 5.2; EXPRESSED IN BONE MARROW, SIGNAL = 6.2; EXPRESSED IN BT474, SIGNAL =   3; EST_HUMAN HIT: BE875511.1, EVALUE 3.00e-14
DLPVLKASSLPPCRTLAGLRTPAPSLRCSPAWPGAPPPQPWSGRNWAPATSPAAPVAPSSGYGMCWVNVPRTAGTRPAWA

SEQ ID NO: 35785 - protein, 51 aa, Homo sapiens
  MAP TO AC007308.13; EXPRESSED IN BONE MARROW, SIGNAL = 1.1; EXPRESSED IN FETAL LIVER, SIGNAL = 5.5; EXPRESSED IN HBL100, SIGNAL = 1.6; EXPRESSED IN HELA, SIGNAL = 2.6; EXPRESSED IN HEART, SIGNAL = 0.86; EXPRESSED IN BRAIN, SIGNAL = 1.2; EXPRESSED IN LUNG, SIGNAL =   3; EXPRESSED IN BT474, SIGNAL = 1.5; EXPRESSED IN ADULT LIVER, SIGNAL = 1.5; SWISSPROT HIT: O95721, EVALUE 2.00e-24; EST_HUMAN HIT: BE732460.1, EVALUE 2.00e-23
MVDKMDQDLKISQKHINSIKSVFGGLVNYFKSKPVETPPEQNGTLTSQPNN

SEQ ID NO: 35786 - protein, 22 aa, Homo sapiens
  MAP TO AC007308.13; EXPRESSED IN BONE MARROW, SIGNAL = 1.1; EXPRESSED IN FETAL LIVER, SIGNAL = 5.5; EXPRESSED IN HBL100, SIGNAL = 1.6; EXPRESSED IN HELA, SIGNAL = 2.6; EXPRESSED IN HEART, SIGNAL = 0.86; EXPRESSED IN BRAIN, SIGNAL = 1.2; EXPRESSED IN LUNG, SIGNAL =   3; EXPRESSED IN BT474, SIGNAL = 1.5; EXPRESSED IN ADULT LIVER, SIGNAL = 1.5; EST_HUMAN HIT: BF034190.1, EVALUE 4.00e-07
SSPVSEESWSAQRRWWTRWTKI

SEQ ID NO: 35787 - protein, 93 aa, Homo sapiens
  MAP TO AC011307.1; EXPRESSED IN ADULT LIVER, SIGNAL = 1.5; EXPRESSED IN BT474, SIGNAL = 1.4; EXPRESSED IN HBL100, SIGNAL =   1; EXPRESSED IN PLACENTA, SIGNAL = 1.1; EXPRESSED IN HEART, SIGNAL = 0.97; EXPRESSED IN LUNG, SIGNAL = 0.91; EXPRESSED IN BRAIN, SIGNAL = 1.2; EXPRESSED IN BONE MARROW, SIGNAL = 1.1; EST_HUMAN HIT: AW888221.1, EVALUE 6.00e-44; SWISSPROT HIT: P70211, EVALUE 9.00e-07
PMEKPIFHDPISEKITAMAGHTISLNCSAAGTLTPSLVWVLPNGTDLQSGQQLQRFYHKADGMLHISGLSSVDAGAYRCVARNAAATRRGWSP

SEQ ID NO: 35788 - protein, 41 aa, Homo sapiens
  MAP TO AC004970.2; EXPRESSED IN BT474, SIGNAL = 1.7; EXPRESSED IN HBL100, SIGNAL = 2.1; EXPRESSED IN BONE MARROW, SIGNAL = 2.4; EXPRESSED IN LUNG, SIGNAL = 2.1; EXPRESSED IN ADULT LIVER, SIGNAL = 1.9; EXPRESSED IN FETAL LIVER, SIGNAL =   3; EXPRESSED IN PLACENTA, SIGNAL = 3.1; EXPRESSED IN HEART, SIGNAL = 1.6; EXPRESSED IN HELA, SIGNAL = 1.6; EXPRESSED IN BRAIN, SIGNAL = 2.5; EST_HUMAN HIT: AW937860.1, EVALUE 2.80e+00
TTTTTIIIIIIILILWLMYLYDQHFSVFCNFIFEMSILLRP

SEQ ID NO: 35789 - protein, 35 aa, Homo sapiens
  MAP TO AC006323.3; EXPRESSED IN BRAIN, SIGNAL = 1.2; EXPRESSED IN BONE MARROW, SIGNAL =   1; EXPRESSED IN LUNG, SIGNAL = 3.9; EXPRESSED IN ADULT LIVER, SIGNAL =   1; EXPRESSED IN BT474, SIGNAL = 2.5; EXPRESSED IN FETAL LIVER, SIGNAL = 0.88; EXPRESSED IN HBL100, SIGNAL = 1.5; EXPRESSED IN PLACENTA, SIGNAL = 1.3; EXPRESSED IN HELA, SIGNAL = 2.5; EXPRESSED IN HEART, SIGNAL = 1.3; EST_HUMAN HIT: AA378401.1, EVALUE 6.00e-13; SWISSPROT HIT: Q13616, EVALUE 7.00e-14
KKLRVNINVPMKTEQKQEQETTHKNIEEDRKLLIQ

SEQ ID NO: 35790 - protein, 302 aa, Homo sapiens [sequence omitted]

SEQ ID NO: 35791 - protein, 115 aa, Homo sapiens
  MAP TO AC010684.1; EXPRESSED IN BT474, SIGNAL = 8.6; EXPRESSED IN FETAL LIVER, SIGNAL = 3.8; EXPRESSED IN HEART, SIGNAL = 4.3; EXPRESSED IN LUNG, SIGNAL =  13; EXPRESSED IN BRAIN, SIGNAL = 3.7; EXPRESSED IN ADULT LIVER, SIGNAL = 3.2; EXPRESSED IN PLACENTA, SIGNAL = 3.7; EXPRESSED IN HELA, SIGNAL = 6.4; EXPRESSED IN HBL100, SIGNAL = 9.4; EXPRESSED IN BONE MARROW, SIGNAL = 3.4; EST_HUMAN HIT: BE909539.1, EVALUE 5.00e-22; SWISSPROT HIT: P17008, EVALUE 9.00e-15
CGSGFIRMNEGPLEMIRLLTLQYKLLELGLLLDKEQLAGMDIHVRVKGSGHVVQIYAVLQYISKALVPCYPKYVDEASEEIKDTLTRPCWWFTPVAMNPRNLQALVPVLTTRNHS

SEQ ID NO: 35792 - protein, 41 aa, Homo sapiens
  MAP TO AC011086.1; EXPRESSED IN BONE MARROW, SIGNAL = 1.9; EXPRESSED IN HELA, SIGNAL = 2.1; EXPRESSED IN HEART, SIGNAL =   2; EXPRESSED IN LUNG, SIGNAL =   7; EXPRESSED IN BRAIN, SIGNAL = 1.6; EXPRESSED IN BT474, SIGNAL =   1; EXPRESSED IN ADULT LIVER, SIGNAL = 1.8; EXPRESSED IN FETAL LIVER, SIGNAL = 5.2; EXPRESSED IN PLACENTA, SIGNAL = 1.4; EXPRESSED IN HBL100, SIGNAL = 1.3; SWISSPROT HIT: Q65163, EVALUE 3.60e+00; EST_HUMAN HIT: BF694736.1, EVALUE 1.00e-20
VGSSYLLCGKKVWVMNRTKELRCYRCYHFCGCYPTPGPSLK

SEQ ID NO: 35793 - protein, 33 aa, Homo sapiens
  MAP TO AC011307.1; EXPRESSED IN BT474, SIGNAL = 1.3; EXPRESSED IN HBL100, SIGNAL = 2.2; EXPRESSED IN HEART, SIGNAL = 3.8; EXPRESSED IN LUNG, SIGNAL = 9.3; EXPRESSED IN BRAIN, SIGNAL = 4.1; EXPRESSED IN ADULT LIVER, SIGNAL = 7.3; EXPRESSED IN FETAL LIVER, SIGNAL = 1.9; EXPRESSED IN PLACENTA, SIGNAL = 4.8; EXPRESSED IN HELA, SIGNAL =  17; EXPRESSED IN BONE MARROW, SIGNAL = 2.4; SWISSPROT HIT: P21414, EVALUE 4.00e-04; EST_HUMAN HIT: AA157730.1, EVALUE 8.00e-08
DLHLINQIILPIHPMVPNPYILLSSIPPFTIPP

SEQ ID NO: 35794 - protein, 66 aa, Homo sapiens
  MAP TO AC010905.1; EXPRESSED IN BT474, SIGNAL = 1.3; EXPRESSED IN HBL100, SIGNAL = 1.2; EXPRESSED IN LUNG, SIGNAL = 2.2; EXPRESSED IN BONE MARROW, SIGNAL = 2.2; EXPRESSED IN ADULT LIVER, SIGNAL = 4.5; EXPRESSED IN PLACENTA, SIGNAL =   3; EXPRESSED IN HEART, SIGNAL =   3; EXPRESSED IN HELA, SIGNAL = 3.7; EXPRESSED IN BRAIN, SIGNAL = 1.7; SWISSPROT HIT: P19028, EVALUE 1.00e-04; EST_HUMAN HIT: BF508546.1, EVALUE 3.00e-19
VLVSEGGMLPPGNIAMIQLNWKLRLPPGHFALLLPLHQQPKKGGTVLAGMIDSDYQDSISLLLCNR

SEQ ID NO: 35795 - protein, 115 aa, Homo sapiens
  MAP TO AL031673.16; EXPRESSED IN BONE MARROW, SIGNAL = 1.3; EXPRESSED IN BRAIN, SIGNAL = 1.2; EXPRESSED IN ADULT LIVER, SIGNAL = 1.5; EXPRESSED IN BT474, SIGNAL = 1.2; EXPRESSED IN FETAL LIVER, SIGNAL = 0.9; EXPRESSED IN PLACENTA, SIGNAL = 1.8; EXPRESSED IN HBL100, SIGNAL = 1.9; EXPRESSED IN HELA, SIGNAL = 1.7; EXPRESSED IN HEART, SIGNAL = 1.3; SWISSPROT HIT: P33999, EVALUE 1.00e-08; EST_HUMAN HIT: BE536921.1, EVALUE 1.00e-32
ANRKLAEECYFLWKSTRLQHMTLAEDVKAMLTELRKEVRLLLLTNGDRQTQREKIEACACQSYFDAVVVGGEQREEKPAPSIFYYCCNLLGVQPGDCVMVGDTLETDIQGGLNAG

SEQ ID NO: 35796 - protein, 56 aa, Homo sapiens
  MAP TO AL117348.2; EXPRESSED IN BT474, SIGNAL = 3.4; EXPRESSED IN FETAL LIVER, SIGNAL = 1.7; EXPRESSED IN ADULT LIVER, SIGNAL = 2.1; EXPRESSED IN HELA, SIGNAL =  88; EXPRESSED IN PLACENTA, SIGNAL = 1.8; EXPRESSED IN HBL100, SIGNAL = 1.5; EXPRESSED IN HEART, SIGNAL = 1.8; EXPRESSED IN BRAIN, SIGNAL = 2.2; EXPRESSED IN BONE MARROW, SIGNAL = 1.8; EXPRESSED IN LUNG, SIGNAL = 1.6; EST_HUMAN HIT: AW837162.1, EVALUE 7.00e-19
GHVIPMGCVLWQEDAISYYTRMKDRLLERITEEERHVQDQPLGMAFVTFQEKSMAT

SEQ ID NO: 35797 - protein, 120 aa, Homo sapiens
  MAP TO AL117348.2; EXPRESSED IN BT474, SIGNAL = 3.4; EXPRESSED IN FETAL LIVER, SIGNAL = 1.7; EXPRESSED IN ADULT LIVER, SIGNAL = 2.1; EXPRESSED IN HELA, SIGNAL =  88; EXPRESSED IN PLACENTA, SIGNAL = 1.8; EXPRESSED IN HBL100, SIGNAL = 1.5; EXPRESSED IN HEART, SIGNAL = 1.8; EXPRESSED IN BRAIN, SIGNAL = 2.2; EXPRESSED IN BONE MARROW, SIGNAL = 1.8; EXPRESSED IN LUNG, SIGNAL = 1.6; EST_HUMAN HIT: BE830100.1, EVALUE 3.00e-23; SWISSPROT HIT: Q28983, EVALUE 3.00e-01
KKTEKSLTYYTNLQVKTGQRTLINPKPCGQFCCCEVLGCEWVRVPPPGWEQRHWHRGAPDTSMGPRHPNGMCLVAGRRHLLLHTDEGQAAGEDHRGRTPRPGPAPGNGLRHLPGEVHGHL

SEQ ID NO: 35798 - protein, 90 aa, Homo sapiens; identical to SEQ ID NO: 35610
  MAP TO AP000050.1; EXPRESSED IN BONE MARROW, SIGNAL = 1.4; EXPRESSED IN BRAIN, SIGNAL = 1.2; EXPRESSED IN LUNG, SIGNAL = 5.1; EXPRESSED IN ADULT LIVER, SIGNAL = 1.7; EXPRESSED IN FETAL LIVER, SIGNAL = 0.95; EXPRESSED IN HELA, SIGNAL = 0.91; EXPRESSED IN PLACENTA, SIGNAL = 1.1; EXPRESSED IN HBL100, SIGNAL =   1; EXPRESSED IN HEART, SIGNAL = 1.3; EST_HUMAN HIT: BE222239.1, EVALUE 1.00e-05; SWISSPROT HIT: P37246, EVALUE 2.70e+00

SEQ ID NO: 35799 - protein, 49 aa, Homo sapiens
  MAP TO AL109823.6; EXPRESSED IN PLACENTA, SIGNAL = 5.5; EXPRESSED IN HELA, SIGNAL = 5.2; EXPRESSED IN HBL100, SIGNAL = 3.1; EXPRESSED IN HEART, SIGNAL = 4.7; EXPRESSED IN LUNG, SIGNAL = 7.9; EXPRESSED IN BONE MARROW, SIGNAL = 4.6; EXPRESSED IN BRAIN, SIGNAL = 4.2; EXPRESSED IN ADULT LIVER, SIGNAL = 5.2; EXPRESSED IN BT474, SIGNAL =   2; EXPRESSED IN FETAL LIVER, SIGNAL = 4.6; EST_HUMAN HIT: BF095716.1, EVALUE 6.00e-22; SWISSPROT HIT: Q63788, EVALUE 7.80e+00
EQSVPPKVDENDTRPDVEPPLPLQIQIAMDVMERCIHLLSDKNLQIRLK

SEQ ID NO: 35800 - protein, 27 aa, Homo sapiens
  MAP TO AL109823.6; EXPRESSED IN PLACENTA, SIGNAL = 5.5; EXPRESSED IN HELA, SIGNAL = 5.2; EXPRESSED IN HBL100, SIGNAL = 3.1; EXPRESSED IN HEART, SIGNAL = 4.7; EXPRESSED IN LUNG, SIGNAL = 7.9; EXPRESSED IN BONE MARROW, SIGNAL = 4.6; EXPRESSED IN BRAIN, SIGNAL = 4.2; EXPRESSED IN ADULT LIVER, SIGNAL = 5.2; EXPRESSED IN BT474, SIGNAL =   2; EXPRESSED IN FETAL LIVER, SIGNAL = 4.6; EST_HUMAN HIT: BE883532.1, EVALUE 3.00e-11
RNSQSLPKWMRMTPVQMWSHHCHCRSK

SEQ ID NO: 35801 - protein, 63 aa, Homo sapiens
  MAP TO AP000313.1; EXPRESSED IN BONE MARROW, SIGNAL = 2.8; EXPRESSED IN HBL100, SIGNAL = 1.8; EXPRESSED IN HELA, SIGNAL = 1.8; EXPRESSED IN HEART, SIGNAL = 2.2; EXPRESSED IN BRAIN, SIGNAL = 2.8; EXPRESSED IN LUNG, SIGNAL = 1.6; EXPRESSED IN BT474, SIGNAL = 1.4; EXPRESSED IN ADULT LIVER, SIGNAL = 2.7; EXPRESSED IN FETAL LIVER, SIGNAL = 4.1; EXPRESSED IN PLACENTA, SIGNAL = 2.4; SWISSPROT HIT: P18588, EVALUE 1.20e-02; EST_HUMAN HIT: BF348405.1, EVALUE 1.00e-04
ILENTPENHPDHSHLKHALEKAEELCSQVNEGVREKENSDRLEWIQAHVQCEGLSEVANLGAG

SEQ ID NO: 35802 - protein, 59 aa, Homo sapiens
  MAP TO AC011307.1; EXPRESSED IN BONE MARROW, SIGNAL = 3.2; EXPRESSED IN BT474, SIGNAL =  11; EXPRESSED IN HBL100, SIGNAL = 3.8; EXPRESSED IN BRAIN, SIGNAL =   3; EXPRESSED IN LUNG, SIGNAL =   3; EXPRESSED IN ADULT LIVER, SIGNAL =  17; EXPRESSED IN FETAL LIVER, SIGNAL = 9.3; EXPRESSED IN PLACENTA, SIGNAL = 3.7; EXPRESSED IN HEART, SIGNAL = 3.8; EXPRESSED IN HELA, SIGNAL =  56; EST_HUMAN HIT: AA970601.1, EVALUE 7.00e-18; SWISSPROT HIT: P27793, EVALUE 3.00e-01
PHKHAGGVQATTVGQNHGSFAGHSIWDWRCEFPASEICLHGAVNHLRPVQQKQVTEQEE

SEQ ID NO: 35803 - protein, 59 aa, Homo sapiens
  MAP TO AC011307.1; EXPRESSED IN BONE MARROW, SIGNAL = 3.2; EXPRESSED IN BT474, SIGNAL =  11; EXPRESSED IN HBL100, SIGNAL = 3.8; EXPRESSED IN BRAIN, SIGNAL =   3; EXPRESSED IN LUNG, SIGNAL =   3; EXPRESSED IN ADULT LIVER, SIGNAL =  17; EXPRESSED IN FETAL LIVER, SIGNAL = 9.3; EXPRESSED IN PLACENTA, SIGNAL = 3.7; EXPRESSED IN HEART, SIGNAL = 3.8; EXPRESSED IN HELA, SIGNAL =  56; EST_HUMAN HIT: H94704.1, EVALUE 1.00e-19; SWISSPROT HIT: P49868, EVALUE 1.50e+00
LIADTHEVLVHDPRVLESDWDGNPMLLCVFHQIIAAIEPVVELGHPPGSNDLNLGASEQ

SEQ ID NO: 35804 - protein, 313 aa, Homo sapiens
  MAP TO AC007688.15; EXPRESSED IN PLACENTA, SIGNAL = 1.2; EXPRESSED IN HELA, SIGNAL =  35; EXPRESSED IN HEART, SIGNAL = 1.2; EXPRESSED IN BRAIN, SIGNAL = 1.8; EXPRESSED IN BT474, SIGNAL = 1.8; EXPRESSED IN HBL100, SIGNAL = 3.9; EXPRESSED IN LUNG, SIGNAL =  31; EXPRESSED IN BONE MARROW, SIGNAL = 1.5; EXPRESSED IN ADULT LIVER, SIGNAL = 1.2; EXPRESSED IN FETAL LIVER, SIGNAL = 0.9; EST_HUMAN HIT: AU140676.1, EVALUE 2.00e-98; SWISSPROT HIT: P22815, EVALUE 7.00e-06
MATTVPDGCRNGLKSKYYRLCDKAEAWGIVLETVATAGVVTSVAFMLTLPILVCKVQDSNRRKMLPTQFLFLLGVLGIFGLTFAFIIGLDGSTGPTRFFLFGILFSICFSCLLAHAVSLTKLVRGRKPLSLLVILGLAVGFSLVQDVIAIEYIVLTMNRTNVNVFSELSAPRRNEDFVLLLTYVLFLMALTFLMSSFTFCGSFTGWKRHGAHIYLTMLLSIAIWVAWITLLMLPDFDRRWDDTILSSALAANGWVFLLAYVSPEFWLLTKQRNPMDYPVEDAFCKPQLVKKSYGVENRAYSQEEITQGTDAAW

SEQ ID NO: 35805 - protein, 32 aa, Homo sapiens
  MAP TO AC007688.15; EXPRESSED IN PLACENTA, SIGNAL = 1.2; EXPRESSED IN HELA, SIGNAL =  35; EXPRESSED IN HEART, SIGNAL = 1.2; EXPRESSED IN BRAIN, SIGNAL = 1.8; EXPRESSED IN BT474, SIGNAL = 1.8; EXPRESSED IN HBL100, SIGNAL = 3.9; EXPRESSED IN LUNG, SIGNAL =  31; EXPRESSED IN BONE MARROW, SIGNAL = 1.5; EXPRESSED IN ADULT LIVER, SIGNAL = 1.2; EXPRESSED IN FETAL LIVER, SIGNAL = 0.9; EST_HUMAN HIT: BE531168.1, EVALUE 3.90e-01
CVRRFNTFSPLQHSFSAGPEWLQQSLMVAAMA

SEQ ID NO: 35806 - protein, 95 aa, Homo sapiens
  MAP TO Z82188.2; EXPRESSED IN HBL100, SIGNAL = 0.93; EXPRESSED IN PLACENTA, SIGNAL =   1; EXPRESSED IN HELA, SIGNAL = 1.3; EXPRESSED IN HEART, SIGNAL = 0.99; EXPRESSED IN BRAIN, SIGNAL = 1.1; EXPRESSED IN BONE MARROW, SIGNAL = 1.4; EXPRESSED IN LUNG, SIGNAL = 4.3; EXPRESSED IN ADULT LIVER, SIGNAL = 1.2; EST_HUMAN HIT: BF223041.1, EVALUE 3.00e-40
YNQEITIKTANQQRSGVVCLWSSHSFVSLLLCKLALTSLCGLTSNSFLCESRNPLFGSGLGPLSSTIFSSEPRRDDTRKHPQPKGNRLQPQLADF

SEQ ID NO: 35807 - protein, 357 aa, Homo sapiens
  MAP TO AL078472.1; EXPRESSED IN BONE MARROW, SIGNAL =  27; EXPRESSED IN LUNG, SIGNAL =  19; EXPRESSED IN BT474, SIGNAL =  34; EXPRESSED IN FETAL LIVER, SIGNAL = 7.1; EXPRESSED IN ADULT LIVER, SIGNAL =  28; EXPRESSED IN HELA, SIGNAL =  43; EXPRESSED IN PLACENTA, SIGNAL =  20; EXPRESSED IN HBL100, SIGNAL =  25; EXPRESSED IN HEART, SIGNAL =  18; EXPRESSED IN BRAIN, SIGNAL =  21
DSIWKYPKTRSLKKSLASGGSVQCGGGGDGGDGGGSGSGGDAGGGGGDGGGGDSGGGDGGGGGGSGDGGGGGDGGDGGGGDGGGGGDGDGGGGDGGDGSGDGGGGGDGGDGDGGGGDGGDGSGGSGTGGGGDGGGAGDGGSGGGGSGDGGGGGGSGSGDGDDGGGGGGRGFSGDGGGGGGGGSGGDAGGGGGSGDGGGGDGGGGDGGGGDGGGGGGSGDGGGGDGGGGDGGGGDGGGGDGGGSGGSGDGGSGDGGGGDGGGGGGGSGDGGSGHGGGGGGHGFSGDGGGGGGSGGGGCGSGGGGGGSGDGGGGSGSGDGGGGGGRGFSGDGGGGGGGGTGGVMHIGDKTAEALSLSIL

SEQ ID NO: 35808 - protein, 183 aa, Homo sapiens
  MAP TO AC011307.1; EXPRESSED IN PLACENTA, SIGNAL = 8.3; EXPRESSED IN HELA, SIGNAL = 8.3; EXPRESSED IN HBL100, SIGNAL =   6; EXPRESSED IN HEART, SIGNAL = 7.6; EXPRESSED IN BONE MARROW, SIGNAL = 8.6; EXPRESSED IN LUNG, SIGNAL = 7.9; EXPRESSED IN BRAIN, SIGNAL = 7.9; EXPRESSED IN ADULT LIVER, SIGNAL = 9.4; EXPRESSED IN BT474, SIGNAL = 4.8; EXPRESSED IN FETAL LIVER, SIGNAL = 8.6; EST_HUMAN HIT: AW937782.1, EVALUE 7.00e-79; SWISSPROT HIT: O35136, EVALUE 8.00e-12
FDSRIKVFANRTLVVKSMTDKDAGDYLCVARNKVGDDCVVLKVDVMMKPAKIEHKEENDHKVFYRGDLKVDCVATGLPNPEISWSLLDGSLVNSFMQSDDSGGRTKHYVVFNNGTLYFSEVGMREEGDYTCFAENQVGKDEMRVRVKMVTPATIWNKTYLAVQVPYGDVVTVTCEAKGEPMPK

SEQ ID NO: 35809 - protein, 32 aa, Homo sapiens
  MAP TO AL031283.15; EXPRESSED IN BRAIN, SIGNAL = 5.5; EXPRESSED IN BONE MARROW, SIGNAL = 5.5; EXPRESSED IN LUNG, SIGNAL = 3.4; EXPRESSED IN BT474, SIGNAL = 4.5; EXPRESSED IN FETAL LIVER, SIGNAL = 4.1; EXPRESSED IN ADULT LIVER, SIGNAL = 4.7; EXPRESSED IN HELA, SIGNAL = 8.4; EXPRESSED IN PLACENTA, SIGNAL = 5.7; EXPRESSED IN HBL100, SIGNAL = 4.8; EXPRESSED IN HEART, SIGNAL = 4.1; SWISSPROT HIT: P55009, EVALUE 2.80e-02; EST_HUMAN HIT: AW673424.1, EVALUE 2.00e-11
MEKLGAPQTHLGLKNMIKEVDEDFDSKLSFRE

SEQ ID NO: 35810 - protein, 45 aa, Homo sapiens
  MAP TO AC007028.2; EXPRESSED IN ADULT LIVER, SIGNAL =   1; EXPRESSED IN BT474, SIGNAL = 0.95; EXPRESSED IN FETAL LIVER, SIGNAL = 1.5; EXPRESSED IN HBL100, SIGNAL =   1; EXPRESSED IN HELA, SIGNAL = 1.7; EXPRESSED IN HEART, SIGNAL = 0.84; EXPRESSED IN LUNG, SIGNAL =  18; EST_HUMAN HIT: BE814995.1, EVALUE 1.20e-01
SALTLAVIREHKDIVILLLQQILICFLEMCVERLQKIMPLRLGIQ

SEQ ID NO: 35811 - protein, 58 aa, Homo sapiens
  MAP TO AC007378.2; EXPRESSED IN PLACENTA, SIGNAL = 6.1; EXPRESSED IN HBL100, SIGNAL = 2.6; EXPRESSED IN HEART, SIGNAL = 2.3; EXPRESSED IN FETAL LIVER, SIGNAL = 1.5; EXPRESSED IN ADULT LIVER, SIGNAL = 1.8; EXPRESSED IN HELA, SIGNAL = 9.1; EXPRESSED IN BRAIN, SIGNAL = 1.5; EXPRESSED IN LUNG, SIGNAL = 3.3; EXPRESSED IN BONE MARROW, SIGNAL = 1.3; EXPRESSED IN BT474, SIGNAL = 1.3; EST_HUMAN HIT: BF334188.1, EVALUE 8.20e-02
CATSVGRPMPTRSGGTLTAAPTATACRARPSARPSAAPLCPVLSPSTWKEVAAQCVQV

SEQ ID NO: 35812 - protein, 42 aa, Homo sapiens
  MAP TO AC007250.2; EXPRESSED IN PLACENTA, SIGNAL = 0.97; EXPRESSED IN ADULT LIVER, SIGNAL = 1.3; EXPRESSED IN FETAL LIVER, SIGNAL = 0.98; EXPRESSED IN HEART, SIGNAL = 0.98; EXPRESSED IN HELA, SIGNAL =   1; EXPRESSED IN BRAIN, SIGNAL =   1; EXPRESSED IN LUNG, SIGNAL = 1.3; EXPRESSED IN BONE MARROW, SIGNAL = 0.95; EST_HUMAN HIT: AA807691.1, EVALUE 2.80e+00
ALPCRPSVSLLCLANLTTSSLLFLKKKRKKRRRRRKRKKKRK

SEQ ID NO: 35813 - protein, 89 aa, Homo sapiens
  MAP TO AC007308.13; EXPRESSED IN BONE MARROW, SIGNAL = 1.9; EXPRESSED IN BT474, SIGNAL = 1.2; EXPRESSED IN HBL100, SIGNAL = 4.2; EXPRESSED IN BRAIN, SIGNAL = 1.7; EXPRESSED IN LUNG, SIGNAL = 0.97; EXPRESSED IN ADULT LIVER, SIGNAL = 2.4; EXPRESSED IN FETAL LIVER, SIGNAL = 1.3; EXPRESSED IN PLACENTA, SIGNAL = 1.8; EXPRESSED IN HEART, SIGNAL = 2.7; EXPRESSED IN HELA, SIGNAL = 1.7; EST_HUMAN HIT: BF347584.1, EVALUE 1.50e+00
MALPFTVDASEVLLSAQTSLTPSYAHPTDDSQHIPSPSPLRFIQDLTSPSIPAAALWPGLLLPNPRHLPLLHMRLAQARGESEPPYRLE

SEQ ID NO: 35814 - protein, 23 aa, Homo sapiens
  MAP TO AC009481.1; EXPRESSED IN HELA, SIGNAL = 2.4; EXPRESSED IN PLACENTA, SIGNAL = 1.6; EXPRESSED IN HEART, SIGNAL = 1.2; EXPRESSED IN BONE MARROW, SIGNAL = 1.4; EXPRESSED IN BRAIN, SIGNAL = 1.2; EXPRESSED IN ADULT LIVER, SIGNAL = 1.9; EXPRESSED IN FETAL LIVER, SIGNAL = 1.2
GNRILITRQYMMSCQMNCIALLL

SEQ ID NO: 35815 - protein, 152 aa, Homo sapiens
  MAP TO AC008132.19; EXPRESSED IN LUNG, SIGNAL = 3.4; EXPRESSED IN BRAIN, SIGNAL = 0.96; EXPRESSED IN ADULT LIVER, SIGNAL = 1.4; EXPRESSED IN FETAL LIVER, SIGNAL = 0.97; EXPRESSED IN PLACENTA, SIGNAL = 1.2; EXPRESSED IN HEART, SIGNAL = 0.92; EST_HUMAN HIT: AL110383.1, EVALUE 9.00e-19; SWISSPROT HIT: P18899, EVALUE 1.00e-05
PHEDTVHNITNEDASHDITNEDAVHGIANEAAAQGIANEDAAQGIANEDAAHGIASEDAAQGIANEVAAQGIANEDAAQGIANEDAVHGIANEDAAHGIANEDAVHGIANEDSVYDIANEDAIYDIANDTVQGTLTRMLYTTSLMRTPYKAS

SEQ ID NO: 35816 - protein, 22 aa, Homo sapiens
  MAP TO AC008280.2; EXPRESSED IN PLACENTA, SIGNAL = 1.3; EXPRESSED IN HBL100, SIGNAL = 2.3; EXPRESSED IN HEART, SIGNAL = 1.9; EXPRESSED IN ADULT LIVER, SIGNAL = 1.1; EXPRESSED IN HELA, SIGNAL = 3.2; EXPRESSED IN BRAIN, SIGNAL = 0.92; EXPRESSED IN LUNG, SIGNAL = 0.99; EXPRESSED IN BONE MARROW, SIGNAL = 2.1; EXPRESSED IN BT474, SIGNAL = 2.3
ASRKHSRTRLGSGNKSVRKVIL

SEQ ID NO: 35817 - protein, 50 aa, Homo sapiens [sequence omitted]

SEQ ID NO: 35818 - protein, 42 aa, Homo sapiens
  MAP TO AC009308.3; EXPRESSED IN PLACENTA, SIGNAL =   2; EXPRESSED IN HBL100, SIGNAL = 1.6; EXPRESSED IN BONE MARROW, SIGNAL = 1.8; EXPRESSED IN HELA, SIGNAL = 1.4; EXPRESSED IN HEART, SIGNAL = 1.9; EXPRESSED IN BRAIN, SIGNAL =   2; EXPRESSED IN LUNG, SIGNAL = 1.7; EXPRESSED IN BT474, SIGNAL = 1.1; EXPRESSED IN ADULT LIVER, SIGNAL =   2; EXPRESSED IN FETAL LIVER, SIGNAL = 1.6; EST_HUMAN HIT: AI308220.1, EVALUE 9.30e+00; SWISSPROT HIT: P17565, EVALUE 3.60e+00
MGQARQASGASVWRAGCGHGQQQVLEPKWDERGSSIEEEHEQ

SEQ ID NO: 35819 - protein, 26 aa, Homo sapiens
  MAP TO AC009308.3; EXPRESSED IN PLACENTA, SIGNAL =   2; EXPRESSED IN HBL100, SIGNAL = 1.6; EXPRESSED IN BONE MARROW, SIGNAL = 1.8; EXPRESSED IN HELA, SIGNAL = 1.4; EXPRESSED IN HEART, SIGNAL = 1.9; EXPRESSED IN BRAIN, SIGNAL =   2; EXPRESSED IN LUNG, SIGNAL = 1.7; EXPRESSED IN BT474, SIGNAL = 1.1; EXPRESSED IN ADULT LIVER, SIGNAL =   2; EXPRESSED IN FETAL LIVER, SIGNAL = 1.6; EST_HUMAN HIT: AW841921.1, EVALUE 4.20e+00
GPSKASIWSVCVEGRVWPWPTAGVGA

SEQ ID NO: 35820 - protein, 20 aa, Homo sapiens
  MAP TO AC010134.1; EXPRESSED IN BONE MARROW, SIGNAL = 5.5; EXPRESSED IN BRAIN, SIGNAL = 3.7; EXPRESSED IN BT474, SIGNAL = 2.5; EXPRESSED IN HBL100, SIGNAL = 3.1; EXPRESSED IN HEART, SIGNAL = 6.1; EXPRESSED IN LUNG, SIGNAL =  16; EXPRESSED IN ADULT LIVER, SIGNAL = 7.5; EXPRESSED IN FETAL LIVER, SIGNAL = 4.2; EXPRESSED IN PLACENTA, SIGNAL = 6.8; EXPRESSED IN HELA, SIGNAL = 4.7
STALGSCAQASAQQSRQSTE

SEQ ID NO: 35821 - protein, 35 aa, Homo sapiens
  MAP TO AC009857.1; EXPRESSED IN BT474, SIGNAL = 2.6; EXPRESSED IN ADULT LIVER, SIGNAL = 6.2; EXPRESSED IN PLACENTA, SIGNAL = 6.4; EXPRESSED IN BONE MARROW, SIGNAL = 4.1; EXPRESSED IN FETAL LIVER, SIGNAL = 6.8; EXPRESSED IN HEART, SIGNAL = 4.1; EXPRESSED IN HELA, SIGNAL = 2.7; EXPRESSED IN HBL100, SIGNAL = 3.2; EXPRESSED IN BRAIN, SIGNAL = 4.5; EXPRESSED IN LUNG, SIGNAL = 2.2; EST_HUMAN HIT: AI885048.1, EVALUE 1.70e-02
LAGCVTGVWLACSVADTAQSPDGRRGMQMDRYRSS

SEQ ID NO: 35822 - protein, 42 aa, Homo sapiens
  MAP TO AC009813.2; EXPRESSED IN ADULT LIVER, SIGNAL = 1.6; EXPRESSED IN PLACENTA, SIGNAL = 0.94; EXPRESSED IN HEART, SIGNAL = 1.1; EST_HUMAN HIT: AV761058.1, EVALUE 2.00e-03; SWISSPROT HIT: Q13797, EVALUE 2.00e-19
VLVGAPKADSKYSPSVKSPGAVFKCRVHTNPDRRCTELDMAR

SEQ ID NO: 35823 - protein, 89 aa, Homo sapiens
  MAP TO AC009955.1; EXPRESSED IN PLACENTA, SIGNAL = 1.1; EXPRESSED IN HBL100, SIGNAL = 1.3; EXPRESSED IN HELA, SIGNAL = 1.4; EXPRESSED IN HEART, SIGNAL =   1; EXPRESSED IN BT474, SIGNAL = 1.4; EST_HUMAN HIT: BF344378.1, EVALUE 3.00e-37; SWISSPROT HIT: Q28824, EVALUE 5.00e-03
PRLRFTRPLQDVEGREHGIAVLECKVPNSRIPTAWFREDQRLLPCRKYEQIEEGTVRRLIIHRLKADDDGIYLCEMRGRVRTVANVTVK

SEQ ID NO: 35824 - protein, 45 aa, Homo sapiens
  MAP TO AC009955.1; EXPRESSED IN PLACENTA, SIGNAL = 1.1; EXPRESSED IN HBL100, SIGNAL = 1.3; EXPRESSED IN HELA, SIGNAL = 1.4; EXPRESSED IN HEART, SIGNAL =   1; EXPRESSED IN BT474, SIGNAL = 1.4; EST_HUMAN HIT: BF344378.1, EVALUE 1.00e-20; SWISSPROT HIT: Q90267, EVALUE 1.20e+00
LPCWNVKYPTPASPRPGSVRTSGCCPAASTSRSKRALSGASSSTG

SEQ ID NO: 35825 - protein, 38 aa, Homo sapiens
  MAP TO AC010968.1; EXPRESSED IN ADULT LIVER, SIGNAL = 1.3; EXPRESSED IN BT474, SIGNAL =   1; EXPRESSED IN FETAL LIVER, SIGNAL = 1.1; EXPRESSED IN HELA, SIGNAL = 1.1; EXPRESSED IN HEART, SIGNAL = 0.97; EXPRESSED IN LUNG, SIGNAL =  17; EST_HUMAN HIT: R31173.1, EVALUE 4.00e-10
LEKVDISSTEGYDLFITQLKDGLKNTSHETAANHKVAK

SEQ ID NO: 35826 - protein, 38 aa, Homo sapiens
  MAP TO AC010985.1; EXPRESSED IN PLACENTA, SIGNAL = 1.1; EXPRESSED IN HEART, SIGNAL =   1; EXPRESSED IN LUNG, SIGNAL = 2.6; EXPRESSED IN FETAL LIVER, SIGNAL =   1; EXPRESSED IN ADULT LIVER, SIGNAL = 0.95
IIIGTVVRITEHWLTILQISVDFLQRRMHETWSLKMLM

SEQ ID NO: 35827 - protein, 28 aa, Homo sapiens
  MAP TO AC011074.1; EXPRESSED IN HEART, SIGNAL = 0.91; EXPRESSED IN LUNG, SIGNAL = 1.9; EXPRESSED IN BRAIN, SIGNAL = 0.92; EXPRESSED IN ADULT LIVER, SIGNAL = 0.96; EXPRESSED IN FETAL LIVER, SIGNAL = 0.93; EXPRESSED IN PLACENTA, SIGNAL = 0.97; EXPRESSED IN HBL100, SIGNAL =   1
NTFNKVSANLYSGNHNKKLFKEITEGLS

SEQ ID NO: 35828 - protein, 62 aa, Homo sapiens
  MAP TO AC011416.1; EXPRESSED IN PLACENTA, SIGNAL = 3.6; EXPRESSED IN HBL100, SIGNAL = 1.8; EXPRESSED IN HEART, SIGNAL = 3.9; EXPRESSED IN BONE MARROW, SIGNAL = 2.7; EXPRESSED IN HELA, SIGNAL = 2.4; EXPRESSED IN BRAIN, SIGNAL = 3.5; EXPRESSED IN LUNG, SIGNAL = 2.8; EXPRESSED IN BT474, SIGNAL =  35; EXPRESSED IN ADULT LIVER, SIGNAL = 3.6; EXPRESSED IN FETAL LIVER, SIGNAL = 2.8
EEEEEEEEEEEEEEEEEEEEEEEEEEEEEEEEEEEEEEEEEEEEEEEEEEEEEEEKFKESMK

SEQ ID NO: 35829 - protein, 88 aa, Homo sapiens
  MAP TO AC011416.1; EXPRESSED IN PLACENTA, SIGNAL = 3.6; EXPRESSED IN HBL100, SIGNAL = 1.8; EXPRESSED IN HEART, SIGNAL = 3.9; EXPRESSED IN BONE MARROW, SIGNAL = 2.7; EXPRESSED IN HELA, SIGNAL = 2.4; EXPRESSED IN BRAIN, SIGNAL = 3.5; EXPRESSED IN LUNG, SIGNAL = 2.8; EXPRESSED IN BT474, SIGNAL =  35; EXPRESSED IN ADULT LIVER, SIGNAL = 3.6; EXPRESSED IN FETAL LIVER, SIGNAL = 2.8; SWISSPROT HIT: P05156, EVALUE 6.30e+00; EST_HUMAN HIT: AA701865.1, EVALUE 2.60e+00
NETIRGEKKTHRKYYYSKRQQSVCVVGGWGRESERKREKKKKKKKKKKKKKKKKKKKKKKKKKKKKKKKKKKKKKKKKKKKKKKKKKK

SEQ ID NO: 35830 - protein, 47 aa, Homo sapiens [sequence omitted]

SEQ ID NO: 35831 - protein, 57 aa, Homo sapiens
  MAP TO AF165424.1; EXPRESSED IN HEART, SIGNAL = 2.7; EXPRESSED IN BRAIN, SIGNAL = 1.1; EXPRESSED IN BONE MARROW, SIGNAL = 1.8; EXPRESSED IN LUNG, SIGNAL = 2.2; EXPRESSED IN ADULT LIVER, SIGNAL = 2.8; EXPRESSED IN FETAL LIVER, SIGNAL = 1.9; EXPRESSED IN HELA, SIGNAL = 1.9; EXPRESSED IN PLACENTA, SIGNAL = 2.4; EXPRESSED IN HBL100, SIGNAL = 1.5; EST_HUMAN HIT: AA401714.1, EVALUE 3.00e-12; SWISSPROT HIT: P80147, EVALUE 5.80e+00
KSGTTQSKGYGSCFQVTGRFQIFLISNWLKDLSIERNVWIMIRGCGDQSFIMQMKPP

SEQ ID NO: 35832 - protein, 19 aa, Homo sapiens
  MAP TO AL121587.4; EXPRESSED IN HBL100, SIGNAL = 0.91; EXPRESSED IN HEART, SIGNAL =   1; EXPRESSED IN BRAIN, SIGNAL = 2.2; EXPRESSED IN BONE MARROW, SIGNAL =   1; EXPRESSED IN LUNG, SIGNAL = 1.2; EXPRESSED IN ADULT LIVER, SIGNAL = 1.3; EST_HUMAN HIT: BE296613.1, EVALUE 3.00e-03
MVSNMLAQDSHLLSGQLPT

SEQ ID NO: 35833 - protein, 65 aa, Homo sapiens
  MAP TO AL049553.14; EXPRESSED IN FETAL LIVER, SIGNAL = 0.9; EXPRESSED IN HBL100, SIGNAL = 0.99; EXPRESSED IN HEART, SIGNAL = 1.1; EXPRESSED IN LUNG, SIGNAL = 1.1; EXPRESSED IN ADULT LIVER, SIGNAL = 1.4; EXPRESSED IN PLACENTA, SIGNAL = 1.1; EXPRESSED IN BRAIN, SIGNAL = 0.97; EXPRESSED IN BONE MARROW, SIGNAL = 0.97
ITIPSQGKARPAGKMAAVCERGSQEATIDPPSTPSPLAPPAYATVYNHGNLATTVILSSLPVGLT

SEQ ID NO: 35834 - protein, 24 aa, Homo sapiens
  MAP TO AL121763.1; EXPRESSED IN ADULT LIVER, SIGNAL = 2.7; EXPRESSED IN BT474, SIGNAL = 1.8; EXPRESSED IN FETAL LIVER, SIGNAL = 1.6; EXPRESSED IN HELA, SIGNAL = 2.1; EXPRESSED IN PLACENTA, SIGNAL = 2.8; EXPRESSED IN HBL100, SIGNAL = 1.8; EXPRESSED IN HEART, SIGNAL = 3.5; EXPRESSED IN BONE MARROW, SIGNAL = 2.2; EXPRESSED IN LUNG, SIGNAL = 1.7; EXPRESSED IN BRAIN, SIGNAL = 4.8
SVKTRMTMSKTEVIGRRGDQQCLP

SEQ ID NO: 35835 - protein, 24 aa, Homo sapiens
  MAP TO AL080246.13; EXPRESSED IN BT474, SIGNAL = 1.4; EXPRESSED IN PLACENTA, SIGNAL = 1.6; EXPRESSED IN HBL100, SIGNAL = 1.4; EXPRESSED IN HEART, SIGNAL = 2.4; EXPRESSED IN ADULT LIVER, SIGNAL = 1.9; EXPRESSED IN FETAL LIVER, SIGNAL = 1.3; EXPRESSED IN HELA, SIGNAL = 1.7; EXPRESSED IN BRAIN, SIGNAL =   2; EXPRESSED IN LUNG, SIGNAL = 0.89; EXPRESSED IN BONE MARROW, SIGNAL = 2.5
HTPSCAPASASQASLWPHAPGAGA

SEQ ID NO: 35836 - protein, 25 aa, Homo sapiens
  MAP TO AL080246.13; EXPRESSED IN BT474, SIGNAL = 1.4; EXPRESSED IN PLACENTA, SIGNAL = 1.6; EXPRESSED IN HBL100, SIGNAL = 1.4; EXPRESSED IN HEART, SIGNAL = 2.4; EXPRESSED IN ADULT LIVER, SIGNAL = 1.9; EXPRESSED IN FETAL LIVER, SIGNAL = 1.3; EXPRESSED IN HELA, SIGNAL = 1.7; EXPRESSED IN BRAIN, SIGNAL =   2; EXPRESSED IN LUNG, SIGNAL = 0.89; EXPRESSED IN BONE MARROW, SIGNAL = 2.5
QAPAPGACGQSDAWEALAGAQDGVC

SEQ ID NO: 35837 - protein, 23 aa, Homo sapiens
  MAP TO AL035455.28; EXPRESSED IN BT474, SIGNAL = 1.1; EXPRESSED IN FETAL LIVER, SIGNAL = 1.3; EXPRESSED IN ADULT LIVER, SIGNAL = 1.4; EXPRESSED IN PLACENTA, SIGNAL = 1.6; EXPRESSED IN HEART, SIGNAL = 1.4; EXPRESSED IN BONE MARROW, SIGNAL = 1.1; EXPRESSED IN HELA, SIGNAL = 1.1; EXPRESSED IN HBL100, SIGNAL = 1.1; EXPRESSED IN BRAIN, SIGNAL = 1.2; EXPRESSED IN LUNG, SIGNAL =  12
MTKSRVVSFFGVLGKENKKKKRM

SEQ ID NO: 35838 - protein, 64 aa, Homo sapiens
  MAP TO Z98044.10; EXPRESSED IN HBL100, SIGNAL = 1.4; EXPRESSED IN HELA, SIGNAL = 1.2; EXPRESSED IN HEART, SIGNAL =   2; EXPRESSED IN LUNG, SIGNAL = 0.89; EXPRESSED IN BT474, SIGNAL = 2.2; EXPRESSED IN PLACENTA, SIGNAL = 1.8; EXPRESSED IN BRAIN, SIGNAL = 1.5; EXPRESSED IN BONE MARROW, SIGNAL =   2; EXPRESSED IN ADULT LIVER, SIGNAL =   2; EXPRESSED IN FETAL LIVER, SIGNAL = 1.4; EST_HUMAN HIT: AA023011.1, EVALUE 2.20e+00
AKGEACWLRAAEQMPLLAPSTLSLPTGLWFPTGRSRETGTSQMGPGEEQMTPVGLVKGTTQDEM

SEQ ID NO: 35839 - protein, 34 aa, Homo sapiens
  MAP TO AF165926.1; EXPRESSED IN PLACENTA, SIGNAL =  10; EXPRESSED IN HBL100, SIGNAL =   6; EXPRESSED IN HEART, SIGNAL =  11; EXPRESSED IN BRAIN, SIGNAL = 8.7; EXPRESSED IN BONE MARROW, SIGNAL = 7.7; EXPRESSED IN LUNG, SIGNAL = 6.3; EXPRESSED IN BT474, SIGNAL =   5; EXPRESSED IN ADULT LIVER, SIGNAL =  11; EXPRESSED IN FETAL LIVER, SIGNAL = 9.1; EXPRESSED IN HELA, SIGNAL =   9; EST_HUMAN HIT: T19399.1, EVALUE 4.00e-13; SWISSPROT HIT: O75694, EVALUE 4.00e-14
TLNWDVGFVIQTMNEIGVPLPRLLEVYDQLFKSR

SEQ ID NO: 35840 - protein, 49 aa, Homo sapiens
  MAP TO AL035106.25; EXPRESSED IN BONE MARROW, SIGNAL = 2.3; EXPRESSED IN BRAIN, SIGNAL = 1.9; EXPRESSED IN ADULT LIVER, SIGNAL = 2.4; EXPRESSED IN BT474, SIGNAL = 3.9; EXPRESSED IN FETAL LIVER, SIGNAL = 2.3; EXPRESSED IN PLACENTA, SIGNAL = 1.7; EXPRESSED IN HELA, SIGNAL = 1.5; EXPRESSED IN HBL100, SIGNAL = 2.2; EXPRESSED IN HEART, SIGNAL =   2; EXPRESSED IN LUNG, SIGNAL =   4; SWISSPROT HIT: P54644, EVALUE 1.40e-01; EST_HUMAN HIT: AU130001.1, EVALUE 2.00e-17
DYHSNGYTVTNGWKIHNTAKNKWFVCMAKTAEEKQKWLDAIIREREQRE

SEQ ID NO: 35841 - protein, 48 aa, Homo sapiens
  MAP TO AL035106.25; EXPRESSED IN BONE MARROW, SIGNAL = 2.3; EXPRESSED IN BRAIN, SIGNAL = 1.9; EXPRESSED IN ADULT LIVER, SIGNAL = 2.4; EXPRESSED IN BT474, SIGNAL = 3.9; EXPRESSED IN FETAL LIVER, SIGNAL = 2.3; EXPRESSED IN PLACENTA, SIGNAL = 1.7; EXPRESSED IN HELA, SIGNAL = 1.5; EXPRESSED IN HBL100, SIGNAL = 2.2; EXPRESSED IN HEART, SIGNAL =   2; EXPRESSED IN LUNG, SIGNAL =   4; EST_HUMAN HIT: AF114028.1, EVALUE 2.00e-03
RSTTRPRISGLSAWPRRQRRSRSGWMPSSASGSSARVSSSFGVLAWDP

SEQ ID NO: 35842 - protein, 33 aa, Homo sapiens
  MAP TO AL024507.7; EXPRESSED IN BONE MARROW, SIGNAL = 0.98; EXPRESSED IN BT474, SIGNAL = 2.4; EXPRESSED IN ADULT LIVER, SIGNAL = 2.6; EXPRESSED IN HELA, SIGNAL = 5.5; EXPRESSED IN PLACENTA, SIGNAL = 1.8; EXPRESSED IN HBL100, SIGNAL = 1.5; EXPRESSED IN HEART, SIGNAL = 1.4; EXPRESSED IN LUNG, SIGNAL = 3.9
SKKKKPLKKKPTPVLLPQSKQQKQKQANGVVGN

SEQ ID NO: 35843 - protein, 57 aa, Homo sapiens
  MAP TO AC009955.1; EXPRESSED IN FETAL LIVER, SIGNAL = 1.1; EXPRESSED IN ADULT LIVER, SIGNAL = 2.4; EXPRESSED IN PLACENTA, SIGNAL = 2.3; EXPRESSED IN HELA, SIGNAL = 2.4; EXPRESSED IN BONE MARROW, SIGNAL = 1.2; EXPRESSED IN BT474, SIGNAL = 1.7; EXPRESSED IN HEART, SIGNAL = 1.7; EXPRESSED IN HBL100, SIGNAL = 1.7; EXPRESSED IN BRAIN, SIGNAL = 1.3; EXPRESSED IN LUNG, SIGNAL = 2.6; EST_HUMAN HIT: BF312530.1, EVALUE 3.00e-31; SWISSPROT HIT: P35442, EVALUE 4.00e-03
WAQLPGAGAGPGTCSGQGEGPVLGCLGAPRGDQGRWGPWSQAAAPKTCPGGLHTQGL

SEQ ID NO: 35844 - protein, 26 aa, Homo sapiens
  MAP TO AC009955.1; EXPRESSED IN FETAL LIVER, SIGNAL = 1.1; EXPRESSED IN ADULT LIVER, SIGNAL = 2.4; EXPRESSED IN PLACENTA, SIGNAL = 2.3; EXPRESSED IN HELA, SIGNAL = 2.4; EXPRESSED IN BONE MARROW, SIGNAL = 1.2; EXPRESSED IN BT474, SIGNAL = 1.7; EXPRESSED IN HEART, SIGNAL = 1.7; EXPRESSED IN HBL100, SIGNAL = 1.7; EXPRESSED IN BRAIN, SIGNAL = 1.3; EXPRESSED IN LUNG, SIGNAL = 2.6; EST_HUMAN HIT: AU134634.1, EVALUE 2.00e-05
LFLLLTPQVGTAARGWSWPGNLFWPR

SEQ ID NO: 35845 - protein, 164 aa, Homo sapiens
  MAP TO AC009963.2; EXPRESSED IN LUNG, SIGNAL = 3.3; EXPRESSED IN BRAIN, SIGNAL = 1.5; EXPRESSED IN BT474, SIGNAL = 3.1; EXPRESSED IN ADULT LIVER, SIGNAL = 3.5; EXPRESSED IN HEART, SIGNAL = 2.2; EXPRESSED IN PLACENTA, SIGNAL = 4.6; EXPRESSED IN BONE MARROW, SIGNAL = 1.4; EXPRESSED IN HELA, SIGNAL = 6.2; EXPRESSED IN HBL100, SIGNAL = 2.8; EST_HUMAN HIT: AL044843.1, EVALUE 4.00e-83; SWISSPROT HIT: P49792, EVALUE 2.00e-87
TKEGFSIPVSADGFKFGISEPGNQEKESEKPLENDTGFQAQDISGQKNGRGVIFGQTSSTFTFADVAKSTSGEGFQFGKKDPNFKGFSGAGEKLFSSQCGKMANKANTSGDFEKDDDAYKTEDSDDIHFEPVVQMPEKVELVIGEEGEKVLYSQGVKLFRFDAE

SEQ ID NO: 35846 - protein, 91 aa, Homo sapiens
  MAP TO AL035106.25; EXPRESSED IN PLACENTA, SIGNAL = 2.2; EXPRESSED IN HBL100, SIGNAL = 1.5; EXPRESSED IN HELA, SIGNAL = 1.8; EXPRESSED IN BRAIN, SIGNAL = 2.1; EXPRESSED IN BT474, SIGNAL = 3.6; EXPRESSED IN HEART, SIGNAL = 2.4; EXPRESSED IN LUNG, SIGNAL =  16; EXPRESSED IN BONE MARROW, SIGNAL = 2.1; EXPRESSED IN ADULT LIVER, SIGNAL =   2; EXPRESSED IN FETAL LIVER, SIGNAL = 1.8; EST_HUMAN HIT: AI014257.1, EVALUE 7.00e-49; SWISSPROT HIT: P26662, EVALUE 1.80e+00
HLNPMSYTQHCITTMAAPSWKCLPAAEGDPQGQGLHDGSFGPASGTLGQEDRGLSFLLKQEDREIQDAYLQLFTKLDVALKEMKQYVTQIN

SEQ ID NO: 35847 - protein, 66 aa, Homo sapiens
  MAP TO AL035106.25; EXPRESSED IN PLACENTA, SIGNAL = 2.2; EXPRESSED IN HBL100, SIGNAL = 1.5; EXPRESSED IN HELA, SIGNAL = 1.8; EXPRESSED IN BRAIN, SIGNAL = 2.1; EXPRESSED IN BT474, SIGNAL = 3.6; EXPRESSED IN HEART, SIGNAL = 2.4; EXPRESSED IN LUNG, SIGNAL =  16; EXPRESSED IN BONE MARROW, SIGNAL = 2.1; EXPRESSED IN ADULT LIVER, SIGNAL =   2; EXPRESSED IN FETAL LIVER, SIGNAL = 1.8; EST_HUMAN HIT: BE384520.1, EVALUE 1.00e-33; SWISSPROT HIT: P24129, EVALUE 5.00e-01
PWLLPPGSACLLQRVIPKARVSMMAASGQPVGPLVRKTGASASYSSRRTVRSRMPTCSSSPSWMWP

SEQ ID NO: 35848 - protein, 46 aa, Homo sapiens
  MAP TO AL096817.12; EXPRESSED IN BT474, SIGNAL =  11; EXPRESSED IN HEART, SIGNAL = 2.5; EXPRESSED IN LUNG, SIGNAL =  17; EST_HUMAN HIT: AI791362.1, EVALUE 2.00e-18; SWISSPROT HIT: Q39735, EVALUE 3.50e+00
KAVEEIVNTGVTVIKDEKTSVARLMREKEHEMSILYGIAQRQRQEE

SEQ ID NO: 35849 - protein, 23 aa, Homo sapiens
  MAP TO AL121588.6; EXPRESSED IN HELA, SIGNAL = 2.1; EXPRESSED IN HEART, SIGNAL = 1.8; EXPRESSED IN PLACENTA, SIGNAL = 2.2; EXPRESSED IN HBL100, SIGNAL = 1.7; EXPRESSED IN BRAIN, SIGNAL = 1.7; EXPRESSED IN BONE MARROW, SIGNAL = 1.4; EXPRESSED IN LUNG, SIGNAL = 2.7; EXPRESSED IN ADULT LIVER, SIGNAL = 3.6; EXPRESSED IN BT474, SIGNAL =   1; EXPRESSED IN FETAL LIVER, SIGNAL = 1.3; EST_HUMAN HIT: AA777621.1, EVALUE 8.00e-06
GIVWRAQKTTGKCGKVWNLLETC

SEQ ID NO: 35850 - protein, 98 aa, Homo sapiens
  MAP TO AC009963.2; EXPRESSED IN LUNG, SIGNAL = 4.6; EXPRESSED IN ADULT LIVER, SIGNAL = 1.7; EXPRESSED IN BT474, SIGNAL = 1.4; EXPRESSED IN HELA, SIGNAL = 1.2; EXPRESSED IN PLACENTA, SIGNAL = 1.9; EXPRESSED IN HEART, SIGNAL = 1.2; EXPRESSED IN HBL100, SIGNAL =   1; EST_HUMAN HIT: AI635520.1, EVALUE 6.00e-35; SWISSPROT HIT: P49792, EVALUE 9.00e-40
EQLLDCEGEDGWNKLFDLIQSELYVRPDDVHVNIRLVELYRSTKRLKDAVARCHEAERNIALRSSLEWNSCVVQTLKVDKSYWVFTFLCRQLAYIFLY

SEQ ID NO: 35851 - protein, 18 aa, Homo sapiens
  MAP TO AC009506.2; EXPRESSED IN BRAIN, SIGNAL = 0.94; EXPRESSED IN BONE MARROW, SIGNAL =   3; EXPRESSED IN LUNG, SIGNAL =   4; EXPRESSED IN ADULT LIVER, SIGNAL =   2; EXPRESSED IN BT474, SIGNAL = 7.7; EXPRESSED IN HELA, SIGNAL =  12; EXPRESSED IN PLACENTA, SIGNAL = 2.2; EXPRESSED IN HEART, SIGNAL = 1.1; EXPRESSED IN HBL100, SIGNAL =   4; EST_HUMAN HIT: AI557280.1, EVALUE 2.00e-03
PLHLITYRKKQVTPSQNK

SEQ ID NO: 35852 - protein, 65 aa, Homo sapiens
  MAP TO AL034548.24; EXPRESSED IN PLACENTA, SIGNAL =   2; EXPRESSED IN HBL100, SIGNAL = 1.5; EXPRESSED IN HEART, SIGNAL = 1.9; EXPRESSED IN BRAIN, SIGNAL = 1.8; EXPRESSED IN BONE MARROW, SIGNAL = 1.8; EXPRESSED IN LUNG, SIGNAL = 5.5; EXPRESSED IN ADULT LIVER, SIGNAL = 2.1; EXPRESSED IN FETAL LIVER, SIGNAL = 1.5; EXPRESSED IN BT474, SIGNAL = 1.3; EXPRESSED IN HELA, SIGNAL = 1.2; EST_HUMAN HIT: BF568475.1, EVALUE 4.00e-18
ISLSSGTLLLLLGVAALTTGYAVPPKLEGIGEGEFLVLDQRAADYNQALGTCRLAGTALCVAAGV

SEQ ID NO: 35853 - protein, 110 aa, Homo sapiens
  MAP TO AL033531.7; EXPRESSED IN HELA, SIGNAL = 1.8; EXPRESSED IN HBL100, SIGNAL = 1.3; EXPRESSED IN HEART, SIGNAL = 2.8; EXPRESSED IN LUNG, SIGNAL = 0.99; EXPRESSED IN BRAIN, SIGNAL = 1.4; EXPRESSED IN BONE MARROW, SIGNAL =   1; EXPRESSED IN ADULT LIVER, SIGNAL = 1.7; EXPRESSED IN BT474, SIGNAL = 1.9; EST_HUMAN HIT: AI927915.1, EVALUE 8.00e-35
QSDKFTAKPLDSNSGERNDLNLDRSCGVPEESASSEKAKEPETSDQTSTESATNENNTNPEPQFQTEATGPSAHEETSTRDSALQDTDDSDDDPVLIPGARYRAGPGDRL

SEQ ID NO: 35854 - protein, 35 aa, Homo sapiens
  MAP TO AC009550.2; EXPRESSED IN ADULT LIVER, SIGNAL = 3.4; EXPRESSED IN BT474, SIGNAL = 1.2; EXPRESSED IN HELA, SIGNAL = 3.2; EXPRESSED IN HEART, SIGNAL = 1.9; EXPRESSED IN PLACENTA, SIGNAL = 2.8; EXPRESSED IN HBL100, SIGNAL = 1.6; EXPRESSED IN LUNG, SIGNAL = 8.2; EXPRESSED IN BONE MARROW, SIGNAL = 1.1; EST_HUMAN HIT: AA601143.1, EVALUE 1.00e-03; SWISSPROT HIT: P78790, EVALUE 8.20e+00
  unsure 13
  unsure 30
  unsure 32
  unsure 35
VTRKAASFECGPXKGEGSATGPGCCASCSXHXGPX

SEQ ID NO: 35855 - protein, 50 aa, Homo sapiens
  MAP TO AL121748.1; EXPRESSED IN BT474, SIGNAL = 2.4; EXPRESSED IN HELA, SIGNAL =   2; EXPRESSED IN PLACENTA, SIGNAL = 1.3; EXPRESSED IN HBL100, SIGNAL = 1.8; EXPRESSED IN HEART, SIGNAL = 1.9; EXPRESSED IN LUNG, SIGNAL =  17; EXPRESSED IN BRAIN, SIGNAL = 1.8; EXPRESSED IN BONE MARROW, SIGNAL = 1.1; EXPRESSED IN ADULT LIVER, SIGNAL = 1.1; EXPRESSED IN FETAL LIVER, SIGNAL = 1.9; EST_HUMAN HIT: AA706814.1, EVALUE 5.10e-01
LGISHRNFTRGAFFLGAFVLSCKKVQPTGGDKMKPKRFIFHVPPVFEGNI

SEQ ID NO: 35856 - protein, 101 aa, Homo sapiens
  MAP TO Z95114.19; EXPRESSED IN LUNG, SIGNAL = 3.6; EXPRESSED IN BONE MARROW, SIGNAL = 1.1; EXPRESSED IN FETAL LIVER, SIGNAL = 1.4; EXPRESSED IN ADULT LIVER, SIGNAL = 2.2; EXPRESSED IN HEART, SIGNAL = 2.2; EXPRESSED IN PLACENTA, SIGNAL = 1.2; EXPRESSED IN HBL100, SIGNAL =   1; EST_HUMAN HIT: BE939489.1, EVALUE 1.00e-42; SWISSPROT HIT: O95236, EVALUE 1.00e-43
RARARLPVTTWRISAGSGGQAERTIAGTTRAVSRGARILSATTSGIFLALDVVNLVYESKHLHEGAKSASAEELRRQAQELEENLMELTQIYQRLNPCHTH

SEQ ID NO: 35857 - protein, 22 aa, Homo sapiens
  MAP TO AL109954.10; EXPRESSED IN PLACENTA, SIGNAL = 2.1; EXPRESSED IN HEART, SIGNAL = 1.8; EXPRESSED IN LUNG, SIGNAL = 1.5; EXPRESSED IN BONE MARROW, SIGNAL = 1.2; EXPRESSED IN FETAL LIVER, SIGNAL = 1.7; EXPRESSED IN ADULT LIVER, SIGNAL = 2.9; EXPRESSED IN BT474, SIGNAL = 2.9; EXPRESSED IN HELA, SIGNAL = 3.5; EXPRESSED IN HBL100, SIGNAL = 1.4; EXPRESSED IN BRAIN, SIGNAL = 0.99; EST_HUMAN HIT: BF126495.1, EVALUE 1.00e-04
ILSRHLKPYHEPDAEEETPGGS

SEQ ID NO: 35858 - protein, 42 aa, Homo sapiens
  MAP TO AC010748.1; EXPRESSED IN PLACENTA, SIGNAL =  21; EXPRESSED IN HBL100, SIGNAL =  16; EXPRESSED IN HEART, SIGNAL = 2.8; EXPRESSED IN LUNG, SIGNAL = 7.6; EXPRESSED IN BRAIN, SIGNAL =   3; EXPRESSED IN BONE MARROW, SIGNAL = 2.2; EXPRESSED IN FETAL LIVER, SIGNAL = 5.3; EXPRESSED IN ADULT LIVER, SIGNAL = 7.2; EXPRESSED IN BT474, SIGNAL =  49; EXPRESSED IN HELA, SIGNAL =  40; EST_HUMAN HIT: AW752971.1, EVALUE 2.80e-02
TSWLGRTERSWTSTGLSRLRRAPRWSPRSPSRLELLRRHSRS

SEQ ID NO: 35859 - protein, 36 aa, Homo sapiens
  MAP TO AC010732.1; EXPRESSED IN PLACENTA, SIGNAL = 3.4; EXPRESSED IN HEART, SIGNAL = 1.3; EXPRESSED IN LUNG, SIGNAL = 8.4; EXPRESSED IN BONE MARROW, SIGNAL = 4.8; EXPRESSED IN FETAL LIVER, SIGNAL = 1.9; EXPRESSED IN ADULT LIVER, SIGNAL = 2.4; EXPRESSED IN BT474, SIGNAL = 3.1; EXPRESSED IN HELA, SIGNAL =   9; EXPRESSED IN HBL100, SIGNAL =  15; EXPRESSED IN BRAIN, SIGNAL = 1.7; EST_HUMAN HIT: AW403965.1, EVALUE 2.00e-13
NFAKEFVISDRKELEEDFIKSELKKAGGANYDAQTE

SEQ ID NO: 35860 - protein, 120 aa, Homo sapiens
  MAP TO AC005412.5; EXPRESSED IN BT474, SIGNAL = 4.1; EXPRESSED IN HBL100, SIGNAL = 2.2; EXPRESSED IN HELA, SIGNAL =   4; EXPRESSED IN PLACENTA, SIGNAL = 2.1; EXPRESSED IN HEART, SIGNAL = 1.3; EXPRESSED IN LUNG, SIGNAL =  13; EXPRESSED IN ADULT LIVER, SIGNAL = 1.2; SWISSPROT HIT: Q09735, EVALUE 2.00e+00; EST_HUMAN HIT: H71229.1, EVALUE 1.00e-50
GAEIIPSGTEHPVFPKAYELEKRTSPQVLGSILKSGTTSESGALSLEPSHIGDLQKADTSSQGALVFLSKDYEIESQNPLASPTNTLLGSAKEQRYQRGLERNDSWGSFDLRAAIVYHTK

SEQ ID NO: 35861 - protein, 107 aa, Homo sapiens
  MAP TO AC008000.7; EXPRESSED IN BONE MARROW, SIGNAL = 1.1; EXPRESSED IN FETAL LIVER, SIGNAL = 1.2; EXPRESSED IN ADULT LIVER, SIGNAL = 1.5; EXPRESSED IN BT474, SIGNAL = 0.95; EXPRESSED IN HEART, SIGNAL = 0.97; EXPRESSED IN LUNG, SIGNAL =  16; EXPRESSED IN BRAIN, SIGNAL = 2.1; EST_HUMAN HIT: AI571737.1, EVALUE 9.00e-57; SWISSPROT HIT: Q01814, EVALUE 2.00e-34
LVMSAITVIILVLYFTVDTFVVNKKPWLPECTPVYVQYFVKFFIIGVTVLVVAVPEGLPLAVTISLAYSVKVRGEESRTSRLMQLQLRAWGNHWGWCWGWEMNEEAP

SEQ ID NO: 35862 - protein, 104 aa, Homo sapiens
  MAP TO AL033520.8; EXPRESSED IN FETAL LIVER, SIGNAL = 2.1; EXPRESSED IN BT474, SIGNAL = 2.8; EXPRESSED IN HBL100, SIGNAL = 2.4; EXPRESSED IN HELA, SIGNAL = 2.8; EXPRESSED IN HEART, SIGNAL = 2.3; EXPRESSED IN PLACENTA, SIGNAL = 2.5; EXPRESSED IN BRAIN, SIGNAL = 2.2; EXPRESSED IN LUNG, SIGNAL =   4; EXPRESSED IN BONE MARROW, SIGNAL = 2.6; EXPRESSED IN ADULT LIVER, SIGNAL = 2.7; EST_HUMAN HIT: AI204671.1, EVALUE 5.00e-53; SWISSPROT HIT: Q15544, EVALUE 5.00e-28
MTPQESGRGDVIAARRQEVRSWPVQLGFPSFCLRHLRDLLSPPILSVMDDAHESPSDKGGETGESDETAAVPGDPGATDTDGIPEETDGDADVDLKEAAAEEGE

SEQ ID NO: 35863 - protein, 45 aa, Homo sapiens
  MAP TO AC000026.3; EXPRESSED IN HBL100, SIGNAL = 6.7; EXPRESSED IN PLACENTA, SIGNAL = 4.6; EXPRESSED IN LUNG, SIGNAL = 5.9; EXPRESSED IN BRAIN, SIGNAL = 2.8; EXPRESSED IN BONE MARROW, SIGNAL = 5.3; EXPRESSED IN ADULT LIVER, SIGNAL = 5.4; EXPRESSED IN FETAL LIVER, SIGNAL =  11; EXPRESSED IN BT474, SIGNAL = 5.3; EXPRESSED IN HEART, SIGNAL = 4.4; EXPRESSED IN HELA, SIGNAL = 6.7; EST_HUMAN HIT: BE799537.1, EVALUE 1.00e-04
MALVLMIPPLLQSPPPRPPMQLSLHMALSLLIQPMGSSQQPLHLQ

SEQ ID NO: 35864 - protein, 221 aa, Homo sapiens
  MAP TO AL022238.1; EXPRESSED IN FETAL LIVER, SIGNAL = 6.9; EXPRESSED IN BT474, SIGNAL = 3.6; EXPRESSED IN HBL100, SIGNAL = 5.1; EXPRESSED IN HELA, SIGNAL = 6.3; EXPRESSED IN HEART, SIGNAL = 5.8; EXPRESSED IN PLACENTA, SIGNAL = 8.5; EXPRESSED IN BRAIN, SIGNAL = 4.9; EXPRESSED IN LUNG, SIGNAL = 4.3; EXPRESSED IN BONE MARROW, SIGNAL = 7.8; EXPRESSED IN ADULT LIVER, SIGNAL = 5.1; EST_HUMAN HIT: BE311634.1, EVALUE 9.00e-73; SWISSPROT HIT: Q06418, EVALUE 1.20e-01
EKAGAVIVKTHNHVERPNHAGEPRIGVPWLPAPSPPRLEPESYKQESQCSCKSWPSRKSVEKRLGAVVLRGARLSTGPPDDSSSQSMLSRWPSARSRPMVLLGSGTKCNSEVSMGDGGWSRMAVLLSIWLWRSSMRERGSGPSCPLVSRGSPVLLSRKSSRRPGREGEPGGGGAAWGSSAEGDGCAARGDPQTVFGDGFSFPGRDGGSLKSAEISANQSRE

SEQ ID NO: 35865 - protein, 208 aa, Homo sapiens
  MAP TO AP000504.1; EXPRESSED IN BONE MARROW, SIGNAL = 1.3; EXPRESSED IN FETAL LIVER, SIGNAL = 0.99; EXPRESSED IN ADULT LIVER, SIGNAL =   1; EXPRESSED IN BT474, SIGNAL = 1.4; EXPRESSED IN HEART, SIGNAL =   1; EXPRESSED IN HELA, SIGNAL = 2.3; EXPRESSED IN HBL100, SIGNAL = 1.4; EXPRESSED IN PLACENTA, SIGNAL = 1.2; EXPRESSED IN BRAIN, SIGNAL =   1; EST_HUMAN HIT: BE795445.1, EVALUE 9.00e-64; SWISSPROT HIT: Q13625, EVALUE 1.70e-02
MSRPLLITFTPATDPSDLWKDGQQQPQPEKPESTLDGAAARAFYEALIGDESSAPDSQRSQTEPARERKRKKRRIMKAPAAEAVAEGASGRHGQGRSLEAEDKMTHRILRAAQEGDLPELRRLLEPHEAGGAGGNINARDAFWWTPLMCAARAGQGAAVSYLLGRGAAWVGVCELSGRDAAQLAEEAGFPEVARMVRESHGETRSPEN

SEQ ID NO: 35866 - protein, 38 aa, Homo sapiens
  MAP TO AP000504.1; EXPRESSED IN BONE MARROW, SIGNAL = 1.3; EXPRESSED IN FETAL LIVER, SIGNAL = 0.99; EXPRESSED IN ADULT LIVER, SIGNAL =   1; EXPRESSED IN BT474, SIGNAL = 1.4; EXPRESSED IN HEART, SIGNAL =   1; EXPRESSED IN HELA, SIGNAL = 2.3; EXPRESSED IN HBL100, SIGNAL = 1.4; EXPRESSED IN PLACENTA, SIGNAL = 1.2; EXPRESSED IN BRAIN, SIGNAL =   1; EST_HUMAN HIT: AI348367.1, EVALUE 7.00e-17; SWISSPROT HIT: P40764, EVALUE 2.10e+00
RVTTSLAYLSHPSLAWYHFLSSPKSHVPALAHHLHPSH

SEQ ID NO: 35867 - protein, 131 aa, Homo sapiens
  MAP TO AP000516.1; EXPRESSED IN LUNG, SIGNAL = 3.5; EXPRESSED IN FETAL LIVER, SIGNAL = 1.2; EXPRESSED IN ADULT LIVER, SIGNAL = 0.92; EXPRESSED IN HBL100, SIGNAL = 1.3; EXPRESSED IN HELA, SIGNAL =   1; EXPRESSED IN HEART, SIGNAL = 1.1; EXPRESSED IN BRAIN, SIGNAL = 2.5; SWISSPROT HIT: P14373, EVALUE 1.00e-24; EST_HUMAN HIT: BE293328.1, EVALUE 2.00e-51
KEPVIIECGHNFCKACITRWWEDLERDFPCPVCRKTSRYRSLRPNRQLGSMVEIAKQLQAVKRKIRDESLCPQHHEALSLFCYEDQEAVCLICAISHTHRAHTVVPLDDATQEYKVGKQTHDVSVGKKGEA

SEQ ID NO: 35868 - protein, 67 aa, Homo sapiens
  MAP TO AL117354.2; EXPRESSED IN BT474, SIGNAL = 1.9; EXPRESSED IN HBL100, SIGNAL = 1.3; EXPRESSED IN HELA, SIGNAL = 2.7; EXPRESSED IN HEART, SIGNAL = 0.86; EXPRESSED IN PLACENTA, SIGNAL =   1; EXPRESSED IN LUNG, SIGNAL = 2.1; EXPRESSED IN BONE MARROW, SIGNAL =   1; EXPRESSED IN ADULT LIVER, SIGNAL =   1; EST_HUMAN HIT: N32770.1, EVALUE 1.00e-23; SWISSPROT HIT: P41008, EVALUE 3.30e+00
KLSRQFWPSLLHRLSDSRKRTRTGRSWPAAIPHLRRRRGRLPRRALQTQNSEIVKDDEGKEDYQFDE

SEQ ID NO: 35869 - protein, 40 aa, Homo sapiens
  MAP TO AC006205.7; EXPRESSED IN BT474, SIGNAL =   1; EXPRESSED IN HEART, SIGNAL = 0.96; EXPRESSED IN BONE MARROW, SIGNAL = 1.1; EXPRESSED IN BRAIN, SIGNAL = 1.1; EXPRESSED IN LUNG, SIGNAL =   4; EXPRESSED IN ADULT LIVER, SIGNAL =   1; EST_HUMAN HIT: BF438052.1, EVALUE 5.60e-02
MRLKAVLEQGPSSHYYTTLVTLISLSLLLQVVIGVLLVVI

SEQ ID NO: 35870 - protein, 23 aa, Homo sapiens
  MAP TO AC006205.7; EXPRESSED IN BT474, SIGNAL =   1; EXPRESSED IN HEART, SIGNAL = 0.96; EXPRESSED IN BONE MARROW, SIGNAL = 1.1; EXPRESSED IN BRAIN, SIGNAL = 1.1; EXPRESSED IN LUNG, SIGNAL =   4; EXPRESSED IN ADULT LIVER, SIGNAL =   1; EST_HUMAN HIT: W38567.1, EVALUE 8.20e+00
PLVSLCFLPYSLEAPTPGASPST

SEQ ID NO: 35871 - protein, 27 aa, Homo sapiens
  MAP TO AC009961.2; EXPRESSED IN PLACENTA, SIGNAL = 1.8; EXPRESSED IN BONE MARROW, SIGNAL = 1.5; EXPRESSED IN LUNG, SIGNAL = 2.1; EXPRESSED IN BRAIN, SIGNAL = 0.93; EXPRESSED IN ADULT LIVER, SIGNAL = 1.7; EXPRESSED IN BT474, SIGNAL = 5.1; EXPRESSED IN HEART, SIGNAL = 1.9; EXPRESSED IN HELA, SIGNAL = 4.4; EXPRESSED IN HBL100, SIGNAL = 1.4; EST_HUMAN HIT: BF036881.1, EVALUE 1.00e-08
WNSADGKSDKTKSAPSRDPERLQKIKE

SEQ ID NO: 35872 - protein, 53 aa, Homo sapiens
  MAP TO AL096773.6; EXPRESSED IN FETAL LIVER, SIGNAL = 2.9; EXPRESSED IN ADULT LIVER, SIGNAL = 3.6; EXPRESSED IN BT474, SIGNAL = 4.9; EXPRESSED IN HBL100, SIGNAL = 4.1; EXPRESSED IN HELA, SIGNAL = 3.5; EXPRESSED IN HEART, SIGNAL = 3.9; EXPRESSED IN PLACENTA, SIGNAL =  19; EXPRESSED IN BRAIN, SIGNAL =   4; EXPRESSED IN BONE MARROW, SIGNAL = 3.4; EXPRESSED IN LUNG, SIGNAL = 4.6; EST_HUMAN HIT: AW967179.1, EVALUE 1.00e-22; SWISSPROT HIT: P43150, EVALUE 3.50e+00
MSCTIEKILTDAKTLLERLREHDAAAESLVDQSAALHRRVAAMREAGTALPDQ

SEQ ID NO: 35873 - protein, 25 aa, Homo sapiens
  MAP TO AL096773.6; EXPRESSED IN FETAL LIVER, SIGNAL = 2.9; EXPRESSED IN ADULT LIVER, SIGNAL = 3.6; EXPRESSED IN BT474, SIGNAL = 4.9; EXPRESSED IN HBL100, SIGNAL = 4.1; EXPRESSED IN HELA, SIGNAL = 3.5; EXPRESSED IN HEART, SIGNAL = 3.9; EXPRESSED IN PLACENTA, SIGNAL =  19; EXPRESSED IN BRAIN, SIGNAL =   4; EXPRESSED IN BONE MARROW, SIGNAL = 3.4; EXPRESSED IN LUNG, SIGNAL = 4.6; EST_HUMAN HIT: AW967179.1, EVALUE 2.70e+00
CWRGYGSTMRPPSRWWISRRRCTGG

SEQ ID NO: 35874 - protein, 67 aa, Homo sapiens
  MAP TO AL096814.10; EXPRESSED IN BRAIN, SIGNAL = 2.1; EXPRESSED IN BT474, SIGNAL =   2; EXPRESSED IN HBL100, SIGNAL = 2.4; EXPRESSED IN HELA, SIGNAL = 2.2; EXPRESSED IN PLACENTA, SIGNAL = 2.7; EXPRESSED IN LUNG, SIGNAL = 1.8; EXPRESSED IN BONE MARROW, SIGNAL = 1.8; EXPRESSED IN ADULT LIVER, SIGNAL = 3.2; EXPRESSED IN FETAL LIVER, SIGNAL =   2; EXPRESSED IN HEART, SIGNAL = 2.8; EST_HUMAN HIT: AW960713.1, EVALUE 2.00e-34; SWISSPROT HIT: P43080, EVALUE 1.00e-35
MGNVMEGKSVEELSSTECHQWYKKFMTECPSGQLTLYEFRQFFGLKNLSPSASQYVEQMFETFDFNK

SEQ ID NO: 35875 - protein, 20 aa, Homo sapiens
  MAP TO AC010724.1; EXPRESSED IN HBL100, SIGNAL = 2.1; EXPRESSED IN HELA, SIGNAL = 2.4; EXPRESSED IN HEART, SIGNAL = 1.4; EXPRESSED IN PLACENTA, SIGNAL = 1.5; EXPRESSED IN BONE MARROW, SIGNAL = 1.5; EXPRESSED IN BRAIN, SIGNAL = 1.7; EXPRESSED IN LUNG, SIGNAL = 1.6; EXPRESSED IN ADULT LIVER, SIGNAL = 2.2; EXPRESSED IN BT474, SIGNAL = 1.8; EXPRESSED IN FETAL LIVER, SIGNAL = 1.1; EST_HUMAN HIT: AW195066.1, EVALUE 1.00e-03
NNENKSTLQLEQQVKELEKS

SEQ ID NO: 35876 - protein, 106 aa, Homo sapiens
  MAP TO AL109924.6; EXPRESSED IN BONE MARROW, SIGNAL = 1.7; EXPRESSED IN LUNG, SIGNAL = 2.4; EXPRESSED IN ADULT LIVER, SIGNAL = 2.1; EXPRESSED IN BT474, SIGNAL = 1.2; EXPRESSED IN FETAL LIVER, SIGNAL = 1.8; EXPRESSED IN HBL100, SIGNAL =   2; EXPRESSED IN HELA, SIGNAL = 2.5; EXPRESSED IN HEART, SIGNAL = 2.7; EXPRESSED IN PLACENTA, SIGNAL =   2; EXPRESSED IN BRAIN, SIGNAL = 2.2; SWISSPROT HIT: O75690, EVALUE 6.00e-04; EST_HUMAN HIT: AI362808.1, EVALUE 9.00e-06
GWSCPSQCDGWSCPSQCDGWSCPSQCDGWCCPSQCDGWSCPSQCDGWCCPSQCDGWCCGFKPRTATVHAHKCPSHQQPLHHYHMHAHAHTAPTASPWACFPGGNHN

SEQ ID NO: 35877 - protein, 42 aa, Homo sapiens [sequence omitted]

SEQ ID NO: 35878 - protein, 33 aa, Homo sapiens
  MAP TO AC007358.2; EXPRESSED IN LUNG, SIGNAL =  12; EXPRESSED IN ADULT LIVER, SIGNAL = 1.7; EXPRESSED IN FETAL LIVER, SIGNAL = 1.4; EXPRESSED IN HELA, SIGNAL = 1.3; EXPRESSED IN PLACENTA, SIGNAL = 1.7; EXPRESSED IN HBL100, SIGNAL = 1.1; EXPRESSED IN HEART, SIGNAL = 2.3; EXPRESSED IN BONE MARROW, SIGNAL = 1.2; EXPRESSED IN BRAIN, SIGNAL = 1.4
NNHYNQMKTSEAKAVQLLHKVPRKSLLPSILPM

SEQ ID NO: 35879 - protein, 38 aa, Homo sapiens
  MAP TO AC000026.3; EXPRESSED IN FETAL LIVER, SIGNAL = 1.7; EXPRESSED IN HELA, SIGNAL = 1.7; EXPRESSED IN HEART, SIGNAL = 2.7; EXPRESSED IN LUNG, SIGNAL = 1.2; EXPRESSED IN BRAIN, SIGNAL = 1.7; EXPRESSED IN BT474, SIGNAL =   2; EXPRESSED IN ADULT LIVER, SIGNAL =   2; EXPRESSED IN PLACENTA, SIGNAL = 2.1; EXPRESSED IN HBL100, SIGNAL = 2.2; EXPRESSED IN BONE MARROW, SIGNAL =   2; EST_HUMAN HIT: AW160866.1, EVALUE 5.00e-04; SWISSPROT HIT: P52303, EVALUE 6.00e-05
GEIFELKAELNSDKKEKKKEAVKKVIASMTVGKDVRCA

SEQ ID NO: 35880 - protein, 62 aa, Homo sapiens
  MAP TO AC007558.3; EXPRESSED IN HELA, SIGNAL =   4; EXPRESSED IN LUNG, SIGNAL = 3.1; EXPRESSED IN BRAIN, SIGNAL =   4; EXPRESSED IN BT474, SIGNAL = 2.3; EXPRESSED IN ADULT LIVER, SIGNAL = 5.4; EXPRESSED IN FETAL LIVER, SIGNAL = 3.9; EXPRESSED IN PLACENTA, SIGNAL = 5.2; EXPRESSED IN HEART, SIGNAL = 4.4; EXPRESSED IN HBL100, SIGNAL = 3.1; EXPRESSED IN BONE MARROW, SIGNAL = 4.9
SMCCSNSWAAVFIIVIITAMGTVYALPSPVLRRFLDTASLSSPMSHISSILRQSSQMMYTIN

SEQ ID NO: 35881 - protein, 41 aa, Homo sapiens
  MAP TO AL121714.1; EXPRESSED IN LUNG, SIGNAL = 0.94; EXPRESSED IN BRAIN, SIGNAL = 1.7; EXPRESSED IN BT474, SIGNAL = 6.5; EXPRESSED IN HELA, SIGNAL = 1.9; EXPRESSED IN PLACENTA, SIGNAL = 0.97; EXPRESSED IN HBL100, SIGNAL = 0.97; EXPRESSED IN HEART, SIGNAL =   2; EST_HUMAN HIT: AA938287.1, EVALUE 5.00e-16
LEWMALANQLAFLDALPQHMDSALMNLTTMAMDLDKVSVSM

SEQ ID NO: 35882 - protein, 34 aa, Homo sapiens
  MAP TO AL121714.1; EXPRESSED IN LUNG, SIGNAL = 0.94; EXPRESSED IN BRAIN, SIGNAL = 1.7; EXPRESSED IN BT474, SIGNAL = 6.5; EXPRESSED IN HELA, SIGNAL = 1.9; EXPRESSED IN PLACENTA, SIGNAL = 0.97; EXPRESSED IN HBL100, SIGNAL = 0.97; EXPRESSED IN HEART, SIGNAL =   2; EST_HUMAN HIT: N50691.1, EVALUE 1.00e-14
LGMDGFGQPVGILGRPATAYGFRPDEPYYYGYGS

SEQ ID NO: 35883 - protein, 68 aa, Homo sapiens
  MAP TO AC007038.3; EXPRESSED IN LUNG, SIGNAL = 1.9; EXPRESSED IN HEART, SIGNAL = 1.1; SWISSPROT HIT: P46676, EVALUE 4.30e+00; EST_HUMAN HIT: BE727405.1, EVALUE 1.90e+00
SPWLEQPEVQLLLQTVINVLLPPRIISTSRSKNFMLESSPAHCSTPGDAGKDLRREGLAESTSQAAYL

SEQ ID NO: 35884 - protein, 34 aa, Homo sapiens
  MAP TO AC007038.3; EXPRESSED IN LUNG, SIGNAL = 1.9; EXPRESSED IN HEART, SIGNAL = 1.1; EST_HUMAN HIT: AA384860.1, EVALUE 1.00e+00; SWISSPROT HIT: P27694, EVALUE 2.80e+00
PSMLLGWWTQPALPCASLSPHPQGWSSGLGSSLT

SEQ ID NO: 35885 - protein, 46 aa, Homo sapiens
  MAP TO AB020874.1; EXPRESSED IN HELA, SIGNAL = 1.6; EXPRESSED IN HEART, SIGNAL = 1.1; EXPRESSED IN LUNG, SIGNAL = 2.7; EXPRESSED IN BRAIN, SIGNAL = 1.4; EXPRESSED IN BT474, SIGNAL = 2.9; EXPRESSED IN ADULT LIVER, SIGNAL = 1.3; EXPRESSED IN FETAL LIVER, SIGNAL = 1.1; EXPRESSED IN PLACENTA, SIGNAL = 3.6; EXPRESSED IN HBL100, SIGNAL = 2.3; EXPRESSED IN BONE MARROW, SIGNAL =   1; SWISSPROT HIT: P18054, EVALUE 1.60e+00; EST_HUMAN HIT: AI697112.1, EVALUE 2.00e+00
GPDSPQLTDYSSPTNLPTGFHSEMGFKPKPKAVNSQYRYRFNDWFR

SEQ ID NO: 35886 - protein, 66 aa, Homo sapiens
  MAP TO AC007283.3; EXPRESSED IN BONE MARROW, SIGNAL = 2.7; EXPRESSED IN FETAL LIVER, SIGNAL = 1.7; EXPRESSED IN HELA, SIGNAL = 3.6; EXPRESSED IN BRAIN, SIGNAL = 1.5; EXPRESSED IN LUNG, SIGNAL = 5.2; EXPRESSED IN BT474, SIGNAL = 3.6; EXPRESSED IN ADULT LIVER, SIGNAL = 2.4; EXPRESSED IN PLACENTA, SIGNAL = 2.5; EXPRESSED IN HEART, SIGNAL = 2.5; EXPRESSED IN HBL100, SIGNAL = 2.7; EST_HUMAN HIT: BE621247.1, EVALUE 1.00e-05
RPPASASSQTECSSRSTRAWAHWMPWRRAAAARNNTSTTGIRRRSRRMSWAPSRTKGPFRSSCPTS

SEQ ID NO: 35887 - protein, 43 aa, Homo sapiens
  MAP TO AC007538.5; EXPRESSED IN BONE MARROW, SIGNAL = 0.94; EXPRESSED IN ADULT LIVER, SIGNAL = 1.7; EXPRESSED IN HBL100, SIGNAL =   1; EXPRESSED IN PLACENTA, SIGNAL =   1; EXPRESSED IN HEART, SIGNAL = 0.97; EXPRESSED IN LUNG, SIGNAL = 2.6; EST_HUMAN HIT: AA805722.1, EVALUE 5.40e+00
SNPLSLLCSVILGLGLTHHIFQTLMPAGSLLVLFIRGTSRRLE

SEQ ID NO: 35888 - protein, 43 aa, Homo sapiens
  MAP TO AC007628.3; EXPRESSED IN HBL100, SIGNAL = 0.95; EXPRESSED IN HELA, SIGNAL =   1; EXPRESSED IN HEART, SIGNAL = 0.9; EXPRESSED IN BONE MARROW, SIGNAL =   1; EXPRESSED IN BRAIN, SIGNAL = 1.2; EXPRESSED IN FETAL LIVER, SIGNAL = 1.2; EXPRESSED IN ADULT LIVER, SIGNAL = 1.3
MYTCISHPYSVPTSSMGFKSTRSLSRAQSSWWSSDCRCMSSSS

SEQ ID NO: 35889 - protein, 35 aa, Homo sapiens
  MAP TO AC009488.1; EXPRESSED IN BT474, SIGNAL = 1.7; EXPRESSED IN LUNG, SIGNAL =  19; EXPRESSED IN FETAL LIVER, SIGNAL = 2.4; EXPRESSED IN ADULT LIVER, SIGNAL = 2.6; EXPRESSED IN PLACENTA, SIGNAL = 2.6; EXPRESSED IN HEART, SIGNAL = 2.9; EXPRESSED IN HELA, SIGNAL = 2.7; EXPRESSED IN HBL100, SIGNAL = 2.3; EXPRESSED IN BRAIN, SIGNAL =   2; EXPRESSED IN BONE MARROW, SIGNAL = 2.3; SWISSPROT HIT: Q28983, EVALUE 4.20e-01
AKHEKEEGGTEAFRLHEVYIDIYDAQVTLQKGHRV

SEQ ID NO: 35890 - protein, 21 aa, Homo sapiens
  MAP TO AC009488.1; EXPRESSED IN BT474, SIGNAL = 1.7; EXPRESSED IN LUNG, SIGNAL =  19; EXPRESSED IN FETAL LIVER, SIGNAL = 2.4; EXPRESSED IN ADULT LIVER, SIGNAL = 2.6; EXPRESSED IN PLACENTA, SIGNAL = 2.6; EXPRESSED IN HEART, SIGNAL = 2.9; EXPRESSED IN HELA, SIGNAL = 2.7; EXPRESSED IN HBL100, SIGNAL = 2.3; EXPRESSED IN BRAIN, SIGNAL =   2; EXPRESSED IN BONE MARROW, SIGNAL = 2.3
PAVSLSSQVWECVSSQGSPTT

SEQ ID NO: 35891 - protein, 69 aa, Homo sapiens
  MAP TO AC009743.1; EXPRESSED IN LUNG, SIGNAL =   2; EXPRESSED IN ADULT LIVER, SIGNAL =   1; EXPRESSED IN HEART, SIGNAL = 1.3; EST_HUMAN HIT: AA641863.1, EVALUE 7.10e-01; SWISSPROT HIT: P04929, EVALUE 3.30e+00
GVLLCVFDEQEDVLHFKSELSRGKVIMKHRFSVTAEAKEELFQQHYPIEPHTVQHTSHEAHVAIEHLKP

SEQ ID NO: 35892 - protein, 56 aa, Homo sapiens
  MAP TO AC009743.1; EXPRESSED IN LUNG, SIGNAL =   2; EXPRESSED IN ADULT LIVER, SIGNAL =   1; EXPRESSED IN HEART, SIGNAL = 1.3; EST_HUMAN HIT: AW117946.1, EVALUE 2.00e-03; SWISSPROT HIT: O84645, EVALUE 1.50e+00
FALTRLQVLNSHMCLMASVLDSVWFYWIVLLKQFLFGLSCHREPVFHNYLSTTQFR

SEQ ID NO: 35893 - protein, 96 aa, Homo sapiens
  MAP TO AC009948.2; EXPRESSED IN HEART, SIGNAL =   7; EXPRESSED IN LUNG, SIGNAL = 2.3; EXPRESSED IN BT474, SIGNAL = 0.99; SWISSPROT HIT: Q00872, EVALUE 2.00e-12; EST_HUMAN HIT: AA180780.1, EVALUE 2.00e-23
TPGPPTNITVQDVTKESAVLSWDVPENDGGAPVKNYHIEKREASKKAWVSVTNNCNRLSYKVTNLQEGAIYYFRVSGENEFGVGIPAETKEGVKIT

SEQ ID NO: 35894 - protein, 340 aa, Homo sapiens
  MAP TO AF166490.1; EXPRESSED IN BONE MARROW, SIGNAL = 5.5; EXPRESSED IN LUNG, SIGNAL = 4.5; EXPRESSED IN BRAIN, SIGNAL = 3.8; EXPRESSED IN ADULT LIVER, SIGNAL = 3.6; EXPRESSED IN BT474, SIGNAL = 9.4; EXPRESSED IN FETAL LIVER, SIGNAL = 2.3; EXPRESSED IN PLACENTA, SIGNAL = 3.6; EXPRESSED IN HELA, SIGNAL = 6.1; EXPRESSED IN HBL100, SIGNAL = 4.6; EXPRESSED IN HEART, SIGNAL =   3; EST_HUMAN HIT: AF150239.1, EVALUE 1.00e-91; SWISSPROT HIT: P52742, EVALUE 1.00e-118
KSYGSHLFDYAFIQNSALRPHSVTHTREITLECRVCGKTFSKNSNLRRHEMIHTGEKPHGCHLCGKAFTHCSDLRKHERTHTGEKPYGCHLCGKAFSKSSNLRRHEMIHTREKAQICHLCGKAFTHCSDLRKHERTHLGDKPYGCLLCGKAFSKCSYLRQHERTHNGEKPYECHLCGKAFSHCSHLRQHERSHNGEKPHGCHLCGKAFTESSVLKRHERIHTGEKPYECHVCGKAFTESSDLRRHERTHTGEKPYECHLCGKAFNHSSVLRRHERTHTGEKPYECNICGKAFNRSYNFRLHRRVHTGEKPYVCPLCGKAFSKFFNLRQHERTHTKKAMNM

SEQ ID NO: 35895 - protein, 65 aa, Homo sapiens
  MAP TO AL080278.7; EXPRESSED IN PLACENTA, SIGNAL = 3.3; EXPRESSED IN HBL100, SIGNAL = 2.9; EXPRESSED IN HEART, SIGNAL = 3.5; EXPRESSED IN FETAL LIVER, SIGNAL = 3.8; EXPRESSED IN ADULT LIVER, SIGNAL = 3.5; EXPRESSED IN HELA, SIGNAL = 3.2; EXPRESSED IN BRAIN, SIGNAL = 3.3; EXPRESSED IN LUNG, SIGNAL = 4.5; EXPRESSED IN BONE MARROW, SIGNAL = 3.6; EXPRESSED IN BT474, SIGNAL = 2.1; SWISSPROT HIT: P22829, EVALUE 1.50e+00
SFKTQDTLLQDPSLLSVSEGTVSLSLPLTMPTLNQFIPSLSLNITSLGKSTFLDFTNYVRALFTI

SEQ ID NO: 35896 - protein, 128 aa, Homo sapiens
  MAP TO AL034431.13; EXPRESSED IN HBL100, SIGNAL = 1.1; EXPRESSED IN HEART, SIGNAL = 1.5; EXPRESSED IN LUNG, SIGNAL = 4.4; EXPRESSED IN FETAL LIVER, SIGNAL = 1.8; EXPRESSED IN ADULT LIVER, SIGNAL = 1.3; EXPRESSED IN PLACENTA, SIGNAL = 1.8; EXPRESSED IN HELA, SIGNAL = 0.99; EXPRESSED IN BRAIN, SIGNAL = 1.5; EXPRESSED IN BONE MARROW, SIGNAL = 1.4; EXPRESSED IN BT474, SIGNAL = 1.4; SWISSPROT HIT: P45559, EVALUE 3.50e+00; EST_HUMAN HIT: BF129465.1, EVALUE 3.70e-01
LTSTSGPSTGRRKLAMTRGSGSVCCCCYHIIGQTLGTVVTVQGITATETLGKPCNLFKPQLLPLKSHNNVYLLIMCHEGLSLPGFTQILSPPLFCLSPLQCLVPSEPSIWLCTERASSHACLLKRAFA

SEQ ID NO: 35897 - protein, 22 aa, Homo sapiens
  MAP TO AL096814.10; EXPRESSED IN BT474, SIGNAL = 3.8; EXPRESSED IN HBL100, SIGNAL =   4; EXPRESSED IN HEART, SIGNAL = 5.2; EXPRESSED IN LUNG, SIGNAL = 4.9; EXPRESSED IN FETAL LIVER, SIGNAL =   7; EXPRESSED IN ADULT LIVER, SIGNAL = 5.5; EXPRESSED IN PLACENTA, SIGNAL = 5.7; EXPRESSED IN HELA, SIGNAL = 4.3; EXPRESSED IN BRAIN, SIGNAL = 6.5; EXPRESSED IN BONE MARROW, SIGNAL =   6; SWISSPROT HIT: Q9UMX6, EVALUE 1.00e-06
VTDDEEASQYVEGMFRAFDKNG

SEQ ID NO: 35898 - protein, 80 aa, Homo sapiens
  MAP TO AL033383.24; EXPRESSED IN LUNG, SIGNAL = 2.1; EXPRESSED IN BONE MARROW, SIGNAL = 1.1e+02; EXPRESSED IN BT474, SIGNAL = 1.6; EXPRESSED IN FETAL LIVER, SIGNAL = 2.2; EXPRESSED IN ADULT LIVER, SIGNAL = 1.1; EXPRESSED IN HBL100, SIGNAL = 1.3; EXPRESSED IN HELA, SIGNAL = 1.9; EXPRESSED IN PLACENTA, SIGNAL = 1.1; EXPRESSED IN HEART, SIGNAL = 1.2; EST_HUMAN HIT: AF074687.1, EVALUE 1.00e-03
ASSGKENRSPSRRPGRSPKRRSLSPKPRDKSRRSRSPLLNDRRSKQSKSPSRTLSPGRRAKSRSLERKRREPERRRLSSP

SEQ ID NO: 35899 - protein, 59 aa, Homo sapiens
  MAP TO AL080247.3; EXPRESSED IN PLACENTA, SIGNAL = 0.99; EXPRESSED IN BONE MARROW, SIGNAL =   1; EXPRESSED IN FETAL LIVER, SIGNAL = 1.2; EXPRESSED IN HEART, SIGNAL = 1.1; EXPRESSED IN HBL100, SIGNAL = 0.92; EXPRESSED IN BRAIN, SIGNAL = 1.1; EXPRESSED IN LUNG, SIGNAL = 3.5; EXPRESSED IN ADULT LIVER, SIGNAL = 1.1; EST_HUMAN HIT: BE730599.1, EVALUE 2.00e-08; SWISSPROT HIT: P23249, EVALUE 2.00e-09
DEIQTPKARKMEFFNPVLNENQKLAVKRILSGDCRPLPYILFGPPGTGKTVTIIEAVLQ

SEQ ID NO: 35900 - protein, 48 aa, Homo sapiens
  MAP TO AL034384.1; EXPRESSED IN BT474, SIGNAL =   1; EXPRESSED IN PLACENTA, SIGNAL = 0.98; EXPRESSED IN BONE MARROW, SIGNAL = 1.3; EXPRESSED IN FETAL LIVER, SIGNAL = 1.2; EXPRESSED IN ADULT LIVER, SIGNAL = 1.3; EXPRESSED IN HEART, SIGNAL =   1; EXPRESSED IN HBL100, SIGNAL = 0.92; EXPRESSED IN BRAIN, SIGNAL = 1.6; EXPRESSED IN LUNG, SIGNAL = 3.2; EST_HUMAN HIT: N85746.1, EVALUE 1.20e+00; SWISSPROT HIT: P45789, EVALUE 5.30e-01
QWLSVSPELPSHLLARGILGGCQTNDRVHTLRPLLLLHVDWKVSIFHS

SEQ ID NO: 35901 - protein, 102 aa, Homo sapiens
  MAP TO AL096678.8; EXPRESSED IN BT474, SIGNAL = 1.1; EXPRESSED IN BONE MARROW, SIGNAL = 1.2; EXPRESSED IN LUNG, SIGNAL = 1.7; EXPRESSED IN ADULT LIVER, SIGNAL = 1.4; EXPRESSED IN PLACENTA, SIGNAL = 0.96; EXPRESSED IN HEART, SIGNAL = 0.98; EXPRESSED IN HELA, SIGNAL = 2.1; EXPRESSED IN HBL100, SIGNAL = 1.9; EXPRESSED IN BRAIN, SIGNAL = 1.2; EST_HUMAN HIT: BE792924.1, EVALUE 1.40e-01
ENPLEIKEKPEEAGHEAEERGETETDQNESQSPQEPEEGPSEDDKAEGEEEMDTGADDQDGDAAQHPEEHSEEQQQSVEEKDKEADEEGGENGPADQGFQPQ

SEQ ID NO: 35902 - protein, 115 aa, Homo sapiens
  MAP TO AL096710.8; EXPRESSED IN HEART, SIGNAL = 1.4; EXPRESSED IN BRAIN, SIGNAL = 1.1; EXPRESSED IN BONE MARROW, SIGNAL = 0.92; EXPRESSED IN LUNG, SIGNAL = 1.9; EXPRESSED IN BT474, SIGNAL = 1.1; EXPRESSED IN ADULT LIVER, SIGNAL = 1.6; EXPRESSED IN HBL100, SIGNAL = 1.7; EXPRESSED IN HELA, SIGNAL = 0.92; EST_HUMAN HIT: BE817913.1, EVALUE 3.70e+00; SWISSPROT HIT: Q03001, EVALUE 3.00e-41
SLNSGFAQTLHPSLTSGLTQSLTPSLTSSSMTSGLSSGMTSRLTPSVTPAYTPGFPSGLVPNFSSGVEPNSLQTLKLMQIRKPLLKSSLLDQNLTEEEINMKFVQDLLNWVDEMQ

SEQ ID NO: 35903 - protein, 25 aa, Homo sapiens
  MAP TO AL109624.1; EXPRESSED IN ADULT LIVER, SIGNAL = 7.6; EXPRESSED IN PLACENTA, SIGNAL = 7.3; EXPRESSED IN BRAIN, SIGNAL = 6.8; EXPRESSED IN BT474, SIGNAL = 3.7; EXPRESSED IN FETAL LIVER, SIGNAL = 6.1; EXPRESSED IN HEART, SIGNAL = 8.2; EXPRESSED IN HELA, SIGNAL = 5.5; EXPRESSED IN HBL100, SIGNAL = 4.8; EXPRESSED IN LUNG, SIGNAL = 4.1; EXPRESSED IN BONE MARROW, SIGNAL = 8.2
ALVHGEVLDTEEIPLEIESQVNPVV

SEQ ID NO: 35904 - protein, 1551 aa, Homo sapiens
  MAP TO AL050341.18; EXPRESSED IN PLACENTA, SIGNAL = 1.1; EXPRESSED IN HBL100, SIGNAL = 2.2; EXPRESSED IN HELA, SIGNAL =   3; EXPRESSED IN HEART, SIGNAL = 1.2; EXPRESSED IN BRAIN, SIGNAL = 2.2; EXPRESSED IN BONE MARROW, SIGNAL = 1.3; EXPRESSED IN LUNG, SIGNAL = 4.5; EXPRESSED IN ADULT LIVER, SIGNAL =   1; EXPRESSED IN BT474, SIGNAL = 3.8; EXPRESSED IN FETAL LIVER, SIGNAL =   1; EST_HUMAN HIT: AV715688.1, EVALUE 1.00e-129; SWISSPROT HIT: Q06730, EVALUE 5.00e-15
AQDAGLGVSILLCVRALQLRSSEDEEMKASVCKTIACLLPEDLEVRRACQLTEFLIEPSLDGFNMLEELYLQPDQKFDEENAPVPNSLRCELLLALKAHWPFDPEFWDWKTLKRHCHQLLGQEASDSDDDLSGYEMSINDTDVLESFLSDYDEGKEDKQYRRRDLTDQHKEKRDKKPIGSSERYQRWLQYKFFCLLCKRECIEARILHHSKMHMEDGIYTCPVCIKKFKRKEMFVPHVMEHVKMPPSRRDRSKKKLLLKGSQKGICPKSPSAIPEQNHSLNDQAKGESHEYVTFSKLEDCHLQDRDLYPCPGTDCSRVFKQFKYLSVHLKAEHQNNDENAKHYLDMKNRREKCTYCRRHFMSAFHLREHEQVHCGPQPYMCVSIDCYARFGSVNELLNHKQKHDDLRYKCELNGCNIVFSDLGQLYHHEAQHFRDASYTCNFLGCKKFYYSKIEYQNHLSMHNVENSNGDIKKSVKLEESATGEKQDCINQPHLLNQTDKSHLPEDLFCAESANSQIDTETAENLKENSDSNSSDQLSHSSSASMNEELIDTLDHSETMQDVLLSNEKVFGPSSLKEKCSSMAVCFDGTKFTCGFDGCGSTYKNARGMQKHLRKVHPYHFKPKKIKTKDLFPSLGNEHNQTTEKLDAEPKPCSDTNSDSPDEGLDHNIHIKCKREHQGYSSESSICASKRPCTEDTMLELLLRLKHLSLKNSITHGSFSGSLQGYPSSGAKSLQSVSSISDLNFQNQDENMPSQYLAQLAAKPFFCELQGCKYEFVTREALLMHYLKKHNYSKEKVLQLTMFQHRYSPFQCHICQRSFTRKTHLRIHYKNKHQIGSDRATHKLLDNEKCDHEGPCSVDRLKGDCSAELGGDPSSNSEKPHCHPKKDECSSETDLESSCEETESKTSDISSPIGSHREEQEGREGRGSRRTVAKGNLCYILNKYHKPFHCIHKTCNSSFTNLKGLIRHYRTVHQYNKEQLCLEKDKARTKRELVKCKKIFACKYKECNKRFLCSKALAKHCSDSHNLDHIEEPKVLSEAGSAARFSCNQPQCPAVFYTFNKLKHHLMEQHNIEGEIHSDYEIHCDLNGCGQIFTHRSNYSQHVYYRHKDYYDDLFRSQKVANERLLRSEKVCQTADTQGHEHQTTRRSFNAKSKKCGLIKEKKAPISFKTRAEALHMCVEHSEHTQYPCMVQGCLSVVKLESSIVRHYKRTHQMSSAYLEQQMENLVVCVKYGTKIKEEPPSEADPCIKKEENRSCESERTEHSHSPGDSSAPIQNTDCCHSSERDGGQKGCIESSSVFDADTLLYRGTLKCNHSSKTTSLEQCNIVQPPPPCKIENSIPNPNGTESGTYFTSFQLPLPRIKESETRQHSSGQENTVKNPTHVPKENFRKHSQPRSFDLKTYKPMGFESSFLKFIQESEEKEDDFDDWEPSEHLTLSNSSQSSNDLTGNVVANNMVNDSEPEVDIPHSSSDSTIHENLTAIPPLIVAETTTVPSLENLRVVLDKALTDCGELALKQLHYLRPVVVLERSKFSTPILDLFPTKKTDELCVGSS

SEQ ID NO: 35905 - protein, 25 aa, Homo sapiens
  MAP TO AL050341.18; EXPRESSED IN PLACENTA, SIGNAL = 1.1; EXPRESSED IN HBL100, SIGNAL = 2.2; EXPRESSED IN HELA, SIGNAL =   3; EXPRESSED IN HEART, SIGNAL = 1.2; EXPRESSED IN BRAIN, SIGNAL = 2.2; EXPRESSED IN BONE MARROW, SIGNAL = 1.3; EXPRESSED IN LUNG, SIGNAL = 4.5; EXPRESSED IN ADULT LIVER, SIGNAL =   1; EXPRESSED IN BT474, SIGNAL = 3.8; EXPRESSED IN FETAL LIVER, SIGNAL =   1; EST_HUMAN HIT: AW130613.1, EVALUE 2.00e-05
KMLVLGCQFYCVSELFNSDQVKMRK

SEQ ID NO: 35906 - protein, 94 aa, Homo sapiens
  MAP TO AP000509.1; EXPRESSED IN BONE MARROW, SIGNAL = 1.2; EXPRESSED IN LUNG, SIGNAL = 4.9; EXPRESSED IN ADULT LIVER, SIGNAL = 2.2; EXPRESSED IN BT474, SIGNAL = 4.7; EXPRESSED IN FETAL LIVER, SIGNAL = 1.1; EXPRESSED IN HELA, SIGNAL = 1.7; EXPRESSED IN PLACENTA, SIGNAL = 1.2; EXPRESSED IN HBL100, SIGNAL = 1.2; EXPRESSED IN HEART, SIGNAL = 1.6; EST_HUMAN HIT: BF434359.1, EVALUE 4.00e-40; SWISSPROT HIT: P10265, EVALUE 2.00e-31
HWPSAWPVQHTQLKTVGVGKAPEVYQSHYILHCEGPDGQPGTIQPIITSVPINLWGRDLLQQWGAQVLLPEQLYSPQSQHMMHEMGHVPGMGLG

SEQ ID NO: 35907 - protein, 57 aa, Homo sapiens
  MAP TO AP000513.1; EXPRESSED IN PLACENTA, SIGNAL = 0.99; EXPRESSED IN HBL100, SIGNAL = 1.1; EXPRESSED IN HELA, SIGNAL =   2; EXPRESSED IN HEART, SIGNAL = 0.86; EXPRESSED IN BRAIN, SIGNAL = 0.92; EXPRESSED IN BONE MARROW, SIGNAL =   1; EXPRESSED IN LUNG, SIGNAL = 2.1; EXPRESSED IN BT474, SIGNAL = 1.8; EST_HUMAN HIT: AI983114.1, EVALUE 1.00e-06
KDKKKRKDEGKSRTTLPERPLTEVKAETRAEEAPEKKREKPKSLRTTAPSHAKFRST

SEQ ID NO: 35908 - protein, 168 aa, Homo sapiens
  MAP TO AP000346.1; EXPRESSED IN PLACENTA, SIGNAL = 1.7; EXPRESSED IN HELA, SIGNAL = 1.6; EXPRESSED IN HBL100, SIGNAL = 1.4; EXPRESSED IN HEART, SIGNAL = 1.3; EXPRESSED IN BONE MARROW, SIGNAL = 2.1; EXPRESSED IN BRAIN, SIGNAL = 1.7; EXPRESSED IN ADULT LIVER, SIGNAL = 1.4; EXPRESSED IN BT474, SIGNAL = 1.4; EXPRESSED IN FETAL LIVER, SIGNAL = 1.2; EST_HUMAN HIT: AW887015.1, EVALUE 3.00e-46; SWISSPROT HIT: P15257, EVALUE 3.40e-01
VMANKALLMVMSKVLLLYLVSLLDVTQSWPLLPVTLFPLRSDSPFLFPGICFSTAHAWLLTPQTPTQTSFLAVFTLCDPHYCPHGEAGVYLSSKPSQLLNCLLTLPSGLPNRSLKLITSRDDHLPPAQLIFCLHLITMTMGGLNPTARNLESLDSVTSPPTLKWLLCT

SEQ ID NO: 35909 - protein, 57 aa, Homo sapiens
  MAP TO AP000352.2; EXPRESSED IN FETAL LIVER, SIGNAL =  21; EXPRESSED IN HELA, SIGNAL =  25; EXPRESSED IN HEART, SIGNAL =  38; EXPRESSED IN LUNG, SIGNAL =  15; EXPRESSED IN BRAIN, SIGNAL =  19; EXPRESSED IN BT474, SIGNAL =  14; EXPRESSED IN ADULT LIVER, SIGNAL =  35; EXPRESSED IN PLACENTA, SIGNAL =  22; EXPRESSED IN HBL100, SIGNAL =  16; EXPRESSED IN BONE MARROW, SIGNAL =  21; EST_HUMAN HIT: BF084115.1, EVALUE 5.00e-19; SWISSPROT HIT: Q9Y6J0, EVALUE 3.00e-30
LDSTDVNLWYKIGHVALRLIRIPLARHAFEEGLRCNPDHWPCLDNLITVLYTLSDYT

SEQ ID NO: 35910 - protein, 56 aa, Homo sapiens
  MAP TO AP000356.1; EXPRESSED IN HEART, SIGNAL = 0.99; EXPRESSED IN HELA, SIGNAL = 4.5; EXPRESSED IN PLACENTA, SIGNAL = 8.5; EXPRESSED IN BRAIN, SIGNAL = 4.4; EXPRESSED IN LUNG, SIGNAL = 1.7; EXPRESSED IN BONE MARROW, SIGNAL = 3.9; EXPRESSED IN ADULT LIVER, SIGNAL = 2.4; EXPRESSED IN FETAL LIVER, SIGNAL = 9.3; EST_HUMAN HIT: W55897.1, EVALUE 7.00e-24; SWISSPROT HIT: Q03248, EVALUE 1.00e-28
STYYMEGNLGHPVFQTQFGRIAVNICYGRHHPLNWLMYSINGAEIIFNPSATIGAL

SEQ ID NO: 35911 - protein, 19 aa, Homo sapiens
  MAP TO AP000356.1; EXPRESSED IN HEART, SIGNAL = 0.99; EXPRESSED IN HELA, SIGNAL = 4.5; EXPRESSED IN PLACENTA, SIGNAL = 8.5; EXPRESSED IN BRAIN, SIGNAL = 4.4; EXPRESSED IN LUNG, SIGNAL = 1.7; EXPRESSED IN BONE MARROW, SIGNAL = 3.9; EXPRESSED IN ADULT LIVER, SIGNAL = 2.4; EXPRESSED IN FETAL LIVER, SIGNAL = 9.3; EST_HUMAN HIT: H19181.1, EVALUE 5.00e-05
TWRETWATPCSRRSSEGSR

SEQ ID NO: 35912 - protein, 45 aa, Homo sapiens
  MAP TO AP000497.1; EXPRESSED IN BT474, SIGNAL = 1.4; EXPRESSED IN FETAL LIVER, SIGNAL = 2.1; EXPRESSED IN HEART, SIGNAL = 2.6; EXPRESSED IN LUNG, SIGNAL = 5.7; EXPRESSED IN BRAIN, SIGNAL = 1.8; EXPRESSED IN ADULT LIVER, SIGNAL = 2.4; EXPRESSED IN PLACENTA, SIGNAL = 2.3; EXPRESSED IN HELA, SIGNAL = 1.8; EXPRESSED IN HBL100, SIGNAL = 1.5; EXPRESSED IN BONE MARROW, SIGNAL = 2.6; EST_HUMAN HIT: BE931845.1, EVALUE 3.00e-12
FPPNTRYGGKSLVFPPKKPAPIGEFQSTEPEPRYVFFWLEISENL

SEQ ID NO: 35913 - protein, 370 aa, Homo sapiens
  MAP TO AL109928.5; EXPRESSED IN BONE MARROW, SIGNAL = 1.1; EXPRESSED IN BT474, SIGNAL =   2; EXPRESSED IN ADULT LIVER, SIGNAL = 0.9; EXPRESSED IN HELA, SIGNAL = 1.4; EXPRESSED IN HBL100, SIGNAL =   1; EXPRESSED IN HEART, SIGNAL =   1; EXPRESSED IN LUNG, SIGNAL = 1.2; EXPRESSED IN BRAIN, SIGNAL = 1.2; EST_HUMAN HIT: AA994842.1, EVALUE 2.00e-89; SWISSPROT HIT: Q29052, EVALUE 2.50e+00
KNSSGKRQSKSQVPHASSQPRSSLTAVTQPTEEKLKESISPEARRKRNPLGSRCQGASGNKLFLDFQSMKIIKENADEDSASDLSDSERIPIPPSPLTPPDLNLRAEEIDPVYFDLHPGQGHTKPEYYYPNFLPSPFSSWDLRDMALLLNAENKTEAVPRVGGLLGKYIDRLIQLEWLQVQTVQCEKAKGGKARPPTAPGTSGALKSPGRSKLIASALSKPLPHQEGASKSGPSRKKAFHHEEIHPSHYAFETSPRPIDVLGGTRFCSQRQTLEMRTEEKKKKSSKSTKLQRWDLSGSGSSSKVETSGHIRVPKQAAVILDSADSCKASKTQAHAHPRKKGKAESCGHATVSSEKKLKTNGVKQNTYKLK

SEQ ID NO: 35914 - protein, 252 aa, Homo sapiens
  MAP TO AL034380.21; EXPRESSED IN PLACENTA, SIGNAL = 4.8; EXPRESSED IN HBL100, SIGNAL = 5.2; EXPRESSED IN HEART, SIGNAL = 3.3; EXPRESSED IN BONE MARROW, SIGNAL = 5.4; EXPRESSED IN FETAL LIVER, SIGNAL = 3.4; EXPRESSED IN HELA, SIGNAL =  14; EXPRESSED IN BRAIN, SIGNAL = 4.4; EXPRESSED IN LUNG, SIGNAL = 5.7; EXPRESSED IN BT474, SIGNAL = 4.5; EXPRESSED IN ADULT LIVER, SIGNAL = 4.8; EST_HUMAN HIT: BE383165.1, EVALUE 4.00e-67
LPGLLELLVEYFRRCLIEIFGILKEYEVGDPGQRTLLDPGRFSKVSSPAPMEGGEEEEELLGPKLEEEEEEEVVENDEEIAFSGKDKPASENSEEKLISKFDKLPVKIVQKNDPFVVDCSDKLGRVQEFDSGLLHWRIGGGDTTEHIQTHFESKTELLPSRPHAPCPPAPRKHVTTAEGTPGTTDQEGPPPDGPPEKRITATMDDMLSTRSSTLTEDGAKSSEAIKESSKFPFGISPAQSHRNIKILEDEPH

SEQ ID NO: 35915 - protein, 85 aa, Homo sapiens
  MAP TO AC004019.11; EXPRESSED IN BONE MARROW, SIGNAL = 2.5; EXPRESSED IN BT474, SIGNAL = 2.8; EXPRESSED IN HBL100, SIGNAL =   3; EXPRESSED IN HEART, SIGNAL = 4.2; EXPRESSED IN LUNG, SIGNAL = 8.5; EXPRESSED IN BRAIN, SIGNAL = 2.9; EXPRESSED IN ADULT LIVER, SIGNAL = 3.4; EXPRESSED IN FETAL LIVER, SIGNAL = 2.7; EXPRESSED IN PLACENTA, SIGNAL = 3.7; EXPRESSED IN HELA, SIGNAL = 2.6; EST_HUMAN HIT: AI740494.1, EVALUE 7.20e-01
EEFWIREDEKREKRRSRAGRSGGSHVWTRSRDPEGSSRKQQPMENGGKSLPPTRRAPSSGDDQSSSSTQPPREVGTSNGRGFSHP

SEQ ID NO: 35916 - protein, 47 aa, Homo sapiens
  MAP TO AC005948.6; EXPRESSED IN PLACENTA, SIGNAL = 1.2; EXPRESSED IN HEART, SIGNAL = 1.4; EXPRESSED IN LUNG, SIGNAL = 3.6; EXPRESSED IN BRAIN, SIGNAL = 0.97; EXPRESSED IN BONE MARROW, SIGNAL = 1.3; EXPRESSED IN BT474, SIGNAL = 1.2; EXPRESSED IN FETAL LIVER, SIGNAL = 1.2; EXPRESSED IN ADULT LIVER, SIGNAL = 1.1; EXPRESSED IN HBL100, SIGNAL = 1.4; SWISSPROT HIT: O14074, EVALUE 3.50e+00
IKRDSIKDLLKSKDMSIAFIYQMSHNAKEEMKLVQNDFFISNPHKFL

SEQ ID NO: 35917 - protein, 28 aa, Homo sapiens
  MAP TO AC006369.3; EXPRESSED IN BRAIN, SIGNAL =   1; EXPRESSED IN LUNG, SIGNAL = 6.4; EXPRESSED IN FETAL LIVER, SIGNAL = 1.1; EXPRESSED IN ADULT LIVER, SIGNAL =   1; EXPRESSED IN BT474, SIGNAL = 2.7; EXPRESSED IN HBL100, SIGNAL = 0.93; EXPRESSED IN PLACENTA, SIGNAL = 0.97; EXPRESSED IN HEART, SIGNAL = 2.7
HVNCDDHNDDDNEDSDDGSGSDGGDDGW

SEQ ID NO: 35918 - protein, 21 aa, Homo sapiens
  MAP TO AC006369.3; EXPRESSED IN BRAIN, SIGNAL =   1; EXPRESSED IN LUNG, SIGNAL = 6.4; EXPRESSED IN FETAL LIVER, SIGNAL = 1.1; EXPRESSED IN ADULT LIVER, SIGNAL =   1; EXPRESSED IN BT474, SIGNAL = 2.7; EXPRESSED IN HBL100, SIGNAL = 0.93; EXPRESSED IN PLACENTA, SIGNAL = 0.97; EXPRESSED IN HEART, SIGNAL = 2.7
QPSSPPSLPLPSSLSSLSSSL

SEQ ID NO: 35919 - protein, 77 aa, Homo sapiens
  MAP TO AC008013.8; EXPRESSED IN HBL100, SIGNAL = 3.7; EXPRESSED IN HELA, SIGNAL =   3; EXPRESSED IN PLACENTA, SIGNAL =   4; EXPRESSED IN HEART, SIGNAL = 4.2; EXPRESSED IN BRAIN, SIGNAL = 3.7; EXPRESSED IN BONE MARROW, SIGNAL = 3.7; EXPRESSED IN LUNG, SIGNAL = 3.8; EXPRESSED IN BT474, SIGNAL = 2.9; EXPRESSED IN FETAL LIVER, SIGNAL = 3.7; EXPRESSED IN ADULT LIVER, SIGNAL = 3.7; EST_HUMAN HIT: R09295.1, EVALUE 1.10e+00
SRCPQPGRLLPRPAGDHRVRAGGGGGLGSCYPFSAHRVPGTSLALAHSVLQRRREWYGYPILQMRKSRLREVRRLVQ

SEQ ID NO: 35920 - protein, 71 aa, Homo sapiens
  MAP TO AC006146.2; EXPRESSED IN PLACENTA, SIGNAL = 2.1; EXPRESSED IN BRAIN, SIGNAL = 3.3; EXPRESSED IN ADULT LIVER, SIGNAL = 1.6; EXPRESSED IN FETAL LIVER, SIGNAL = 2.4; EXPRESSED IN BT474, SIGNAL = 2.1; EXPRESSED IN HEART, SIGNAL = 1.7; EXPRESSED IN HELA, SIGNAL = 2.3; EXPRESSED IN HBL100, SIGNAL = 2.1; EXPRESSED IN LUNG, SIGNAL = 5.1; EXPRESSED IN BONE MARROW, SIGNAL = 2.4; EST_HUMAN HIT: AI702990.1, EVALUE 7.20e-02
TSQKFPRVPLPRRESPSEERLEPKREVKEPRKEGEEEVPEIQEKEEQEEGRERSRRAAAVKATQTLQANES

SEQ ID NO: 35921 - protein, 25 aa, Homo sapiens
  MAP TO AC006146.2; EXPRESSED IN PLACENTA, SIGNAL = 2.1; EXPRESSED IN BRAIN, SIGNAL = 3.3; EXPRESSED IN ADULT LIVER, SIGNAL = 1.6; EXPRESSED IN FETAL LIVER, SIGNAL = 2.4; EXPRESSED IN BT474, SIGNAL = 2.1; EXPRESSED IN HEART, SIGNAL = 1.7; EXPRESSED IN HELA, SIGNAL = 2.3; EXPRESSED IN HBL100, SIGNAL = 2.1; EXPRESSED IN LUNG, SIGNAL = 5.1; EXPRESSED IN BONE MARROW, SIGNAL = 2.4; EST_HUMAN HIT: AA806165.1, EVALUE 1.00e-08
PKSSQGCLFPEESPQVKRGWSPRGR

SEQ ID NO: 35922 - protein, 59 aa, Homo sapiens
  MAP TO AC006452.2; EXPRESSED IN BONE MARROW, SIGNAL = 1.8; EXPRESSED IN BRAIN, SIGNAL = 2.2; EXPRESSED IN LUNG, SIGNAL = 4.8; EXPRESSED IN ADULT LIVER, SIGNAL = 1.9; EXPRESSED IN BT474, SIGNAL = 1.4; EXPRESSED IN FETAL LIVER, SIGNAL = 1.5; EXPRESSED IN HELA, SIGNAL = 1.4; EXPRESSED IN PLACENTA, SIGNAL = 1.7; EXPRESSED IN HBL100, SIGNAL = 1.4; EXPRESSED IN HEART, SIGNAL = 1.6
MTVLLRGPSLVRKFKEERQNNNNNTTTTTTNLMILEKRLAQRGPSTPTQGGNRWDARAA

SEQ ID NO: 35923 - protein, 51 aa, Homo sapiens
  MAP TO AC006977.3; EXPRESSED IN BT474, SIGNAL =   1; EXPRESSED IN FETAL LIVER, SIGNAL = 1.1; EXPRESSED IN PLACENTA, SIGNAL = 1.4; EXPRESSED IN HBL100, SIGNAL = 1.7; EXPRESSED IN HELA, SIGNAL = 1.1; EXPRESSED IN HEART, SIGNAL = 1.4; EXPRESSED IN BRAIN, SIGNAL = 1.2; EXPRESSED IN BONE MARROW, SIGNAL = 1.2; EXPRESSED IN LUNG, SIGNAL = 1.3; EXPRESSED IN ADULT LIVER, SIGNAL = 1.6; EST_HUMAN HIT: AW006478.1, EVALUE 1.00e-16; SWISSPROT HIT: P36286, EVALUE 2.00e+00
DSEASKEKSFAQGDPTTVGRAGCKRRLVKPGPMHSKTMPGAPTAHLIPTYQ

SEQ ID NO: 35924 - protein, 28 aa, Homo sapiens
  MAP TO AC006977.3; EXPRESSED IN BT474, SIGNAL =   1; EXPRESSED IN FETAL LIVER, SIGNAL = 1.1; EXPRESSED IN PLACENTA, SIGNAL = 1.4; EXPRESSED IN HBL100, SIGNAL = 1.7; EXPRESSED IN HELA, SIGNAL = 1.1; EXPRESSED IN HEART, SIGNAL = 1.4; EXPRESSED IN BRAIN, SIGNAL = 1.2; EXPRESSED IN BONE MARROW, SIGNAL = 1.2; EXPRESSED IN LUNG, SIGNAL = 1.3; EXPRESSED IN ADULT LIVER, SIGNAL = 1.6; EST_HUMAN HIT: AW006478.1, EVALUE 5.50e-02
RTVKLVKRSHLPKGTPLLLAELGANAGL

SEQ ID NO: 35925 - protein, 35 aa, Homo sapiens
  MAP TO AC009546.2; EXPRESSED IN PLACENTA, SIGNAL = 3.4; EXPRESSED IN HBL100, SIGNAL = 2.3; EXPRESSED IN HEART, SIGNAL = 3.7; EXPRESSED IN BONE MARROW, SIGNAL =   3; EXPRESSED IN BRAIN, SIGNAL = 2.9; EXPRESSED IN LUNG, SIGNAL =  12; EXPRESSED IN ADULT LIVER, SIGNAL = 3.7; EXPRESSED IN BT474, SIGNAL = 1.4; EXPRESSED IN FETAL LIVER, SIGNAL = 2.4; EXPRESSED IN HELA, SIGNAL = 3.3; EST_HUMAN HIT: BE872347.1, EVALUE 4.40e+00
  unsure 13
  unsure 24
  unsure 34
KYPLQEPSNLIPXVSHWPTPTRSXEGKGTQDCGXR

SEQ ID NO: 35926 - protein, 71 aa, Homo sapiens
  MAP TO AC009403.1; EXPRESSED IN PLACENTA, SIGNAL = 5.8; EXPRESSED IN HELA, SIGNAL = 5.6; EXPRESSED IN HBL100, SIGNAL = 2.9; EXPRESSED IN HEART, SIGNAL = 6.6; EXPRESSED IN LUNG, SIGNAL =  15; EXPRESSED IN BONE MARROW, SIGNAL = 5.9; EXPRESSED IN BRAIN, SIGNAL = 4.8; EXPRESSED IN ADULT LIVER, SIGNAL = 7.9; EXPRESSED IN BT474, SIGNAL = 2.6; EXPRESSED IN FETAL LIVER, SIGNAL = 4.7
LASVAEVEPPCSGGLKSIIKTGRAASPLKPGGVDLCLTLPALALLVVLGLPWLVDTNAVSASVITWPSPML

SEQ ID NO: 35927 - protein, 36 aa, Homo sapiens
  MAP TO AC009651.2; EXPRESSED IN BONE MARROW, SIGNAL = 1.2; EXPRESSED IN FETAL LIVER, SIGNAL = 1.1; EXPRESSED IN HELA, SIGNAL = 1.2; EXPRESSED IN HEART, SIGNAL = 1.6; EXPRESSED IN BRAIN, SIGNAL = 1.1; EXPRESSED IN LUNG, SIGNAL =   6; EXPRESSED IN ADULT LIVER, SIGNAL = 1.5; EXPRESSED IN BT474, SIGNAL = 1.1; EXPRESSED IN PLACENTA, SIGNAL = 1.2
GNVTITDRTSRHKIQKICKKIENLNNIINHLNVIDI

SEQ ID NO: 35928 - protein, 58 aa, Homo sapiens
  MAP TO AC009440.1; EXPRESSED IN HEART, SIGNAL = 1.5; EXPRESSED IN LUNG, SIGNAL = 6.3
SEGLCWNCAPILASTHTGNIFSLPSIISEFAVVEILILSILFILLPTSQSVQMSVPTK

SEQ ID NO: 35929 - protein, 38 aa, Homo sapiens
  MAP TO AC009411.1; EXPRESSED IN HBL100, SIGNAL = 1.1; EXPRESSED IN HEART, SIGNAL = 0.97; EXPRESSED IN PLACENTA, SIGNAL = 1.1; EXPRESSED IN BRAIN, SIGNAL =   1; EXPRESSED IN BONE MARROW, SIGNAL = 1.2; EXPRESSED IN FETAL LIVER, SIGNAL = 2.9; EXPRESSED IN ADULT LIVER, SIGNAL = 1.1
LPVISTLKMPLTSYSVSFFPIFSFISFEHILQELLDEK

SEQ ID NO: 35930 - protein, 78 aa, Homo sapiens
  MAP TO AC009419.1; EXPRESSED IN BONE MARROW, SIGNAL = 1.4; EXPRESSED IN BRAIN, SIGNAL = 1.2; EXPRESSED IN BT474, SIGNAL = 1.1; EXPRESSED IN LUNG, SIGNAL = 4.9; EXPRESSED IN ADULT LIVER, SIGNAL = 1.7; EXPRESSED IN FETAL LIVER, SIGNAL = 1.9; EXPRESSED IN PLACENTA, SIGNAL = 1.6; EXPRESSED IN HEART, SIGNAL = 1.5; EXPRESSED IN HELA, SIGNAL = 1.5; EXPRESSED IN HBL100, SIGNAL = 1.1; EST_HUMAN HIT: AA984443.1, EVALUE 3.00e-07; SWISSPROT HIT: P16273, EVALUE 5.90e+00
  unsure 71
PWGHNLWMALAKSYAVVKKQSNCWVYEDKLVSTEERFQWHSWGLSLGTSRVLVVWNLKVIHKMRKILGLTXPVPTEVQ

SEQ ID NO: 35931 - protein, 39 aa, Homo sapiens
  MAP TO AC009473.2; EXPRESSED IN PLACENTA, SIGNAL = 1.7; EXPRESSED IN HELA, SIGNAL =   1; EXPRESSED IN HEART, SIGNAL = 1.5; EXPRESSED IN BRAIN, SIGNAL = 1.7; EXPRESSED IN BT474, SIGNAL = 1.3; EXPRESSED IN HBL100, SIGNAL = 1.4; EXPRESSED IN LUNG, SIGNAL = 5.8; EXPRESSED IN BONE MARROW, SIGNAL = 1.8; EXPRESSED IN ADULT LIVER, SIGNAL = 1.9; EXPRESSED IN FETAL LIVER, SIGNAL = 1.2
ANTKPEIGKGLTSSRDRTAGGWWMGMGRKMRLERVWSSL

SEQ ID NO: 35932 - protein, 54 aa, Homo sapiens
  MAP TO AC009974.2; EXPRESSED IN FETAL LIVER, SIGNAL = 2.6; EXPRESSED IN ADULT LIVER, SIGNAL = 2.6; EXPRESSED IN PLACENTA, SIGNAL = 2.2; EXPRESSED IN HEART, SIGNAL = 1.8; EXPRESSED IN BRAIN, SIGNAL = 2.2; EXPRESSED IN BT474, SIGNAL = 1.3; EXPRESSED IN HELA, SIGNAL = 2.4; EXPRESSED IN HBL100, SIGNAL = 1.6; EXPRESSED IN LUNG, SIGNAL =  12; EXPRESSED IN BONE MARROW, SIGNAL = 2.5; EST_HUMAN HIT: AW167326.1, EVALUE 3.70e-01; SWISSPROT HIT: P28327, EVALUE 5.90e+00
LLCGVGGAGIVFTQDPGLAAYLYHFLPLPISPFLDELYLVTYFQVKAGGAEIGK

SEQ ID NO: 35933 - protein, 36 aa, Homo sapiens
  MAP TO AC010792.1; EXPRESSED IN ADULT LIVER, SIGNAL = 2.3; EXPRESSED IN PLACENTA, SIGNAL = 2.4; EXPRESSED IN BRAIN, SIGNAL = 2.5; EXPRESSED IN FETAL LIVER, SIGNAL = 2.8; EXPRESSED IN BT474, SIGNAL = 1.6; EXPRESSED IN HEART, SIGNAL = 3.4; EXPRESSED IN HELA, SIGNAL =   2; EXPRESSED IN HBL100, SIGNAL = 2.3; EXPRESSED IN LUNG, SIGNAL =  11; EXPRESSED IN BONE MARROW, SIGNAL = 2.6
TPGNHNTYDDDDDDDDDDDDTYLKDCPEGSQRCLQG

SEQ ID NO: 35934 - protein, 21 aa, Homo sapiens
  MAP TO AC010872.2; EXPRESSED IN PLACENTA, SIGNAL = 1.2; EXPRESSED IN HBL100, SIGNAL = 1.1; EXPRESSED IN HELA, SIGNAL = 1.3; EXPRESSED IN HEART, SIGNAL = 1.4; EXPRESSED IN BONE MARROW, SIGNAL = 1.7; EXPRESSED IN LUNG, SIGNAL = 9.6; EXPRESSED IN BRAIN, SIGNAL =   1; EXPRESSED IN ADULT LIVER, SIGNAL = 1.3; EXPRESSED IN BT474, SIGNAL = 1.2; EXPRESSED IN FETAL LIVER, SIGNAL = 1.2; EST_HUMAN HIT: BF697362.1, EVALUE 9.00e-04
KGIYFLQLWRLRSPGSRGHLW

SEQ ID NO: 35935 - protein, 39 aa, Homo sapiens
  MAP TO AC010877.1; EXPRESSED IN FETAL LIVER, SIGNAL = 1.4; EXPRESSED IN HEART, SIGNAL =   1; EXPRESSED IN BONE MARROW, SIGNAL = 0.92; EXPRESSED IN LUNG, SIGNAL =   2; SWISSPROT HIT: O14607, EVALUE 4.00e-07; EST_HUMAN HIT: AA330221.1, EVALUE 7.00e-04
SDSLLEDTKYEYFFLNLKEENEKRTQHKDHSDNESTSSE

SEQ ID NO: 35936 - protein, 23 aa, Homo sapiens
  MAP TO AC010102.1; EXPRESSED IN HELA, SIGNAL = 0.95; EXPRESSED IN HEART, SIGNAL = 1.1; EXPRESSED IN LUNG, SIGNAL = 7.2
LIFLKSGTTKQYLFSPLLILVWK

SEQ ID NO: 35937 - protein, 49 aa, Homo sapiens
  MAP TO AC010879.1; EXPRESSED IN HEART, SIGNAL = 0.89; EXPRESSED IN LUNG, SIGNAL = 1.3; EXPRESSED IN BRAIN, SIGNAL = 1.1; EXPRESSED IN BONE MARROW, SIGNAL = 1.3; EXPRESSED IN FETAL LIVER, SIGNAL = 0.9; EXPRESSED IN ADULT LIVER, SIGNAL = 1.1; EST_HUMAN HIT: AI371993.1, EVALUE 2.00e-03; SWISSPROT HIT: Q90185, EVALUE 4.60e+00
LYINHGIRICFKGTDPSEGIRKLALTVEGEEELVYAEITCQEKKQENGG

SEQ ID NO: 35938 - protein, 41 aa, Homo sapiens
  MAP TO AC010879.1; EXPRESSED IN HEART, SIGNAL = 0.89; EXPRESSED IN LUNG, SIGNAL = 1.3; EXPRESSED IN BRAIN, SIGNAL = 1.1; EXPRESSED IN BONE MARROW, SIGNAL = 1.3; EXPRESSED IN FETAL LIVER, SIGNAL = 0.9; EXPRESSED IN ADULT LIVER, SIGNAL = 1.1; EST_HUMAN HIT: AW991260.1, EVALUE 1.10e-02
CTSIMASGSASRVQILVRASESLHSRWKVKRSWCMQRLHVK

SEQ ID NO: 35939 - protein, 56 aa, Homo sapiens
  MAP TO AC011283.2; EXPRESSED IN FETAL LIVER, SIGNAL = 1.1; EXPRESSED IN ADULT LIVER, SIGNAL = 0.91; EXPRESSED IN HELA, SIGNAL = 0.91; EXPRESSED IN PLACENTA, SIGNAL = 1.1; EXPRESSED IN HEART, SIGNAL = 1.2; EXPRESSED IN BONE MARROW, SIGNAL =   1; EXPRESSED IN LUNG, SIGNAL = 6.5; EST_HUMAN HIT: AA114901.1, EVALUE 7.20e-01
MCLFHLLIHSVHKYSSSPCYMYGTILSNGNRRGYKMDISMTYCSFYSSRETEKLEI

SEQ ID NO: 35940 - protein, 25 aa, Homo sapiens
  MAP TO AC011283.2; EXPRESSED IN FETAL LIVER, SIGNAL = 1.1; EXPRESSED IN ADULT LIVER, SIGNAL = 0.91; EXPRESSED IN HELA, SIGNAL = 0.91; EXPRESSED IN PLACENTA, SIGNAL = 1.1; EXPRESSED IN HEART, SIGNAL = 1.2; EXPRESSED IN BONE MARROW, SIGNAL =   1; EXPRESSED IN LUNG, SIGNAL = 6.5; EST_HUMAN HIT: BE672608.1, EVALUE 1.60e+00
CVSFICSFIQSTNIHQAPAICMALF

SEQ ID NO: 35941 - protein, 103 aa, Homo sapiens
  MAP TO AP000501.1; EXPRESSED IN FETAL LIVER, SIGNAL = 1.4; EXPRESSED IN BT474, SIGNAL = 1.3; EXPRESSED IN HELA, SIGNAL = 0.9; EXPRESSED IN HBL100, SIGNAL = 1.4; EXPRESSED IN HEART, SIGNAL = 1.7; EXPRESSED IN LUNG, SIGNAL = 8.3; EST_HUMAN HIT: AW880750.1, EVALUE 9.00e-56; SWISSPROT HIT: P29054, EVALUE 7.00e-03
VRDLCRVLQLPPTFEDTAVAYYQQAYRHSGIRAARLQKKEVLVGCCVLITCRQHNWPLTMGAICTLLYADLDVFSSTYMQIVKLLGLDVPSLCLAELVKTYCS
